United States Patent Application Publication US 2024/0093182 A1 - sequence listing, part 11

SEQ ID NO: 22614 - DNA, 1583 bp, Artificial sequence
  DNA replication origin
ccggcccctcctggcccgacccagtccagcctcttcctttccccaggtgtcctgaaggcagtggaccacatcaactccaccatcgcgccagccctcatcagctcagtgaggcctgctctttgctggggatagcagggccagagttctggaaggaatcccggagcagggcaggaggaagggaagaaagaaggcccactcttaggaatcatggttacaagggggaagggtggggaacagcttccttaatgcaccctgctcccatgggagttcaggtcccctaatccaggtaggcccctgtcacagggacctggttggaccctggccaaatgtgagcttgggtgtgaatgaggggaccctctgccttagggctcagcctccagcctggccctgggtgatggaggctctgccctcagggtctctctgtggtggagcaagagaaactggacaacctgatgctggagttggatgggactgagaacaaatgtgagccggggccgggagaaagtggggaagcgtcagggtggggaggcgtggagcagatagagagctgaagggccagtgctgtagtggcttcctcaggaatgactgtcaggggcattctcctctcaaagccagagcaaggggagatgagtttagctgcagagggaaggaccgacagtaggcagaaggaagaccttctttgcagcatacagaggagggggatggcctgagagagtctgtggtctcagggatatttagaaagaggtgtggctctctgccgtttccaatctcctcctccccacccattcctctccctgctgttttcaagagagcatggatgaggtgttgctggggcaggggtggggagggaggagggggtctcctttactggctccttttggagactacagatggaggcaggagctagaaaggagaaggggacattgtgctcagcaccttcctctataatctcctagccaagtttggggccaatgccatcctgggtgtgtctctggccgtgtgtaaggcaggggcagctgagcgggaactgcccctgtatcgccacattgctcagctggccgggaactcagacctcatcctgcctgtgccggtgagcaataagccagcctgcggctctcccaggggcgggtgggggagggagcatgcaactcatgaggaatgatgggaggaaagtgaattgagggaggtaaagaggaaggatggggacgtgagacttagtccggaaagctgggggaagtttgggatcttgggttaacactcctggggcgggcagggaggggctctttgacccttctgtctttctgtggctccccaggccttcaacgtgatcaatggtggctctcatgctggcaacaagctggccatgcaggagttcatgatcctcccagtgggagctgagagctttcgggatgccatgcgactaggtgcagaggtctaccatacactcaagggagtcatcaaggacaaatacggcaaggatgccaccaatgtgggggatgaaggtggctttgcccccaatatcctggagaacagtgaaggtgaggccaggagccccactcccagctctaagtcttaccctattg

SEQ ID NO: 22615 - DNA, 1632 bp, Artificial sequence
  DNA replication origin
aaataggttctgggtgagaaaggagggctctggatgggaaagaagggtgggagacaccgggctggctggatcctgggggtgggggctcccagtagagccgaggagggtttacttgggcgggcagaatggggaagagggggataagaagattggaaggaaatgtaagctgaacaaggcctatggctggcggcagtatggaagaggaaagatcatggatgggaaaagaaaatggagatggggccggtgcgggggctcacgcctgtaatctcagcactttcggaggctgagtcgggtgggtcacttgtcaggagttcaagaccagcctggccaacatggcgaaaccccgtctctactaaaaatacaaaaattagccgggtgtggtggcgcatgcctgtaatcccagctactcagaggctgaggcaggagaatccttgaacctgggaggcaaaggtttcagcaagcagagatcgcgccactgcactccagcctgggagacagagcgagacgccgtctcaaaaaaaaaaagaaaaaatggagatgggaaacgagggcagttaaaggaaatgacagatgtgggagcggggggaggttgctggcaagctcatgggtagataggtaagggatacagcttggaggagtgagacaccatcctcaggccttccatctagtggcatctccattttccttctcaaatctgttgaaagtcatcactaaagatcccctgggtcacagggaagcagtcgggtgaagactgggcttaatgtggacccaaatccctgggtatccttgttgctcaatcccacttgttctaaggtggagacagtccccaccacagactgcaggctcctcccaacccttcctctccctcccctgctctccaggtagcctctggcagtcagtctgctcccggccgtgaagccagcacctccgccagcccaccaccagttccttctcctgggctccctcctggccctccaccaagcggcaacatctcccaggacaaaggacacagggtgatttttggcagcagaaattgggaaggccagagaatgggagggaggcaggctggcaagccggaagagctggagctggagtgtggattaggagccctcagtagagctccagatttggggtgggggtcgggtacttgtggggccagtcttgctggaggctaagggtgggccctgaattggcaagatcccacctgccttcagggaaggaaggaggttagctctggagcagctcagtagatttttgtctcacaattccttgggccagattcaacaaagttctgggaatactcaaaagctctaaacaagattccagagcactggggaactgggcgcaggaacaggaacacttccttggcctgggaatgagtcatcactctgaagtcccttgaattggttggcactcactttaccactccaagcacaccttcctcccagggcctccctgagaccaggccagctccctgtctccctgtgcaccccgactcccttcctcttgctctagggtagctgctgctcctccccacccctgactttgttccagggctccccctttccctctcaccctctctccccatggcatttcctctctttctgtaccactcagttcagtctcccactg

SEQ ID NO: 22616 - DNA, 1438 bp, Artificial sequence
  DNA replication origin
cgccgcccgcccccgccgcgccgcccggccccgcggcccgcccggccctcggcgcggttccgacccgccgccgcccgcgcccgcctagcgcagcccgcacccgcgcgatcccgggcccctcggccgcctcgcccgcggcccccgccccttccccggcagtcggctccctctcccccctcctagcccctccccgaagccgcggtccctccgaaatggcccggcccgaggccccgacccggcgcggggctgcggacgggctgggcggtgcgtccggcgactcgcacaggaaagcggacggcgaagggagggagcctgggagagggggatgggagaagggaggaagagggagaaggagggagcgcggaggaacggaggagagaggggccaggagggagacgcgagggagggagcgcgaggcaagccgcgaggggggagagagggggagccggagagggggaggcgcagcgcgagttggccgaggccgaggccgagggggccggggcgcggggagggctagccgtggcggaatgtggggagcccgcgggcccggcgcgggagagggctaggtaggaggggctgtgggtggtgagggcagatgaggggaggctgaagtttgggggcgagcgggtctgtggcagaggtgaagtgggaggagtttgggggatcctggggtagagattgggataatgggattggattggaaagatggagctgcctgggggctttgtgggtgcctggtgagaagtgagagaagcttggggtgagggatctgtggcagagatggagccagacgggtttgggggctattatcagagagaatgggatggaagtttggggtcataaggagagagaaaaattgaaaagatgacatatatagaaagatggggcttctggaaaaagtaaagcttttgggggtgattagtgttgacaaaagagtcataaatataagaattgggggtggggggatgaaggaatgctggagagagagaagtccagaggaaacgtcagtgaggagagagaggagggaacgcgtgaggaaccttaagaagggatgaacgaggtgggcccaggtgccaattctagggaaaataggttctgggtgagaaaggagggctctggatgggaaagaagggtgggagacaccgggctggctggatcctgggggtgggggctcccagtagagccgaggagggtttacttgggcgggcagaatggggaagagggggataagaagattggaaggaaatgtaagctgaacaaggcctatggctggcggcagtatggaagaggaaagatcatggatgggaaaagaaaatggagatggggccggtgcgggggctcacgcctgtaatctcagcactttcggaggctgagtcgggtgggtcacttgtcaggagttcaagaccagcctggccaacatggcgaaaccccgtctcta

SEQ ID NO: 22617 - DNA, 1860 bp, Artificial sequence
  DNA replication origin
gcggcgcggcccggggcattccgggcggccagggggaggcggcgagcccggggaggtggggagcagagcggggatcggggtttgctccgggggccggcgggcgattggggccaggcggggaaaaggggggatgggggccgccctccgggggggtcggggccgccgccgccgtcgtcgcggcggcgactgaggccgagaagaggagaggggggcgggggagctgccgccgccgccccccagaggcgccggagcccggaatcccgctcggagccagccagccgtcccgagctaccagcaggtaaggtctgcggccgcctgggccccgggcccgcggggttctgtcccgcccgggctccggcctgcggctccccacccccacccctcccagttccccctcctgccgccgccgcctccatttgttattttcccaatcccgtccccccactgcgggctctgcctggcctgagggccgggggctcagggggtggggcccgccgaggagagtcgggggccagggtttcgggaggatcgggaaggtggggaaggagggagggtctccggaggaggcctgtggggccagagggtatccgggacccgcagactcaaaagaggaggaacatcgaggccggggttggcggaggaaaacgggggatgctgtgagtggggttccgggcgaaggcagaatggataggagagatggcagcgaggtggggcatgaagcctccaggaaaaagctccaaaggaccagaacacgggttccggagcctggggttgggggctttaggaatagacgggaagtgggaaacgggaaaggggtgtggtaggtggaaagagggattgtggctgatgaacctgggggagacggaggcttgggcaaagagaggtccatttttgagaagagccggaggttttccagcgtggaagagggaaggccatgtctttgtgacggttttcattcccctactgcaggtcacctctgaccctgttttccctatcccagacatagttatttcttggagagggcactggggcccagtagtgtgggttatcccaaaactagtgaggaggaaaacaggaacacagaagggggagttgggaagaaaggggttctgggaggatggaaatggagaattgagcaaccttacaggcactccaggcaagttgcgacctccaccctccaccctccaatttccggagcgtccgctgcccctggagctgtgatctatatagggaggccttagttactgctttgagctcaaagatctccctttgtgcatgggcttattttgactagggtaggtaccttcaagctcccttacctgaggtgctataggagggtaggagttgctttggcaactggggtagggggtagctgccagatggacacctgggatggtctcttgaggggcaccttttgccactgtgttgctatggtagtgatccagtgggatgtcagattggttgggggggcttcgaatgtttattggacctcagcctgtggctgtccttgggactctgggctgggttttggaggttgtttctggatctgttggtggttgggagtttccccacggtgtgcaccctttcatgttgaagtctgttggaacaggtagatacgttccttgcagatcataggtgtttctccaagtctctccacctgggcatgatgggaggatgaaaacgcttctgttcaggttacaccatcttttggcagttggttctgacctctacctcccttattatgttattttttgtagagttgtctttttgcttctttgcactttctttcattttctaaaacttgaattcctctttgagcctcccttcttgagtaacccttttcctctttccctcaactaa

SEQ ID NO: 22618 - DNA, 2478 bp, Artificial sequence
  DNA replication origin
caccagcgcaaggcccctccctgctactccctctctcgtcgccgccttgtcgtcgtcccctttccaggcccacctccgccccacctggccgctcacctggcagactgactggcatggctgggtacatctaccaccttgggagggggcgaggggctgcgggctgggggcaccgggctctcgggggtctcatactcctcagccggctcctgtttgatctgcgtggcgctcaggggcggccctgaggcaggggccgcaggtggtggtggcagcgatggcaggcctgagggccccgcaggtggcaggggcccaggtcccacggtgggcgagcccggcttgaaggtccctgggcctgcaggtggcgaggttcctcgatagcccggtggggtccccgttcggaaggagggaggcgacccgggtttgtatccgggtggggtggctgtcttgtaggcccccggggacggggctctctttccgtacggtgggggcccaggtggggaggccgttttgtagcctgctggcgaggaagccacggtggcaatgaccgtggaaagggtagccgaagaggtggtgaccgtaggcaccggtgggaaagggtagggcgccccttgagggccctgggaaggggaggggtgtgaacatgggtaggacccttgagaagtggaagaggaagagttggaagaggaagagactggagggccattggggcctgcttggctgtaggacacctggctgtgaggtgggggcaggtgtgctggccctggtgggtagggcctcagagaccccagggagggagacatggcgtaagggtgtgcgtggtgggagctaccgccctccagtgggtggggaaatgctccaggaggagggggcccagagtttccgtgatgctgctgctgctgctgctgctgctgctgctgctgctgctgctgctgttgctgttgctggtggtgatggtgatgtgttgagactggtgggtgggcggtggactgggccccagtagagggagggaaggggcctggatgggcattgctgttggctaagaggcggccatagggaggaggtggtgggggaccctggctccacacagcctgggatgggagagaaggctgagtatacttggggggctgattggagacagagaggcttgttgggggagggaaagagtgggggtagctgggcaatgcctgggaagctgggaagggggaggcagaggaagaggaggaagaactggaagaggaggctgctgcagagctactactagaggatgaataaggaaacctcatggggggcgctggagcagaagaggaagcaggaggcagagagtggggtgaaggagccagagttgggcccttctctgggccaggaggaagtccacccataccctgtcccatggcgtggggagagggcagatgaccaggtagtggttgggcccccaggccagggggagaggctgatgcattgttgaggggtctcagggcaggtgggggaggcaggttcggtgtcacatgggggaagttggctggtggtggagcagaaggtaggttcccaccacccactggagtggtaggcggctttgttgggggagcaccactagccccagagcttgatactgaaatgggagtagtgggtggggggtgctgcttacccccattagggccccccactgatgaggcagcccctccccccttgggacccattgggggtccagacaaaactccaccagtgcccccaggatagagctgtgggtgagggggaggggccccaggaggagcctggaacattcgagatgtggggggctccatgggagcatgatatccagtgggtgtcacagaaggatggggttcaaagctagcctctggctgtcgaggggtgctgtctggcggttgaggggaaggaggaaagagtggaggtgggtggtaggggcgggctgggccctgggacaggccagaagatgagtcagagtcattctccacacttccagggctgtagatactgggggacgtgcttcggttgtcctggtcgatatccctagggtcgctgctgccatcatcattaaggctccgcccgtccaagctatccagatcggagggagactgtggccgagggagttcctgctgtagaaaagggaagactcattttttctcttttcctttcctgcttccctgagatttggggctctcttgcataaaatcatttcccctcacagcacactgttgtactgtgatgtggtgagtactcttgctcaagcccacctcttaccatctggggatttctcactttcctcacattcttggctgctccctagcagccagtcttgtttcccgcctgtaaaaccctattccttcctcaaggatccatctcaagcaccttgtctctacccacagctgactccaactccctgtcttccaccatctcataaccaccactttaaccatcctccatcccccaagcccttggtttttataccacttctggccgggc

SEQ ID NO: 22619 - DNA, 980 bp, Artificial sequence
  DNA replication origin
cgcccctctcctccgtccaggcctagtggccagtgaggcccgcagcagctcacagcctgcaggggtggttttgaggcgggggctacaagcactcgccggggccgcggcgctgcgggctccatcgggcagctcgcaccgcctgagcgcccgctgcttccacgcccggcaggttcaacaaacacctggatcgcggcttcaactcgtgcgcgcgcagcgacctgtacttcgtgccactggagggctccaagctggccaagaagcgggccgacctggtggagaaggtgcggcgcgaggccgagcagcgcgcgcgcgaagaaaaggagcgcgagcgcgagcgggaacgcgagaaagagcgcgagcgcgagaaggagcgcgagcttgaacgcagcgtggtgagtgcgtcactgcctgcgccaccgccttctttccctctttccttccttccctctgcgctgcgctgcgctacgctacgctgcggggctgtggctgggtgggcgggcgagtcacgtcgccacctgtcggaggggaggtaccactgcagcccaggaaatggagcccaaaaggttttcagcgagagccatctgcattcctgggttgggaaaaggcatgctcagatgggactacctgtggatcccaagaagggcaaatattcgggagcgggggccgcagttaagttccaggtgggcagagtttcaatgagttgaggcattttggcattcggctgtcgaaacaaatgggcagcttaaaaccagccacctcttttcataactgccgctttgactccacttttccctgtatcccacagaagttggctcaggagggccgtgctccggtggaatgcccatctctgggcccagtgccccatcgccctccatttgaaccgggcagtgcggtggctacagtgcccccctacctgggtcctgacactccagccttgcgcactctcagtgaatatgcccggcctcatgtcatgtctcctg

SEQ ID NO: 22620 - DNA, 910 bp, Artificial sequence
  DNA replication origin
acccaaagctacagggccctttctagaaagttacagatctagagatggggaaaaacatgaaagacctcgcagagggagaagaggagaaaatggcaaaaaatgagttgaatccagagaaatcagaagataggtttgtgggttgggcacggtggctcacgcctgtaatctcaggactttgggaggccgaggtgggtggatcgctttgagctcaggaatttgagaccagccatggccaacatggcgaaaccccgtctctaccaaaaatacaaaaagtagccaggtatggtgacacacgcctgtaatcccagctactccagaggctgaggtaggaggatcacttgagaccgggaagtcgaggctgcagtgagctgtgattgcgccactacactccagcctgggtggcagagccagaccatgtctcaaaaaaataaataagaagacaggtttgtgaagggcttgggagaatggggctgtgagaatagaaaagtgtccttcaaaagctcccgtgtgggcctctgtcatgggaaggatactagactatggagagaactgggctgtggggcatacaggctttgtggccagggaaggccatgagaagacaaggctgagagaacgtcagggaggcaaagttcagggcagcaatctcaggaaaggttcatgccaggccaggggaggaaagtcttggccataggaatgaaagagcccagtcatgatagggggaaggtggccccaaagggccagggcaaggaaggaggggtctcacctgcatggatagcatcttgctggtgcaggtgcaggtgcgagtggatgtgggagtgctggtggtgatggggagtcacattgagcatctgcagccgggccagtgggtcattgcccagggccgccaccctttctgcgtgctgcctctcag

SEQ ID NO: 22621 - DNA, 1591 bp, Artificial sequence
  DNA replication origin
gcccaggtcccctctcccagcaacgccctttctatacaagccgcagctgcacaaaggcaagtcccacctcctctaaccgcccttgggctacctgcccttggggtgggacttggactccactgagggctgtgctgtgaggtgggtccgggagcagctcggtccggagagtggagcgcgatcgttccctctgcaggcctcaatcgaggggcaaggctgatgctccgggccagctggggtctctgggtagcggtgggtaacttcacactagcgacaccttgctgggacccgcctgcccttcacaggcctggcggggccttctccctcccctttccctcaggggatcccagcacaggctgggcactgcggggcggcacagcccaactcctgcccagctgacccctcgctgacctcagggatctctctggcctgcagctccgctgtgggcagggtctgaggccacagaggaatgggctagtcctgggggcagcatctgctgtggggaggggacccaaggacagcccccgctttttgtacctctggagacaggggtgagactaggcaggttggagaaaagaggcccctgggagagggtgggaggcctagaggagtggccaagccttagaggaggtgcccgtggctggcgctgggagggaaggggttaaggcagtgggggggcagcctatggcaggaggacacacctgtgcgcagggtggcaggcggggcccaggtaaggagcctgcgctggctgcccggcaggcggagaaggaaggaggaagagcggaggccagggcgggctctaggccgtggaatctggggccttaaagccccttcgtctccccagcacccactctctgggggcaggtgggcccggtgacaggtaaaggccaccaggggagaggtcctgggctgagcttgggactgcagaggggggatgagggtgggtaaatcggtgtgtgtcgcgggtcgggaaaggctgccgggggtaggggaaggtggctcagaggcggcgggccgacggtcgaggggcttcggagggcctgcttggactgcaacctgggcctcgtgatcagcgacccagggtgtggctggtggcgggcagcagggctcaccaggaagtgtccccagggactcgggtggtggggggatgggagccagggatctgcagcttttccgcagggatcctgggcctgaagctgcctgacccaaggtgggcgggctgggcgggggccctcgtcttacccagcagtgtttgggtgcggttgggagtctctaatactgccgggtaatgatggaggcccctgtccctgtgtcagcaacatccatcgcctcaggtccccagcccttagctggctgcagccccctccccacttcccacgcaccccggaagcccctcgtcttgagctgagagcgttgcacaaggggtggttcttgttggctggctgccactaagggacacaatgggccccagcccctcctcccacccagtgcgatttgtcacctggtggatccagaacccacagtcgaccttgagcttggggttggctcgccccctctcaagagacctcacctggcctgtggccagggtcccctg

SEQ ID NO: 22622 - DNA, 1055 bp, Artificial sequence
  DNA replication origin
cctgccagtcccgtgcagtgcgcttgcactcctcagcccttgggtggtcgatgggactgggcgccgtggagcagggggcggcgctcgtcggggaggctcgggcagcacaggagcccatggagggggtgggaggctcaggcatggcaggctgcaggtcccgagccctgccccgcgggaaggcagctaaggctcggtgagaaatcaagtgcagcgccggtgggctggcactgctgggggacccagtacaccctccgcagccactggcccgggtgctaagtcattgcgcggggccggcagggctggccggctgctccaagtgccggcccgccaagcccacgcccacctggaactccagctggcccgcaagcgccgcacgcagtccgggttccggctcgcgcctctccctccacacctccctgcaagctgagggagtgggctccagccttggccagcccagaaaggggctcccacagtgcagtggtgggctgaagggctcctcaaatgccgccaaagtgggagcccaggcagaggaggtgccaagagcaagcgagggctctgaggactgccagcacgctgtctcctctcagcagaagcctcggcagggcgctgggctgcagagtaccgtgcacaactagggcacctccctccctcccccgccaacacacacacacacagccacaaaagcacagccccaggccaggagcacacaactgccctcaaatgccctcaccagcctctaaggggaggccacgtccacgtgacttcaaacaacactagactaggatgcaaccaggaagctgagtcagggctacacacctcctacgcccccatctgtgtcctccccaaacccagtcaacacaggggcgcacaggggctggccgggacctttgggtatacagctgcaacctctggagggcgtttacaccgtgagctacgagtacttattggggttcagctggaaggtggctccctctgaccatctccccaggacacacacgagctttctgccattctctctgacggggcaggcctgcttggcatgggaagtctctgca

SEQ ID NO: 22623 - DNA, 1418 bp, Artificial sequence
  DNA replication origin
ttgaggagcccttcagcccaccactgcactgtgggagcccctttctgggctggccaaggctggagcccactccctcagcttgcagggaggtgtggagggagaggcgcgagccggaacccggactgcgtgcggcgcttgcgggccagctggagttccaggtgggcgtgggcttggcgggccggcacttggagcagccggccagccctgccggccccgcgcaatgacttagcacccgggccagtggctgcggagggtgtactgggtcccccagcagtgccagcccaccggcgctgcacttgatttctcaccgagccttagctgccttcccgcggggcagggctcgggacctgcagcctgccatgcctgagcctcccaccccctccatgggctcctgtgctgcccgagcctccccgacgagcgccgccccctgctccacggcgcccagtcccatcgaccacccaagggctgaggagtgcaagcgcactgcacgggactggcaggcagcttcacctgcagccccggtgcgggatctactaggtgaagccagctgggctcctgagtctggtggggacgtggagagcctttatgtctagctcagggattgtaaatacaccaatcagcaccctgtgtttagctcaaggtttgtgagtgcaccaatcgacactgtgtatctagctgctctggtggggccttggagaacctttatgtctagctcggggattgtaaatacaccaatcggcactgtgtatctagctcaaggtttgtaaacacaccaatcagcaccctgtgtttagctcaaggtttgtgaatgcaccaatcgacactctctatctagctgctctggtggggccttggagaacctgtgtgtcgaaactctgcatctaactaatctgatggggacgtggagaaccttcatatctagctcagggattgtaaacgcaccaatcagcgccctgacaaaacaggccactcggctctaccaatcagcaggatgtgggtggggccagataagagaataaaagcaggctgcccaaaccagtatggacaacccgctcgggttcctttccgcgctgtgaaagctttgttctttagctcttcgcaataaattttgttactgtttgggtccacgctgtttttatgagctgtaacactcaccgcaaagatccgtagcttcagtcctgagcccagccagaccacgagcccatagggaaaaacgagtaattacagacgggctgtcttaagagctgtgacactcaccgcgaaggtctgcagcttcactcctgagccagcgagaccacgaacccaccaagaggaaaaaactccgaacacatctgaacatctgaagggacagactccagacgcaccaccttaaaagctgtaacactcaccgcgacggtctgcggcttcattcttgaagt

SEQ ID NO: 22624 - DNA, 1277 bp, Artificial sequence
  DNA replication origin
cgctaggactcagaggcctcgcgaggcagggctagaagctgtggcctcacccttgaggcccgggcacttcccgtctcctcccttgctccccttcctcaccccaatccctacagcctcccgcgcagcctgagctctaggattgtgggttttccatcctccgaagacatcacctttgctcatctcccaggagagtctcgtccaaaggaggggggtgctttctgcttcagcagatcccaccccaccctgggatccgagggagcaatggtggggcgagtgagggtctgccgtaaatatcccccgaccaccctctgggaaggtgctagaggccacaggcaaatttcagtctccccatggaatatctgctgtgctgctgctgctgctgctgctggtgtgtgtatgtgggggaggtgtgtgtgtgtgtgtgtgtgtgggggggggggggatgtgtgtgtggggggggtagggtggggggagggagggtttgcggccacccaccctttctcttcccctcccgtcctcttccctcctcctctgccggggccacactcacattgcgcctggacagcctttggagtgagggcttctccagagatatttcccccacactctgggtccaggcatctggaactggacatctgggacctgcgagagaactggcccaggatagggaacaaaaggtgaaggccggtgggggaggaggaagttcctggaaatgttaagcaactccacagttccccttctccaattctccgggctgagcgccacctgccgtctgactcaggaacagcgggcccgccgcagcttaggggagaaacgtccaaaaacctcgctggccctcagaggtcagggtggcagggcactgactcgacccttttgtactatttaacattaatttttgccatgtgtgtaggatggctccttgtgagttatggctgctgccttcaatcagccatgtctcttcctccccgacctttccgttcacgacatacccggggagcctccctcttgtagaattgaagtttgtgatccttgaacttgagctttctcttcctttccctcctccccaagcaggggtgggggacatgcgcttaggtggtcttttgaatcctattcacaacctctggaggctgcttgtccagcatggtcagggctggggtcgagcccaggtgtccctcagtccctagtcccagtcatcactcaagccgtcactcaagcttctttaggcagatactagagcccctgcctgctctcaccgctccccgaggaaggacactcac

SEQ ID NO: 22625 - DNA, 646 bp, Artificial sequence
  DNA replication origin
gctggtggctacctcgggtctgggaaggactgcccccgagccggtgataggcctctccccgcggctctccctttcactggcgcatgctaagggtgtgtggcagatccatctgcttcgcctccatcccatcctggggagaaagtatttgctgcagttcagcaattcggagcacgtatgttttttgcgtgtgcctctgcattcagacccttttgcctgcatcagctgggctgtgggttaccagagctgccctctctggcagacagcggatacattcagctgggcggggctgtcggacagacggagagggaggacgggagggagggcttgcgggcagagggctcaggtaggtggaaacggatggagactggcaggaaagggcagaagtgggtgtgtggggggcgctaaatgagtatgagagggaaagctgagaaggagaagaccggagatgaggcgtgggagggggtaaggaggggatggaaaagggtaaaggtggaggcagaaaaaagagggaggaatgaggaaaatcaggaaaagagtgagtcaaggaggagcccgggagcctaggagtgaaagggagcaaacgcagagaccgcagggggccaggaggagaggagacagaggctcagagacctgggaagacaagcag

SEQ ID NO: 22626 - DNA, 750 bp, Artificial sequence
  DNA replication origin
ttaccagagctgccctctctggcagacagcggatacattcagctgggcggggctgtcggacagacggagagggaggacgggagggagggcttgcgggcagagggctcaggtaggtggaaacggatggagactggcaggaaagggcagaagtgggtgtgtggggggcgctaaatgagtatgagagggaaagctgagaaggagaagaccggagatgaggcgtgggagggggtaaggaggggatggaaaagggtaaaggtggaggcagaaaaaagagggaggaatgaggaaaatcaggaaaagagtgagtcaaggaggagcccgggagcctaggagtgaaagggagcaaacgcagagaccgcagggggccaggaggagaggagacagaggctcagagacctgggaagacaagcagggtgggagggggagctgtgcagagggcgcccagccctgcccttccaccgctctctcttccttgcctgcatctctgacctcagcctcgcctcctagcctcctgccacttcctgtaccgcctcctgtgcaccatcttgtggctttctcctcagcattcaggaaggggttatggtggtcatcagtaagaaagccttcccatgccaaaggcttgctggtgtgtggttggaggaaagaatggaaatcagggtttcttgctcaccgtgagatactggggatgaggttccttttggtgactcagtttccctctgcctcatgattgtgctttgggagcctgggtgt

SEQ ID NO: 22627 - DNA, 1251 bp, Artificial sequence
  DNA replication origin
accactgactgagcccctactgtgtgccaggccctgtgcaagttgctggggatacagagaatctgtggagagacagacatgtccctcagctttgtagtcaataccatcatggaggcgtgaataagggctcccagagcacagcagaactcctggtagaggcaactcttgaaccgggtcttcagtgatagtagaagactgccaggcacacaatgggtaagggacatgccaggcagagggaacagtacatgcagacacagaggcgagaaagcagggtgtgtgtgggaagcatatgtgatttctgtgaccccaccgcaggggtgcaggggtggtggccgcaaagaggccagagaaggaggaaggcaggacctgccccacctggttaaggggctaaggcgtcaggacttgacctaggcctgacaaggaggtaggaaagttgctctaccggagagtggtccaaccagagttgcacttgagaaaggccactgagatccagagttgaggacggggtggagtagagcaaggcataggagacgaggacaggtggaaggcaggtgcgaggcaggtgggaggcaggtgggaggcaggtgggaggacaggtgggaggcaggtgggaggagaggtgggaggcaggtgggaggcaggcgggaggacaggtgggaggcaggtgggaggagaggtgggaggacaggtgggaggacaggtgggaggcaggtgggaggcaggtgggaggctcttgccacagaccaggcaaaaacacagagggtacaggtcaaggcggcggcagcaataaggggaatagaaagcaaaagacctattggagagatttttaaggggtaagaacgacagggtttcatcaccatttggccatggggttgagggagagggaggaatctagactgactctcagatttctggcataggcgaatgggtgaaaggtgatagggataggtcacagagaagtcggggaaaggtggagtctgaggcacaggaagggcaggtggatatgccaataggtagttgcaaatgtgagttaggagagagattcaggtgggagataaaaatatggaggcatcaacatgcaactgggagtttgcggccatgggcaaggacaaggcacccggtggatgtcagaacgggcgtcaggcggagcacccacctccaccccaactgtgctacaggcagccgcagagaaccaggaagagcctaaggatgccctactctgtcatgctgcaggaaggaactaagacttgg

SEQ ID NO: 22628 - DNA, 1314 bp, Artificial sequence
  DNA replication origin
cactgcccgaagaagggacagtgggaaaacagcccgaccatacctagccccgcgcagccccagcacgcggtgagcacggcagaggagcattccctccccttaagtcaccggagcccttcccccggctcggcccggtccctcccgcgctccccaccgcccatctccccggccctgctgccgctccagccccgcccctgggacccgcgaggccaccgcaagggtggggagggcccagggacgcggccccgggccccctcggggtcaggcgctcaccgcggagcgccgcgccgcacgacccgccggggcaccaggtgctggcttgggggaggggagaagagggggcggggagccagggggcggggctcaggcttaaaggggccgtgaccgccccgcagcggcccaggcccagcggaagctgtctgaaaaggcggggccttaagactgcgacgcagcctgacgggaagagccgtgagtcttaaaggggaagagcaccttagagagcgggtcttggagagtcgcctttaggagcgctcgaaaaggccacgggccctaggatttgtttgacggaaagctcaaagaagagtggagctaagaagggcttcccaggctctgggggaaagccgaagacgcgagatcctaggctcagtcgatcctgcctcttcccttgggcgcattgtgacctaaggggattcagtgccctttctgagcctcagttttcccctctaaaatggggctggctaatgttcccaagcccaagaaagagaaaagccctaacaccaggggctggggagtccagtccgaagccttcttcagcctcctaggcctgccccgcttccaaataacccctagcggggtagcgtcactgtctccatggagacaggggcccgcccccgccttaatccctctccacctctgcataatggggaaaatagcactgcatgatgacaaattccggagaccaaaatagggtccaacgcatcctgagacctcgagctggtaacgtacagggaaggtgaacagtgagtcagcccttccttccgctaagtcaacatagtggccttattcccatcactccaggctgggaaaggacaaacatacaagaaatgcttttaatcacggaataagactaagcctcaagccccctcatctgccaaagagtgtgctctgctgtcaaacctcaaagtcattgagaaacaaaccctgataatctcacccagcttcaagaccaagggagtcctagtgtcatggagaagagcaaggaggggcccagggctgccggtaaatgaccaagggcaataatgccagacgaacaga

SEQ ID NO: 22629 - DNA, 1287 bp, Artificial sequence
  DNA replication origin
ggctccccgccccctcttctcccctcccccaagccagcacctggtgccccggcgggtcgtgcggcgcggcgctccgcggtgagcgcctgaccccgagggggcccggggccgcgtccctgggccctccccacccttgcggtggcctcgcgggtcccaggggcggggctggagcggcagcagggccggggagatgggcggtggggagcgcgggagggaccgggccgagccgggggaagggctccggtgacttaaggggagggaatgctcctctgccgtgctcaccgcgtgctggggctgcgcggggctaggtatggtcgggctgttttcccactgtcccttcttcgggcagtgtcgccgtccagcctggttgttgaagcgtccccgtggtcccccggggtccaggcccctttgtggaggcagctgctggcccccagcccatgggaccgtagtcgcggaggcctctgcagaggcgcaggctggaagcggtggcctttgaggggggcggcaggagagagtaccgacctccctcgaactcctggcagaggtgggggtcgcagcaaaagcactggggtggagggcggccagtgtggggcagacgcctgtgtgccttcctcagatacgggcagagttgtggatgtgagaagggtctggcttgggtacctcagttccaaacctcctgtgtccatcagagagctggcggtcaccatggcaatgcgggagctggtggaggccgaatgcgggggtgccaacccgctcatgaagctcgccgggcacttcacccaggacaaggcccttcggcaggagggattgaggcctggcccctggccccccggagccccggcctctgaggcagtgagtgttcttgaggtggaaagcccaggtgcagcctctgaggcagtgagtgttcttgaggtggaaagcccaggtgcagcctctgaggcagtgagtgttcttgaggtggaaagcccaggtggtggtggtctgaggtggaggggctgtttgcacatcttggtataactgctttctctattgtgttgcaaatcatagtagttaccacttactgagcgtttataaacactagaaaaccctgtgcacctttaaataaatgcaaccattttatagatgaagaagccgaggctcagatgcctatgggcttcatcaacccctgattttagaggaactgcgtcattgtacatctctgtctttctctcttaggcctccaagcctttgggagtagcttctgaagatgaggtaaatagaccagtctcttttctgtcccatttttct

SEQ ID NO: 22630 - DNA, 1434 bp, Artificial sequence
  DNA replication origin
ctgcctggccgcgaccccgtctgggaggtgaggagcgtctctgcccggccgccccgtctgagaagtgaggagaccctctgcccggcagccgccccgtctgggaagtgaggagcgtctccgcccggcagccaccccgtccgggagggaggtgggggtcagccccccgcccggccagccgccccgtccgggagggaggtgcgggtcagccccccgcctggccagccgccccgtccgggagggaggcggggggtcagccccccgcccggccagccgccccgtccaggagggaggtgggggtcagccccccgcccggccagccgccccgtccgggagggaggtgggggtcagccccctgcccggccagccgccccgtccgggagggaggtgggggtcagccccccgcccggccagccgccccgtccagaaggtgaggggcgcctctgcccggccgcccctactgggaagtgaggagcccctctgcctggccaccaccccgtctgggaggtgtacccaatagctcattgagaacgggccatgatgacaatggcggttttgtggaatagaaaagggggaaaggtggggaaaagattgagaaatccgatggttgctgtgtctgtgtagaaagaagtagacatgggagacttttcattttgttctgtactaagaaaaattcttctgccttgggatcctgttgatctatgaccttacccccaaccctgtgctctctgaaacatgtgctgtgttcactcagggttaaatggattaagggcggtgcaagatgtgctttgttaaacagatgcttgaaggcagcatgctctttaagagtcatcaccactccctaatctcaagtacccagggacacaaacactgcggaaggccgcagggtcctctgcctaggaaaaccagagacctttgttcacttgcttatgtgctgaccttccctccactattgtcctatgaccctgccaaatccccctctgcaagaaacacccaagaatgataaaaaaaaaaaaaaaaaagaataaagtaagttggttcgagaacgtggatggaggaggctgggaaaactgtccatactcctttcacgggattcggaaagaggtatctgaactcaccagcgatcggtggctgttccctcaggttctcccagccacagcttctcctctgattgctccaaatattcctcagcccagcgggcaggggacacagacaaggggtctgcaaggagcagagaagtggggaaatcacacaggttcattcagtgtgggatcaaggaaagggaaagagatgcccatattcaactgaccctcttagccacaccaaagcagacaaaactctgctgactccctcagaaacccctggtcaaaagaatatagtactaaattttcaacatcctcaatatccaacccattctcaaggagcctggggcagaaa

SEQ ID NO: 22631 - DNA, 1474 bp, Artificial sequence
  DNA replication origin
ttttccccacctttcccccttttctattccacaaaaccgccattgtcatcatggcccgttctcaatgagctattgggtacacctcccagacggggtggtggccaggcagaggggctcctcacttcccagtaggggcggccgggcagaggcgcccctcaccttctggacggggcggctggccgggcggggggctgacccccacctccctcccggacggggcggctggccgggcagggggctgacccccacctccctcccggacggggcggctggccgggcggggggctgacccccacctccctcctggacggggcggctggccgggcggggggctgaccccccgcctccctcccggacggggcggctggccaggcggggggctgacccgcacctccctcccggacggggcggctggccgggcggggggctgacccccacctccctcccggacggggtggctgccgggcggagacgctcctcacttcccagacggggcggctgccgggcagagggtctcctcacttctcagacggggcggccgggcagagacgctcctcacctcccagacggggtcgcggccaggcagaggcgctcctcacatcccagacggggcggcggggcagaggcgctcctcacatctcagacgatgggtggtcgggcagagacgctcctcacttcctcgatgggatggcggctgggaagaggcgctcctcacttcctagatgggatggcggccgggcagagacgctcctcactttccagactgggcagccaggcagaggggctcctcacatcccagacgatgggcggccaggcagagacgctcctcacttcccagatggggtggcggccaggcagaggctgcaatctcggcactttgggaggccaaggcaggcggctgggaggtggaggttgtagcgagccgagatcacgccactgcactccagcctgggcaccattgagcactgagtgaacgagactccgtctgcaatcccggcacctcgggaggccgaggctggcggatcactcgcggttaggagctggagaccagcccggccaacacagcgaaaccccgtctccaccaaaaaaatacgaaaaccagtcaggcatggcggcgcgtgcctgcaattgcaggcactcggcaggctgaagcaggagaatcaggcagggaggttgcagggagccgagatggcagcagtacagtccagcttcggctcggcatcagagggagaccgtggaaagagagggggagagagaccgtagggagagggagagggagagggagagggcttactttattctttaagatttccccttgggttattactcctgtgaatttatggttgaaatgtagtcaaggacacagtggttgtgtgcctgtactcaggaagctgaggtgggaggattgcttgggcccaggaggtcaagtctagcccgaggaacacagtaagaccttgtctttaaaaaaccaaaa

SEQ ID NO: 22632 - DNA, 1681 bp, Artificial sequence
  DNA replication origin
aatacaattaaaaatatatatgtgttacacaccatggaatactatgcagccataaaaagatgaattcaagggccgggctgggcgcgggagctggccgggctgggcgcgccgcggtcccgcacccacttccgcttcccgtgcggcggtggggggatggcggcagggccggtgggcggcggcggctccaggtccctgcccgggcgcggcactgcgcagtccgccctccccgtcgcaggggcgctcctgagcttcgcggggccgcctccagggctgcctgcgcggagggccggccgcggccgacgcgagtgttaagtgtccgccctggccggctacccggagccaagagcaggcggcggagcctgagcgggacgtggccacgctggcgcggcgggtccaagcccgccattggtcggcttccgttacgccgctgatgtggagtagggcggagcgcggaacgcgaggagctgctggggtgtgtgtcgcagcgggttttcctcggcggtttgcggagctgctaggatggagcaggctgcggagggagcgagtgtgaccgcagcccctgtgtcagctgccgacagcactgaggagttggccgaagtcgaagaaggagttggagtagtgggcggggataatgacgcagccgcgagaggagcggaggcctttggcgacagtgaggaggacggagaggatgtgttcgaggtggagaagatcctggacataaagatcgaggggggtgaaattctttacaaagttcgctggaaaggctatacatcggatgacgatacctgggagcccgagactcacctggaggactgtaaagaagtgcttcttgaatttaggaagaaaattgcagagaacaaagccaaagcagtcaggaaggatattcagagactatccttaaataacgacatatttgaggcgaactctgatagcggtcagcaaagtaagacaaaagaagatacttccccaaagaagaaaaagaaaaaattaaggcagagagaggagaaaagcccagatgatctgaaaaagaaaaaagcaaaggccgggaagctaaaagacaagtccaaaccagacctggagagctccttggaaagtttagtttgatttaaggacaaagaaaagaatttctgaagccaaagaagaactaaaggagtccaaaaagcccaaaaaagatgaagtaaaagaaacaaaggaattaaagttaaaaagggtgaaataagagatttaaagacgaaaacaagagaagatcccaaagaaaatagaaaaacaaaaaaagaaaatttgtcgaatcccaggtggaatctgaatcaagtgtacttaatgattccccctttccggaggatgacaatgaagggctacattccgacagcagagaagagaaacaaaacactaaaagtgcaagagagagagcagggcaggacacagggctggagcatggctttgagaagcccctagacagtgccatgagtgctgaggaggataccgatgtcagaggcaggaggaaaaagaagaccccgagaaaggttgaggacactagagagagcaggaagctagagaacaagaacgcattcttagagaagaaaactgtgcctaaaaagcagaggaatcaagacagaggcaaaagtgctgcagagttagagaagcttatgcctatatctgtccaaacgccaaagggctggag

SEQ ID NO: 22633 - DNA, 839 bp, Artificial sequence
  DNA replication origin
ccccgcccggccagccccctcgtctgggaggtgaggggcgcctctgcccggccgcccctactgggaagtgaggagcctctctgcctggccagccaccccgtccgggagggaggtgggggggtcagccccctgcccggccagccgccccgtccgggagggaggtggaggggtcagcccccctcccagccagccgccccgtccgggaggtgaggggcgcctctgcccggccgcccctactgggaagtgaggagcccctctgcccggccagccgccccgtctgggagggaggtggagggtcagccccccgcccggccagccgcccagtctgggagggaggtgggggggtcagccccccgcccggccagccgccccgtccgggaggtgaggggcgcctctgcccggccgcccctactgggaagtgaggagcccctctgcccggccaccaccccgtctgggaggtgtgcccaacagctcattgagaacgggccgtgatgacaatggtggttttgtggaatagaaagcggggaaaagtggggaaaagattgagaaatcggatggttgccatgtctgtgtggaaaggagtagacatgggagacttttcattttgttctgtactaagaaaaattcttctgccttgggatcctgttgatctgtgaccttaccccccaaccctgtgctctctgaaacatgtgctgtgtccactcagggttaaatggattaagggcagtgcaagatgtgctttgttaaacagatgcttgaaggcagcatgctcgttaagagtcatcaccactccctaatctcaagtacccagggacacaaacgctgcggaaggcctcagg

SEQ ID NO: 22634 - DNA, 1923 bp, Artificial sequence
  DNA replication origin
cagacggggcggctggccgggcagaggggctcctcacttcccagtaggggcggccgggcagaggcgcccctcacctcccggacggggcggctggctgggaggggggctgacccctccacctccctcccggacggggcggctggccgggcagggggctgacccccccacctccctcccggacggggtggctggccaggcagagaggctcctcacttcccagtaggggcggccgggcagaggcgcccctcacctcccagacgagggggctggccgggcgggggggctgacccccccacctccctcccggatggggcggctggcggggcaaaggggctcctcacttcccagtaggggcggccgggcagaggcgcccctcaactcccggacgaggcggctggcctggcgggggctgaaccccacctccctcccggacggggcggctgccgggcagagacactcctcacttcccagacggggtggctgccgggcggaggggctcctcacttcccagacggggcggctgccaggcggaggggctcctcacttctcagatggggcggttgccaggcagagggtctcctcccttctcagacagggcagctgggcagagacactcctcacctcccagacggggttgcggctgggcagaggcgctcctcacatcccagatggggcggcggggcaaaggcgctccccacatctcagacgatgggtggccgggcagagacgctcctcacttcctagatgggatggcggccgggcagagacgctcctcactttccagactgggcagcccggcagaggggctcctcacatcccagacgatgggcggccaggcagagacgctcctcacttcctagacggggtggcggccgggcagaggctgcactctgggcactttgggaggccaaggcaggcggctgggaggtggaggttgtagcgagccgagatcacgccactgcactccagcctgggcaccattgagcactgagtgaaccagacaccgtctgcaatcccagcacctccggaggccgaggctggcggatcactcgcggttaggagctggagaccagcctggccaacacagcgaaaccccgtctccaccaaaaaaatacgaaaaccagtcaggcgtggcggcgcgcgcctgcaatcgcaggcactcgcaggctgaggcaggagaatcaggcagggaggttgcagtgagccgagatggcagcagtacagtccagctttggctcagcatcagagggagaccgtggaaagagagggagagggagaccgtggggagagggagagggagagatgctgaccgtggaaagagagggagagggagaccgtggggagagggagagggagagggagtcaaagactttttataaaagccatcagtgttttggcctaagtttggctcagatgaggattgggtgtgccaagctttaattctctatgtgaatgataaaaccacatcctcacaagaaaagatacgttatgttctctgttggatcaaggaattagcccccatgttgcccctcaaggaataagaagaaaaagagcttagtaaaaagcccttgcctggtgaaaagcccagggaccccctgtcacgctttccccctccatacgtctcacagaataggggacgggaagattaaggggcatcacgagggttagaggaagaaagacctggagactgcgggggagccaaaccagatgctcctttagagccttacccaaatttaagaaaagaattagaacaatgtaaaagggatattaaggactactctatcctttccaaacagcagacatcttgcatgttccccattagggaacttcccacgggacaggaagagattggctttgtaaatgctccgcttacaagtactgaagtcagcaatttcaaaaaggggatgaacccactcctagaag

SEQ ID NO: 22635 - DNA, 1354 bp, Artificial sequence
  DNA replication origin
cacatacaccaataggcatcttggctcaacatacgaaagcccctttccacagagacagctgcctccagcctgaagaagttgccacaggaggtagaaggaggtcccttgcccatgcctgggagacccagccagagtggacagggaggcggcccgggccggggtgccagactcagcaaataaacacagcactcccaggtaaccctgaatttcagataaccaacgaataactttgtatgatactatatttgtactcaaaagtaactcgtttatctgaaattcaaagttgactgcgcatgcgttactgtattgtatctggcaacgctccacctggagcccttaggttggttttcctactcgggtttgtggaaggggcgccccccgtcttgcaggtgcccgcggcgctctccacagaggagcgctagaggagcggcggcggcggcggcggcaggggcggcggcggcaggggcggcggcggcggcggcggcggcaggggcggcggcggcggcggcaggggcggcagcccggcactgactggagacccaggtgagtcctagcaactcacacggcccaaccgtcaaaaccacctctgtggtgggcgcgcacccaacgcacgcacttaggctcaatccgggagtcgcctccggccactgactggagacccaggcgagtcctaaggaactgacaaggcccaacggtcaaaacggcctctgtcgtgggcgctcacccaatgcacccacctactctctctcaatccgggcgtcgcctcccgttgccaggcaacgagagcgcgcgcagcaaagaggaagcgggactgacagatgaggaaaccgaggtttgcagagactgagtgacttgttgaagatcacacagctagtaagaggcagaatcaaagctggaacttgggggctgggtgcggtggctcacgcctgtagtcccagctactcgggaggctgaggcaggagaatcgcttgaacctggggggcggaggttgcagtgagcagagatcgcgccactgcactccagcccgggcgacagagctagactccatctaaaaacaacaacaacacaaaatcgcgccactacactccagccaggatggtgagaccctgtctcaaaacaaacagctgcaacataaaaaacccaaaaaccaaaccataacaaaaaaaacctggaaattgaacttgggcccaggatggaaactgactacctgaagaggtgctttggaaattgcctggcccaggcacttgcacttgacatgcatggggtatattcttccacgtacaattacatatatgcattcatatgattatgtacagtagtagtagattattaaatgttgaagagcactaacaca

SEQ ID NO: 22636 - DNA, 960 bp, Artificial sequence
  DNA replication origin
gctgggcaagtgagacaaggaaaaggtggagggagcgcctctgggcctggagcttcagagctgcgaggttatgtttcagccaaactgcaggtgaggcttatgaggcccgcttgggctccgcgctgtgggccttcatcacgccgtcctctctcatcatgagctgtagatacccaaagaatggcaccgatgaatcatctagtaacaaatctgtctttttgatcgggggccttcgctgcactggcgtggctgaaactgcggttctcaccaacgtccaccctcttcctccagttcgccgccctgcccccagcgagcactgagcccgccagcccgacttggcgctgcggccgcgaccacccacctcccaatagcccggcggccgcatgaggctgggactggcgcacggaggcggtggggcggcggggggggggaagggggaggggaaggggggtgctgaagcggggggggcgagaaactggagaccctgcaaaaaggctgggcctgggctgctctggttaccccgcgagtcctcttcactgcgcaggcgtgggcagctgcagaaccctgtcattctatcttagtttgctcatcatcactaatattctttgctatgacccaggatatacctggaacccagcgaccttgacctgccttccaatgcaggtaagtgaatttaactgccctttctgtattgctctaggctgtgttacttgatagggttgacgcctgagttgggatacatttcagggattacattaatttttttttttttttttgagacggagtttcgctcttgtcgcccaggctggagtgcaatggcacgatctcaggtcaccgcaatctccgccacccgggttcaagcgattctcctgcctcagcctcccgagtagctgggatgagaggcgcgcgacaccacgcccagctacacgcccggctaattttttgtatttttagtagaaacag

SEQ ID NO: 22637 - DNA, 916 bp, Artificial sequence
  DNA replication origin
gagactccggtccctgctactgtggcggcagcacctcctctagggccgtcctgtcgggtccgctcccttcggcgcgtggggctccccgcgctgccaccgctcgggctccgaccagtctgggctcccggggagccagaaggcgggcagacagtgtcagggctcggcgcgggctcgggctcggctcggctccgctgcaggccccggctcctccccggcctccgcgccgcgctccgcgcccctccccctcccccgcccgccggccgctgccgccaccgcctcccggcgcgggttaaggaggagccgggagacgccgagccgcgggcagcgccgagccgcgagcctcgctacccggtgtgcgctccgcctggagagccacggccgctctcacgccggcgagggatctcgccgccctcgcccacctgcggccgcgtggctccgggagttcgccgtctacccgggatgacaactcactgctccccgtcgggagagtccctagtgcgcaccgtataccgtcaattccagctgacaccccaactccggcgtttcattctgttaaactccgtatacagatgaacagccccagctttctcaggactgtctttgatgggcttctctttccctcgagataatttataaaggatcatgagcattgaggtgaagattggggtgaagtttatatgttacccttatatcatcctggaattcagtaaatgctccttgaatgagtggatacatgataaatgagcgtgtaacggtgaaataaacatcagaagatctgggtcctgttccttgtttcagcttcctaaacttgtgcatggcccttgttctccgcaatcttgctcagcgaagaagggaccttgatacttggcctgcttaccctttacagctgtcacatcctgaagtcatattattctgc

SEQ ID NO: 22638 - DNA, 2041 bp, Artificial sequence
  DNA replication origin
ggcgagggcggcgagatccctcgccggcgtgagagcggccgtggctctccaggcggagcgcacaccgggtagcgaggctcgcggctcggcgctgcccgcggctcggcgtctcccggctcctccttaacccgcgccgggaggcggtggcggcagcggccggcgggcgggggagggggaggggcgcggagcgcggcgcggaggccggggaggagccggggcctgcagcggagccgagccgagcccgagcccgcgccgagccctgacactgtctgcccgccttctggctccccgggagcccagactggtcggagcccgagcggtggcagcgcggggagccccacgcgccgaagggagcggacccgacaggacggccctagaggaggtgctgccgccacagtagcagggaccggagtctcgagccgcggcctcccggaccgtgctgcccaggccagctcagggacagccgggagtacgaaagccccaccctctggggcaccccgggagcggaggcgggagcggggacgcgagcaacctctccccctgttggagagaaaagacccttaccactcgggtgagggaaagaagagacccctggaggggacgcctctctcctgcctagaggcgaggaagacccctgtactggccggggaggagacccccagaagtggaaagaagggagctttccgtagggaagcagagtgagaccaccctagcgcgcccccgcccctccaaacacacactctcaacagttcaggactttggaggcaaagagagacggggctgtgcctgtggagtaggcaccctcggcccaccactattcacaggagacaggagtccttacgttcagaagccactccagggaaagaagaggaatcggctttcagccttctggagaggggaagacctccccctcaacttcctcgtgcctagacagtggaacggggtggagcccctccgctcctatctccagcagacagaaagagccctccacctcagaaagatccagtttgggggggaggggaactcccccaagggggaggagacaactcctggttgggagaggctcctcccctcctcccccgggtaacaagcagggtgtggggggtgtgccaccttccccaagtaggacctccttctcctccccctccccctcctccaaccttgactcctcatcctcaggggacccagttcccctcaccaacttgggaggctcagcctcgtccaggaagagccactgaggatgagagccgtcacctgcctctgaagaggggaatccctccaaccccaaactccagtaccaggtggttccctccctttgccggaggaaccttggagacaggttagtgctttctttcatcttctctctgtcattgtctggcactagtgggtgtagggggttgagctggtggatcgtgggtttcactgccggggaagacagagtgatgactcagaaaatccaatgggaaatgtgatccaagggagctcctggatttgaacccacatcttgctgcagaagctctgagaaatgggtttcttagtgtttggggactaaagggatgggattcattttaggtcccttagggaagtggatgttttcatgctgaggaaaagggttatcggaaaacagctgcattttgagaacatgcatactgtgtagcagtgatttacacaacccaaccagtggtaagattcccataccacccttcacccttgggccttttcccctggagagtgggctgtcatgaaaatcacggtggcatctggggtcctggccttgcccagggcatgccgaggtcagcttagtgttcaccagaggtgttccctccagcttactgcaattatagctcccttgacaagaaaagcaatctgttcctgctcatcctatctcagataccaagaggcctcctctcctgacatttccattcctagctggatgtatgcctctgcccataaaatccaaagggaaaatgggaatcccacatgttctgaggcgagaagaaagtgtgcaggggaatgccaactcccgggttaaagtgcttcc

SEQ ID NO: 22639 - DNA, 1107 bp, Artificial sequence
  DNA replication origin
atggcaaaaccccgtctctactaaaaatacaaaaattagccaggcatggtggtgtgggtctgtagtcccagctagttgagaggctcaagcaggagaatcatttcaacccaggaggtggaggttgtagtgagctgagatcgcaccactgtactccagcctgggcaacagagcgagactctgttgaaaagaaaagaaaaggggaagggaaagggaagggaagggaaggggaaggggaagggaagggaaagggaatggaagggaaggggaaaggaagggcaagggaaggggaaggggaaggaaagggaagggaagggaaagggaaggggaaggaaagggaagggaaggggaagggaagggaggggaagggaagaggaaaggaaggggaagggaaggggaaggggaagggaaggggaaggaaagggaagggaaggggaagggaaggggaagggaaggggaagggaaggggaagggaagggaaggggaagggaaaggaagggaggggaagggaggggaggggacactgtcttcgttagtctccccgacacacaccttcttagcaggtaacccatcctccagccttgggaattataaaggctcattccctccagcgagatgcaggcaaaaatgcacagaatgccagctcagagtcaaaggaaagcaaagcaactcatcagagtacaacggttttgaaacaagcttcttagctcttacctgggcgattgtatcctgctgagtcctgggtggggattgggtacattggtgatgggccagggtagaggtggggagcttgtgggtgcccataagagttcactgccaaagcaagacaagagttacttgagttggggggggcgggtcactgtactcaacaaagcagggaagaaaaaaatatacccttgctcccatcctccttctctcttccctgccctgttctgtagctcctgcaggcatgaaggctttctgcagaagctgtcagtcctcaccactgagggtaaaaagaaatggatagtacaattgtgaaataggaaagatataaggaagaaaaatatagaaacacagggccaggtatggtggctcatgcctgtaatcccaacactttgggcagccgag

SEQ ID NO: 22640 - DNA, 1100 bp, Artificial sequence
  DNA replication origin
agtgtaatgtaagtgagaaatacatgtttgttgttgtaagccacttggattttggggttgttggtgatacggtgtaatccagttataatgtgacttattccagggagagagctatagttttaggaatatggtttgctttctaattatgagcttagattgtaaagactctgagaatcaatgattgttatttcagggaatatgtgtgcatgtatacctgtctacgtgcatgtgctggttaggcccaatcattaatttgtggagaacttaaaattcccttatccttcccttatgctttgtcattcccctttcccttttcttactaaataatttgattctaaataaagcagtagcaagataggtgtctatggtgaggtggctgggagagcagcagtggcctggcacagggggagagctttagcagggtgagaagggtgactatgcagggtattggcttgacagtggttctggagcccaagcagagtgagaagaacatcccttaggggtgggaaagtgtcctggcatggggaaccagagcgaggagatgtccactcctggcaatggcccagtgcagggtgtcagaggataagattgaggagggtgtccatagtaggggtagcctgatgtgagaggtcagagtctgagaggtaaagaaggcatctatgtggtgggatagtcaggtgcagtgagttggagtgcaagcagggtgaggagggcatccatgtatgaggttaccttctatagggagtcagagtcgcaaatggctgagcagagtactctagggccagcctggtatgtatgtcagcatgtgggagaggtgaggagggcacccatgcctagtgttggcccagttggggttgggactcagcacttaagcaggatgaggagagagagcatccttgcagagggtagacctggtgtggtttcagagaccaagcatgataaggagggtgtccatgtggtggggtagcccagtgagggaactcagatcctaagtagggtaagatggacattattgctgggggatggaggacctgcatggagtgtcagagcccaagcaggatgaagaaagcttctatgcagagggaggacttggtgtgggt

SEQ ID NO: 22641 - DNA, 1000 bp, Artificial sequence
  DNA replication origin
ctcagatcctaagtagggtaagatggacattattgctgggggatggaggacctgcatggagtgtcagagcccaagcaggatgaagaaagcttctatgcagagggaggacttggtgtgggtttcagaaacttagcaggataaggaggtggtccatgtggtaggatagcccggtgaggaaatcagacccctccagggtgaggagggcttccacccatagggtgaccttgtgtggagcattagaacctaagggggtctaagtggtgactaggggaccagcatcaggaatcagagtgcaagcagagtgaggagggctttcctgcagaggaatggcctagcacagggagtcagagccttggcagggtgagggggatgtttgttgggggatgttcatgggggtggggagtgggctggccctttgccggcactctcagagtgaggagggagggcatccgcgcaggggatggtggcttggactggggagtcagagcccaactaggaagagagggacatcttagcaggtgggagattgacgacatccaggagattgatcaaataaggaataagtgaaagacaatgaaagcaggtttcttagtgtcacagaaaggagttaggaatgtgggaagggagaaaactagaatgaaacttgtggtgttagattggaattagaggaattagtgtgaactcatggtgttcaatatatttagatatagaaataatatagaaatatagacgtgtgtgtttgtgtgtgtgtgcatgcatgtatgcatgtgtgttatgcaggagaaggaatcagctgggggagattaaaaggaggatcatttgcggagagttgagggcagagaatccaggtgtgagctgggagcatgtctatggagagattccacatgaaggatttaatatttggagtgttttcttctaggcctttggaaaaagtcatatttagtactttgtttaagtttatccccttctatactgtgattctatataattctcctaactg

SEQ ID NO: 22642 - DNA, 1180 bp, Artificial sequence
  DNA replication origin
cccccccacctccctcctggacggggcggctggccgggcagaggggctcctcacttcccagtaggggcggccgggcagaggcgcccctcacctcccggacggggcggctggccgggccgggggctgacccccccacctccctcccgagcggggtggctggccgggcagaggggctcctcacttcccagtaggggcggccgggcagaggcgcccctcacctcccggaaggggcggctggccaggtggggggctgaccccccccacctccctcctggatggagcggctggccgggcagaggggctcctcacttcccagtaggggcggccgggcagaggcgcccctcacctcctggacggggcggctggccgggcggggggctgatccccccacctccctcccagatggggcggctggccgggcagggggctgacccccccacctccctgccggacgaggtggctgccgggcagagacgctcctcacttcccagacggggtggctgctgggcggaggggctcctcacttctcagatggggcggccgggcagagacgctcctcacatcccggacggggtggcagggcagaggtgctccccacatctcagacgacgggcggccgggcagagacgctcctcacttcccagatgggatggcggccaggaagaggtgctcctcacttcctagatgggatggcggctgggcagagacgctcctcactttccagactgggcagccaggcagaggggctcctcacatcccagacgatgggcggctgggcagagacgctcctcacttcccagacggggtggcggccgggcagaggctgcaatctcggcactttgggaggccaaggcaggctgctgggaggtgtaggttgtagcgagccgagatcacgccactgcactccagcctgggcaccattgagcacggagtgaacgagactccgtctgcaatcccagcacctcaggatgccgaggctggcggatcactcacggttaggagctggagacaagcccggccaacacagcgaaaccccgtctccaccaaaaaaatacgagaaccagtcaggcgtggcggcgcgcgcctgcaatcgcaggcagtcggcaggctgaggcaggagaatcaggcagcagtaccgtccagcttcagctcggcatcagagggagaccgtggagagagg

SEQ ID NO: 22643 - DNA, 953 bp, Artificial sequence
  DNA replication origin
agccccccacctggccagccgccccttccgggaggtgaggggcgcctctgcccggccgcccctactgggaagtgaggagcccctctgcccggccagccaccccgctcgggagggaggtgggggggtcagcccccggcccggccagccgccccgtccgggaggtgaggggcgcctctgcccggccgcccctactgggaagtgaggagcccctctgcccggccagccgccccgtccaggagggaggtgggggggtcagccccccgcccggccagccgccccatccaggaagtgaggggcgcctctgcccggccacccctactgggaagtgaggagtccctctgcccagccagccggcccgtccaggagggaggtgggggggtcagccccctgcccagccagccgccccgtccgggaggtgaggggcgcctctgcccggctgcccctactgggaagtgaggagcccctctgcctggccaccaccccgtctgggaggtgtacccaacagctcattgagaacgggccatgatgacaatggcggttttgtggaatagaaaggggggaagggtggggaaaagattgagaaatcggatggttgccgtgtctgtgtagaaagaggtagacgtgggagacttttcattttgttctgtactaagaaaaattcttctgccttgggaacctgttgatctgtgaccttatccccaaccctgtgctctctgaaacatgtgctgtatccactcagggttgaatggattaagggcggtgcaagatgtgctttgttaaacagatgcttgaaggcagcatgctccttaagagtcatcaccactccctaatctcaagtacccagggacacaaacactgcagaaggccgcagggtcctctgcctaggaaaaccagagacctttgttcacttgtttatctgctgaccttccctccactattgtcctgtgaccctg

SEQ ID NO: 22644 - DNA, 1112 bp, Artificial sequence
  DNA replication origin
gagcccagatgtgaatctgtacataccaagctttctaatttttcagtagtttccaagcatctttttttttttcttgtttcttcattgatgtctttttttttttttttttttttttttgagacacagtctctgtcgcccaggctggggtgcagtggtgtgatctcagctcactgcaacctccgcgtctcacagtcaagcaattctcatgcctcagcctcccgagtagctgggactacaggtgcccactacacccagcttattttggtatttttagtagaaacagggtttcaccatgttggccaggctggtcttgaactcctgacctcaggtgatccacctgccttggcctcccaatatgctggaattattgatatgagccattgtgcccggtcatgtcattgttgccttaaccaagcctcttttaatttttcaaacggaagagcccctgtccctcagttactgctgctgagccctttcaagatgactcagtgaggagggggaaaagcagaagcggtgtgggaagaggcggggtctgggccagctgctggtcctgctctcctccctcctttggcctctaggctcccaggagtggtttggaacctgcgccgtgtgctctgggggctgtggcagggcaggggcggcttggaacctgcgccatgtgatctgggggctgtgtcagggcagcgggagtcctcgtgtcccctgcgcacaacacagacagaaggctgggtccacccagtgggcggtcgggtgccaggccagtgcttaccccgccatgttttcaagcccgaggccagctggctgcaggtgcagggctatgcgtcaggggtcagggtgcacacatccctgcaggtctcggggctcctgggttgcttctggaagggcccggatggggcctgactggagctgccgaggggtggagcttctgggaaaaggatccctcctagggggagtgtcttgggcctggggccacgtggcacggagagagacgggtccatggcagtgtctgcttttctctgtgaaggcaaagggcctctgagggagtattacagccgcctcatccaccagaagcatttccagcacatccaggtctgcaccccctggctggaggg

SEQ ID NO: 22645 - DNA, 884 bp, Artificial sequence
  DNA replication origin
gggcagaaggggtgcgagcgactctggccaggccccagggacggaaccgggtctggcggccctgaccggggagagcccaggaactcacgtagccggagcgccgggggtttcagcacggagacccatcccgtctgcccctggactcccgcgagccccgcgggcctctccgctcgccccgccgcccacatgccaggggaaggagcgcagtgtgcgcgccgccaggaagcggcgatcgaaaccctgcagcaagagttcgatcccgcgttctcctcgggcgccatgacgtgggcggggccgcagcgttgccgggagacctggaggaagccggcctggactgaagagggggcgggtccggggcagtgcgcgggggcagggagggggcggggcctggggggtagggtcaggaggtgcgtcctgggggcggactctagggcggggctaaggtgagccttaggagggcggggcctggggtggggccaggatgagcgccatgagggcgaggcctggggtagggccaggataagcctcactggggcaggtcctgggtagagaccaggttggcgggtcttggggcggggccaggatagggcgatcctggaagctgggcttcggaagcgtccaggttggtggcgtcctggaggcagtgccttgcgtgggggcaggataagagtcctggaggcgggcattagggcggggataaacgccattgggttcaggaggcgggactcagagcagagcccaggagacaggtcttagggcggggctaaggccagacccagagaagggctcaggaggcggggcaggggcggggcgttgactatgtcttggcacatggccaggcggtgcgcggactctgggaggcggagcttaggacgggcccacgt

SEQ ID NO: 22646 - DNA, 1417 bp, Artificial sequence
  DNA replication origin
aggtgagccttaggagggcggggcctggggtggggccaggatgagcgccatgagggcgaggcctggggtagggccaggataagcctcactggggcaggtcctgggtagagaccaggttggcgggtcttggggcggggccaggatagggcgatcctggaagctgggcttcggaagcgtccaggttggtggcgtcctggaggcagtgccttgcgtgggggcaggataagagtcctggaggcgggcattagggcggggataaacgccattgggttcaggaggcgggactcagagcagagcccaggagacaggtcttagggcggggctaaggccagacccagagaagggctcaggaggcggggcaggggcggggcgttgactatgtcttggcacatggccaggcggtgcgcggactctgggaggcggagcttaggacgggcccacgtggggaggggcccagggtccgggaggcggtgccgagtcccggctgggctgcgctcaggaggcgggccctgggaggcggagcttagggaggggccggtggcgggagggacccagggactgggaggctggtcggggctgggctcagggtccgagacctagctgggcttggggcggggccgagacggagcgaggggtccagggtgtgggaaacggggaggggtttgaggagaggatcggaatgtggctcaagttcgggaggcgttacctgcggagggtttgaggcaggcccaggagcgagcccacggtctgcctacgcggggccaggggcgggccccaggatccggagcttcgggcggggcggagtccgagtttggggcccgggaggcggggccagttagggtgagggtccctgggatcgacgggtcaggtcttgggctaacgtaggcactctcgcagttcctccgccttcaggaaggtctttttagcagaggccttacgggtgcgcgcttcggtcctggaggccttatcctaacctcctctccatcagcgccacccgtctggggcccgaaacgagggagctttccctctgtcccccagcctttggactgtcaccaaacaagccattcgttcatcaaaaatacttattaagcgcctaccatgtgcctgacaagggagatgtaacggtgagaaaaagtaggtgtggtccaggccctccaggggctcaggggctcgtggaagaagtggacattgaaatacttatcacacaaatgaggataaaagtacgatagcgatatctgccacgaaggtgagcagacagagctagcggggcttgcaggaggagttttgatcttgcagggacaggaaggaggagttagctcctgcggggtgggattgggggtggtggtgatatagacgtggggacagagtggaaaacaacaaaaatataattattttagttcaaagttattgtgtcttg

SEQ ID NO: 22647 - DNA, 1170 bp, Artificial sequence
  DNA replication origin
catgaactggggtttatttttatatttgatgaaaaagagcctaaaccttatctgatttgggataaagaaaaaggagcattaactttgactatgcctttagctccagccacctttttaagaggaaattgctgggcaggttggggagggcttgtcatggaacgaaactgtcagccggacccagtgtgaggaggggaggtgataaaaggattatagggtggaagagcagaggctgaggaagaattcaggcctagctcagcctggcgaggaggggagaggtcagatgggtctgtagaaaaggaagattagaaagagtcagcgatgcttggggttgggactgaggggacaggtgggatggaaagaaggaagatttgggatgagttgcactgggaacagactagggagggaccgatgtgtaaaagaatgcctggacatcagtcacctcagacaatttgcccattttatgacaagaattatctagatcttgtaggatggaaaaattgaaagtgtcattttctggctatttggaaccactgtcgagtttgtattggggtcaagtggcattgtggaagaaaataaggcatttaggttttaggtcaggtgtgagttgaagaggttttaggtttttaagaacacaggctaagggagaagaaaggggaatggagggcggaagcttgcccatagtgaaggaggcaagcccagagaaaagagagaatagagacatgaagagaaggggtggggcattcttgccttccagaaaagtgggaaacgggttggggcacagaaataaagggttggggtgcagagataggaggtcaggttgtggaaataagggatcagggcacagaggtaagagggtggggcatggaaataagggatcagggcacagagataacaggtcggggttcctgggcctccctcagaaaagcgggacttgctgctaagggtgaaggaccaaggcaggcagccctgcgtggtctgacacctctgaaacctgggtgaataatcagagaggcgtccctgcaatgattaaacaccaagggaaggctgccttccctagtctgtgaccggcaccggagttttgggtccatggataaaacgtgtctacttggtctctaccagaaaatgaaaggaattgaaattaagagaagggagagattgaagtgtggtgcc

SEQ ID NO: 22648 - DNA, 1298 bp, Artificial sequence
  DNA replication origin
tggcaagccccgaggcagggatggccggcccaggagggaggaggacgacgtccctcccgaagagaagaggctgcggctcttgctggaggggggaagcgcacagccccaggactgcgaggacgggcaggacgcgccgcggtcggccaggaaggagaccggcacccagacaggtggcgacggcagaggagtaagtgacgcgggcgcgggggtcccggggtgccgggggcgcagggtaggggcggcgggaggccccgtggcctgccctgggttgaagttggtaattgagcggcaactccggcgggcgcggagtgacagctcgtgtcggcctccgagacgccagctgccccttctcggctgtgtggcttcgacttcctgattctcccacgacgtccctggccgggagacgcgctggactctgcagctagccaaaaggggagggggagccccgcgtcctgggggcccctagcaggggaagggccgggggttgcgctgagccgcctgtctggggcatctgtctgggactctgccggtgcctctcacctggcgaggggcctgtggtgggggtaggggggaagtccctggcgccaggcttggccaagccctgctctgctgggctgcgggctggcggcgctcacccagctcctcacctgtcccgcatcttcctgtttttcttccctttctggttgggcagcgagagttgagaggaggcagatggcttccatcccagaaatcgctctcctctttccatccctacagagagggacagagaggcaaagttccttgcatcccccggggcactgtccctgtgagctcccggtgtcctgcacatgtgagcccctgagtcagcgggcctgtgagtgtgggatggggctccgtggccagcctggcctcctggggttcactttctgctttcctacgccaactcttcctgtgtggttttgctggccttccactgaggaggcacataggtttggaggacagatgagggcccactggagagctgtacccctcagtgaggtccgccaccttgatggtttttgatggataatggggttgacctcttggttccttccacatgtttttatgtttgaccatttgctcagctgagcttgtcttaataattggattcgtggttaatgagccccacatgggcgagagggcggccttcattctgaacccatttaggcagcacgggcagccctcctcgccgtgggctgcatcagagccccccctgcccagtcttggggttgctcatggtgacatcctcatctccccgtgcacgttaccgcattcagagc

SEQ ID NO: 22649 - DNA, 1829 bp, Artificial sequence
  DNA replication origin
ggtgccggtctccttcctggccgaccgcggcgcgtcctgcccgtcctcgcagtcctggggctgtgcgcttcccccctccagcaagagccgcagcctcttctcttcgggagggacgtcgtcctcctccctcctgggccggccatccctgcctcggggcttgccaggggcttcggagctgccggaagggctggccatggccccgggggctctgcctgcacctggggaagaggaaggacccggagcgagcggcctctcggcggagctggggcgtctgagcgcgggctcggtgggtccgcgcggcgcggagctgggcatcggggccggcgcggactcctccgcgggccgctcgtggtcctctggcgccctctgctggccgctcgcgcgcaccgtggacaggtagggccctggcctgcgctgcgctcacctgccccggaccaagcagtcgctgtctcctgcctgtggccatgcccgctctgaccaggccctgcacctcctccccaccccagccaggttgcaccccgatggactccctgcccaaggaggagagaagagaagggacgccccgagagggtggacatcggccacagccaccttgtctttgctcttaccctgtgtcttccatgatttggaggtggtaggaaaaccgaggctgctcaaaactcgtggagaattccgcctgcaggatgacatgaatgcaccttcccattgcctaccaacagatcttttctgagcatcactgtggaccaggcgtggtgatgggggaggggatattgtggtgaacatgacaggcattgccttcacccagtggggctcagcgctgggtgagaaggcattgagaatggacattgtcaattgggccaaaggaggccaaggagaagtgctgggtgcatgggaactaaaaaagacaggaggctcagcaggtcttggagctgggagagggacagcagcagcggctgttccaaaggaagcaacagctgagagaagtctcagaggttgttctcagcccagtggagggtgttcaggcagagggaacagcgtgtgcaaaagcccagaggctgggaaagaagcagaaagaggacggtggggctggagcgtggtgtgcaaggtgagagaggtgtggtgggtggacagatggccttggacccagccgtgcaggggcagaggagatagggaatccttgcaggcccccagccggggctgaggcacagagacaatgcaggtgggcaaagggaggagacgtggagaaatattttggaggcatgccctgatgaatgagcccaggatgcacccttagtgtcagtgtggagctccttccttggctgtgtgatgagctgaactcgggggtattttctggacatggaggtgctacacccagagtccaggacaggctaagtgagcaccagcagctcctggcccacctcaaaagcaggagagacaggggagactggggaggccggggtagaaggggaagccaggaaggcaggagaggccacagaaacagaggaggccagggaggcagaggaggcaggagaggctggggaggctgtgtcctttccatgattctgcccaggatcctaggcccctgtactccctgagcttccccaccccaagtgctggaaccatgttgcacaatggtctccccactaagctcctgatggcagcccctaccctgctgtgctccctatttcaaccctaacagctctcacagtgggcagcacagagtaggtgctcaggaaacactggtggcagagcacatgggtctgctcagcaccttcctccctcctccagctctccctatcatgaaataattctgataacgacacatggac

SEQ ID NO: 22650 - DNA, 1008 bp, Artificial sequence
  DNA replication origin
cccgaggcagggatggccggcccaggagggaggaggacgacgtccctcccgaagagaagaggctgcggctcttgctggaggggggaagcgcacagccccaggacggcgaggacggggaggacgcgccgcggccgggcagggtggagaccggcacccagacaggtggcgacggcagaggagtaagtgacgcgggcgcgggggtccgggggtgccgggtgcgcggggatgcggggaacgaggggtaggggcggcgagaggctccgtggcctgccccgggttgaagttgggagggcggccttcattctgaacccatttaggcagcacgggcagccctcctcgccgtgggctgcatcagagccccccctgcccagtcttggggttgctcccggatgctgtctgggaggcttggtcatggtgacatcctcatctccccgtgcacgttaccgcattcggagcttgggtcacctggacactgaactcaggcgaattttctctgagatcccgggagaaggaggacagttctttggaaggttttgcagggccgatcacggaaaggatgagaagggagaggtcctggtcggggacacaattacagtggcagtgtaacaccaggaaactttattgcgtgaagtccttctcactccctctacctccttcttttacgtggactctgccaaagaccaggataccagaatgcagtggagtgaccaagtgtagtgggatcttgggaacgcgagtctggagccaggcggctggggtttgcatcctggttctgcccctccttagctggctgacatggcacaagccacttaccctctctgagccttactgtcttcagtggcaaatggatctgtcaacgggccccattgcctggggttgttactgctgagattaagggatgctcgtccatagaagcacttagcgttgtgcctggcacatagtgtatggtggataaatgggacttaggactaaaactcatgccttggtgtgtttttgcagtgatgtttt

SEQ ID NO: 22651 - DNA, 1746 bp, Artificial sequence
  DNA replication origin
cggcgcgtcctccccgtcctcgccgtcctggggctgtgcgcttcccccctccagcaagagccgcagcctcttctcttcgggagggacgtcgtcctcctccctcctgggccggccatccctgcctcggggcttgccagtggcttcggagctgcgggaagggctggccatggctccgggggctctgcctacacttgcggaagaagaaggagcctgcgcaagcggcctctcggcggagctggggcgtctgagcgcgggctcggtgggtccgcgcggcgcggagctgggcatcggggcggcgcgggctcctccgcgggccgctcgtggtcctctggcgccctctgctggccgctcacgcgcaccgccaccacgccgggcccgggcctgcgccgctctcacccgtcctggcccaggaggtcgctgtcccttgcccgtggccaggcccgctctggccaggccctgcacctcctcgccaccccagccaggttgcaccccgatggtctccctgctcaaggaggaggaagagaagggacgccccgagagggtggacattggccacagccaccttgtctttgctcttaccctgtgtcttccatgatttggaggtggtgggaaaaccgaggctgctcaaaactcgtggagaattccgcctgcaggatgacatgaatgcaccttcgcattgcctaccaacagatcttttctgagcatcactgtggaccaggcgtggtgatgggggaggggatattgtggtgaacatgacaggcattgccttcacccagtggggctcagcactgggtgagaaggcattgagaatggacattgtcaattgggccaaaggaggccaaggagaagtgctgggtgcatgggaactaaaaaagacaggaggctcagcaggtcttggagctgggagagggacagcagcagcggctgttccaaaggaagcaacagctgagagaggtctcagagagttgttctcagcccagtggagggtgttcaggcagagggaacagcgtgtgcaaaagcccagaggctgggaaagaagcagaaagaggacggtggggctggagcgtggtgggcaaggtgagagaggtgtggtgggtggacagatggccttggacccagccgtgcaggggcagaggagataggggatccttgcaggcccccagccggggctgaggcacagagacaatgcaggtgggcaaagggaggagacgtggagaaatattttggaggcatgccctgatgaaggagcccaggatgcacccttagtgtcagtgtggagctccttccttggctgtgtgatgagctgaactcgggggtattttctggacatggaggtgctacacccagagtccaggacaggctaagtgagcaccagcagctcctggcccacctcaaaagcaggagagacaggggagactggggaggccggggtggaaggggaagccaggaaggcaggagaggccacagaagcagaggaggccagggaggcagaggaggcaggagaggctggggaggctgtgtccttccccagattctgcccaggatcctaggcccctgagcttctccaccccaagagctggaaccatgttgcacaatggtctccccaactaagctcctgatggcagcccctaccctgctgtgctctctatttcaaccctaacagctctcacagtgggcagcacacagtaggtgctcaggaaacactggtggcagagcacatgggtctgctcagcaccttcctccctc

SEQ ID NO: 22652 - DNA, 1360 bp, Artificial sequence
  DNA replication origin
ccccacctccctcccggacggggcggctggccgggcagaggggtcctcacttcccagtaggggcagccgggcagaggcgcccctcacctcccggacggggcggctggccaggcggggggctgatccccccacctccctcccggacggggcggctggccgggcggggggctgaccccccacctccctcccggactgggcggctggccgggcggggggctgaccccccacctccctcccggacggggcggctggccgggcagaggggtcctcacttcccggtaggggcggccgggcagaggcgcccctcacctcccggacggggcggccggccgggcggggggctgacccccccacctccctcccggacggggcggctggccgggcagaggggctcctcacttcccagtaggggcggccgggcagaggagcccctcacctcccggacggggcggctggcggggcggagggctgaccccccccccacctccctcccggacggggcggctgccgggcggagacgctcctcacttcccagacggggcggttgccaggcagagggtttcctcacttctcagacggggcggccgggcagagacgctcctcacctcccagacagggttgcggcccagcagaggcgctcctcacatcccagacagggcggcggggcagaggcgctccccacatctcagacgatgggcggcggggaagaggcgctcctcacctcccagacagggttgcggcccagcagaggtgctcctcacatcccagacagggcggcggggcagaggcgctccccacatctcagacgatgggcggcggggaagaggcgctcctcgcctcccagacgggatggtggccgggcagagacgctcctcactttccagactgggcagccaggcagagaggctccccatatcccagacgatgggggggccaggcagagacgctcctcacctcccagacggggtggcggctgggcagaggctgcaatctcggcactttggggggccaaggcaggcggctgggaggtggaggttgtagcgagccgagatcacgccactgcactccagcctgggcaccattgagcaccgagtgaacgagactccgtctgcaatcccagcacctcgggaggccgaggctggcggatcacccgcggctaggagctggagaccagcccggccaacacagcgaaaccccgtctccaccaaaaaaaaaaacgaaaaccagtcaggcctggcggcgcgcgcccgcaatcgcaggcactcggcaggctgaggcaggagaaccaggcagggaggttgcagtgagccgagacggcagcagcaccgtccagctttggctcggcatcagagggagaccg

SEQ ID NO: 22653 - DNA, 974 bp, Artificial sequence
  DNA replication origin
ggggtcagccccctgcctggccagccgccccgtccgggagggaggtggggggatcagccccccgcctggccagccgccccgtccgggaggtgaggggcgcctctgcccggccgcccctactgggaagtgaggagcccctctgcccggccagccgccccgtccgggagggaggtggggggggtcagccccccgcctggccagccgccccatccgggagggaggtgggggggtcagccccccgcccggccagccgccccgtccgggagggaggtggggggatcagccccccgcctggccagccgccccgtccgggaggtgaggggcgcctctgcccggccgcccctactgggaagtgaggagcccctctgcctggccagccgccccgtccgggagggtggtgggggggtcagccccccgcccggccagccgccccatccgggaggtgaggggcgcttctgcccggccgcccctactgggaagtgaggagcccctctgcccggccacgaccccgtctgggaggtgtgcccagcggctcattggggatgggccatgatgacaatggcggttttgtggaatagaaaggcgggaagggtggggaaaaaattgagaaatcggatggttgccgggtctgtgtggatagaagtagacatgggagagttttcattttgttctgtactaagaaaaattcttctgccttgggatcctgttgatctgtgaccttatccccaaccctgtgctctctgaaacatgtgctgtgtccactcagggttaaatggattaagggcggtgcaagatgtgctttgttaaacagatgcttgaaggcagcatgctcgttaagagtcatcaccactccctaatcttaagtacccagggacacaaacactgcggaaggccgcagggtcctctgcctaggaaaaccagagacctttgttcacttgtttatctgctgaccttccctccactgttgtcctatg

SEQ ID NO: 22654 - DNA, 1234 bp, Artificial sequence
  DNA replication origin
gcggcgggcggggggcggcggccggaggagctgggggccgggccagcgcgccgagcactgccgagcggatctgacacctgcgtcgagagccgccctcccagctcctcgcccgcacccgagccatcgctggcctcgggggaagagaggcgatggatcgcgcgcggggagcgaaaagggagcgcgagggcgctccgaggacgcgcctccccacccgcccccaaaccgtcttcactgagaaagggaaacggatggggggggtggggggcgaggtttgctcccaactcgaaaccgcgagattagtcccttccgttgtacgccctccccgccctcacattccctgcttaggccccatcaatctgcgcctggaaccccgacacgagccccctaccccctcgggcgcagggtcctgccggcatcccgacgcctcccgcccagcccttccgccggccgccgcccggagtctccgcttacggtggttcctccctccggtaggcaaagatatggagacaaagatcattcatacctagaaggtctttatccgggactggagtaaagacagtacctctgtatattgagaggcaaatttaaaaccacatgataaatttcctggctgaagcgggtttggagatacaggcggggtggatagcgccagctctgccccctagaaaccggcgtaaaccttggacaagttagttgctacgcttcctctgagcctttgttgtgaaaagataaaagagtacagtccggagtcgttgtgagaatgaaatgagatattttaagagcattttgtaaattctaaaactatgtataaaaaataaaagtatagcccaaaggaggctaagaatatgaatgttcaactacgctattacattttcttaaggagaaaaaaaaagggctacagacgacctcccaggtttacatggaagattcacttccaaataacttcagtcaccagagacaccaggtgtgaggtacggtaatgtgctcaccagtttgccttcttgctggtctcagccctgtctcagtgacctcagccaacaacttttcactgctcctctcccagtcaattgacaatataatttcattttctgcttttaaaaaattttttgactaatttccttcagcgtctcgagagtcctttaaaagatgtagcataacccagggtggtaacttctggatccagactgcccggattggatttatggttccactccctatgtgaacctctgcagta

SEQ ID NO: 22655 - DNA, 774 bp, Artificial sequence
  DNA replication origin
ggggagggggtcgggataccgggagccgcctcctttctcctccgccgactgcggctcccgcaggctggccgggcgtcctcgcacactcgcccagtttctcacagcctcgcgtcccgtcagcttctccctcaccccactcccacacactctcactcccacacactcacacccggccgctcctcgttccctcactcgcctgccgcgcgcgcgcgcgaccccgctcacacacagcgcgcgcgacgccggcggagaccgccccgctccctcagaccgaacgccgcccgcccgcttgctgaggagcggcgcgcgccccggccccgccctcctggcgccgcggcgcggcgggcggggggcggcggccggaggagctgggggccgggccagcgcgccgagcactgccgagcggatctgacacctgcgtcgagagccgccctcccagctcctcgcccgcacccgagccatcgctggcctcgggggaagagaggcgatggatcgcgcgcggggagcgaaaagggagcgcgagggcgctccgaggacgcgcctccccacccgcccccaaaccgtcttcactgagaaagggaaacggatggggggggtggggggcgaggtttgctcccaactcgaaaccgcgagattagtcccttccgttgtacgccctccccgccctcacattccctgcttaggccccatcaatctgcgcctggaaccccgacacgagccccctaccccctcgggcgcagggtcctgccggcatcccgacgcctcccgcccagc

SEQ ID NO: 22656 - DNA, 1174 bp, Artificial sequence
  DNA replication origin
ggcttcacccggtgaatcccgcaccggggctgcaggtggagctgcctgccagtcccctgcgtgcgcccgcactcctcagcccttgggtggtcgatgggactgggtgccgtggagcagggggtggccctcgtcgaggagactcgggctgcacaggagcccatggagggggtgggaggctcaggcgtggcgggctgcaggtccggagccctgccccacgggaaggcagctaaggcccagcgagaaatcgagcacagtgccagagggctggcactgctgggggacctagtacaccctccgcagctgctggcccaggtgctaagcccctcattgcccagggcccgcagggccggccggctgctccgagtgcagggcccgccaagcccacgcccgcccggaactccagctggcccacaagcgccgcgcgtagccccggttcccgctcgcgcctctccctccacacctccctgcaagctgagggagccggctctggccttggccggcccagaaaggggctcccacagtgcagcggtgggttgaagggctcctcaagtgccaccaaattgggagcccaggcagaggaggcgccaagagggagcgagggctgtgaggaccaccaacatgctgtcacctctcactaacagtcaagacaatgaaaaaaggccttgaatacatttcagagacctatgcagcagccccttctattgcaggccctgagacctaggaggggagaatgatttcatgggccaggcccagagctccactgccctgcacagccttgggacactgctccctacctctcggaagctccagctccagccagggttcaaaggggccgaagtacagcttaagctaccactttggataatacaagttgtaaatggcttccacatggtgttaagcctgcaagtacaaagagtgcaagagtggtgggttcttggcagcctctgcctagatttcagaggatgtatggaaaagcctgggtgttcaggcagaaacctgctgcagcagtggagcccacataaagaacctctactagggtagtgcggaggggaaatgtgggattggaggccccacatggagtcccttctggggcattgccttgtggagctgtgagaagagggccaccatcctccagacccaagaatggtagatgcacctgcagcttgcaccctga

SEQ ID NO: 22657 - DNA, 1002 bp, Artificial sequence
  DNA replication origin
cagctataggtgatggtctcaccgcttggtgataggcgaaagtcccatctgggtcgccaaaatgtgtccggaattggtgggttcttggtctcactgacttcaagaatgaaactgcggacccttgcggtgagtgttacagctcttaaggtggtgcgtctggagtttgttccttctgatgttcggatgtgttcggagtttcttccttctggtgggttcgtggtctcgctggctcaggagtgaagctgcagacctttgcggtgagtgttacagctcttaaggcggcacatctggagttgttcgttcctcccggcgggctcgtggtctcgctggcttcaggagtgaagctgcaggccttcgtggtgagtgttacagctcataaaagcagcatggacccaaagagtgagcagtagcaagatttattgcaaagagcaaaagaacaaagcttccacagtgtggaaggggacccaagcgggttgccactgctggctggggcagcctggtttcattctcttatctggccccacccacgtcctgctgattggtagagcccagtggtctgttttgacagggcgctgattggtgcgtttacaatccctgagctggatacaaaggttctccacgtccccatcagattagatacagagtatccacacaaaggttctccaaggccccaccagagcagatagatacagagtgtccattggtgcactcacaaaccctgagctagacacagggtgctgattggtgtgtttacaaaccttgagctagatacagagtgccgattggtgtatttacaatccctgagctagacataaaggttcttcacggccccaccagagcagctagatacagagtgtcaattggtgcactcacaaaccctgagctagacacagggtgctgactggtgtgtttacaaaccttgagctagatacagagtgccgattggtgtatttatgtctagctcagggattgtaaaggttctccaaagccccaccagattca

SEQ ID NO: 22658 - DNA, 809 bp, Artificial sequence
  DNA replication origin
gagataagaggttggggcatggaaataaggggtggggcacagagataagaggtcggggcatggaaataaggggttggggcacagagataagaggtcggggcacggaaataagggattggggcgcagagatataagaggttgggccacggaaataagggattggggcgcagagatacaaggttggggtacttgcccctcctctacaaaagcgggacttgccactaagagtgaaggagaaggggttgggggtttcttgccccccagaaaggtggagaaggggtagagacacggagagaaatggttggggtacttgccccttccccagaaaagcgggacttgccgctaagggtgaaggaccaatgcaggcgtccctcctgcattgacacctctgaaacgtgtgtaaataatcagagaggtgtccctgcaatgactaaacaccaagggaaggctgccttccctagtccgtgaccggcgccggagttttgtgtccatggataaaacgtgtctcctttgtctttaccagaaaatgaaaggaattgaaattaagagaagggagagattgaagagtggaaaggagaaagtggttgagggacagtgagagaggttggagaagagagtaagaagaggccgcttacccgatttaaaattggtgagatgttccttgggctgcttggtctgaggacctgaggtcgtaggtggatctttttcacagagcaaagagcaggaggacaggggattgatctcccaagggaagtccccggatctgagtcacggcaccaaatttcatgcacgtccatgtgaagagacca

SEQ ID NO: 22659 - DNA, 1142 bp, Artificial sequence
  DNA replication origin
ccacctttttaagagtaaatttctgggcaggtgggggagggctagtcatggaacgaaactgtaagccggaccaggtgtgaggaggggaggtgataaaaggattatagggtggaggagcagaggctgagcaagaattgggacctagctcggcctggcgaggagcagcctggggaggaagggagaggtcagatgggtctgtagaaaaggaagattagaaagactcagcgacacttgggattggtactgaggggacaggcaggagggaaagaaggaagatttgggacaagttgcactgggcacagagactagggagggactgatgtgtaaaacaatgcctggttgtcaggcacctcagaccgtttgcccattttatgacaagaattatttagatcttgcaggatggaaaaattgaaagtgccgttttccggctgtttggaactactattgagtttgtattggggtcaagcagcattgcagaagaaaataaggcatttaggttttaggtcaggtgtgagttgaagaggttttaagtctttgagaacacaggccaaggcagaagaaggaggaaaggagggtggaaggttgcccatagtgaaggaagcaagcctagagaaaagggagagtagagacatggagggaaggggttcgggggttcttaccttccagaaaagtgggaaaggggttggggcacagatataaggggttggggcacagagataagaggttggggcatggaaataaggggtggggcacagagataagaggtcggggcatggaaataaggggttggggcacagagataagaggtcggggcacggaaataagggattggggcgcagagatataagaggttgggccacggaaataagggattggggcgcagagatacaaggttggggtacttgcccctcctctacaaaagcgggacttgccactaagagtgaaggagaaggggttgggggtttcttgccccccagaaaggtggagaaggggtagagacacggagagaaatggttggggtacttgccccttccccagaaaagcgggacttgccgctaagggtgaaggaccaatgcaggcgtccctcctgcattgacacctctgaaacgtgtgtaaataatcagagaggtgtccctgcaatg

SEQ ID NO: 22660 - DNA, 1465 bp, Artificial sequence
  DNA replication origin
tcggtcgcccggttaccttctcgcctggctgtgcacccaagtcttccccgggggcgtccacctcatgtgccggggtccccagtcgccaggctgggctgggggctcgctcggcctccgcggcgggctcccctcgcctcctccccttcctggaggggcgggggcgccgagggcggggtgggaggcgcccggcgcgaccgcggctccccgcccctcccgccgctccgggtgcgggcccggccgcggctcagccaggcctccggggctcgctccgggcctgtcacttcctgcccggccgagaaggtgggggccgcaggccaggggctgcgggccgggctggaggagggggctgcggggaggtgcttccggggcagccggaccccccccccgccgtccctccgcctcccctcggcgccctccgccccctccctcccgcgcgtccctcgtttcctgccggcgcccgttgccatggcgacgcagctcccgggcctctgcgctccaggcccaggggttttttcctctcttgctctctttctcctcttttttacccccttctttctctccgagttctgctcgccggttggaaggacgaaactaagaaagtgctggcctctagtggggaacgcacctctcggagaggagagggagatgggagaagggagggaagtgacgtgagacggggagaaagaaggtattttctggagctgctgggaataaggggtagaaagaaaggatcaaagggaccaacagacagagagggagaaagagcaaagcaacgacccctagagaaacgatagactgggaaaagaaatgaagcaaaggaaaggaaggaaaaggcgagaaaaactttgagaatgagagaaaggagagagaaggttgattgtttaatccctcacctcaactccaagaaggcgggaaagaatgctgcagaaacagctaacccattaggagttgacttcattttcaaagcagcaacctaatgtaacttcctttggatagcatttaagtttgtcatttcagggatttgtgtgtgcttcgatttcaatatgtatatgagttcgaatgacaaaaacgggaaaaggccagagtataacgagatgtagaacaatggggctgtctctgggaacactaaacatttgataggggagccgttgtcgttgtatttatgatatcaacttaccggtttttaattactctctcatcgttcaacattcaataaatatttatagagcgtctactatgtgctaaaccgtggaagcttggattgcatcagtgcacgaaacaaagataactgccttactgccttcattaacctttacagaagggtctgggggatgcctcgtggattaacaactgggattgatgccttttctcttgctctcagtcttttcctaacctctatcctaaacagttattttctctgtcaatccactcttccttttctcctttaaaagcccatgcatggttt

SEQ ID NO: 22661 - DNA, 963 bp, Artificial sequence
  DNA replication origin
aaaagaggagaaagagagcaagagaggaaaaaacccctgggcctggagcgcagaggcccgggagctgcgtcgccatggcaacgggcgccggcaggaaacgagggacgcgcgggagggagggggcggagggcgccgaggggaggcggagggacggcggggggggggtccggctgccccggaagcacctccccgcagccccctcctccagcccggcccgcagcccctggcctgcggcccccaccttctcggccgggcaggaagtgacaggcccggagcgagccccggaggcctggctgagccgcggccgggcccgcacccggagcggcgggaggggcggggagccgcggtcgcgccgggcgcctcccaccccgccctcggcgcccccgcccctccaggaaggggaggaggcgaggggagcccgccgcggaggccgagcgagcccccagcccagcctggcgactggggaccccggcacatgaggtggacgcccccggggaagacttgggtgcacagccaggcgagaaggtaaccgggcgaccgagggccggggaggggcaggacctctgggggcttggctgcgcggggatgtatcctcagccacctccatctgtgtaacgccccaggtacctcccccagttgctttccctgcctacctccggcgctgagctctgcggtccttcggctctgcctgtccgagtcttctggctattcattctgctgcgcttcatgctgtctgtccgtcaccctagctgcctctgactgctcattttcttattcatttttccttctctgactttggtccttccagccgagcatgctgtctagttatctccctgctttcgtggtccgctgggttcctcagcctccagttccttgacttctgcctctgctctctgtatgcacatgtcccagctcacttgggtcagttcattcccggcgcaccactggatccacccccttccc

SEQ ID NO: 22662 - DNA, 971 bp, Artificial sequence
  DNA replication origin
ccgcgtaggagcccatggctggggcgccggcgggcggctcagtcatggcgggctgctcagtcatggtgggctgcaggtcccgagccctgccccgcggggaggcagctaaggcccggcgagaaatggagcacggcagctgctggcccaggtactaaacccctcactgccccgggctggcgggccggccgctccgagtgcggggcccgccgagcccacgcccaccgggaactcgcgctggcccgcaagcgccgagcgcagccccggttcccgcctgcgcctctccctccacacctccctgcaagctgagggagctggctccggccttggccagcccagaaaggggctcctacagtgcagctgcgggctgaggggctcctcaagcgcggccagagtgggtgccaaggccgaggaggcgccaagagcgagccagggttgcgagggctgccagcaggctgtcacctctcaataggacgtgaaggtcggtcggggtctggttgtagaaggctttaaacaacaagctaataaatttatacttcacactgtagacaagttgcaagtcactgaaacatttttaaacagaggagtggatttgcaaatgcagtgtcttggaaatagtaagctggaagcagtgtgaaggatggtttggagagaccagaagcaagcagccaagttgggttgtgcagtaaaccaagcagtgcagtagaggcttagacctcaagagtgacaatagacatggagaggacaaaggccgtacccaccaggctgtaaatctgcattgtgtccctccatcctcccctcgcttctgccctggaggcttatatttagagagctgtactcctaacgtgaggccctgggctttgtctcaaaggtaaaggcaaaagttccttatgtggactacctctgcatttgttattaaacagccttagatgatgccattaattgaatgaactcagaggccttcttgataaact

SEQ ID NO: 22663 - DNA, 1121 bp, Artificial sequence
  DNA replication origin
ccagcggctgcggagggtgtactgggccccccagcagtgccagcccaccggcgctgcgctcgatttctcgccgggccttagctgccttcccgcggggcagggctcgggacctgcagcccgccatgcctgagcctcccaccctctccgtgggctcctgtgcggccggagcctccccgatgagcgccgccccctgcttcacggcgcccagtcccatcgaccactgaggacgactcgctgaggagtgcgggcgcagagcatgggactggcaggcagctctacctgcagccccggtgtgggatccaccgggtgaagccagctgggctcctgagtctggtggggacgtggagaacctttatgtctagctcagggattgtaaatacaccaataggcactctgtatctagctcagggtttgtgaatgcaccaatcgacactctgtatctagctactctggtggggccttggagaacgtttgtgtggacactccgtatctagctaatctggtggggatgtggagaacctttgtgtctagctcagggattgtaaacgcaccaatcagcaccctgtcaaaacagaccactgggctctaccaatcagcaggatgtgggtgggggccagataagagaataaaagcaggctgcccaagccagcagtggcagcccgctcggtcacgctgtggaagctttgttcttctgttctgtgcaataaatcttgctaccgctcactctttgggtccgcactgcttatgtgagctgtaacactcaccgcgaacatctgcagcttcactcctgaagccagcgagaccaggagcccaccgggaggaactaacaactccagacgcgctgccttaggagctgtaacactcaccttgaggttctgcagcttcactcctgagccagcgagaccccgaacccaccagaagaaagaaactccgaacacatccgaacgccagaaggaacaaactccagaggcgccaccttaacagctgtaacactcactgcgagggtccacggcttcgttcttgaagtcagtgagaccaagaacccaccaagtccggacacagtttgacatctcctaattgacttcaatatcctcgacaatcaggcttaaggcacccaagaa

SEQ ID NO: 22664 - DNA, 850 bp, Artificial sequence
  DNA replication origin
tcacgccactgcactccagcctgggcaccattgagcactgagtgaacgagactccgtctgcaatcccggcacctcgggaggccaaggctggcggatcactcgcggttaggggctggagaccggcccggccaacacagcgaaaccccgtctccaccaaaaccagtcaggcgtggtggtgcgtgcctgcaatcgcaggcactcggcaggctgaggcaggagaatcaggcagggaggttgcagtgagccgagatggcagcagtacagtccagcttcggctccacatgagagggagaccgtggggagagggagagggagacggagagggagagggagagggagacggagagggagagggagagggagacggagagggagagggagagggagagggagagcgctcacatcctgtttttttttttttccttgagacagggtctgacagtttgatttttaaaggccaaatctctccagactccaaagaactctgtagccaaacagcagcacatactaatcaggcctgcctgtccttagagcagcagcatagaagcctggagacatggacttccatcccatattcacattcaacagcaaaataaatccaaatataaggcagtgctacaattcaaagactgtctgagatcagatgagattgggcatgttcagcgtgatacgggtagagatgttccctcactccactggcccacagccacatgcagaccaaccctgaagaatacacccaagcggtctgcactcagatcaaaccctgatctcccacaactacatcaacacacaaacaaccaccagaatacaatctaactgctgcaacaataagcaagtcccaagagagtcc

SEQ ID NO: 22665 - DNA, 1302 bp, Artificial sequence
  DNA replication origin
agtagggggcggccgggcagaggcgcccctcacctcccggacggggcggctggctgggcgggggggctgaccccccccacctccctcccggacggggcggctggccaggcggggggctgacccccccacctccctcccggacggggcggctggccaggcggggggctgacccccccacctccctcccggacggggcagctggctgggcgggggggctgaccccccatctccgtcccagacggggtggctggccgggctgaggggctcctcacttcccagtaggggggggcgggcagaggcgcccctcacctcctggacggggcggctggccgggcagggggctgacccccccacctccctcccggacggcatggctggccaggcggggggctgaccccccacctccctcccggatggggcggctggccgggcggagggctaaccccccccacctccctcccggacggggtggctgctgggcggagacgctcctcacttcccagatggggtggctgccgggcggagaggctcctcacttctcagacggggcggctgccgggcggaggggctcctcacttctcagacggggtggttgccaggcagagggtctcctcacttctcagacggggcggccgggcagagacgctcctcacctcccagacggggtctcggccgggcagaggcgctcctcacatcccagatggggcggcggggcagaggcgctccccacatctcagacgatgggcggccgggcagagacgctcctcacttcctagatgtgatggcggctgggaagaggcgctcctcacttcctagatgggatggcggccgggcggagacgctcctcactttccagactgggcagccaggcagaggggctcctcacatcccagacgatgggtggccaggcggagacactcctcacttcccagacggggtggcggccgggcagaggctgcaatctcggcactttgggaggccaaggcaggttgctgggaggtgtaggttgtagtgagccgagatcacgccactgcactccagcctgggcaccattgagcactgagtgaacgagactccgtctgcaatcccggcacctcgggaggccaaggctggcggatcactcgcggttaggggctggagaccggcccggccaacacagcgaaaccccgtctccaccaaaaccagtcaggcgtggtggtgcgtgcctgcaatcgcaggcactcggcaggctgaggcaggagaatcaggcagggaggttgcagtgagccgagatggcagcagtacagtccagcttcggctcca

SEQ ID NO: 22666 - DNA, 1041 bp, Artificial sequence
  DNA replication origin
tccaggaggtgaggggcgcctctgcccgcccccccctactgggaagtgaggagcccctcagcccggccagccaccccgtctgggacggagatggggggtcagcccccccgcccagccagctgccccgtccgggagggaggtgggggggtcagccccccgcctggccagccgccccgtccgggagggaggtgggggggtcagccccccgcctggccagccgccccgtccgggagggaggtggggggggtcagcccccccgcccagccagccgccccgtccgggaggtgaggggcgcctctgcccggccgccccctactgggaagtgaggagcccctctgcctggccagccgccccgtccgggagggaggtgggggggtcagccccctgcccggccagccgccccgtccgggaggtgaggggcgcctctgcccggccgcccctactgggaagtgaggagcccctctgcccggccaccaccccgtctgggaggtgtgcccagcagctcattgagaacgggccaggatgacaatggcggctttgtggaatagaaaggcgggaaaggtggggaaaagattgagaaatgggatggttgccgtgtctgtgtagaaagaagtagacatgggagacttttcattttgttctgcactaagaaagattcttctgccttgggatcctgttgatctgtgaccttacccccaaccctgtgctctctgaaacatgtgctgtgtccactcagggttaaatggattaagggcggtgcaagatgtgctttgttaaacagatgcttgaaggcagcatgctcgttaagagtcatcaccaatccctaatctcaagtaatcagggacacaaacactgcggaaggccgcagggtcctctgcctaggaaaaccagagacctttgttcacttgtttatctgctgaccttccctccactattgtcccatgaccctgccaaatcccctctgtgagaaacacccaagaattatcaataaaaaaaaaaaaaaaaaaaaaaaaaaaatcaaactgtcagctgggcgcaaga

SEQ ID NO: 22667 - DNA, 1288 bp, Artificial sequence
  DNA replication origin
ccaccctcccgcaggctccgacggaggcggccgccgcggctccccaggaccccgcgcccaagagcccggtgggcagcggtgcgccccaggccgcggccccggcgcccgccgcccacgtcgcaggaaaccccggtggggacgcggcccccgcagccacgggcaccgcggccgccgcctctttagccaccgccgccggcagcgaagacgcggagaaaaaagttctcggtgagtcaggccagggagggcaggggctgccgtagtggggcgggcccagccggccgcggagcacgtgtgggcagctcgcgctacatctcccacccgggctggagacgctgacagcacagggtccccagggatctccgggtccccaggggtctccgggtccccagcgctggccgcctcccttgccggcgctcccaggtgagcgcgctgcgccctgcgctcctggcggccgtgtgcatctcccttctggttccgggccagaaagtttaggtcttaacttctgtctcccagacgggcactgttgcggattcgcgtggtggaaaatgcctgcgtttggagaagaaaggagaggcagtctgggagaggggaccttgggtagggatggatgtaggggaaggaccgacacgtgggcctggcgctttggggtccttgcttgggatctgggaaaggagagcatttcctttggggaagaggagggcgctagaaggagacggggagggaaagatagaaaagcttcttgccaggaagggtcaggtgtctgtccctgacgcccttcccacatgggcatgggaaagacgccatgctcctgttggccacatgccagcaaagagatgttgcaatcgtctccgggaaacttgggtcttagtcccacgtcttcctccccctctctgtgcccacggctgcaaacagccattcagtgtccaccaatggctacacgcttccctcttcccggactgtgggaacgcacgtggtgtagcagctgaaaaaactttgtcggaagtgggggtatgacgttagttcaaaacattgttaccttggcacttgtaacgtaggaagggaaacaggaagatgaaatgttgagatttgggggggcagtggatggaaagggtttctgtgatggttgttggtttagtcacataacaagcgttcttttcgtaagtaacgcccctgtgtgagttcttaaacgcttgcaaagcaggtgggtggtgaataacctccctaaagggtgtgtgtccatatcgttcgctcttataaacaggaacgttaacagatggtgtaggatgct

SEQ ID NO: 22668 - DNA, 973 bp, Artificial sequence
  DNA replication origin
aggtggtccttctggctttcctggacgaggtgggggaccttgggactggtttcctccttgtgggggtggtccttctggctttcctggacgaggtgggggaccttgaggtttgttgcctccttgtgggggtggtccttctggctttcccggacgaggtgggggaccttgggactggtttcctccttgtgggggtggtccttctggctttcccggacgaggtgggggaccttgggactggtttcctccttgtgggggtggtccttctggctttcccggatgaggcgggggaccttgggactggtttcctccttgtgggggtggtccttctggctttcccggacgaggcgggggaccttgggactggtttcctccttgtgggggtggtccttctggctttcccggacgaggcgggggaccttgggactggtttcctccttgtgggggtggtccttctggctttcccggacgaggtgggggaccttgggactggtttcctccttgtgggggttgtccttctggctttcccggacgaggtgggggaccttgggactggtttcctccttgtgggggtggtccttctggctttcctggacgaggtgggggaccttgggactggttgcctccttgtgggggtcgtccttctggctttcctggaggaggtggggtacgttggggctggtttcctccttgtgggcgtcgtccttctggctttcctggaggaggtggacacacggcattcactgaatagttgccgcaaatttttacagtaacgcagctaaatggggaaatgcacaaaaataagacccagacactaatttctttgcattttcagtgaagctctagaactctggagtggaatgctggagaagaaggaagcagttgaggggctctcagtctaaggaggagtcagaataaggacactggccatttgtctgtcatctcccagcaggcactcctggcaggagggaagtca

SEQ ID NO: 22669 - DNA, 1041 bp, Artificial sequence
  DNA replication origin
gagtatctgaatacaaatttttagaaatgggttctaggacaatacaatgtcaatgggttttagttgattcattggcacaataaagttggagaactgtagcaattagagtcctgatgaataataaagtggaatcatacctgtcattgaatcctagattactggggaggctgttgtccctgggcaggtctgggtggcctgcccccttgaggaggtggaggtggcccctggggctttccagcaggaggtgcctgaggctgctggggattgcctcctgctgggggtgggccttgtggctttccaggaggtgggggaccttgaggcttgttgccttcttgttggggtggtccttgtggctttcctggaggagatcgggcacttcgggacttgtttccttcctgtgggggtggtccttctggctttcctggatgaggtgggggaccttgggactggttacctccttgtgggggtggtctttctggctttcctggaggaggtgggggacggtgggactggttgcctccttgtgggggtggtctttctggctttcctggaggaggtggggtaccttgggactggtttcctccttgtgggggtggtctttctggctttcctggatgaggtgggggaccttgggactggttgcctccttgtgggggtcgtccttctggctttcctggaggaggtgggggaccttgggactggtttcctccttgtgggggtggtccttgtggctttcctggaggaggtgggggacgttggggctggtttcctccttgtgggcgtcgtccttctggctttcctggaggaggtgggggacatacggcattcactgaatagttgccacaaatttttacagtaatggagctaaatggggaaatgcacaaaaatgagacccagatactaatttctttgcattttcagtgaagccctagaactctggagtggaacgctgggggaaaagggagaagttgaggggctctcagtctaaggaggagtcagaataaggacactggccatttgtctgtcatctcccaggaggca

SEQ ID NO: 22670 - DNA, 1211 bp, Artificial sequence
  DNA replication origin
ttccttaaagagtttgttacaaatataggatcttgttacccatttccagaatatgtcaatacaaatctttagaaatgggatctgggactatacaatgccaatgggcttttagctgattcattggcacaataaagctggagagctgtagcaattagagcacttggtgaagaataaactggaatcatacctgtcattgaatcctagatgactggggaggctgtcactggggaggtctggaaggtctgcccccttgaggagggcgtggtggtccctggggctgtccagcaggaggtgcctgaggctgctggggattgcctcctgctggaggtgggggaccttgaggattgttgccttcttgttggggtggtccttgtggctttcctggaggagatcgggcacttcgggacttgctgcctccttgtgggggtggtccttgtggctttcctggaggtgggggaccttgaggtttgttgcctccttgtgggggtggtccttgtggctttcctggaggaggtgggggaccttgaggctggttgcctccttgtgggggtggtccttgtggctttcctggaggagatcgagaacttcgggacttgctgcctccttgtgggggtggtccttgtggctttcctggaggtgggggaccttgaggtttgttgcctccttgtgggggtggtccttgtggctttcctggaggaggtgggggaccttggggctggttgcctccttgtgggggtggtccttgtggctttcctggaggagatcgggcactttgggacttgttgtctccttgtgggggtggtccttgtggctttcctggaggtgggggaccttgaggtttgttgcctccttgtgggggtggtccttgtggctttcctggaggaggtgggggaccttggggctggttgcctccttgtgggggtggtccttgtggctttcctggaggagatcgagaacttcgggacttgttgtctccttgtgggggtggtccttgtggctttcctggaggtgggggaccttgaggtttgttgcctccttgtgggggtggtccttgtggctttcctggaggaggtggaggaccttgaggctggttgcctccttgtgggggtggtccttgtggctttcctggaggagatcggggacttcgggacttgtctccttgtgggggtggtccttgtggctttcctggaggtgggggaccttgaggtttg

SEQ ID NO: 22671 - DNA, 1122 bp, Artificial sequence
  DNA replication origin
gaggtgggggaccttgaggctggttgcctccttgtgggggtggtccttgtggctttcctggaggagatgggggaccttgaggtttgttgcctccttgtgggggtgctccttgtggatttcctggagaacaaagagagaagagaaagacagagtaaaagcccatacaagattccctgaatagttgcagtaaatttttatcagtttgggtaacaagctgagtggggaaacacacaaaaatgagaccaagacattaatttctttgcatttcagtgaagacatagaactctggagtggagcgccagggaagaacaaagcagttgagggcctctcattataaagaggagacagaatgaggatgctgcccatttgtctgtcatctcccagcaggcactcctggccagggggatgaggtaacccactcctgctgtcatctaagccaagcatctctgccgttcaatttggtggcctgctcatgatgcccagaatcaaggttgcatgaagagtgcctatattattaggagcactaacattaatcaattcccgaaaggaaagttttgataagaagacactggagaactgatccattcataagcagaaaaagacagtcagaacagattgagaatgaatcgggatttacctgctattagggagggagattcttcctggctgacatctagaagagaagcacaggatgatgggaacagttacatcttgaaccttacaagactcacaagtgttctacagggaaaacagacttctcaccacaccccatgcatcccctaagttaactcatcagccaccatctgtgaagctgctggaaggggaggaaggtgtaaggggaggcagggttgttatgacagagcaacagccatgaactcaacatagaagagccccttttttccctccctagcatccctcaagacttaatgctaatttagttcacaaatgccaggtacttcaatgtgatattttggtgttcttatgccctccatctcctataaatacattgcttatgtacacatgctttctcaattggggtaaccagaagtaatcatttcaatacaatcttacccataccactcccagcacattgaaatactgcgtgtaagggagagaaaaatg

SEQ ID NO: 22672 - DNA, 996 bp, Artificial sequence
  DNA replication origin
gggctggatttttatatttgatgaaaaagagcctaaacgctatctgatttgggataaagaaaaaggcacattaaccttgactatgcctttagctccagccacctttttaagagtaaattgctgggcgggagggggaaggctagtcacggaacaaaactgtaagccagaccaggtgtgaggaggggaggtgataaaaagattatagggtggaggagcagaggctgagcaagaattgggacctagctcagcctggcgaggagcagcctggggaggaagggagaggtcagatgggtctgtacaacaggaagattagaaagactcagtgacgcttggggttgggactgaggggacaggcgggagggaaagaaggaagatttgggatgagttgcactgggcacagagactaggaagggactgatgtgtaaaagaatgcctggacatcaggcacctcagatcatttgcctattttatgacaagaatgatttagatcttgcaggacggaaaaattcaaagtgccattttctggctatttggaactactgtcaagtttgtattggggtcaagcggcattgcagaagaaaataaggcatttagattttaggtcaggtgtgagtagaagaggttttaagtttttgagaacacaggccaagggagtagaaggaggaatggagggtggaaggttgcccatagtgaaggaagcaagcctagagaaaagagagagtagagaaatggagggaaggggttcgggggttcttcccttccagaaaagtgggaaaaggcattggggtgcagagataagaggttggggcatggaaataagagatggggcaccgaaataagaggtcagggcatggaaataagggattggggcacagagatagaagaggttggggtgcagaaataaggaattagggcacagagatatgaggttgggacacagaaataagggattggggtgcagagataagaggttggggcatggaaataagggattgg

SEQ ID NO: 22673 - DNA, 1554 bp, Artificial sequence
  DNA replication origin
gatgagcgctgtccgtggtcctgaagatgttcctgggccccggcggtggcggcggcagcggtgcctaggagggccggcagcggggacggctacgaggtaaggaatccgggcggaggctgcgcttgcggcagctgcggatgctcccacaggctgcgattctaggcgctcagctcgttcagccgccgctccagctcgtcgatgctctggcgctgggtgcggacgagcctctgttggttcagcacgatggccctgagctccttgaggtagagcccggcgcaccggattctccagaagtctctccaagccgcccgccagcctcttgagcccttcctgcgcctgggcggcggtggggagcgcgagggcgcgggatcccagcagcccagcggtcggctttcttccttctccccctggcctagtcttcctctcgccgcaggcgccgcgtcactgccaccctgactttcacacacccaccgcggggcagggtcatggcccagggcagcccttcctgtctcttggcgtccagaggaggctttgctactcgcagggcattgagaagagggaggaggcgagcaagaggttcgggcgtgggagggaagcaggataaacgcaggtgaccgcagaaggacagggggcggccctctgatcaggtgggggatgggtggcagcacccacctgctgaagatgtctccagggaccttctgcaggcactgccgggcatctgccacctgccggacggcctcctctcactgcaggtctggtgggatgtgggacaaggcataggtctgatctgccaggggatgctgggtcctcgcaggagtcatggtgcctgtgggtgggagccagagcatcagagccacccacgcccaccggcacccacttacctcaggtagcgtggtgttgagacaccacagcccttatcctaatcgtgtgcacagcttcagtctataaaggtggggatgggagacagagcatttggtgggaggccaggagctcataggagatgggattctgctgatagctgctgagtgaatgagggagggaatgggcaggaccaggggctgggtaattggtagggaaaatggaggaacttggagaaggagcaacatttcctcaccccttataaggtgcttggtacctgccaagaaccctgtccatacatgatctcagttcagctccccaccttgggtatacaagaaaggagccctggctgcagaggaaaacagaggctggaaacagggatacatgggcagtgtggtggtggtgagagaattgcccgaatcagctgccaaatggtgcccaggttggaaaagcaaatgtgcacacatgggttcttcccactctaaccctgaggaattcgaggcctgcttcttacacagactgggcagtggctagtgactctaggtatagcagtgtccaggccctgctcacccagactagagcttagggagccagaaggaaggaggtgcatgacaggtgggaaaaataatcctcaaattgcaaggtgagagcacaatctatttatactgggttgaattaactcctcccccaatgcca

SEQ ID NO: 22674 - DNA, 969 bp, Artificial sequence
  DNA replication origin
ctgggctgctgggatcccgcgccctcgcgctccccaccgccgcccaggcgcaggaagggctcaagaggctggcgggcggcttggagagacttctggagaatccggtgcgccgggctctacctcaaggagctcagggccatcgtgctgaaccaacagaggctcgtccgcacccagcgccagagcatcgacgagctggagcggcggctgaacgagctgagcgcctagaatcgcagcctgtgggagcatccgcagctgccgcaagcgcagcctccgcccggattccttacctcgtagccgtccccgctgccggccctcctaggcaccgctgccgccgccaccgccggggcccaggaacatcttcaggaccacggacagcgctcatccgcccggccactgcccgcgcccgagctggcatcgtttcagaaccacgaacagctcctggcgcaacccgagccagaccctggaggcagggctcacacaacccagtcgccccatcagcacccgggaacacttggggtcaaggccaacaaggagaagaaaggtcccccgggttgctgcgctgcccccggaaccccccttcagcaagaatctcccgcgccctcggcaagggagtcctgagcaggagacctgagtgagcggggaagagcagatgagcactgctgtggtggaagcaagggaagcaagcgggtgtgagggggagatgcagaaattgggtgcgtgggagtctaaaggacctgggtgatgtggcgcgaaggggtgagaagatgcttgggggcagaagcctgacagggagatttcggggaaaagaggggaaaatattagtgtttgagaaggttttggggaatgttggcgcaaaaaggagtaaccagatcatcagtaggggcaaaagacgaaagaaagaggatatttaagcgattggggatattgggaactggcagcatttaaagggactagactagaaggaagttg

SEQ ID NO: 22675 - DNA, 870 bp, Artificial sequence
  DNA replication origin
agccgcggccccacgcggccccgctacccgggtttcctccgcccgcgcccccgcggccgcccctcccccgcgcagcttttatttccccgatgccgggctgtaacccgagcttttatttcctggtggctcctttaagaggcagagctcagtgctgggaattcacgtcagtttctgcactgaaactctcaagatcaatgagcaaagagctttctcagttctgcctttcagtttctctcttccaggaaggaaaacattcgagagagcgagggagagccgcgggagggcggggggcgggggcgccggctgcgggtgggaggagagaccgggaggccggccgggctgcgtcccgggtccccgcgccgcgccgcgacctgcagaccccgccgccgcgctcgggcccgtctcccacgcccccgccgccccgcgcgcccaactccgccggccgccccgccccgccccgcgcgctccagacccccggggcggctgccgggagagatgctggaagaaacttcttaaatgaccgcgtctggctggccgtggagcctttctgggttggggagaggaaaggaaagtggaaaaaacctgagaacttcctgatctctctcgctgtgagacatgtctgagactcctgctcagtgtagcattaaggtaaaaatcttctcccctccttctacgtggtggaaaccctgagctgcaccggccagggcagtcgtgctgggctcctcagagcaggctgttgcagttgctctgttcgcaggaaattatttggggcgagagggaaagagatgcagctcgcggtggctgctgtaccctttagcgtaaccttgctactcccccccaccgccgagcccctgccggctcctcggcccc

SEQ ID NO: 22676 - DNA, 735 bp, Artificial sequence
  DNA replication origin
taagggatcggggagcagagatatgaggttggggtgcagaaataagggattggggcacagagatatgaggtcagggtgcagaaataagggattggggtgcagagatatgaggttggggtacttgcctctcctccagaaaagccggacttgccgctaagggtgaaggataaggggttgggggtttcttgcaccccagaaaggtggagaaggggtagagacacggagagaaggggttggggtacttgcccctcccccagaaaagcgggacttgccgctaagggtgaaggaccaaggcaggcgtccctgtgtggtctgacacctctgaaacgtgggggaataatcagagaggtgtccttgcaatgattaaacactaagggaaggctgcattcccagtccgtgaccggcaccggagttttgggtctacggataaaacgtgtctcctttgtctctaccagaaaatgaaaggaactgaaattaaaagaagggagagattgaagtgtggcgccaagattgaaaggagaaagaggctgagggttagggaggttggagaagagagtaaaaagaggccgcttactggatttgaaattggtgagatgtttcttgggctgcttggtctgagaacctgaggtcataggtggatctttctcacggagcaaagagtgggaggacaggggattgatctcccaagggaggtcccccatctgagtcatggcaccaaatttcatgcgcgtcggt

SEQ ID NO: 22677 - DNA, 1373 bp, Artificial sequence
  DNA replication origin
ttggaagttcttgtgtgctggagatgtggctggggtttgtctcacagtgaaggcaaggaattgcaacttttttctattattgtacaccttgaaggcgaggttaattaaatcctgttgtggggtttgagggccggaatttaatttttggagttttatttaatgtcgggagcagattgggtaataaaatgtattttgagaataagacggccttttgaccttttagggtctagggctgtaaagtgtctcagggttgctgccgaacgagccatgaactgggctgggttttttatatttgatgaaaaagagcctaaacgctatctgatttgggataaagaaaaaggagcattaactttaatttagctccagccaccttttcaagagtaaattgctgggcaggagggggagggctagtcatggaacgaaactgtaagccggaccgggtgtgaggaggggaggtgataaaaggattatagggtggaggagcagaggctgaggaagaattgcgacctagctcggcctggcgaggaggagagaggtcagatgggtctgtagaaaaggaagattagaaagactcggcgacgcttggggttgggactgaggggacaggtgggagggaaagaaggaagatttgtgatgagttgcattgggaacagagactagagagggacggatgtgtaaaagaatgcctggacatcaggcatctcagaccatttgcctattttacgacaagcattatttagatcttgtaggatggaaaaattgaaagtgctgttttctggctatttggaactactgtggagtttgtattggggtcaagcggcattgcagaagaaaataagacacttagattttaggtcaggtgagagttgaagaggttttaagttcttaagaacacaggctaaggaagaagaaggaggaatggaaggtggaagcttgcctatagtgaaggaggcaagcccagagaaaagagtagagacacggagaaggggtagggggttcttgccctccagaaaagcagagaaggggtcaggcacagagataggaggttggggcatggaaataagggatggggtgcagagatataagaggttggggcatggaaataagggatcggggagcagagatatgaggttggggtgcagaaataagggattggggcacagagatatgaggtcagggtgcagaaataagggattggggtgcagagatatgaggttggggtacttgcctctcctccagaaaagccggacttgccgctaagggtgaaggataaggggttgggggtttcttgcaccccagaaaggtggagaaggggtagagacacggagagaaggggttggggtacttgcccctcccccagaaaagcgggactt

SEQ ID NO: 22678 - DNA, 1426 bp, Artificial sequence
  DNA replication origin
gcctcacgccctccgcggggagggccgaagcggccggtccgggaaagaatcccgctggaatgcgccaccgggaggaggctttccctcccagttcgcctctgctagcccagaacctctcccagggtctcaggcagaggctgtgcgtgcggttgccgactcccttccctggccgtacaggaggcagtaccgggagaaggggctcgttgcgcgcagggacacggtcgcggcgaccctaggaggcggtgccgaccgtatccctgcgccgctgcgcgaggcagaggctgaatgaggagctgcgcgggggaagcggggcgccgggggaggaggcggcgggatggaagcagacgctggcgtcgcgcgagcccggggccgagcggcgcggtagagagggcggcggcggcgcgcgcggaaccttgacgtgcccctttctttcttctctcgctgggaagctgggaagtatgagcgtgcagccctgccgctgcggcggccgccccggctcctcgcctcccccacttctggccacccctcgccggtgagagaagagaacgcgagaagggaagatgggggccgtcctgaggagcctcctggcctgcagcttctgtgtgctcctgagaggtgggaagagtgggggcactggaaagttggtggggttcggggggaggtggccttgttgtatgtgtctagggggaggggagggacggaggaagggagaaggggagaggagcggggagaggcctggtcgtggggagggggagagaaaggggcccgggagcaggggctgcgtgcaccgcccggccacaatgcggacctggcctggcttcccagaccttccccggacacatcggagcttcgatcccggctgctggtcttagggaacccttggcaccccatgctgtcgggatgactgagtgtctgtgtgcctctctctgcctggggtcttccagggaaaagggtctttgtacgtattttggcttttaaaatgtttgagtccgagatgctttaaggttggccttatccatcgaagccccgccacccactccccaccccgtttcggtgtttcttaggtgaacttttaaagccctcttgctattttttccaggccttgttacaggtaatgattggcttccgtttgggatataatgaccctgggtgagagcgcagttggaaagtgactccggggttataggtcgagcgtttcagcattgggagccttctgagcttcagcccataataaaataaaacattgcccttgtaacctctggtattcacggcttgcccctattttcggagtatgcaagtgtacagttggcactaagtagggaaattcatcctcgtgtgaagaggagccggtcctgggaccaaaatgataatttgctctgcacccctggggactgcttggcactttggtaaattgcataggctgttc

SEQ ID NO: 22679 - DNA, 952 bp, Artificial sequence
  DNA replication origin
gcgccccgcttcccccgcgcagctcctcattcagcctctgcctcgcgcagcggcgcagggatacggtcggcaccgcctcctagggtcgccgcgaccgtgtccctgcgcgcaacgagccccttctcccggtactgcctcctgtacggccagggaagggagtcggcaaccgcacgcacagcctctgcctgagaccctgggagaggttctgggctagcagaggcgaactgggagggaaagcctcctcccggtggcgcattccagcgggattctttcccggaccggccgcttcggccctccccgcggagggcgtgaggcggcgttgaacaacattggagccggcgtggtcgggactactttctgcggctcggccgggcagccgtctgccccgctctttgtgcggccgccgccggcagggccaggtggggctccggtctcgcgcccccagccacctgagactgcccagccgcggtgcacgcgcggggagccacggcggatcccgttgcggggtgatgagctccgtcttcggggttggaaatcggtttcagcatcctttttttgggagggcggaatttttgaacgctgtttacaccggctttcagcgtggatctggtgaacgatattaaaacgccaattcaaaactgagattgtcatttttctcccgccttcccagaaatacaaactgcccccagaattaagcccgaccagctaaagatttctaaactggcagataaaattccaagataaatgcctcaaaacctaagagcaaagggacaattggacaagactatttaggattttacaagttgcatataataacgaatgtttggcatgcttcgattatcaattctcagcttgagaaggaaaagattccctagaatctcagactgtgcacagcctctgctactcccagtgcattgggcattcaggagtaatggcccagacgccccctgaa

SEQ ID NO: 22680 - DNA, 1129 bp, Artificial sequence
  DNA replication origin
gggggggtcagccccccgcccggccagccgccccgtccgggagggatgtggggggatcagccccccgcctggccagccgccccgtccaggaggtgaggggggcctctgcccggccgcccctactgggaagtgaggacccctctgcccggccagccgccccgtccgggagggaggtgggggggtcagccccccgcccggccagccgcccagtccgggagggaggtgggggggtcagccccccgcctgaccagccaccccgtccgggagggaggtgggggggccagccccccgcctggccagccgccccgtccgggaggtgaggggcgcctctgcccggccgcccctactgggaagtgaggagcccctctgcctggccagccgccccgtccgggaggatggtgggggggtcagccccccgcccggccagccgccccatccgggaggtgaggggcgcttctgcccggccgcccctactgggaagtgaggagcccctctgcccggccacgacccgtctgggaggtgtgcccagcggctcattggggatgggccatgatgacaatggcggttttgtggaatagaaaggcaggaagggtggggaaaaaactgagaaatcagatggttgccgggtctgtgtggatggaggtagacatgggagacttttcattttgttctgtactaagaaaaattcttctgccttgggatcctgttgatctgtgaccttatccccaaccctgtgctctctgaaacatgtgctgtgtccactcagggttaaatggattaagggcggtgcaagatgtgctttgttaaacagatgcttgaaggcagcatgctccttaagagtcatcaccactccctaatcttaagtacccagggacacaaacactgcggaaggccgcagggtcctctgcctaggaaaaccagaccttccctccactattgtcctatgaccctgccaaatccccctctgcgagaaacacccaagaatgatcaataaaaaaaaaaaaaaaaaaagagtcatcaccaatccccaatctcaagtaatcagggacacaaacactgcggaaggccgcagggtcctctgcctaggaaaaccagagacctttgttcacttgtttatctgctgaccttc

SEQ ID NO: 22681 - DNA, 1297 bp, Artificial sequence
  DNA replication origin
tgacccccccacctccctcccggacggggcggctggccgggcagaggggctcctcacttcccagtaggggcggccaggcagaggcgcccctcacctcccggacggggcggctggccaggcggggggctggcccccccacctccctcccggacggggtggctggtcaggcggggggctgacccccccacctccctcccggactgggcggctggccgggcggggggctgacccccccacctccctcccggacggggcggctggctgggcagaggggctcctcacttcccagtaggggcggccgggcagaggagcccctcacctcccagactgggcggctggccgggcggggggctgacccccccacctccctcctggacggggcgactggctgggcagaggggctcctcacttcccagtaggggcggccgggcagaggagcccctcacctcccggacggggcggctggccgggcggggggctgaccccccccacctccctcccggatggggtggctgccgggcggagacgctcctcacttcccagacggggtggctgccggacggaggggctcctcacttctcagacggggcggttgccaggcagagggtttcctcacttctcagacggggcggccgggcagagacgctcctcacctcccagacagggttgtggccagcagaggcgctcctcacatcccagacagggcggcggggcagaggtgctccccacatctcagacgatgggcggccgggcagagacgctcctcacttcctagatgggatgggggtggggaagaggcgctcctcgcttcctagatgggatggcggccgggcggagacgctcctcactttccagactgggcagccaggcagagaggctcctcatatcccagacgatggggggccaggcagagacgctcctcacttcccagacggggtggcggctgggcagaggctgcaatctcggcactttgggggtccaaggcaggcggctgggaggtggaggttgtagcgagccgagatcacgccactgcactccagcctgggcaccattgagcactgagtgaacgagactccgtctgcaatcccggcacctcgggaggccgaggctggcggatcactcgcggttaggagctggagaccagcccggccaacacagcaaaaccccgtctccaccaaaaaaaaaacgaaaaccagtcaggcgtggcggcgtgcgcctgcaatcgcaggcactcggcaggctgaggcaggagaatcaggcagggaggttgcagtgagccgagatggcagcagtactg

SEQ ID NO: 22682 - DNA, 1062 bp, Artificial sequence
  DNA replication origin
agacggggtggcggctgggcagaggctgcaatctcggcactttgggggtccaaggcaggcggctgggaggtggaggttgtagcgagccgagatcacgccactgcactccagcctgggcaccattgagcactgagtgaacgagactccgtctgcaatcccggcacctcgggaggccgaggctggcggatcactcgcggttaggagctggagaccagcccggccaacacagcaaaaccccgtctccaccaaaaaaaaaacgaaaaccagtcaggcgtggcggcgtgcgcctgcaatcgcaggcactcggcaggctgaggcaggagaatcaggcagggaggttgcagtgagccgagatggcagcagtactgtccagctttggctcggcatcagagggagaccgtggaaggagaccgtggagagagggggagggggagggggaggggcgattttgtggttttcttccctttagtcttctaatataggctgttacgtggattgattttcgtgtgttgaatcatccttgtgttccaggaataaatctcacttggtcatggtgtataatccttttatatgctcctgaatttggtttactaggattttgtttgggatttttgcatcaatgtttgtaaggtaaattggtctacagttttcttttcttgtagtgtttttgtcttgctttggaatcagggtaatgctgccctcatagatgagttagggagtgttttctctgcttcaattttttgggaaagtctaaaaagggtttatgttagttcttttaaatggttggtggaactcacctgtgaaactatcagttccagggcttttctttatcaggagatttttttattatgtattcaatctccttactaattataggtctattcagagtttctatgtggcttagccttggtaggttctagttctgtgtttctaggaatttgtccatttcacctaggttatctaatttattgctgtacaattactcatagtaccttgtaaagtcatttttattcccatagaatcggtattaatgtacacactttctcgttttagtatttgagt

SEQ ID NO: 22683 - DNA, 1377 bp, Artificial sequence
  DNA replication origin
ggggcccgaggggagacgccgtgacaactttcgtttccctctgagggaattgggaggtcggcggccccaaaagtaagtggccttggcgggccgcgcggggtgtgcgggcgggagggtgcggggcccggggcgccctcccgcccggccgcatggacgctccgcagcgcgccccgactcccggtgccgggcgccgcgctccagccccgccgtctctgccttcccgggcgtaccggccaccctttcgggaggcggcgtgggggcgaccgcggccgggggccgcaggagcgtttgaagcgggggtgtaggcctggccggaggctggccggagcgggaagggggcgtgcggccgggcgcggggtcgcagtgggtgcgctcccggccgctgcgcggcgcttggaccgggccccgccgagaggagcggccgccgcgggacgcggcacctttgcgggcgaagctgctcacttccaggcgcgactgttacacaacacgcctgccaagtggggccctggcctgactgttcccattatccccagttcgcctttggtgtaagcagcgaggccacctgggtggtgacggtgctgctttcttcaaccaaccaaccgaaaaagccctcaattttcggacaggggctcgggtcttggcgttggggggcccgacgcctagtgacttctttatttacactagctgcaaaacgtgagaaataaaaaagcccagggtctgtgtatcacgtgtagtttcatgtaatgaaacaccacagagggaaatattttcagatgctgggtttatttcctaaagaataccaataatgaaccagagaaaaggcaagtagatctgaaaatgaatggatactgcaaaatcctaaagaagtttaggaaacatcaactgcaaggattcttggcgttttgaagtcgtgggtgtctcagattggagaaagcacacctctaaccagcctgtgatgaataagctggggaggaaaaaaacctgttgcataatctcatttgccgtggggtttgctgtgccatccccttgaaccaaagggaagtgagttaagatgcagggttttaaaactctctgaagtttttatttacccagcgctctggctcccacttctgttttaaaagattataagtaaatactctgctctttcaagtgaaccaaacctatcaaacctgtttagaaaataaaccaggtatgtttctttctcttctttcttttccgcctctgtgtgtgtgtgtgtgtgtgaaatttaccatccatgcaaaagtttaggactagtgtttggggaactgagactgtcagaaaaatgcctctttatgccactcaccttatggggctgatggagagtccacgtaaaggataaccgtttcctcaaaggat

SEQ ID NO: 22684 - DNA, 1180 bp, Artificial sequence
  DNA replication origin
gcacagggttgggggtaaggtcacagatcaacaggatcccaaggcagaagaatttttcttagtacagaacaaaatgaaaagtctcccatgtctacttctttctacacagacacggcaaccatctgatttctcaatcttttccccaccttccccccctttccattccacaaaaccgccattgtcatcatggcccgttctcaatgagctgttgggtacacctcccagacggggtggtggccaggcagaggggctcctcacttcccagtaggggcggccgggcagaggcgcccctcacctcccggacggggcggctggccaggcgtggggctgacccccccacctccctcccagacagggcggctggcctggcgggggctgagccccacctccttcccggactgggtggctgccgggcggagacgctcctcacttcccagacggggtggctgccgggcggaggggctcctcacttcgcagacggggcggctgccgggcggagggtctcctcccttctcagacggggtggctgggcagagacgctcctcacctcccagacggggcggcggggcagaggcgctccccacatctcagacgatgggcggccgggcagagacgctcctcacttcctagatgggatggcagccgggaagaggcgctcctcacttcctagatgggatggcggccgggcagagacgctcctcacttccagatggggcagccaggcagaggggctcctcacgtcccagacgatgggcagccaggcagagacgctcctcacttcccagatggggtggcggccgggcagaggctgcactctcagcactttgggaggccaaggcaggcggctgggaggtggaggttgtagcgagccgagatcacgccactgcactccagcctgggcaccattgagcactgagtgaaccagactcagtctgcaatcccggcacctcaggaggccgaggctggcggatcactcacggttaggagctggagaccagcccggccaacacagcgaaaccccgtctccaccaaaaaaatacgaaaaccagtcaggcgtggcggtgcgtgcctgcaatcgcaggcactcagcaggctaaggcaggagaatcaggcagggaggttgcagtgagccgagatggcagcagtatagtccagcttcggctcggcatcagagggagat

SEQ ID NO: 22685 - DNA, 892 bp, Artificial sequence
  DNA replication origin
gtgaggagcgcctcttcccggctgccatcccatctaggaagtgaggagcgtctctgcccggccgcccatcgtctgagatgtggggagcgcctctgccccgccgccccgtctgggaggtgaggagcgtctctgcccagccaccccgtctgagaagggaggagaccctccgcccggcagccgccccgtctgcgaagtgaggagcccctccgcccggcagccaccccgtctgggaagtgaggagcgtctccgcccggcagccacccagtccgggaaggaggtggggctcagcccccgccaggccagccgccctgtctgggagggaggtgggggggtcagccccacgcctggccagccgccccgtccgggaggtgaggggcgcctctgcccggccgcccctactgggaagtgaggagcccctctgcctggccaccaccccgtctgggaggtgtacccaacagctcattgagaacgggccatgatgacaatggcggttttgtggaatggaaagggggggaaggtggggaaaagattgagaaatcagatggttgccgtgtctgtgtagaaagaagtagacatgggagacttttcattttgttctgtactaagaaaaattcttctgccttgggatcctgttgatctgtgaccttacccccaaccctgtgctctctgaaacatgtgctgtgtccactcagggttaaatggattaagggcggtgcaagatgtgctttgttaaacagatgcttgaaggcagcatgctcgttaagagtcatcaccactccttaatctcaagtacccagtgacacagacactgcggaaggccgcggggtcctctgcctaggaaaaccagagacctttgttcacttgtttatctgctgaccttccctccactatt

SEQ ID NO: 22686 - DNA, 842 bp, Artificial sequence
  DNA replication origin
cggccgccaccccgcctgggaagtgaggagcgtctctgcctggctgcccatcgtctgggatgtgaggagcccctctgcccggccgcccagtctgggaagtgaggagcgcctcttcccggccgccatcccgtctaggaagtgaggagcgtctctgcccggccgcccaacgtctgagatgtggggagcgcctctgccccgccaccccatctgggatgtgaggagcacctctgccccaccatgaccccatctgggatctgaggagtgtctctgccccaccgccaccccgtctaggaggtaaggagcatctctgcccggctgccccgtctgagaagtgaggagcccctccgcccggcagccgccccgtctgggaagtgaggagcgtctccgcccggcagccgccccgtctgggaagtgaggagcgtctccgcccggcagccgccccgtctgggaggtgtacccaacagctcattgagaatgggccatgatgacgatggcagttttgtcgaatagaaaagggggaaatgtggggaaaagaaagagatcagattgttactgtgtctgtgtagaacgaagtagacataggagactccattttgttctgtactaagaagaattcttctgccttgggatgctgttaatctgtaaccttacccccaaccccgtgctctctgaaacatgtgctgtgtccactcagggttaaatggattaagggcagtgcaagatgtgctttgttaaacagatgcttgaaggcagcatgctcgttaagagtcatcaccattccctaatctcaagtacccagggacacaaacacagcggaaggccgcagggtcctctgcctagaa

SEQ ID NO: 22687 - DNA, 1241 bp, Artificial sequence
  DNA replication origin
ccttcaagcatctgtttaacaaagcacatcttgcactgcccttaatccatttaaccctgagtggacacagcacatgtttcagagagcacggggttgggggtaaggttacagattaacagcatcccaaggcagaagaattcttcttagtacagaacaaaatggagtctcctatgtctacttcgttctacacagacacagtaacaatctgatctctttcttttccccacatttcccccttttctattcgacaaaactgccatcgtcatcatggcccattctcaatgagctgttgggtacacctcccagacggggcggctgccgggcggagacgctcctcacttcccagacggggcggctgccgggcggagacgctcctcacttcccagacggggcggctgccgggcggaggggctcctcacttctcagacggggcagccgggcagagatgctccttacctcctagacggggtggcggtggggcagagacactcctcagatcccagatggggtcatggtggggcagaggtgctcctcacatcccagatggggtggcggggcagaggcgctccccacatctcagacgttgggcggccgggcagagacgctcctcacttcctagacgggatggcggccgggaagaggcgctcctcacttcccagactgggcggccgggcagaggggctcctcacatcccagacgatgggcagccaggcagagacgctcctcacttcccaggcggggtggcggccgggcagaggctgcagtctcggcactttgggaggccaaggcaggcggctgggaggtggaggttgtagcgagccgagatcgcgccactgcactccagcctgggcaacattgagcactgagtgagcgagactccacctgcaatcccggcacctcgggaggcccaggcgggcagatcactcgcggtcaggagctggagaccagcccggccagcccggccaacacagcgaaaccccgtctccaccaaaaaatacaaaaaccagtcaggcgtggcggcgcacacctgcaatcccaggcactcggcaggttgaggcaggagaatcaggcagggaggttgcagtgagccgagatggcggcagtacagtccagcctcagctgggcatcagagggagaccgtggaaagtgggagacgggagagggagagggagaggagggagagggagaggagggagaggagggagagggagagggatcattttagtaattcttaagtatat

SEQ ID NO: 22688 - DNA, 1162 bp, Artificial sequence
  DNA replication origin
tacagcacaatcaaactcagacaaaaccctgaaccagtgagaaccattaggaaggaaaggaacagaaaatgaaccaacctgagtgttaggagacttgcatctagtcctgactccggtaccaaccgaatgcatgtccctggacaggaaacctctctgagtctcgatttcctccgtggtaaaaaggagagggttaaaccacagggtcccgagggtcccttccagctgtcacattctggagcgtatgagatgaggtaggcacacaaagtggacaagatgtggctaagaaaacaagctacacatcaagctcatctgtagcataggtgcttaagaaaactttgctgctgtgtaatattagaacggaaggttggtttccagtaaaatgcattaactttggctcaaaccaagatgatgggtaccgggcatgggggtggggaggcagttgaagatccactgagctttgtctcagggcagccctgctcatcgtcctactttaccttccaccacggtgctcaagcccacactgagagagaaatttccagctgcaaaagggagaagagaaacgctggaatactagtatcggacgttaggacatggttgtggtgttttaaaaatcatttcatcatctggagtttgaccccgaggggagtattttcacccttcagccctctgaaagcattcactagcatctgaatattgttctgagtttgttggagcagtgaaatctggtgagagagaagggtggaggaaggaaggagctgttgtatttggcggctggactcaggtagaggaaactgctacaatcccgggaaagaacagaaaagtagaaagggacgagttcccacacgcagccaatgtccatggccttaactgtgcttgggaaggaagatcctgggccaggggtgtaccctcgtttttcaaaactaaacgtgtctgagacagctacaaagtttattaagggacttgagagactagagttttttgttttttttttttaatcttgagttcctttcttattttcattgagggagagcttgagttcatgataagtgccgcgtctactcctggctaatttctaaaagaaagacgttcgctttggcttcttccctaggcccccagcctccccagggatggcagaaacttctgggttaaggctgagcgaacc

SEQ ID NO: 22689 - DNA, 1336 bp, Artificial sequence
  DNA replication origin
ggtgggcgtagggtgtggcccaggtgaaagacacagcaagttttaaaaagaaattcatactctgaacaccagacaggagatcctagaggagatttagaatcactttttctgtgcaaagagcttgagagaagagcaagtgtgggcgctgtgatgatgaagatgaaatggcgaaggcagcgtcccccggcctccgggaaagtcgctccctgaggccggggcggtgggcgcaccccggcctgagaggcctctcgccccgctcctcgcctgtgaagcccacgctcccggagtcccccaaacacgcccccaaacccacatttccccagttcttccccgtcccaggcccccgcgccgggcggccggggttgcgatgggggcacgttgccgagcgggggtgagggcagaggggacccacgcgggcggccgtggtgcggggcccgggctgcgcgccgccgtggccctccccaggcgccggcgagccgggcgggctttcgaaatgcgcggggctgcggatcattggagcccagggtaggggtgggagcgggctgcagcgccggagggtcggcgaactcgggaaggctctccccttagctccgatatccccacggccggggaggcggccggttactcaggtggagagtccgtttgcggagaggagtgggagctttcgctgctttctcagcgcagaggagaggaggagggaggaaagtttctgagaaaccgcccagcccggctgcgcggcggaggcgcggccgcccgggcgcgggaactgcgcgcgacgacggcgacagtgcggggggctgcacgttacagatgagggagcaacacttgatggccttctcgtcccgaggcaccagccagcccgaccccgcaactgccgcggcgggcgggcgcggaactgcggggcagtttggggagacgacggcgcagtggcttgggtagtggggcaaggggtggcgggcgacggcggccgcaaccccgcaaagggacgttcacggcgaaggacgagctgaactgcgggtcattttgggaggcttgacacaggcgggtaaaggacgaaggacacggtgactcggggctgcgttcctgtggacgtgcctggcgcggcgagcatccacttctccctggcccgcataactaaaacgcaatctctcaaaattctgtttaaagagacctctttaggaaaggagactggggtgcctgcagcaatccaggcgatattttttattctgttagagacactttctgaattatctttttttactcagaggaactttaatttcattattttctgaccctcctctccttcctatttcgaattgtttttcttgctccttca

SEQ ID NO: 22690 - DNA, 917 bp, Artificial sequence
  DNA replication origin
tctgcggagggggacggcctgaggcccgcggccgggttccctccccagacacccgcggaaagcccgaaaggaggcggaacacggcccagcggctcgccacggcgggcccatcccttgcttagccgcctcgcaccctcgcctcaccgcactgctgcactgctgcactgctgccctgctgcccgcccttcgcatcactgacccgccctctctccgccccctcgcctcgccgccccgccctctctctccgccccttcacctcgccgtcccgcccccttgcctcaccgccgggctgaattgccgccccgccctctagccacgccctctggcccctgcctctagccccgcctctcgcctcgccgcctcgccgtcccgccgccttgccgccctgccaccctgccgccctgccgccctgccgccctgccgccctgccgccggtggtcgctgcccgtggtgctccgtcgcccccgccacctcacgtcctcccgtgcgtcgggagcgtctcggctacaacatgttgggcatgatcaagaactcgctgttcggaagcgtagagacgtggccttggcaggtcctaagcaaaggggacaaggtaggcccgcagggctgccgaggacctgaaggattgctgcctcccacccccaccctcgtcggggctgcagcgggtgctgaggggcaggtggggcaggaatgtgctatcgaaggtgcgttctggtgtctgtcgcgagtgcggctctccaccgcccagcatttggactgggaaggaaaggagtgagaggtccccctgcagccggtggtgagaggaggggggtaaacaggagagactgatccaaggagagaatcccaacttggggagttgggcactgcctgttgaatgcattctttcgtttaaaatattccaaacattccgaacagtttga

SEQ ID NO: 22691 - DNA, 1318 bp, Artificial sequence
  DNA replication origin
agaaaaaaggagaggtcaccatctccctcataagatatgttgtacatcaggtcatgctgtttgtcacgttttagccatcctaagaaaggacagaagctgcattccattctgcagtcttggcaaatgactttcttctgtttccacctctattttgccttgtttatttcatctccattatccctctttcagtcatgaatcatgacttttttttctacagtagtcagagttttgtaggacaaactcaggtctctctggcctctcagcaagcttcagggcttcatgcatgcctgcagctgagagtgtctggttgatattctggtactggcactggagccggctgcaataggtggtcctcaggtcccagttgaagaaggcataaataaaagggttaatgagagagtttgcatagcccagccatggaaatatcctctccacccacagtgggatgcagctgcaggcagtgccatagacagaagggtctggctgtcaggaggaaaaagggcggccagcacatggtggaggcccagacgatgatccccaaggtagtcgctgctttctgtttccgcttaaagatggagatattttttcctttcatgcttgaggagtctcgaaaggtttgcacactcttccacctcctggaacttcactgtgccattcagggtgactactgctgtctggctccactcgagggaagccaggtaacctgtgttaggccgcgcttttcctggcggccttgtaaatctgttagtacatgaaaagcatgacgcacatggggattaggatgccactgcggtggagtaaatcgtgtagccaaagtcttgactgaccaagcacaccttatcatcgtttacattctgagcccgaccaaaaatggtaggtaaagtgacaaaggcggaaagaaggcagacagaaagaatcatcttcgtcatgcatttccccttctgcctcatagggtacgtgagaggcttcatgatcccaaggtacctgtcgatgctgatcacgtacaaggtcaagatccaggccgtgcagcacatgacattcatggagaagacgttacagaaaaagtgtccaaagatccacttgcccccgatgaggtcggtgacactgatgaagggcatgaccgccatggccaccgagaggttggccagcgccatggacacgatcaggtagttggagggctggcggagcttcttgacgaagcacacggagataccaccaggcagttgcccgcgatcgcagagagatgagcgtcaggacagagccgatcacaactttctcggccctttcttgatttgctccccgcggccggaggcattgc

SEQ ID NO: 22692 - DNA, 1222 bp, Artificial sequence
  DNA replication origin
tcgccgtcccgccgcccccgcccaggtccagccaagacagaaggcgccggagtccctgcggtgctgggtccgcggcgctcgggaaggatgctcctctcgccagcctcccctcgggacagcggcgaccggcgttctgacattccccgccgtaacacctgctcggcgccctctccccgcgcgtctccgggttcgccccgcgcccgagacccctgccccgctgggcgcccctctcgccctctggtggcacagagaccccagccccaagggactgcaccctcctcggcaccgggcgcctgcagctgagtctgggttgaggccagggcccgaccggcctcgcccccagagcctcgcctccccttattccaacaccggcggggactgggtggtcgcaagcatgcgactccttacccggcagcttgagcgccctggacagcacggtcgccatggctgaggccccggtgcgcgtgcgcgcgcccgcgttctgccgggaagtgtagttccgagcggcggtgcgtggggctgggaccgggaaaggtgggacccgcttgctggggacagagctgagggaggccaagccagagtacacgctccgcaggcttttctcccaccctacctatgcaggtcacctcaccactctgagtctcacttgcctcgtcagtgaaatggggagaaaataccccgtaagcttgcagtgaaaatgattcgaaggagatatttaaggaggtgtggattgtgcaatgtgcgtgggctttgaaatcaggcagactggatttgaatcctgcctgaatcacttactagctgggccatcttgggcaagtcccttggggcgactgagctgccgctgcttttttttaattaaagacatactacctacttcacaagcttgcaatgagaattaaatgatacgacctgtttaaaacacacagcacacagtaggcacctagtaagagtgtttctattacgcttcttaggtagaagttgaagtttcctggagctcgaaccctcatttattgctcccagttctttacaggtgtctactcagcaccctacgctgcagcttctagttgaagggtgtagaaggaggatccgactgtgtacatacatccaatagatgcagcatctccagctcctcagatttcaatgcttgacctttaaggcatctgcacgctccccgtaatcaccccagctttgcctgaatgatttttgcggagagcccgatgcc

SEQ ID NO: 22693 - DNA, 1956 bp, Artificial sequence
  DNA replication origin
atgaaaacagtggggatgttggggccagacgcagtggctcatgcctgtaatcccagcactttgggaggccaaggcaggcgatcacctgaggtcgggagttccagaccagcctgaccaacatggagaaaccctgtctctactaaaaatacaaaattagctgggcattgtggtgcatgcctgtaatcccagctactcgggaggttgaggcaggagaattgcttgaacccaggaggcggaggttgcggtgagccgagatcacacaattgcactccagcctgggcaagaagagcaaaactccgtctcaaaaaaacaaacaaacaaacaaaaaaacaaacaaagaaaacagtggggatgttaactacaggaacataacacagtagcccaaacaggacagcagtctcaggaccccaattacaggggagccaaaaagagctatataaaaacaacttgtacctaatgcaaaaactaaaaatagtattttgggtggagggaagaagaaagggcaagaaggagacaaggaaaaacgcaagtgaacattttctcccatccaagtactaaccaggcccgaccctgcttagcttccgagatcagacgagatcgggcgcgttcagggtggtatggccgtagacgcaagtgaacattttcttaaaacccacatcacatgaaagaacacatgcctactatatctgggcctaaaaaagcatcaagcatacctcagggctcagggccaagctgcctgccaaacaggcccatggactggactatgggaaccccaaccagttcctacaactaatactccagggagtaataacaccacagccttggggcataagaacacaaaagacctcaagagttgctaaagcaagattttcatgcattctcattcttagagaataacaatgacctacactgaaattttaaaaaaggactctaaaagaaaaaaaaaaaagaaataaagctaaatgtctgacatcttattacccctctgggaggacatcattctacactaaggatatacaaagtaaaaaagtaaaaaattaatcctgcaggtaaagggccacgtctctcctttaattccagtgttatgcacacattccaaggcagatgctatcagtgttccttccaatgttccaatgagcccatattaaaaaaaataataatctgtctgaggtcatgaagtctggggacagaaacgcaaattaatatccaacctagcgtcatccaaatggcaaggttcgcttcagggtagcatactggaagctccttgagaacaaggaccctgtaatccccctgcaagctcaaactagctatccaaccaaaacccaaatagccctctctagagatagctatgaaagcaactgcttttccctctaatacaaattatcagcaaataaatgtttatagcttaatgcttaaaacttacctaggtagagccatcaatttttctaaagcctaatgtttaaaatttacttgggtggaataaatatacttttatttaaatatcaactttctaacagtacaatcctactctggaggtttaggaggaaaaaaaaaaaaaaaggaaaaaaaacttggagctgctgcccgaagtactgaatcagctctggaagttgtcatcacccctaatgctgccttaaagaagattccatacattatcttcaacttataggtgccaaatcatttcccatgcttaatctcggcagctggagactgaccaagtggaatcaaaagctcaggatttagagtgaaaagacccctgacgttcaaggccgagctttcccaatacttgtgagaccttggacaattcacttagccaaataactctcattttctcttctgtaaactaggaagggacgtaaatacctgtcccacctgcctcatggatgcgtcgttgctgccgttaggtggaggggatgatccacagagggccactcgccgtcccgccgcccccgccca

SEQ ID NO: 22694 - DNA, 2261 bp, Artificial sequence
  DNA replication origin
tccattctcagccctgctcctgagaagtcaatctttcgaacccctcagttctccagagatcagccttctgaaatcctcagaatggctatgaacctggcagtaataatgcagtggaaggggaaaaaaactggcatctgacaactgtcttataaagagatttcctggaagtgctacacgttacttctgcttacagcacatcggccagaacttagtggaggcatcacccataacaggagaccaaggagtgatgaggtcctgcaagtggcagtcaagaatggctaagaaattcggcctttaacctgaaaaagacaagaaaccattaagggtcaggtctgccttttagaaaggtcactctagctatagtggagatagtggattcactgggttcaaactacaggcaagaagcccagagagaagagagttgttatggtcaggcaccagagggctgccagtcactgaaccaagtaacggcaatgggggaagcgaagtaggcctgaaggcctatgatgagaagactggatgagggattagatgtgggaccggatgagggattgatgtaggaacagatgagggattagatgtgggaccggatgagggattgatgtaggaccagatgagggattagatgtgggaccggatgagggattggatgtaggacgggatgagggattggctgtaggatgagatgagggattggatgtaggacgggatgagggattggatgtagaagcagatgagggattggatgtaggaccagatgagggattggatgtagggccagatgagcgattggatgtagggcgggatgagggattagatgtgggactgaatgagggattggatgtaggaccagaagagggattggatgtaggacaggatgagggattggatataggactggatgagggattggatgtgggaccagatgagagattggatataggaccagatgagggattggacataggagcagatgagggattggatgtaggagcagatgagggattagatgtgggatcagattaggaattggatgtagggccggatgagggattggatgtagggttggatgagggattgaatgtaggatcggatgagggatttgatgtaggacgggatgagggactggatgtgggactcgatgagggattggatgtaggaccggatgagggattagatgtaggatcaggggagggattggatgtaggatgggatgaaggattggatgtaggatgggataagggattggatgtaggacgggatgagggattggacgtaggacgggatgagggattggatgtaggacgggatgagggactgaatgtaggacggcacaggggctgggtgtaggatgggatgagggattggatgtaggacgggatgaggggttgggtgtaggatgggatgaggggttggattagatgtgggaccgggtgagggattggatgtaggactggatgagggttggatgcagggtcagatgaggggttggatgtaggacgggataagggattggatgtaggacgggataagggattggatgtgggacaggatgagggattggatgctggacaggatgaggaattggatgtagggtcggatgagggattggatgtgggaccagatgagggattggatgtaggattggatgagggattagatgtaggatgggatgagggatccgatgctggatgggatgagggattggatgtgggacaggatgagggattggatgctggacaggatgagggattggctgtaggactggatgaagggttgtatgtagggtcagatgagggattggatgtaggacgggatgagggattggatgtgggacaggatgagggattggatgctggacaggatgagggattggatgtaggactggatgagggattggatgtagggtcagatgagggaatggatgtaggacgggataagggattggatgtgggacaggatgagggattggatgctggacaggatgaggaattggatgtagggtcggatgagggattggatgtgggacgggatgaggaattggatgtaggatcggatgagggattagatttaggacgggatgagggattggatgctagatggaatgagggattggatgtgggacaggatgagggattagatgtgggaccggatgagggattggatgcaggaccagatgagggattggatgtaggacaggatgagggattcaatataggaccagatgaaggattggatatgagcaggtgaggagaaggggc

SEQ ID NO: 22695 - DNA, 1549 bp, Artificial sequence
  DNA replication origin
aagtgaagacctgcagaaagaggactgcaggcagggagaacagcaggtacaaaaacccagtggagagaataaccttgacattctcctgggacagtaagggctgagtgggctgggcactgtggctcatgccagtaatcccagcactttgggaggccgaggtgcacagatcgcttgagcttaggagttcaagaccagcctgggcaacatggcaaaaccccatctctactaaaaatacagaaatcaactgggcataatgacgtgtgcccatagtccctgctactcaggaggctgaggtggaaggatcagttgagcccaggagattgaggctgcagtgaaccatgattgcgccactgcactccagcctgggagacagagtgagaccctgtcagaaagaaagggaaagaaggcgaggggaggggaggggagaggagaggaggggaggggagggggaggggaggggaggggaggggaggggagaagggaaggccagggtgggctgggcacagtgagtgaggaatgactggtaaaagacgaattggaggggtggggcggccagagcccaattggccatgaaagtgattacaaggaatttagatttttttacagggagttattccaacttaggtccagacccatacctaacatgtttgaggcccaaaacaagagtttaaagggaaaccctaggctatcttataaaggttcttcatcctctgtgcccactattccagtgtaaatgtccccagaaagacacacgagagctcatgcccatgaacacctagtgggctgctgaatgccagtgaagattggttgagcatacgaggaggccaagatattttcagctggcagcagaaaggtcaagtgaaatggattgcaagggggtatgtccccaggacaaacttcacccactgcacttatgtctggagcagaatgtgctgtgagaggtggagacaagataagagtccagcttgacctactggtgaaagaatagatgagggaaagtatattagttatctattgctgtgttacaaacttctccagacttagcggtgtaaagcaacagtaagtatttcttatctcatacagtttctatgggtcaggaatccacaagcggcttggctgagcagttcatgtttagtatctcttatgaggctccagtcaagatcttggccagggctgccgtcatctgaaggcttgactggggctagaggatctgcttctaaaatggtccactcacctggctggcaagatgaatgaagcaggaggcctctgttaccagagttctccactgggctgcctaggagtccccatgtgtattagcctgttttcacgctgctgataaatacatacctgagactgggaagaaaaagaggtttaattcaacttatagtgccacatggctggggaggcctcagaatcatggcaggaggtgaaaggcacttcttacatggaggtggcaagagaaaaatgagaaagaagcacaagcagaaacccctgataacaccatcagatttcgtaagacttattcactatcacaagaataacacgggaa

SEQ ID NO: 22696 - DNA, 2201 bp, Artificial sequence
  DNA replication origin
tggggggccaggcagatggtggtgtgatttgccaagacaagagctgcaggagaatgaacaggtatgggggacaaactaatacattctattgtatggaggttgcatctgaggccaccaagagatttcaggtgtaaattacaacaggaaggcagaaatattactctggagttcagacatggatctggttacaggtatagatttggagcttataggttatagttggtagttagagcattagatctaaatgagtgtgtgtgtgcaataaaaataagagcgctaaattaggaagagcctgcctatttgtaggaggtgagctgaagaggagtaacatattaagataggaaaaaaaaatccctgtatatatcagctcaagaggcaggaagataattgggaatcattgccattatggataccacaaaggaaagaaaatttcaaccaggaattttcaacagcatcaaataacagagaaagcctgcagtgttcactggcttgatcagagccaagtttaggggtggggcaaagcatagggaggtggggagaaagctggattgcaagaatgaacagcctatcattgcagcagtgaaacatgcagcaaaggggaatgtagcagagggaaatgcatcagtggaaaatggaaatgcagcagtgggaaataagaatacagcagagggaaatgtgttagtggaaaatgggaatggagcgctcggaaatgggaatgaggcagaggagaagagaaatggagaaaggggaatgcagcactgggaaaggcaatggagagaatgtagtagtgagaaatgggaattcatcagggggaaatggagggatggaaatgggaatgcagcagaagataataggaatgcatgagtggaaaatggaaatgcagcagaggggagtgtagcaaagggaaatggaaatgcagcaaaggaaattgagaatgtagtagagggacatgggaatacagcagaggaaaatggggttgcagaagtggaaaacatgggaatgcagcagaggggattgcagagtaagaaaatggaatgcagcagtgggaaatgggagtgcagcagtggtagataggattgcagcagagggaaatggaatgcaggagtgggaaatgggaatgcagcagggggagatggaacgcaggagtgggaaatgggaatgaggcagagggagacggaattcaggagttggaaatgggaatgcaggagtggggaatgggaatgcagcagagggagatggaatgcagcagagaaaaatgggtttgcagcagagagagatggaatgcaggaatgggaaatgggaatacagcagagagagggaatgcaggagtggaaaatgggattgcagcaaagggagatggaattcagcagtgggaaatgggaatgctggaatggtaaatgggattgcagcagagggaaatgggaatgcagcagagggagatggaatgcaggcatgggaaatggaaatgcaggagtgggagatggaataaagaattggaaaatgggaatccagcagaggggaatgggattgcagcagagggagatggaatgcaggagtgggaaatgggaatgcagcagagggagatggaatgcagcagtgggatagggattgcagcagagggcggtggaattcaggagtcagaaatgggaagatgaagcagagggagatggaatgcagcagtgggaaatgggaatgctggaatggtaaatgggattgcagcagagggaaatgggaatgcagcagagggagatggaatgcaggagtgggagatgggaatgcagcagagggagatggaatgcaagagtgggaaatgggaatgcagcagagggagatggaatgcagcagagggagatggaatgcaggagtgggagatgggaatgcagcagagggaaatggaatgcagcagagggagatggaatgcagcagagggagatggaatgcagcagagggagatggaatgcagcagagggagatggaatgcaggagtgggagatgggaatgcagcagagggagatggaatgcagcagagggagatggaatgcagcagagggagatggaatgcagcagagggagatggaatgcagcagagggaaatggaatgcagcagagggagatggaatgcaggagtgggagatgggaatgcaggagtgggaaatggaatgcagcaaaggggaaggagaatgcattagagagacatggga

SEQ ID NO: 22697 - DNA, 780 bp, Artificial sequence
  DNA replication origin
gccggtacgtaaagatgggctttggagtctctcctttgaatgtaggggtttgggggtgtcaggcagataaagggtcgaagccgtgaaatcgtgaacgaatctggcatgaggtaaagctctgaaatccagcagaacccggcacttgctaatttggacgtggcttttttaaaggttttttttttttgtgggggagggggtgctgtgactgggtagggctgtctctggtcttttggggggtttcatcccttcacctagcagaggggcagggcagcggcgccccgggccggacccacgcgccgagcccatccgtccaatcgacacgttgcaggtgaagccccgtgcgctgcacctcagcgcggcggcagcgtgagtgtgcgcgggggtgagtgtgcgcgggggtgagtgtgagtgcgcgcggggcgcgtgcgcgtcgggggcgtgtgtgcgcgcgtcagtgtgccccttccaagaaatgcccagtgtgcaccccgtgcacaatcagaacccattcagcacaagcccggggtgggaggcggcgctgctgctggaggcgatggggagagcgagcgagacaagtcagcagcaatgcagatggggctgggggccgcactcgctggcgagttaagtgggaattgtgtttctgcgtgtgtgtgagtgtgtgttgctgtatggtgccgcttctcccccccttcctccttccttcccacttccctccttcgctcgctccctccctctctcctcttccattcaggttggctttcccacctctcatccgtgcct

SEQ ID NO: 22698 - DNA, 851 bp, Artificial sequence
  DNA replication origin
caaattagcaagtgccgggttctgctggatttcagagctttacctcatgccagattcgttcacgatttcacggcttcgaccctttatctgcctgacacccccaaacccctacattcaaaggagagactccaaagcccatctttacgtaccggctccgagcgcctccgcggttgcagtctgcggagaggggtggccggtggctgggaatggagggttttcctttcctgcaaagcaggattaatgatccgtctcgggggttttgaagttcatgactcttctttgcaaggcaaaaggatatgcattcggacgccagcactactggatggtggtgatcaagaatcacccttgacgagcactctcgatagagcgaagccccgagatttcctagaggtgaagaagccggaggaagtggtttttgaaagggggtggggggaaccttcctttctcaaaaagaggtggggggtggagaggcaggagcccagattccagttggtgaggatcggagccgggggaagggaagcgggcgggggcaggctgtgcaagtcaaccgcgcggcagccggagagggagagcaggaggggaggaggggagcgtcagaaaaatgggtattaatcaccggggacggggggaggcgcggggaacgcaggttgcctggtctggatttgggtctcacactcaaaaacgtgccgcgcacacacacacagacacacacacaccccctacctcgcacaccctgactccggggggaggagaaacccacgaagctggggaagatactgcttctgctcccaggggcgggtgtgagcgcgcgtgtcctctttctccacaccccccaccccaccccaccccca

SEQ ID NO: 22699 - DNA, 1400 bp, Artificial sequence
  DNA replication origin
ggggtttctctcacagtggaggcaagtaattgcaactcagaaatacattgccacttggttgcctcttctctattattgtacaccttgaagagaagattaattaagtcctgttgtggggtttgagggccggaatctaatttttggagctttttgtaacgtcgggagtggactgggtaataaaatgcattttgagaataagacagccttctgggccctgtgggtctagggtggtaaagcgtttaaaggttgttgccaaacgggccatgaactgggctgggtttttatatttgatgaaaaagagtctaaacgctaactgatttgggagaggtcagatgaagaaaaaggagcattaacctggattatgccttcagatccagccacctctctaagaggaaattgttgggcaggtgggggagggctagtcgtggaacaaaagtgtaagccagactgggtgtgaggaggggaggtgatagaaggattatagggtgggggagcggaggctgaggaagaattgggacctggctcagcctggggaggaggggagaggtcagatgggtctgtagaaaaggaggattcaaaggactcagagcttggggtggagactgaaggaccagacaggagagaaagaagaaagatttgggacgagttgcattgggagcagagactaggaagtgactgatgtgtaaagaatgcctggatgtcaggcacctcagaccatttgcccattttatgacaaaaattatctagatcttgtaggatggacaaatcaaaagtgccattctctggccacttggaactattgtcgagtttgtattggggccaagcggtattacagaagaaaataagacgtttaggttttaggtcagatgttagtcgaaggggttttaggtttttaagaacacaggctaagggggaagagggaggaatggatggtagaaggttgcccatagtggagaaggtaagtttaaagaggaaggtagagacacggagaaatggaggtgggcagataccaggcttccagtatgcgtccctgactgagtcctgggctgtaatgtgggtgagcagccaaagcaggtgtccctgcaattgacctgccaccaagggagtgtgggtgaatgatgaaggcaggcgtccccgctatgatcaaacaccaagggaagactgtcttcccaaatctgtgacggacattggagtttttgagttcacagataaaatgtgtctcctttgtctctactagaaaggaaaagaactggaattggaaggatagggagactgaagggtagcaagagaggctggagaagagagtgaagagaccgcttcctgatttgaaattggtgagatgttccttgggctgatctgatgacacctccaaaggaacacaatgattctctagtaacaga

SEQ ID NO: 22700 - DNA, 1221 bp, Artificial sequence
  DNA replication origin
ttctggaggacagctgcagctaaagagtcaacctgggcttggaggacagataaagtttgtgatatatctgtaatgctagcagagaagtcattagagaggctgcagaatgttgcggcagcggttgagatgcctgctattccagtttcaagtgcaatagtggaggcagaaagtcctagacccacaagtaaagggattagtgggatgactcttttttgttgtgttggtgtcatgagggggacaggcagttgatcgttcccatctgcaaactggattttgggggtaaggaagactagagtacatgtgcctgtccagttggcaggtaggcacatgtaggtggaagagccacataaaaagaagagaccttgtgtcaggcagaactggaaatgtaaagtgaaaaggtgagagggtgtactgaaagaggagacctgtgcccagaatcccagcaagggcagcagccattagaggttgtaatgggaattgatggtgcaactgcatggaggcagaggttcggttctcatggtgtatgagaaagcacatagtgtctacgagtaacctttcactgttattcatggggctgggtataagcaagcaagaggaggggctaggaggagagtcagatgagcagggggagggtagccaaggctggagtgagatgcagggtaggtgtcttcctaaacaatagtgactgccaatgttttttagtttgtcagtaatgatagaggcttatcagtaatgtgaagttggaatgctcccatctgtttggtaatgtgtgtggctgggttctggagataaagagtaaaggaacatttggacggtggaaggttgtctaaagggattccagtaggctgttgtcaggagatgcataaaggaatggcaatagggatagttgtttgtgtggttaggggtccaaatatgggggcaagggtggaattgacataaggagaaaggtgccataagtagatgttgagaagtgtggcagctcgttggtgcgaaatgtctggggagttctcacctaatctgtctagaaagtaaagaagttcctcagatgggtaaagatgagggctattaaaggaaggttggaggtgcagggagacaggagaggtagcccagttggcctgtagagcggggatggctgtataagagcaggaagaaagggaaatgcatagccaacaattctttgctagagaaggattggaggcagtgaggagagagtgggtgaga

SEQ ID NO: 22701 - DNA, 1208 bp, Artificial sequence
  DNA replication origin
ccatttaaccctgagtggacacagcacatgtttcagagagcaccgggttgggggtaaggtcatagatcaacagcatcccaaggcagaagaatttttcttagtacagaacaaaatggggtctcctgtgtctacttctttctacacagacatagcaacaatctgatttctctatcttttccccacatttcccccttttctatttgacaaaactgccatcgtcatcatggcccgttctcaatgagctcttgggtacacctcccagacggggtggcggccaggcagaggggctcctcacttcccagaaggggcggccgggcagaggcgcccccccacctcccggatggggcggcagccaggcggaggcgccccccacctccctccctgacggggtggctggccgggcaggggttgccccccccacctcccggacggggtggctgccaggcggaggggctcctcacttgtcagacggggcggctgccgggcagaggggctcctcacttctcagacggggtggccgggcagagatgctcctcacctcccagacggggtcgcggccgggcagaggcgctcctcacatcccagatggggtggcggggcagaggcgctccccacatctcagacgatgggcggccgggcagagacgctcctcacttcctagacgggatggcggccgggaagaggcgctcctcacttcccagactgggcagccgggcagaggggctcctcacatcccagacgatgggcggccaggcagagacgctcctcacttcccagatggggtggcggccaggcagaggctgcaatctcggcactttgggaggccaaggcaggcggctgggaggtggaggttgtagtgagccaagatcacgccgctgcactccagcctgggcaacattgagcactgagtgaacaagactccatctgcaatcccggcacctcgggaggctgaggctggcagattactcccggttaggagctagagacctgcctggccaacacagcgaaaccccgtctccaccaaaaaaatacgaaaaccagtcaggcgtggcggcgcgtgcctgcaattgcaggcactcggcaggttgaggcaggagaatcaggcagggaggttgcagtgagcagagatggcggcagtacagtccagcttcggctcggcatcagagggagaccgtggaaagagaggcagagggagaccgtggggagag

SEQ ID NO: 22702 - DNA, 941 bp, Artificial sequence
  DNA replication origin
gatttttaaaatcgagaaagtcaaagccgccggaccccgggaccggcgcctttcgccaaggggctcttacctcggatccgccctcggggccacggctttccccggagacgccgcgagcccagacgaggtgggaggggaccgggagaaagccccccaatctgattcgcgcccagccagtcgtccgcgagccgcggagccgccttctgcacccagctaaagagcagcgatctccgaggcgagcacagcgccggcctcgcgccgggcgagaccgcctcgctagctgctgcctgtgaagtctggagccgcccgcccgctcgcagccagtgccaaccgcgcgccgcgcatgcccagtgcccgcgcgaggaacgagcgagcgggcgggcgggcgagtgcgcgccccgcagccaggagcgaaatccgctatccgggtcttgccggcagccgagccgcagagttctggtcgactccagcgcttgaggcgaagtggccggtgaggccgggtgggcgggagagggaccggaggaaaggagacggggcgctgcgccaagttatcaaggccgcgatcaaagtcggaccaaggcagcgagtcgacagcaggtttccagaagtgccctaacaggactgactagcagccaggaggcgcaggaaggggcaaagagcgtgtggagagcttcgcccccggcgaggatggacgccccgggcggagggagcgctcgggttgcaacacccagtctggctgcacagctcgtaacccctgccctttggcggcaaacaagacgcatctaatgaccagccagccttcgtcttcctcctctgatcatcggacctattttcccccttttgtcgctctcctctttttttgtctctccaacccatgcggtaaactggtggtgcccaaggccctccatcgggtccctgagagtctcccaactgccggtcct

SEQ ID NO: 22703 - DNA, 1040 bp, Artificial sequence
  DNA replication origin
ggggtttctctcacagcggaggcaagtaattgcaactcagaaatacattgctgcttggctgcctcttctctattattgtacgccttgaaggcgaggttaattaagtcctactgtggggtttgagggccagaatctaattttgggggctttttctaatgtccggagcggattgggtaataaaatgcatattgagaataagacagccttctggcccctctggccctacggcagtaaagcgtctaagggttgttgccaaatgggccatgaactgggctgggtttttatatttgatgaaaaagagcctaaacgctaactgatttgggagaggtcatataaagaaaaggagcattaaccttgactatgccttcagctccagccacctctttaagacgaaattgttgggcaggtgggggagggctagtcacggaacgaaaccgtaagccagaccgggtgtgaggaggggaggtgataaaaggattatagggtgggggagctgaggctggggaagaattgggacctggcttagcctggagaggagcagcctggggaggaggggagaggtcagatgggtctgaagaaaaggaggattcaaaggactcagacaggaaagaaacaagaaagatttgggacgagtcgcattgggagcagagactagggagggaccaatgtgtagtaaagaatgcccgggacatcagacacctcagaccatttgcctatttttgacaaaaaatatccaggtcttgtaagatggaaaaatcaaaagtgccgttttctggccacttggaaccattgtcgagtttgtattggggcctagcactattgcagaagaaaataaggcatttaggtgttaggtcaggtgtgaattgaagaggttttaagttcttgagaacacaggctaagggagaagaagggggaatggagggtgaagtttgcccatagtgaaggaggtaagtttaaagagaaaggtagacacggagaagggggtggtgagcagccaaagcaggcgtccctgcagttggcttgccaccaagggaatgtgg

SEQ ID NO: 22704 - DNA, 1010 bp, Artificial sequence
  DNA replication origin
aatatttctcaaattttaatgcaacaaataactctgttgtatggtttagctgtgtccccagtcaaatctcatctcaatttataatccccataatccccacgtgtggaaggagggacctggtgggaggtgatcagatcatgtggacagttttcccccatgctgttctcatgatagtgagtgagttctcacaagatttgatggttttattaatgtttagcaggtaccccattctccccctttttttcctgccaccttgtgaaaaaggcccttgcttccgcttcaccttccgccatgaatataagtttcctgaggcctccccagccatgtggaactgtgagccatttaacctctttcctttattaattacccagtccaggtgcgtccggaattgctgggttcctggtctcactgacttcaagaatgaagccgcggaccttcgcggtgagtgttacagctcttaaggtggcgcgtctggagtttgttctttctgatgttcggatgtgttcggagtttcttccttctggtgggttcgtggtctcgctggctcaggagtgaagctgcggacctacgcggtgagtgttacagctcttaaggcggtgtgtctggagttgttcgttcctcccggtgggttcgtggtcccgctggtttcaggagtgaagctacagaccttcgcggtgagggttgcagctcataaaggcagtgtggacccaaagagtgagcagcagcaggatttattgcaaagagcgagagaacaaagcttccacagtgtggaaggggacctgagtgggttgccactgctggcttgggcagcctgcttttattcttttatctggctccacccacatcctgctgattggtagagccgagtggtctgttttgacacggcgctgattggtgcatttacaatccctgaggtagaggtaaaggttcacgtccctaccagactcaggagcccagctggcgtcacccagtggatctcgcattggggctgcaggtggagctgcctgcca

SEQ ID NO: 22705 - DNA, 1070 bp, Artificial sequence
  DNA replication origin
ctcgttccctcctccctcggcagccgcggcggcagcaggagaaggcggcggcggcggctagggatcagacatggcggcggatctgaacctggagtggatctccctgccccggtcctggacttacgggatcaccaggggcggccgagtcttcttcatcaagtaaagagccggggacggcacgggggcccgcgggggcgggagggcaggaggcgggcggctggcgacacgggggagagcccgggtctgtgctcctgcagcccctcggctcgcccccgcgtcccctctcacgctccgtgtctgccccttctctcacccctgcagcgaggaggccaagagcaccacctggctgcaccccgtcaccggcgaggcggtggtcaccggacaccggcggcagagcacaggtaacgccgggcccaaacggagttgggctccgcctggaggaggcggcagagcccgggccgcccggctccccgcaacctgccccgcgccgcgggccccgggaggcggcgaggcggggcggaggccgggcgggagcggccgcaggtagaggggccacggggactccgccgccgggagttctctccagtctcggggcgcctctttctcctcagcctttcatcagcacttggagacggcgccctcttcctgcgccttctccccccatcccagcctagacgaccctcgcgaccctagagtggcgacgctcccctccctgaaacctggagtcctgagtttttcctccgcggccgctactcactccccggtgacccccagctgccgtcttgccccccagcaatcttcaggcagtccttacccactcccctccctgcagccccggaccccgatcgcccgccgggataacgtaaccacatcctccccctcctcccaggagcgctgcctcctgccgtgcagcttcctcctcctaggtgggacttgtgggtaggtggctgatgaaggaggaggaggaggaggagaggagttcgggggtgctgcgatcctctctgtgacagggaacggctcgggaaacgcttggcgcgttccctcctgccacgggaggagcagccggagcc

SEQ ID NO: 22706 - DNA, 1415 bp, Artificial sequence
  DNA replication origin
gggcgggggcgggggcgcagaacccgcagccgggggaggtgctgcctcgtgccgccgcgcaggcgcgcagcagtctccgtgtgagtgcgcgtagtcgcgcgcctgtccccgcgcgggctccgtagcgcgtgtgcaggctgacgcagctcgcgggccctcctcctgctctgcagcggcgtcggcggagttttgggcgtttgggaggggggcgagggagagagagtcgagagagggaggcggcggtggggaggaggaggaggaggaggagcaggcgccgccatggccgccgctatcaccgacatggccgacctggaggagctctcccgcctgagccctctgccccccggcagcccgggttcggcggcgcggggccgggctgagccccccgaggaggaggaggaagaggaggaggaggaagaggaggcggaggccgaggcggtggcggcgctgctgctgaacggcggcagcggtgggggcggcggaggcggcggcggaggagtggggggcggcgaggcagagacgatgtcggagccgagccccgagagcgccagccaggccggggaggacgaagacgaggaggaggacgacgaggaggaggaagatgagagcagcagcagcggcgggggtgaggaggagagtagcgccgagagcctggtgggcagcagcggcgggagcagcagcgacgagacccgctcgttgagccccggcgccgccagcagcagcagcggggatggggacggcaaggagggcctggaggagcccaagggaccgcggggcagccagggcggcggcgggggcggcagcagtagcagcagcgtagtctccagcggcggcgacgagggctacgggactgggggaggcggaagcagcgcgacctccgggggccggcggggcagcttggagatgtcgtcggatggggaacccctgagccgcatggactcggaggacaggtcagtgctctgaagcgtttccccttcccttcctcctcttgaactcccgggcccctcagagggggaccaaggcgacgttttgccgcgatccccctgctccccgaatcctcggcccctcccccagactctcaactcggaaatctctcgccgtcgccgccgcgcccctctcgcagcgcatcgcggcttccaactctcaaaccgttcccccccaactctcctttccccgccctctttcccctcggcgcttcgctcctcacggacctcaggacggctctaactcggaaacagtccccaaacgggcccagatcctctggcggagcagaagagggccttgatgtacacacgtcggtactcaaggttagcttcttccaaccgtgttcgggaacacttgtcagaactacaattgacaagtgtttccaatatggctggtctcgcctggatttaacagaacttccttgtccatgg

SEQ ID NO: 22707 - DNA, 1251 bp, Artificial sequence
  DNA replication origin
aaaagtgcaagtaatctccctgagtaagagatgtggcctagagagtacatgtgcacaggatactaaggaatgtacaggaaggggagtatgcacaggatagtaaagggtgtacaggttggtgagtttgcagaggatagtaagggatgtacagattggtgagtttgcacaggatggtaagggatacacaggaaggtgggtttgcacaggatagtaagggatgcataggatggtgggtttgcacagggtactaagggatgtacaggaacgtgagtttgcacacgatattaagggatgcacaggttggtgagtttgcacaggatagtaaggggtgtacaggctggtgggtttgcacaggatagtaaggggtgtacaggctggtgagtttgcagaggatagtaagggatgtacagattggtgagtttgcacaggacggtaagggacacacaggaaggtgggtttgcacaggttagtaagggatgtacaggttggtgagtttgcacaggattgtaagggatgtacaggaaggtgagtatgcacaggatagtaaaggacgtacaggttggtgagtttgcagaggatagtgagggatgtacagattggtgagtttgcacaggacggtaagggacacacaggaaggtgggtttgcacaggatagtaaggggtgtacaggatggtgagtatgcacaggatagtaagggatgtacaggatggtgagtttgcacaggatagtaaaggatgcacagattggtgagtttgcagaggatagtaagggatgtacagattggtgagtttgtgtaggatactaagggatgtacaggatggtgggtttgcacaggatagtaagggacatgcaggaaggtgggtttgcacaggatggtaagggagatgtacaggatggtgggtttgcacagtatagtaagggacgtacaggatggtgagtatgcacagcatagtaagggatgtgcagaaaggtgggttggcacaggatagtaacggatgtgtaggatggtgggtttgcacaggatagtaaggggtgtacaggatggtgggtttgcacaggatagtaagggatgtgtaggattgtgagtttgcacaggatagtaaggggtgtacaggatggtgattatgcacaggatactaagggatgtcctggaaggtgagtttacacaggatagtaagggatatacaggatggtgagtatgcacatcatagtaagggacgttatctccctaagtggcagaggtcacatag

SEQ ID NO: 22708 - DNA, 1135 bp, Artificial sequence
  DNA replication origin
caaatcaccaccaaccttgcatcaaatagaagtggggagggaaaaaaaaagcaaatctccttctcccttctcaccctccctttcttctcaccctcccttcctctcttactcgctccttctccctccctcccttctgcggctgccgctagtctctcggtctggctctctctccgacgggacttagcaacttcttatttctcagccccttgtccatttttttttttccatcctttgccatgaattggattgacagaggcgggggaggctttgctttctgccccagggaatggcgattcgcgtcctggggccgtgccggggagaatcggccgaggagaaagaaagagtgatagaaaaagagctgcaggaaggaggagaagggagacctccatctgccgcgggcccggcgcgctgcagcgcagcgcagcgccgagctgcgcctcggaatggcccggagcccgccctgcgcccccggctcctccagcgtcagcggctcctgcgcgcgggatgcattgggcaatttttgaaatcctgaagtaggaagagaccccggaggatataagtcgggggtgggggtggagcagagaatctgtgaaagatattcaaagagagaaaaggggaatcctgatcgtttctgcccgtgcttgttttcaacttgagcgtgctagcctttaacttgaagaagtctcattggagcatctagcattctccaggagttattcgaaagctgaaactttcagtggattgtgggcctggggagaagaaggattccgagggtggaattgggaagagcgtgcgtgcgtgtgtgtgtgtgtgtgtgtgcgcgcgcgcgcgtgggtcggggcgggggcgtcggggggccactgggaattcagtgaagagggcaccctataccatggcagtgcccggcgacgctgcacgagtcagggacaagcccgtccacagtggggtgagtcaagcccccacggcgggccgggactgccaccatcgtgcggaccccgcatcgccgcgggactcgggctgccgtggctgctggggagacctggtgctgcagccgctccggagctctcggaaactttcctccgcgctgtgcgcgggctccctgtcctttctgctggcgctgctggtgaggctggtc

SEQ ID NO: 22709 - DNA, 1117 bp, Artificial sequence
  DNA replication origin
attagaaagacttagcgacgcttggggttgggcctgaggggacaggcgggagggaaagaaggaagatttgggatgaattgcattgggcagagactaggaagggactgatgtgtaaaagaatgcctggacatcaggcacctcagaccatttgcccattttatgacaagaattatttaggtcttgtaggatggaaaaattgaaactgccatttttctggctatttggaactactgtcaagtttgtattgggttcaagcggcattgcagaagaaaaaagacgcttagattttaggtcaggtgagagttgaagaggtcttaagttcttaagaatacaggctaagggagaagaaggaggaatggaaggtggaagcttgcccatagtgaaggaggcaagcccagagaaaagagtagagacatggagaaggggtgggggtttcttgccctccagaaaagcagagaaagggttggggcacagaaataagggattggggcacagagataagaggttggggtgtggaaataagggattggggtgcagagataagaagttgtggtgtggaaataagggattggggtgcagagataagaggttggggcacggaaataagggattggggtgcagagataagaggttcggcacagaaataatggattggagcacagagataagaggttggggcacagaaataagggattggagcgcagagataagaggttggggcatggaaataagggattggggtgcagagataagaggttggggcacggaaataagggattggagcacagagataagagattggggcacggaaataagggattggagcgcagagataagaggttggggcacggaaataagggattggagcgcagagataagaggttggggcacggaaataagggattggggtgcagagataagaggttggggcatggaaataagggattggggtacagagataagaggttggggcatgaaaataagggattgggggttcttgccctctagaaaagtgggacttgccactaagggtgaaggagaaggggttgaggggtacttgctcctctcccagaaaagtgggacttgccactaagagtgaaggagaacgggttgaggg

SEQ ID NO: 22710 - DNA, 983 bp, Artificial sequence
  DNA replication origin
ggtttggagcaatatggaagataaagcaacccacattgatcacggctgcagaagagacaggaagggccaagttatagctagaaaaaaaagagaaacagaaaaattcttacaagaggctgaaagtatggagaatttcatttattattagctatgcactccagaaagctcaagaaaagagttttggttcaggattgggagagagataggagatgggggcaaaagcaaaaatgtgcatagccacactgggattagacaagaggtaatgagtgatcaggaagtacctacttttttttttttttttttgagacggagtcttgctctgtcacccaggctggagtgcagtggtgcgatctctgctcactgcaacctctgcctcccaggttcaagccattctcctgcctcagcctcccgagcagctgggcttacaggcacatgccactagtgtccgtaattggggggttcttggtctcactgacttcaagaataaagccgcagaccctcacggtgagtgttactgttcttaaaggcggcatgtctggagtttgttccttctgatgtttggatgtgttcattcctccccgtgggttcgtggtcccgttggctcaagagtgaagctgcagacctttgcggtgagtgatacagctcataaagacagtgccaacccagagagtgagcagcagcaagattcattgcaaagagcgaaacaacaaagcatccacagcgtggaaggggacccaagcagatttcaatgctggcttgggcagcctgctttcattcccttatctggccccacccacatcgtgctgattggtcccttttacagagagctgattggtccattttgacagggtgctgattggtgcgtttacaatccctgagctagactcaaaagtactccaagtccccactagattagctagacacagagcactgattggtgcattcaaaaaccctgagctagacacagggtgctgactggtgca

SEQ ID NO: 22711 - DNA, 1114 bp, Artificial sequence
  DNA replication origin
tggaagttcttgtgtgctggagatgtggctggggtttgtctcacagtggaggcaaggaattgcaactttgttttattactgtacaccttgaaagtgaggttaattaagtcctgttatggggtttgagggccagattccaatttttggagttttatttaatgtcaggagcagattgggtaataaaatgtatattgagaataagatggccttttgaccttttagggtctagggctgtaaagcatctcagggttgctgccgaatgagccatgaactgggctgggtttttatatttgatgaaaaagagcctaaacgcttctgatttgggataaagaaaaaggagcattaaccttgactatgcctttggctccagccacctttttaagagtaaattgctgggcaggtgggggaggggtagtcatggaacaaaactgtaagccggatcaggtgtgaggaggggaggcgataaaaagtttatagggtggaggagcagaggctgaggaagaattgggaactagctcggcctggcgaggaggggagaggtcagatgggtctgtagaaaaggaagattagaaagactcagcgacgcttggggttgggcctgaggggacaggcgggagggaaagaaggaagatttgggatgaattgcattgggcagagactaggaagggactgatgtgtaaaagaatgcctggacatcaggcacctcagaccatttgcccgttttacgacaagaattatttaggtcttgtaggatggaaaaattgaaagtgccgtttttctggcaatttgtaactactgtcgagtttgtactggggtcaagcggcattgcagaagaaaaaagacgcttagattttaggtcaggtgagagttgaagaggttttaagttcttaagaatacaggctaagggagaagaaggaggaatggaaggtggaagctagtccatagtgaaggaggcaagcccagagaaaagagtagagacacggagaagtgatgggggtttcttgccctccagaaaagcagagaaagggttggggcacggaaataagggattgggggttcttgccccctagaaaagcgggacttgccactaagggtgaaggagaaggggttgagg

SEQ ID NO: 22712 - DNA, 1018 bp, Artificial sequence
  DNA replication origin
cccagagaatgtagactaggtgcttctgttcccagaagcagcacccagacaatgagaagaacaccatgtggaaagaagtggggcagttctggtttctaatgggctctgctgatctttcagctcctctgcctgaaagctcactttcagacaaaaactatgaacttcaaactgtgtataattcactatacatgcatattttattctctgtataactctagcaaggctgaacccctagcaagtcaaaggcttacctgaggtgcccttcccagatttatcatgtcccccgggtagtgcgtccggaattggtaggttcttggtctgactgacttcaagaatgaagccgccgaccgtcgcggtgagtgttacagttcttaaaagccgtcgcggtgagtattacagttcttaaaggcggcgtgttcggagtttgttccttctggttggttcgtggtcacactagctcaggagagacgctgcggaccttcgcggtgagtgttacagctcttaaggccgcgcgtctggagttgtttgttcattcttcttggtgggttagtggtttcactggcttaaggagtgaagctgcaaaccttcgcggtgaatgttacagctcataaagacagtgtggacccaaagagtgagcagcagcaagatttattgcaaagagggaaagaacaaagcccccacaccgtggaaggggaccacagccacttgctactactggctcgggcagcctgcttttattctcttgtccggccccacccacatcctgctgattggtagagcccagtggtctgttttgtcagggcactgattggtgcatttacaatccctgagctagacacaaatgttctccacatccccacctgagtagctagatacagagtgtggattggtgcattcacaaaccctgagctagacacagggtgctgattggtgtgtttacaaaccttgagctagatacagagtgccgattggtgtatttacaatcccttagctagacataaaggttctcccaagtccc

SEQ ID NO: 22713 - DNA, 781 bp, Artificial sequence
  DNA replication origin
ctgggcgcagtggagcagggggcggtgctcatcggggaggctcgggctgcacaggagcccacagagctggggggtgggggtgggggtgggggtgggggtgggggaggcggctcaggcatggcgggctgcaggtcctaagccctgcccctgcccctgccccttggggaggcagctaaggcccggggagaaaccgagcgcagcgccagtgggccggcactgctgggggacccagcacaccctccgcagccgctggcccgggtgctaagtccctcactgcccggggccggcacggccggccagccgctcggagtgcaggccagcccaatccatgcccacccggaactcgcgttggcccgcaagcactctgcgcagccccagttctgctcgcgcctctcgctccacacctccctgcaaggtgagggagccggctccagccttggccaggccagaaaggggctcccacagtgcagtggtgggctgaagggctcctcaagcgaggccagggtgggcgcgccaaggccgaggaggcaccaagagcgagtgagggctgtgagggctgccagtgcgctgtcacctctcaatatcagcaggtatagtctgctaatttacttgtacactgcaaacttctagaggctcatctgtcatctctgtatcttcagtgtgtgaaagagttcaagacatattataggaaataatttaatggttgtgatattgtgaagtgtgtatttggtcttcttccctgtttcctggtatacaacccctaaaatccatggaatctcca

SEQ ID NO: 22714 - DNA, 957 bp, Artificial sequence
  DNA replication origin
actacaattcccagcgagcaccgcgaggggcgggggagggggcggggcgagggacggccgcgcgcgccagctgccaggcggggatcgggcggcgccgagctgaggtggtgagggactagctcccggatgtggagaagctggggagaaggcgtgggaggaagatggactcggtggagaagggggccgccacctccgtctccaacccgcgggggcgaccgtcccggggccggccgccgaagctgcagcgcaactctcgcggcggccagggccgaggtgtggagaagcccccgcacctggcagccctaattctggcccggggaggcagcaaaggcatccccctgaagaacattaagcacctggcgggggtcccgctcattggctgggtcctgcgtgcggccctggattcaggggccttccagaggtgcgcatgtgcgagagtgggcggcgcggcctgggcgggggtcgggagagggagtcgggctgctggaggggctggggcctccggggccaccgctcttggaagggggccatctctcatgccagggatgtgcaagatccggggtgcctggggccgggctgagagcccaggaggaagggctccagctccttccttgttccgtagctgccaatggtcataacctgggacagttcctgtctccgcccttgagaatcatccgtaaaaggggagattacacctccccaaccgtcccctcctcccgggttgaccttacggggaaaagtaaaggaggccaccccggtgcaacatctgtgataatatgtgaacttctttggatgggggccatcgaagctcccctgttgctcagcctctgataactgcttggtgctgctcgattagggaggcatcaggttcatgaatggagttgagtgtcggggtgtcagagctgaatttcaagctcagcttggagatcttttcctaacctttgaaaaatactccag

SEQ ID NO: 22715 - DNA, 1080 bp, Artificial sequence
  DNA replication origin
agcggaaggctgcggcgcgccgctgaattaactgatgagagcgagttcttttcttctccgggaggggtggggagcgagggtcccggcgggcgaggcggaggagcccggggcaggatagcggtcccgggccgccgtggaaatttccaaggacttggtgcggcgcagagagcgcgtctcggggcggggtgggggggggggggttgcctggcggcgcagcagcgcgggaggcggcgaagggcgcaggagcatcgctcggaggggacaaggggacgccacgggccacatgtttaggagggagccgagccttctcccggaccctcgccgagggcgaccgtgatgctgcagaaccggcgggagcgactcgccgccgccgctctctgcgcactcggagaccccagcgcccgccttctgcaggggaagcgaccatggccatagatcgtgacttcacccccagccacttcccctagaaagaaatccttggaaaagttgcatttgaaaaaatccttgcgctgacctttggggccgacggggccgaagaagcgtgcgtgcgtttgcaagtaagagaaccaaaggtgtgtgtgcatggggggctggcggtgggggaccctccgctgccacttcgcctagctttgtgctgaggccccggcccccgcccctgggacgccggggctgcgatgagcccctgcgggcgggcccggcgacaaacgtccagaggggccatggctgtactggcgtggaagttcccgcggacccggctgcccatgggagccagtgccctctgtgtcgtggtcctctgttggctctacatcttccccgtctaccggctgcccaacgagaaagagatcgtgcagggggtgctgcaacagggcacggcgtggaggaggaaccagaccgcggccagagcgttcaggtactcctgccctcgcggctcctcccctctagcgtcctttcctccccgagtgcagaggacagggtcaccggcgaggaccgccttgcaccgtctcgcagaggcatccctttcatccgctcttccatgtcctttccctccatttgtgccattcccaacctggagactttagt

SEQ ID NO: 22716 - DNA, 1099 bp, Artificial sequence
  DNA replication origin
taatagaaaattagagccaggtacagtggcatgtctgtaatcccagctactctggagactgaggtgggagactcccttgagatcaggaatttgagaccagcctgggtaacatagcgggataccgtctctaaaaaatgtcaaaaataaaaaattagctgggcatggtggcgtgcgcctgtagttccagctgtgagggaggatcacttgagcccagtagttcaagccataattgtaacactgcatttcagcctccatcctgggtatcaaagaaatacctcatggaaggaaggaaggaaggaaagaaggaaggaaagaaggaaggaaggaaggaaggaaggaaggaaggaaggaaggaaaggagggagggagggagggatggaggaagggaggaaggagagagagagagggaggagaaggagaagaagagaagagaagagaaaagggagggagggagggaggaaggaaggaaagaaggaaggaagggagggagggagggggaaaggagagagagagagggagaaggaggaggagaagaagagaagagaagagaaaaggaagggaggtaggaaggaaggaaggagtgtagcaaggcctatagatcaggagatgactgccgttgaaaagacagctcattacagttgaaagagaggaggcatgcgacaccacatggggccagatgaagaagcaccagggtcagtgatgaggaagagaggagaaaggagggaactgagggcaaggcctttactgtggtttctgcaggaagttaactggtgaagaagggcaagcaggctagtttggctaattttaataatttcagtgagctatggggtatagaggctatccctagttgtctgttacctggccctgggccactatacatcaaggcaggtgtatagtggcccagaaggtgagaattttataaaggaggtggttgggttgtggactcctgattgattggtttacatctgaaaagcacatccctgggaggaggagccaacctgggaggagatgggggagatgaggaaggcaggtgacttaggcatattatcaagttgtccagagcaaggtgtgcccagcacacacatgtagggcagatgtt

SEQ ID NO: 22717 - DNA, 959 bp, Artificial sequence
  DNA replication origin
agcgcgagcgagcgggcgagcgagagacggggggagagagagggacacgcgcgcgcacacacacacacaccggcacacacgcacacacacagacacacacacacagagtgaaaaaggcgagccaccaaaacccatctccagtctcctcccgggggcccccagcccgcctctgtgccactttgcatcccacgccggaggaggcattaacgagaccgggtaaggtgcgtgaatcgctgcgttttaactttgttgttcgtcccgatgttgttgtgggcagacctccaaggcgcagagctcccctctgccgctcgccgggcccgccactcagcactccttcccggctccagctggagagccgcggaggagggagggggccgccgccggagtttcctcaagtacagagggagggggactgggctgggggtggcggagaggtgggaggcggcccgaggcgcggagtggccctgtcatccccgggggcggctggccgggggaccctggagcgccggcttggaccccgacccggagacgggataactttctatttttgttgggaagcctgcgtactgttgctggtattgttttgtaagtggtggcggtggaggtggttgatgcgagaggagagtgcggggagaaccctgggctgtgctgggcatcgcggccaatgtccaaggccagaccctaaaagttggacaaagccccttaacccttctaggatatcagagcgacccctggcccaccccctaaccttagtcacccccacctcccgactctttcgtctttttgtttcgctttctgcaatccttctccctaccactccccctccctcccgcccggaatttctgaaacaagtctcatccttcaggattctagggatttcagagaccggaagctttaattctaattgcaactactttttccccccacctcactcagtgtaccaagtgaagaccactcac

SEQ ID NO: 22718 - DNA, 768 bp, Artificial sequence
  DNA replication origin
atatcccgctctccctggctccttccactcctgccatttcatttttatcgctcctttaagtggagggcagataaaaaaaaaattcctgcacggtgtgggtaatcgccgcgttatttacaatctagttactctgcagcagacggggaagaaaactctggggctccttcccttcggatggatagagagggcggccgggcggcgagctgcaagaaggaggtcagggtgggcttgcgggagctcgggggcgacctggagggagcgggagcccccggcaccgcccccgcgccccccccccgcccccgccgcaccccccggggcgggcgccgggccgcggtgaccgccggctggtgcgctgccctcgcctcccccattgttcctactgtctttttgccttttgttatttgcactcgcattgtgttgtttgtctctgaagccgcctcatgaccagcaaagggatttcacctcgtccttgagagcaacacggggagcgcgagcgagcgggcgagcgagagacggggggagagagagggacacgcgcgcgcacacacacacacaccggcacacacgcacacacacagacacacacacacagagtgaaaaaggcgagccaccaaaacccatctccagtctcctcccgggggcccccagcccgcctctgtgccactttgcatcccacgccggaggaggcattaacgagaccgggtaaggtgcgtgaatcgctgcgttttaactttgttgttcgtcccgatgttgttgtgggcagacctc

SEQ ID NO: 22719 - DNA, 741 bp, Artificial sequence
  DNA replication origin
tgcctccggggtggttgaactggtttggttttgtgttaagcgaagccaaaaaaaaaaaaaaaatcaccacacacacacacacacacacacacacacacacacacagacacacacacacaccccaacccaatgcccaagaaccagggaatgaaatttagtgatatttagggagaaataaggctgggcgctgggctccgactctttctgccgcgacacttgagtgggcgcgtggagccgagagagaccctcagagtcccatccccatcagaagaaactccgtcggtgatgccctgagcagaagctgtggggctgatttaagtgtgtgctctgacagctcccgggctgctccggcgcttatctcttctaatcttactttcattgacttaaaacagctgccggtttgccaggggaaaaaaatcctattaaatctcaaaccagggtggggcgggggcgggggttcctgacagtgatcttcccagagctagtgtccagaaaagagcagggggaagggagagcattcacgggggtggctgcgtgttgggaagggggtgatggaaaggggactaaggaaacaattcgagcaacacgtttcttttcctcgctgtagccttctctccttttgcttttatgccgaggtgcgtgttctctgtccccatctctgtaattctctgcagacgcgcaaccatggactgcgccgcgtccctgggcacccccagcattacccagagtgcaacaacacca

SEQ ID NO: 22720 - DNA, 1119 bp, Artificial sequence
  DNA replication origin
ccttcaagcatctgtttaacaaagcacatcttgcaccgcccttaatccatttaaccctgagtggacacagcacatgtttcagagagcaccgggttgggggtaaggtcatagatcaacagcatcccaaggcagaagaatttttcttagtacagaacaaaatggagtctcctatgtctacttctttctacacagacacagcaacaatctgatttctctatcttttccccacatttcccccttttctattccacaaaaccgccattgtcatcatggcccgttctcaatgagctgttgggtacacctcccagacggggtggcggccgggcagaggggctcctcacttcccagaaggggtggcctggcagaggcacccccaacctccctcccggacggggcggctggccaggcgggggctgcccccaacttcccagacggggtggctgctgggcggaggggctctttacttctcagatggggcggctgccgggtggaggggctcctcacttctcagacggggcggccgggcagaggcgctcctcacctcccagacggggcagcagggcagaggcgctccccacatctcagacgatgggcggccgggcagagacgctcctcacttcctagacgggatggcagccgggaagaggcgctcctcacttcccagactgggcagccaggcagaggggctcctcacatcccagacgatgggcagccaggcagagaagctcctcacttcccagatggggtggcggccgggcagaggctgcaatctcggcactttgggaggccaaggcaggcggctgggaggtggaggttgtagcgagccgagatcacgccactacactccagcttgggcaacattgagcactgagtgaacgagactccgtctgcaatcccggcacctcgggaggccgaggctggcagatcactcccggttaggagctggagaccagcccggccaacacagcgaaaccccgtctccaccaaaaaaatacgaaaaccagtcaggcatggtggcgcgcgcctgcaatcacaggcactcggcaggctgaggcaggacaatcaggcagggaggttgcagtgagcagagatggcagcagtacagtccagcttcggctt

SEQ ID NO: 22721 - DNA, 918 bp, Artificial sequence
  DNA replication origin
gccttggcctcccaaagtgccgagattgcagcctctgcccggccgccaccccatctgggaagtgaggagcttctctgcctggctgcccatcgtctgggatgtgaggagcccctctgcctggctgcccagtctgggaagtgaggagcgcctcttcccggctgccatcccgtctaggaagtgaggagcgtctctgcccggccgcccatcgtctgagatgtggggagcgcctctgccctgctgccccgtctgggaggtgaggagcgcctctgcccggccgccccgtctgagaagtgaggagcccctccacccggcagccgccccatctgagaagtaaagagcccctccgcccagcagccaccccgtctgggaagttgggggcagcccccgcctggccagccgccccgtccgggagggaggttgggggtgcctctgccaggccaccccttctgggaagtgaggagcccctctgcccggccgccaccccgtctgggaggtgtacccaacagctcattgagaacgggccatgatgacaatggcggttttgtggaatagaaaagggggaaatgtggggaaaagatagagaaatcagattgttgctgtgtctgtgtagaaagaagtagacataggagactccattttgttctgtactaagaaaaattcttctgccttgggatgctgttgatctatgaccttacccccaacccggtgctctctgaaacatgtgctgtgtccactcagggttaaatggattaagggcggtgcaagatgtgctttgttaaacagatgcttgaaggcagcatgctctttaagagtcatcaccactccctaatctcaagtacccagggacacaaacactgcggaaggccgcagggtcctctgcctaggaaaaccagagacctttgttcactcgtttatctg

SEQ ID NO: 22722 - DNA, 1847 bp, Artificial sequence
  DNA replication origin
caaagtagcatacacataagcgcaaattcattcatttaagaattccttgtgtctattatgtacgagataagtatctctgagctgcacggaatgtggcttatcagaaggtgacctaagtttcaaagcagattttgttaagatgaagacagagattgacaggaggtttaagacactctgtctaaagtaaagatttagagtcacagagttcatggattaggatttagaatccacagagggtccacagattcactcattcaacattccataaatatttattgaatgcctttttgtgtcagagactgtcttaggtgctggaaatttagcagtaaatgaaacagaccaaaacccatgccctcatggagcttacattctgatggtagagagacaagaaaacaaaatagatagtgtattattgaaggtgatgagagctctggagaaaaagtaggaaaagagacagatctgggacaagggcgaaattacagtatcaaagatgatctttttagggaagatctccttttaaaaacactttggaacaaagatttaaatgaggtgccagaggggtagcaagtgcatattccctgaggaagacgcctgcctggcattttcaaggaacagccagtaaccaatgtttatctacgtaagtaaggaagggagaacagtaggatgagagttcagagaagagggtaggggatatcaaataatttaaggccatgtaggatttttgagaagaattttgcttttatgtcaagtggaatgagggccactgatgatctgggagtagagtgactatgatccgacatgaagtatactccattttttaactatgtgaacttgtgccaacgttttaacctctaaatctgtttcgtcatttgtaaaacggtaaaaagtattttacctcataaggttgtcgtgatgattaaataagatgatacgataagtgcaaaagatttagcttgtacttaacatagagtaggcacattttctccccttccctgtctttcacttttctcttctgccccttccacctggcgctaggagggggagactggaataaaccttgcagattacagcccgtgtaagagtagaaaggaaaggatgacagttgatgtaaagccttggttaacagacataatagctgggatttaaattcagctttattggtggtttatgatgtggactagaggaatggaactgaaagtctcggaggaggggcgatcctatcaggtacaggcgctgcttttccagccctcaatcctcaagactctcccaagatacatttctaggtagtttatcaacacagactccgggtatgctagcatgtttaattgccccattgtttaatgtcttaactccacgaactttaactgattaatctgtcttctaattaatgtttgaatgactctcctcaggtctaaactaccaaggccatctctacttaaaaacagttgtcttttgtttgtgatttcaggggccctgggtataagcgaagtccctgtttagagaccttgtgatgggttcaaaatatcaagaaagatagcaaaatatcacaagcctcctgacccgagaagattagcgttgaaagggtctgtcgtgtttgtttgggcctggggctaaattcccagcccaagtgctgaggctgataataatcggggcggcgatcagacagccccggtgtgggaaatcgtccgcccggtctccctaagtccccgaagtcgcctcccacttttggtgactgcttgtttatttacatgcagtcaatgatagtaaatggatgcgcgccagtataggccgaccctgagggtggcggggtgctcttcgcagcttctctgtggagaccggtcagcggg

SEQ ID NO: 22723 - DNA, 1225 bp, Artificial sequence
  DNA replication origin
tatccttttctgtagaaataaaaaagacccagtttaaacggtaagcccttggctggccaaaactgagccttctgagaggcactggcgtcccggaggaccgccgcctgactcaggacttgaaaggttcccgagttcaagggactctggacgccgcaatcgccaccccgctgtcccgcccgcggccccgcgtgcccgcagaagtggggaaggcgtggcacgagcaccgggctgaggtcgccgcccggttgtgcaatcggcctatgcaaataagcgaggttacgccgcccaatcgggagccggatgtgtcgtgacgcacgcgccgagcgcctgtagtatttatagctcgtatttaaagagcccttgggagtctccccgggctcggcagggcggcggcgacggcggtggctgcggagctgcagttagcgctgcgcgcgtgaggtggcggggcggcagccgcgcatcccggccctgtggcgtgttgggcgtgggggagcgtccttacacgttccagggtggcttttcccccacgtcctcgctcggtttctggaaagggggaggaaacgctgcagcttctacagtacttttgcttaagacaaagccagggatcaggaatctcaaaagagcggggggcagaaggtttgagccgaccccaccccggctctccatcggagccccgagcggcgccgtttcctgatgctggctgtgcgtagaggcggccttcctggggggaggggagaacaatgcttcctgaaaagccaaaagtcgtggaatttgggggcggggctcgggccaattaaagtgtattcgtggaaaataaatcgcaagatagtggcagtgatgatcttggcgttcaatcgattgatctgacttcccagcagcgaactgcacactgcagcgcgaaagcaggaaactggcattacgtcagaagacagaagagacccaaattgcaacggttgcatctgcagggctggctggctggcttcctctcctaaacctaaacctttccctctccccacccccttttgtgtgtgtgtgtgtgtgtgtgtgtgtgtgtgtgtgtgtgtgtgtgtgtgtttccagggagcagcttcgctgggccgcaggctctggcactgggtgctttgtcagcgaggcatcgcaggattttaggcaaaggccaaaggggcgagcactggcgtgactcgggaactcttggcctcagtgccctgggcccccgtcccgtgtc

SEQ ID NO: 22724 - DNA, 1004 bp, Artificial sequence
  DNA replication origin
gaggctcggcgaggctgggcgaggagctgggcggcagacgctgagcggggcgcggcgcggggcgccggacgagcgcgggcgtaggaggagcgcgggcgtaggagtcggcgacccgctcgctcccgcggccggtgcctctgggctgggggccgggctgggggccgggccgggccgggccgggccgggcggccaggcggctccgccccttcgccgggcagcggctgagcgcgcgagaggagcggcgcgggggcgcccccctcggccgggcgctcgggtttcagccgccgctcctccgcgccccgcccgcgcctggcccgctcgccggcgccgggagagacctcgtaacggaactgggacgccagcgctgcattgtgggagcttttaaagcggcggggagctcggcgcgaccctcgggcccaccgggccacgctcgcccggcccgcgacgcccccccgctgtcgcctggcccgcgacgcaccgaggcctgaggacccgaaagccgggcgcggggagatgaccggtggctcgtgacggtcccacgggcaaaatcttccatcgcccggggctgagacttgtcaaactgccctctacggtcacccggaaagtaggaggctttttctgcagaggggaaaaaaatcaaaaagagccgttccatcccccctccaaggactgggtttgaattgcttttcatctgcagtggctgtgattcagcgtccctcttagcagcaggcaatgacagaggcaggagaggggaaaaaaaaaaagaaagaaagaaaaaacacagcaaatgaatcaaacggacgtgagtaacaaaagtttagaaagagctgggctcgtattcagaaaaaacgcctcatccccccgccccgctgcactcccaacccctttaaaaatagcagataatcaagaaaggaaacgggtgctttcatatggaaatacagatgtgtatgttgttttcaatattctactgtttttttgtgtgtggcatgcaattactcaggcac

SEQ ID NO: 22725 - DNA, 928 bp, Artificial sequence
  DNA replication origin
cggcgcggcggcggcggcagccgcgcttctggggcccgaccctgccgccgcggccgcgctgctgagacccgacgccgccctgctcagctcgctggtggcgttcggcggaggcggaggcgcgcccttcccgcagcccgcggccgccgcggcccccttctgcctgcccttctgcttcctctcgccttctgcagctgccgcctacgtgcagcccttcctggacaagagcggcctggagaagtatctgtacccggcggcggctgccgccccgttcccgctgctataccccggcatccccgccccggcggcagccgcggcagccgccgccgccgctgccgccgccgccgccgcgttcccctgcctgtcctcggtgttgtcgccccctcccgagaaggcgggcgccgccgccgcgaccctcctgccgcacgaggtggcgccccttggggcgccgcacccccagcacccgcacggccgcacccacctgcccttcgccgggccccgcgagccggggaacccggagagctctgctcaggaagatccctcgcagccaggaaaggaagctccctgaatccttgcgtcccgaaggacggaggttcaagcagagtgagaagttaaaatacccttaaggaggttcaagcagagtgagaagttaaaatacccttaaggtctttaagggaggaagtgtaatagatgcacgacaggcataaacaagaacaacaaaacaggtgttatgtgtacattcggagttcctgttttgctcatcccgcaccaccccaccctccacacactaacatccctttcttccccccaccagctgtaaaagatcctatgcgaaagacactggctcttttttttaatcccccaaataaattttgcccccttttaggccatgttccattatctcttaaaattggaacctaattcgagagga

SEQ ID NO: 22726 - DNA, 1348 bp, Artificial sequence
  DNA replication origin
aggcagaagggggccgcggcggccgcgggctgcgggaagggcgcgcctccgcctccgccgaacgccaccagcgagctgagcagggcggcgtcgggtctcagcagcgcggccgcggcggcagggtcgggccccagaagcgcggctgccgccgccgccgcgccgccccccgggccgccgccgctgccgccgccgcgggaatccagcttcatcctcttgggcgccggcgagtcctccccgggaggctcctgcttgatggtgacgcggctcgcccccgcgcctttgcctttctcgcggtccggccgggcctcggcttcgccgccgtagccgctgtcggtgtccgtgtcgttctcggcggcgagctcggcgctgggctgagtccgctggatgacgggcacgcagtaggcgaggggctccagcttctgccccgcgcgctccaggcagggggcggccgcggacccggcggccgagggagcgccggtgcctttgctcagagggacctgttgagtcaacagctgcggggtgggcaagaactgggtggccacggcgtgcaagtggttgatcagctggacacaccgcggctccctgggtgtccagctctcaaaccgggagaggtattgcaagacttctttggcgcatgtttgaaatcccgagtggaacgcatccaagtcggactgaatgggcgatttcagagatcgctcccctaggatgaggaagggatgggggtgggggacggaggagtggaggcaagaagaaacatacccacgttaaaacatctgcttatcacgtgggccctgcatcgactaaagtgatctcggtttttccccagtattcaagtgatataatccaccagttgacgagagaagcggggtggcggaggtgcggagcggggagagggcgctctcctcccagctgaaaaccaaagtggagcgggtgcaaccgccactttaaatcctgattcctccgagttctgctgaaagcctctaggatgcttcgggaaatgggctcgttccaatgaagggaaagtataagcaatttaacaaatgagagggaacccatgagcccacggaaagagatggggtgcgggtgagggagtcctgacactgctcccctgtgggctgccccgcttcatcagggtaggctggcctccctgaactgacttaccattctgtaaagcaattatcttctgatgctgttgctcggttaaggcggttaaagcttttaagtgtttcaaagttaattccaagactacagctttctccagatgtcccagagtctgcagtggtgcaaaaaagaaacgggcacttggttacttaaaaacacacatttggcttaattggctgtccattca

SEQ ID NO: 22727 - DNA, 1310 bp, Artificial sequence
  DNA replication origin
ccggcggggcgggccgggggacacgtagcgggcgccccagtccctgctgcgccctggtgcatgtacctttggcgttcttctcccctcggttcacttatcaccggcaataatcaacgtttcagagatcaccccggggagaatgtaaatatccctctctgtgcaggaaaaaccttggtttttttctctatgtctttatgtatatctagagaaatatatatatagcctccatcccacccctgggagtccctcaggacatgccttcccctgggctggcagggcggcgtgggcagtgcgcatccccgggcacctcccggtaactctcactagcagtgagtcatgctcccagggtggctctggggaaaggtaacccggctcttgctggcctgtgattcccggcgccgagcgccgcggctgcagggcgagcgcgcgcgcgcacgggttccccgagcagtgatgtggcagcagcggcaggtcggatcacgttgctggccctgtgctggtacccgtttgagaccggattaaggagggaggctttggaggtgccagcggtagtaaacgtgggctctgcacactccgggcgtctcttatcgcgcgggggggcggggggatggggaaagcacgtagcgtcaccggaggctcagaacgcggcagagttgagcgggcgggtgataaatgctgcatagcttttctgtggtagcccctctcgtgccaccccctctcgtgccacccccttctcccttcccagcccccactcaaccccggctcgctccccgccgcgttcctccaggagcacacgcggccccaaacgtcgtcatctgctgctgtgattagtggcaccgcaattccggctgctgcggggaagtttagttggcccagggacgccgtgtcaccgaaagacacttggattgcgacattcggacccagtgacaacgttttcatgtatcttaaatccttcaaggagcggattgcaagttgcttcttctcgaggcaacctctccacccagcgccaaggagtccctccaggccactgatcagtgagcaaacaagtctccaaaatttcctttgggactcaagtttacccaccgcgaattctcttttcacttcctttctatggttcaaaccaacagcacaatcggtggaaaagcaaaaagccacgttcacattcctgcaccgtaacaacggacgaacccagggagtcgcattttggagccaaggaagctcaggctgccccgcacccctgcacccccactcccccctcctcctgccgactgcatcgcctttgggaagatgaatagcttggccgaagttgt

SEQ ID NO: 22728 - DNA, 1228 bp, Artificial sequence
  DNA replication origin
tgggcagggggctgacccccccacctccctcccggacggggcggctggccgggcggggggctgaccccccccacctccctcctggacggggcggctggccgggcagaggggtcctcacttcccagtaggggcggccgggcagaggcgcccctcacctcccggacggggcggccggccgggcagggggctgacccccccacctccctcctggacggggcggctggccgggcagaggggctcctcacttcccagtaggggcggccgggcagaggcgcccctcacctcccggacggggcggctggccgggcggggggctgacccccaccacctccctctcggacggggcggctggccgggcagaggggctcctcacttcccagtaggggcggccgggcagaggagcccctcacctcccggacggggcggctggccgggcggggggctgacccccccccacctccctcccggacggggtggctgccgggcggagacgctcctcacttcccagacggggtggctgccggacggaggggctcctcacttctcagacggggcggttgccaggcagagggtttcctcacttctcagacggggcggccgggcagagacgctcctcacctcccagacagggttgcggcccagcagaggcgctcctcacatcccagacagggcggcggggcagagacgctcctcacttcctagatgggatggcggcggggaagaggtgctcctcgcttcctagatgggatggcggccgggcagagacgctcctcaccttccagactgggcagccaggcagagaggctccccgtatcccagacgatggggggccaggcagagacgctccccacttcccagacggggtggtggctgggcagaggctgcaatctcggcactttggggggccaaggcaggcggttgggaggtggaggctgtagcgagccgagatcacgccactgcactccagcctgggcaccattgagcaccgagtgaacaagactccgtctgcaatcccggcacctcgggaggccgaggctggcggatcactcgcggttaggagctggagaccagcccggccaacacagcaaaaccccgtctccaccaaaaaaaaaccgaaaaccagtcaggcgtggcggcgtgcgcaggcacccggcaggctgaggcaggagaatcaggcagggaggctgcagcgagccgagatggcagcagcaccgtccagccttggctc

SEQ ID NO: 22729 - DNA, 857 bp, Artificial sequence
  DNA replication origin
ggccgccccgtccgggaggtgaggggcgcctctgcccggccgcccctactgggaagtgaggacccctctgcccggccagccgccccgtccaggagggaggtggggggggtcagccccccgcccggccagccgccccgtccgggagggaggtgggggggtcagccccctgcccagccagccgccccgtccgggagggaggtgggggggtcagccccccgcccggccagccgccccgtccgggagggaggtggggggatcagtcccccgcctggccagccgccccgtccgggaggtgaggggcgcctctgcccggccgcccctactgggaagtgaggacccctctgcccggccagccgccccgtccgggagggaggtgggggggtcagccccccgcccggccagccgccctatccaggaggtgaggggcgcctctgcccggccgcccctactgggaagtgaggagcccctctgcccggccaggaccccgtctgggaggtgtgcccagcggctcattggggatgggccatgatgacaatggcggttttgtggaatagaaaggcgggaagggtggggaaaaaattgagaaatcggatggttgccgggtctgtgtggatagaagtagacatgggagacttttcattttgttctgtactaagaaaaattcttctgccttgggatcctgttgatctgtgaccttatccccaaccctgtgctctctgaaacatgtgctgtgtccactcagggttaaatggattaagtgcggtgcaagatgtgctttgttaaacagatgcttgaaggcagcgtgctccttaagagtcatcaccactccctaatcttaagtacccagggacacaaac

SEQ ID NO: 22730 - DNA, 1445 bp, Artificial sequence
  DNA replication origin
agccgcagccgccgccgcctccccggcaggtttcctgttcctttctgaagttttctctccaacacctttgctcctcctcctcctccttccctctccgctccccactccgtgtccactccctgctctgcgacccgctgcggccgtcacagccgcccggcgggagctggaagtggccgagccccctcggtcccctcaggggaatttttggaccaggtgccggtgcccattgggcgaggaggaggagaggagccctggagaggtgggggggcggccaatcagggagcagcggccgggggcggagctgggccggggcggggcgaccctcgggaggccgggccacccgggaagcctctgctgccgccgcaccggcccgcgcggggacgcgacgctgggcggcgctggaggggcggcgggggaccccggcgggggagcgggcgcgtgcggccgccctggagaggccggacctggggcgcgacagtcgctgcctgggaactcgaagaagcttgatgggggcagggagggtgagaggtggcggccgggcgagcgcactgtaggacccgagcacaatggagagagcccccgaactgctggagatgaaaaggtggagccccagcggggtgggtaatttgctggccaaggaagaggtaggcgttgaagtaaaggaaaaaaatacaaataaaaaataaatgcatgatgaagaaagtagaagagaggaaggaagagagtgagggaaggaggatgatctcgatttcgttatgtagtttgggtggtctttttcctcttcttttctcaagtacgcggcgttaatgaaactcgacccgtccgctgatgtccaggtggacgcgagcctccaaggaggtaaacgtcacttggccaagccagtttttgtagccaaccttcagcggtgagggctcagtggagctgagctttaagcctccgaggccgcgcctcctgcgcttcgttaactccaagccgaggttaaccttccacccccatcagcccaaggtccccggctcaagacaaccctggcttgtttacgtttaaagctgctgactcttaaagctccagccgttataagcaaaacgcagctagacacttttccacgccttctctgttgcttctgtagccctcttcttagaacatgattttaaaagccttttgctcttcccttctagaagacacagtggaggcaaactgtatggcggttttgataccagccacctaatttaaaagtgctacataagtaatccccacagagcaaagtttgtagaaaggcagaggaacttggggtgtgcagaagcatgttgtgtcaaattgtgcaactgaccaaaatgtaacttacagtcagatgtcttacatgtcttacagttcaaagatggtttagattgagacttataatcacataatagaaaatgaaagaattagcccagaattcaaaaggccag

SEQ ID NO: 22731 - DNA, 1209 bp, Artificial sequence
  DNA replication origin
taggccactctcaagagaggcctgaacaggtttggcgtaaaaacggcagtgaggtgaggctggtgagaggggaagtggcgacagttcagtcaactccctcaaaaccagtctggccttcaccaggcggagatgggtggggccgggaagacgggcgttgacgacagaaggctacttccggctgtggtgcgtatgacgtcagggcgagtcggaccgacccagccaccgagaagccgaggaggcaaggctcgcgagagttcagggaggccgccctgagattccggcgaggccgcgggtcccacctcccgggggcggggcgagggcggagcggggagaagggagctgacgggcgcccggccggctgcggtccgtgcggaggctgagccggccgcgggcgcgaccggaggcaggtgagttcgcggatgtagcgctcggctgagggcccgagctcgccgcgccagccccaactctgcgagcaggagcaggaggagattttaggtgtctttgggtgtccagggaaagccgggctaattctggggctggaaatgtctccggggaacctgcggcgacggccttggccctcttattccccggggtgatactggccccatgtgtccagagagggagcctcgcacccggggaggaatctttgtcctctgctcctttctccttccactccccggcccccgagcactccgctccgggtccccgcctgggcttcacaaacaataacaaatgtcgcggatcctctccgggtagccccagcgctcccgtcccgtgccctccagccgatgtcacccagagccaggatccgaagcatggctcttcaattgtgggggctgtttgtgtaccgttcctaaaaactgatgcgtcagattgccaaacatttctcaagacagactcaggaaagcctcccagctcctagaagccacggagtgctcaaaaccagtcttagaatctgtctttaccattgcacccgtagccccttcctttcaaaatcatttctcccactccttttttcacctttagtatcgaggtcgaacgagtggttatttggtgtgggagtagaaaagagtataaccgattgagtagggcacgtttcacctttaaaaagttgccaggttgacagcaaaagaacaaactttattttcaaaaccagtggcctccccttttactggtgctgcttttgttttgtggaatagcttttcgggt

SEQ ID NO: 22732 - DNA, 1314 bp, Artificial sequence
  DNA replication origin
ccaccgcccctcggaggcgatgctccggcccgagaggacaggcgcgggcgcttccctcggggcagcgggggcagacctggcgtcgcggggacgcccccagcgcgtcagacgccgcgcgcccacctggggccgtcgcctcgccaccggcaacctcacctcccgccgcagcctcctcttccgccgccatcgcaggagccacttggtcggctccgcagccccgcggctggcagcatggaggagccccgggcccgccctgccccggcccaggcggcggctctggagcagggaagcggggactggcgggccctgccgggtgccgcggcggccgccaccgcagcccgtaggcgcgcacgggacgccgccccgcagcccggccggcagcagctactgagcatgcggactggagccagccgcccgccgctctgggcgccgcggggcttcccggcgggaaagagacccgggccaagggcggagtcgctgcggacaccgccccgccgagccctcccgcgagcagcaaagcactaaaaggccagttgagtccttctagcaaccaccctattgaaaacaggcttccatgctcatagtaagctttgtcccagcattccgaagattgcagttgttagaccctcggggcaaaggtaaaggatgaatgaagataattgcacggtgggttagcggagggcacggggctagggttggggaggagggtgctggacgagagaccctgctcttttctgcttaaggaagggcttagctgcagagacgagagtgtagatgacagagagagggtcccgaggaagccgttttgcctcctggaacggttgggtaaatccagaaacaagatcttttgggcatcacttgacagccctacatcctatggccacgtgtctagaatacactggtttgctgccctcccactggtccctagacccattccttggtaatctagtagaagtaagtaaaggaaagtcacagtagagaagacaccaaatcaaactttgcaaccagcctaaaggtaataactttcctacaaggactcaattccaacgtcttaaccagcaccttatgtgtcctcagggcagtacttagggccattgtgagaggctgggcagagggtttggaagtgtgttcccaagcagaagtgggcatgacaggagaaaactgttgcaggcttaagcaggggctaggactttagaggtaagggagacgtgctgaaaactgtgctgtcctcaacacacaccaagacacatccctaatcaaaaccagtcttgaaacgtctcattcctagctttgacttggaactccaccccaaat

SEQ ID NO: 22733 - DNA, 1103 bp, Artificial sequence
  DNA replication origin
ctcaccgccagatctgcgcgccggcctcccagcccctacgcgcgcgccggttccgggcggggcgccgagggatggcggcccgggaggagcggcgaggtgagggccgcccgcgctcgcccggcctctccggcggcccctcctcccggggcccgctcccgcgaggcggcggccctgcccttctcctttccctcagcgccaaaaaagggccggcggagcgcggcgggcgtcctcgcgcgggctctcccgggcggcgccaggcgggaagggaattccagctcccagccagcagcctcctcccccgccgcccttctcacttccgcccgcgggaccccagccgccggcctgacctgccggctggatccggctctcggggaggcccgggaagctgcgggcccgggcgcctcggctgcggacgcgcagctgcgggaggcggagggcgcgcgtccccgcagcctctccgcccgcccggggcgcgccggctccgccgcttgttgggggctgcagtgatgctccggggtaccccagggagaagaaattcgttttctctcccacgctgctttacacgggctaaagaaaaagaaatgagcgtgggaggaaagggaaggatggagtctctggtccagggagacaaaaaggcatcaaatatggggtcgtccttctggcccagtccggcatcgagtgtcagtgggctgaggcacgcaggcgatctatggacagttggtggcaatgttggtggcacgtagagctgattctctggtagcgtggtcgcgtaggagccatcttacaggaggtccaggcagatggcagcaggttctcagaggaatcgggttgggaggcaggggagcttgcatttgccactggggccccttattctccctaagttattaaaagaaagatgaaagcgcagcccgactaaataaagttacatcacgtggcttctggttttaaaccatgttttctatgagccattgcttttctacttcagtccagtccattacggaatgttatcctggcgcaaaagatctgacaaaattggctcataaatgtctgcaagaagtagcttttcttgtcaccccctttctccacctaccctgcccccatca

SEQ ID NO: 22734 - DNA, 1352 bp, Artificial sequence
  DNA replication origin
gaggacgcccgccgcgctccgccggcccttttttggcgctgagggaaaggagaagggcagggccgccgcctcgcgggagcgggccccgggaggaggggccgccggagaggccgggcgagcgcgggcggccctcacctcgccgctcctcccgggccgccatccctcggcgccccgcccggaaccggcgcgcgcgtaggggctgggaggccggcgcgcagatctggcggtgagcgctgccgccccggggcccccagccatgtcggccgaggagatggtgcagatccgcctggaggaccgctgctacccggtgagcaagaggaagctcatcgagcagagcgactacttccgcgccctctaccgctccggcatgcgcgaggccctgagccaggaggccggcggcccggaggtgcagcagctgcgcggcctcagcgcgccgggcctgcggctggtgctggacttcatcaacgccggcggggcccgcgaaggctggctcctgggcccgcgcggggaaaagggcggcggggtggacgaggacgaggagatggatgaggtgagcctgctgtccgagctggtggaggcggcctccttcctgcaggtcacgtccctgctgcagctgctgctgtcccaggtgcggctcaataactgcctggagatgtaccgcctggcgcaggtgtacgggctgcccgacctgcaggaggcctgcctgcgcttcatggtcgtccacttccacgaggtgctgtgcaagccccagttccacctcctggggtctcctccccaagctccaggggatgtcagcctgaagcagaggctgagggaggcccggatgactgggactcctgtcctcgtggccctcggggacttcctggggggacccctggcccctcacccctaccagggggagcccccgtccatgctcaggtacgaggagatgactgagcgttggttcccgctggccaacaaccttcctcccgacctggtcaatgtcaggggctatgggtctgccatcctggacaactacctcttcatagtgggcgggtacaggatcactagccaggagatctccgctgcgcattcctacaaccccagcaccaacgagtggctccaggtggcctccatgaaccagaagaggtaagcaccccggcagagtgctgctgccttctcattcattcacttgttcattagttcattaccccagtgtttactgagccagtaaataggggagggtgtgctgtggtggaaatgacatcttcaggaatgttgttggccttggcgctggcaaaattcccaatgaactaagaaattgcgaagaggacgtccccagtgaggtcaagaagtggagtggttttttggca

SEQ ID NO: 22735 - DNA, 1300 bp, Artificial sequence
  DNA replication origin
tgggtacttgagattagggagtggtgatgactcttaacgagcatgctgccttcaagcatctgtttaacaaagcacatcttgcaccgcccttaatccatttaaccctgagtggacacagcacatgtttcagagagcaccgggttgggggtaaggtcacagataaacaggataagaatttttcttagtacagagcaaaatgaaaagtctcccatgtctacctctgtctacacagacacgtcaaccatccgatttctcaaacttttccccacctttcccccgcttctattccacaaaaccgccattgtcatcctggcccgttctcaatgagctgttgggtacatctcccagacggagtggtggccgggcagaggggctcctcacttcccagtaggggtggccgggcagaggcgcccctcacctcccggacggggcggctggcctggcgggggctaacccccacctccctcccggacggggtggctgccgggcggagacgctcctcacttcccagacggggtggctgccgggcggagacgctcctcacttcccagacggggtggctgccgggcggaggggctcctcacttctcagacggggcggttgccgggcggagggtctcctcacttctcagacggggcggccgggcagagacgctcctcacctcccagacggggtcgcggccgggtagagacgctcctcacatcccagacggggcggcggggcagaggcgctccccacatctcagatgatgggcggcccggcagagacgctcctcacttcctagatgggatggcggccgggaagaggcgctcctcacttcctagatgggatggcggccgggcagagacgctcctcactttccagactgggcagccaggcagaggggctcctcacatcccagacgatgggcggccaggcagagacgctcctcacttcccagacggggtggcggccgggcagaggctgcaatctgggcactttgggaggccaaggcaggcggctgggaggtggaggttgtagcaagccgagatcacgccactgcactccagcctgggcaccattgagcactgagtgaaccagactccgtctgcaatcccagcacctcaggaggccaaggctggcggatcactcgaggttaggagctggagaccagcccggccaacacagcgaaaccccgactccaccaaaaaaatacgaaaaccagtcaggtgtggcggcgcgcgcctgcaatagcaggcactaggcaggctgaggcaggagaatcaggcagggaggttgcagtgagccgagatggcagcag

SEQ ID NO: 22736 - DNA, 859 bp, Artificial sequence
  DNA replication origin
ggctgcccagtctggaaagtgaggagcgtctctgcccggccgccatcccatctaggaagtgaggagcgcctcttcccggccgccatcccatctaggaagtgaggagcgtctctgccgggccgcccatcatctgagatgtggggagcgcctctgccccgccgccccgtctgggatgtgaggagcgtctctacccggccgcgaccccgtctgggaggtgaggagcgtctctgcccggccgccccgtctgagaagtgaggagaccctccgcccggcaaccgccccgtctgagaagtgaggagcccctccgcccggcagccaccccgtctgggaagtgaggagcgtctccgcccggcagccaccccgtctgggaagtgaggagcgtctccgcccggcagccaccccgtccgggagggaggtgggggttagcccccgccaggccagccgccccgtccgggaggtgaggggcgcctctgcccggccacccctactgggaagtgaggagcccctctgcccggccaccactccgtctgggagatgtacccaacagctcattgagaacgggccaggatgacaatggcggttttgtggaatagaagcgggggaaaggtggggaaaagtttgagaaatcggatggttgacgtgtctgtgtagacagaggtagacatgggagacttttcattttgctctgtactaagaaaaattcttatcctgtttatctgtgaccttacccccaacccggtgctctctgaaacatgtgctgtgtccactcagggttaaatggattaagggcggtgcaagatgtgctttgttaaacagatgcttgaaggcagcatgctcgttaagagtcatcaccactccc

SEQ ID NO: 22737 - DNA, 1563 bp, Artificial sequence
  DNA replication origin
cctgccggagaagtgagctagtcgcaaagaggtggcgccctaggaacgcgcgcggggcgagcgagggcgcaggcgggctggcgggcgggcgcgcggggggcgggggcggcgacgggcggcccgaacgggccccgcgccgcccgagcgagtggaggggagccccgagccgggaatgagcggcgagcggcggagctcccccctcccgcgctgccgaccccggagctgtcaggagctctgccgagccccaccccggagcccgggccctgtcgcgccatccccgtgccgggggcgtgggcgcatccgcttgctccctccaggcccggccggctcctgccggcgcggcggatccgggagccgagatccccgagggcgtgcggactgccccgggcagccggcggtccccggcgcgccgagctggacgagcgggcgccaagaccaccaggggcggaccgacgaggaggaggccaaggagctgggccggggaccgcgggcaaccgggagcctgcgcggagaggacgcgggctgttggcctgtgaatttaaggagcccgaagctcgcctggcagctcggggcgatgcatgagaaccttcctccctggcccattcccgggatgaactgagtggggagcatcggctagagagagggagatcttttgcttagaagaacaaaaacagttccagatttcatatctaaattgcactttttgctgtttcagaactgctgggagacatctggagccggtcccaaaaaacccgcgcacaggagagatcccccttttgaattgcagagggggaccgacactcctggagcacgcacacggcccttttcactcatggtcgggagtctaacccatcctttctctgataccctacctgcttgtcccctccccctcaaaagtcccaggttacagattcttggaagactgtatccgagtcgctgcagccagcggacagatgcagtggaactatggttatgtgctgctctgcctgggagaagcgacgggaaagccgaggttctttccaaagctaatgggcggggaagaaagactgctcggaattactgggtagtatcatctaggaaaggattgcagcgggagtggataccctccccagggctcctctaactttttgaaaagagcgcgagtggactgggaaccattcaagggatatttgtcttctaggcaatcctgctggtagggttcattagtttctagaaggctagtgtgatttagattcttgagatgattcaaggaatgtggcctttatcaagcccgactttccgggtgatgctccacatattttacccagggtgggagaaatagcacgctgtcaccgagaccctcgctcatcggggctcccactggttcactgcagctagctagcagttaaagtttactgcttaggttgggtgggggggcatattttcttagaagctcctgccttcctcagttcattactgtaaaccccgtaccttaaaagactcggcttcttctcactaacaaagaaaaaaagcaaaacaaaaccaaaacacacacacgcacacacacacactctctctctggga

SEQ ID NO: 22738 - DNA, 980 bp, Artificial sequence
  DNA replication origin
ctcgggcttcagtccctaagagtctggactccggactgccgcacagaatccttcttgcccggagcggtattattgaggtctttgcgttctgccccgccctgtcccgccggcttgggtgcttggtttctaacccgagtatactcggagtctctggtcctgcgcgcccccctcctcccgggagagccccgtatctggctgcgggtaagggaaaacttcgggaaccccgagacccaaggacagggtcggagggagcgcgcgaacttcctctgagcagggctcttcctcccctcccctctccctccaggtcaatttatgactcaaacatgagataagccctaggcagacggtgacgctgacttccccgtgggggcgcggggagagaaggatgaggcagacgtaccccctccctggcctggccctgtccggggccgcgtcggggtgtggaggggcgactcccttcctccgggagccccgactcgctctctcccagcgcgcctcccctgcgcccgtaaagctcggccctgccggagccccgggacccgtctgttttatttcacttaaagcgatctgcaaagtcaaggccgggtgaggtgcggcgcgggagaggagaggatatgaacggacgtggaacgaagttctgtctgccaactccctccgtctgattcttggaatccggtggcatcttaaaggacggaattgagggcaaggagaagattattaatccccgaagcccgctctgtctatatataactgctcagtggttacagttggcgatcgcagggtgggggttgggggtgtagaccgtgggccatggaacacgtggcatctctccagggcataaaaatcaatctagctggtggctcctatggagtttgtaaattgcgcagagctggctgggggaagccagtgagctgtccatggtggttaaggctcgttgatgtgcgtcctcgggctgtcctggtgaggcacagaccccccta

SEQ ID NO: 22739 - DNA, 862 bp, Artificial sequence
  DNA replication origin
ccccgtctgagaagtgaggagcccctccgcccagcagtcaccccgtctgggaagtgaggagcgtctccgcccagcagccacctcgtccgggagggaggtgggggtcagccccccgcccggccagccgccccgtccgggaggtgaggggcgcctctgccctgccgcctctactgggaagtgaggagcccctctgcccggccagccgccccatccgggagggaggtgggggggtcagccccccgcccggccagccgccccgtccgggagggaggttggggggtcagccccctgcccggccagccgccccgtccggaagggaggtggcggggtcagccccccgcccggccagccgccctgtctgggaggtgaggggcgcctctgcccagccgcccctactgggaagtgaggagcccctctgcccggccaccaccccgtctgggaggtgtacccaacagctcattgagaacaggccatgatgacaatggcggttttgtggaatagaaaggggggaaaggtggggaaaagattgagaaatcggatggttgctgtgtctgtgtagaaagaggtagacatgggagacttttcattttgttctgtactaagaaaaattcttatcctgttgatctgtgaccttacccccaaccctgtgctctctgaatcatgtgctgtgtccactcagggttaaatggattaagggcggtgcaagatgtgctttgttaaacagatgcttgaaggcagcatgctcgttaagagtcatcaccactccctaatctcaagtacccagggacacaaacactgcggaaggccgcagggtcctctgcctaggaaaaccagagacctttgttcacttgtttatctgctg

SEQ ID NO: 22740 - DNA, 1238 bp, Artificial sequence
  DNA replication origin
ctttcccccctttctattccacaaaaccgccattgtcatcatggcctgttctcaatgagctgttgggtacacctcccagacggggtggtggccgggcagaggggctcctcacttcccagtaggggcggctgggcagaggcgcccctcacctcccagacagggcggctggccgggcggggggctgaccccgccacctcccttccggacggggcggctggccgggcagggggctgaccccccaacctccctcccggacggggcggctggccgggcggggggctgacccccccacctccctcccggatggggcggctggccgggcagaggggctcctcacttcccagtagaggcggcagggcagaggcgcccctcacctcccggacggggcggctggccgggcggggggctgacccccacctccctcccggacgaggtggctgctgggcggagacgctcctcacttcccagacggggtgactgctgggcggaggggctcctcacttctcagacggggcggctgcagggcggaggggctcctcacttctcagacgggcggttgccaggcggagggtctcctcacttctcagacggggcggccgggcagagacgctcctcacctcccagacggggtcgcggccaggtagaggagctcctcacatcccaggcggggcagcggggcagaggctctccccacatctcagacgatgggcggccaggcagagacgctcctcacttcctagatgggatggcgactgggaagaggcgctcgtcacttcctagatgggatggcggccgggcagagacgctcctcactttccagactgggcagccaggcagaggggctcctcacgtcccaggcgatgggcggccaggcagagacgctcctcacttcccagacggggtggcggccgggcagaggctgcaatctgggcactttgggaggccaaggcaggcggctgggaggtggaggttgtagcgagccgagatcatgccactgcactccagcctgggcatcattgagcactgagtgaaccagactccgtctgcaatcccggcaccccaggaggccgaggctggcggatcactcgcggctaggagctggagaccagcccggccaacacagcgaaaccccgtctccaccaaaaaaatacaaaaaccagtgaggcgtggcgtcgcgtgcctgcaatagcaggcactgggcaggctgaggcaggagaatcaggcagggaggttgcagt

SEQ ID NO: 22741 - DNA, 1965 bp, Artificial sequence
  DNA replication origin
actagttttcctcccagaccacatggaggaccaaggaaagtcagatttagcggtccttaccgacgcattctcgaaaacctgcacccttgcctgtcctcctaggccacaagggggaccaactgagaaaaatcgatttagtggcccttaccgacgcattctcgaaaagctgttagagtcctaagcattctcctgttagtactgggactttacccctgtcctataaagatgttatgccccaaaaatgaagtggagggccataccctgagggagggaagggatctccaggtttggaagagtgacaccttttgtcctcacttatatgaataggaaggatataatttctgaggctccccatatcctagcttcaggaatagcttttgttaggcctgttagtctgaggagggatcctaaaattccaggtagtccccactacgatggggctttgggcaaaaattatgtctttctgattggtgagcccgggtgcctaaagaaggtaacagagtcctggagtttatactagaaatcattcttataggagaaactagaaaagcaccagagacggtagcaatttttagaagcgggactaacctcagagaagagaggcaagaggaagtttgtctgacaggcattaggacccagggggcaagggtcaggatagataggatagatgggcgagtctcgcttgggcgacatgcttttgagagttctgctcatggccgcagggtcaaccaacttgttgtcgggaccccagagctgcatggctttcctctctgtcgaccctcggctcagcccagaagtactggaaaagcagaagctggttctagggaaaacaatggtcccaactccgaagagtcgggggttgttatagagccctttcccagaaaacctgacacccgtgtctttagtccggtggccacgctagtcgcttttaactggccaacaggtgcccggtatttagcccccaaattctaaggaaagataggacagaatagcaagctaaaggggtccgatggtactcactgcttggcaataggtgattgtctcaccgctcagcaataggcgatggtcttactgcttggtgattggcgaaggtcccatctgggtcgccaaaatgtgtctggaattggtgggttcttggtctcactgacgtcaagaatgaagccgcggaccctcgccgtgactgttacagttcttaaaggcggcatgtccggagtttgttccttctgatgttcagatgtgttcggagtttcttccttctggtgggttcatggtctcgctggctcgggagtgaagctgcagacctttgcggtgagtgttacagctcttaaaggcagtgtggacccaaagagtgagcagtagcaagatttattgcaaagagcgaaagaacaaagcttccacagtgtggaaggggacccgagcaggttgccactgctggctcaggcagcctgcttttattctcttataagtccccacctacatcctgctgattagtagagccaagtggtctgttttgacagggcactgattggtgcacctacaatccctgagctagacacaaaggttctccacatccccaccagattagctagatacagagtgtccacacaaaggttctccaaggccccaccagagtagctagatgcagagtgtcgattggtgcattcgcaaactctgagctagacacggtgctgattggtgtgtttacaaaccttgagctagatacagagtgccgattggtgtatttacaatccctgagctagacatgaaggttctccaaggcccaccagagtagctagatacagagtgtcgattggtgcattcacagaccctgagctagacacagggtgctgactggtgtatttacaatccctgagcaagacataaaggttctccacatctccaccagactcaggagcccagctggcttcacccaatggatcccgcacctgggctgcaggtggagct

SEQ ID NO: 22742 - DNA, 1278 bp, Artificial sequence
  DNA replication origin
cctgcaagcaaggcgggccgggggcagagggcgccgggctgtgcgggggaaccggcccgcgtcccgggattggggggcggtggaagagagagcgagcgggcatgcgcagtggggcggaggaggtggcgatggccgggggaggcggggggactgctgtttatttgcagctgggccaactccgcggcgcaggcggcggcggagcgcggggagctcgcggcgggtccagctgccgcagcaccatgcccgagcccccctccgggcagacgccgcgcgccgccggggccccggtaggggaggatgccagacgcccgggagaggccagggcagcagcggcggcggcggcgcgatggtggtgaccacctctgcccgaggcggcggcggggaccgcacaccctcccggcggcggggctgcgggctagcgccggccggggccgcggcgctgctggccggggcaagctgcctgtgctacggccgctccctgcagggcgagttcgtgcacgacgacgtgtgggcgatcgtgaacaaccccgacgtgcggcccggcgccccgctccgctggggcatcttcaccaacgacttctggggcaagggcatggccgagaacaccagccacaagtcctaccggccgctctgcgtcctcaccttcaagtgagtccctcacctcgcgctagccgccgctgcctcctctaccctccgcccgtccctcggaccgggagaagttgcgggactgacttgggggcatttcatttttgccgccctttccctccacgcctccctcctctccaggatgtgcatggcactttgctccgggatccactgcccggctaatctgggctctcggggcggttcgggaggcgccggctggggagttgggatcgagtttctcaactgtctgccctctcagcgggcttctctctcgaggcagggctgggagcgggctggtgaaaccgcctccgcaccccttcgcctgccggatcgtgaccaagtgggactagcgcggacccagagggttccggaggggtggcggtggtggcgatgcttccaagtagagaatttctcggaggctgttgggcagctttgcagatgagaagtgtatcagccccttaagggtttcgttcagatgagacgaggcgggagccttgagctgacagggctgcgtgggttcaggagagggagcagaaaactctcccgagccccccagcccccgccttgcacccttggctgctcccagaggctctccaatctgccagacttctctggatctagactttagaaggt

SEQ ID NO: 22743 - DNA, 1216 bp, Artificial sequence
  DNA replication origin
gccacgcgcggcgcggtgggcgggcctgggcgcgagcggctgagtcggctgggtctctggcgccgcagaggccgcgggcgaggaccgggaggggagagggaggagacaggaggaggagacgcgagtgcggggtggcgccggtccacctccgcagcgctcctgcctcccccaggctttggaaggcgggcccgggctgcggcagcggcggcctcggctgcctggggaggtgaagtcgggctgcggcggcctcggtcggcgcggcggagggaggcggctgacccggcgagggtgggcaggtctgggcggccggcgccgctgcgaggtggaggggcggcttggcatccccggggcggggcggggctcccgagggccgcggtcggtgcgttttccgcaggtcagcctcccccggggccttgcagaagcggcttctgcgtacccggggcggctgtgggaagggtgggggtcggtgcctgcagggctctccgtggccgctcgggagaggtgctcttcgctcaggctcccccggagacttgagggggtgcgcgctggcgtgcatggggcctgttctgtccttggtttggggatgctcctaaggggggagaaagggatacctcgggtgcttggaggtcgagagacggatacgtaagtgcgcaagggccactgattagggcacgggaagggctcgctagaatgagctcttaaactggttgggtgtaagcggttttgggctagtctaaaccaaacaactgagaataaacgcggggttcctgcaggttgagagagtacctgtctgcaaatgtccagtagtgatggattgccttgtaggccccagagcaatcggggaagttagcattcttgttcaagaagctgctggttcacttagagctataaaagaatgttgtgagtttggattttcttccaaacgttcaggattgaggttagggctggtggtgagggatcatgtaaagaggtttgagtggctcagccttaggtcccggtgtggaaagcttattcttttggtgtcatcacgtggccatgggaattatttagaatgtgatctgccctcatgagaagaaaggagctctgaagccgttgcagttcttcctccctatgtggaaaatcgaatttctggaaacatcctccgtattgggagattttgcctatgtaaaggctatccttattggctagcggcactaattactttaaaagtaggatg

SEQ ID NO: 22744 - DNA, 1067 bp, Artificial sequence
  DNA replication origin
ctccaagtcgcgtgccctacacaccccctctgcgctgcccagcggggcacggcccgacctcggaaggcccatccggctctcagaagtggccgctctaccagctgcccataatgctgccgaggagcctgtgccagtcccacggctgccgtgcagcaagcgggcggcccgactgacttcagccacgtcccctgcgtcagacaagtgggcgtcccctgcgtcgagacaagtgggggatccgcgaggcctgcaggggcgcagggaccagagtgctaagacgtggcatgacctttcagggagaactgcgcagagggtggccaagggtcacctccctcgaggggcgaagccctgagatgtgaggatgattcttaagacagcgcccttcccgccccttccaaccccccagaccaccacccgggtctgggaacagggtgagcgcatggcgagaggttgtctggttttgtagctatcaagttgtacccccgctgtgcccataggaagtgactcatctgcttgtcaggtagtggccttgctgtgagccaggaccatattaagaaaagaaagaaaaaaaggagcagcaaaacactgtgcccctgcacaatgtgctctcctttcttctgccctccctctcctaggctgtcctcttcttcctccacttgtagtttgctcagccccctcccatccactgccacccccgcccagttgaataatgctcgtatctgagtcagcggatgtgaaacaaagggttatttctccttatctaattttgtggaagattgactaaaagagggtggagagtgtgtctatttagcaggaaaaagatgtttttaacgtgaataatattgagaaatgtgctgtgactttcactgttgggcaaagcagggagacgcctgcctagctggcccttcctgcaggcttggtaaaaagtcctctccggtggagggttggtggccatttgtcaggtacctaaagaatacaaggcgctatgctaggaactagaactgtacagaaatatcccgaaggctctaatgtcatgggacctaactcatttcggaggaagtaaggcttga

SEQ ID NO: 22745 - DNA, 2303 bp, Artificial sequence
  DNA replication origin
ccgcccgggggaagctcgggacagtctagctcgggactgccggcggggcgggcagcggaggtggaggcgcctctcctggacccccagccccctcccgcggcgcccccactcctcgggcgcgcttctgcacttaccctgccaggggctccggaagcggcgaagggagctgcgcctagagagactgagagcggcggctcccggggccgcccagccgcccaccgcccgcagccagcgctcctccctcccagcccgggaaggtcagcgtgtgggcagcccggcccgcgcccctgcgcccactgaggcttcctgccggccctctagtccccgcctgcccagcgctcggccgcgacgccccggcgccggctctcccagcccagccggcaggacgcgcccgggagccccgcacgcgagctgccggctctttgtttgggggtttgcctctctgcgattcagagcacgcggagggaattaagtcagagtccgaggcagctgtgcggttgccggggggatccctaaggggggcggggcaaaaggacggactagtagggcggtggagcggctttcaaactccccgcgctccgcagctccccgcttaggtctccctgccctttacgtttgtcggcccctgggagaggttggcctttgggggtttccagggaccctagggacaagcctgtctgataagagagaggttctccatcccccttcctcaccagcccccatcactgccgtgtccctcttagagtcctgtggagcatcagctttacatttcctgggccccggggagaatcaaggtctctctaatctgaagcaaaaaggaataacagagagtagagcccatctgttcctgctgagtccctgtgaaggtgcaaagctggccctaacgggactggccctaacagtggggcatggattatctatttcccaaagtaacaagggccttgtgcttatccaaccgtgttcttttgaaacttagctgcagtgaggaagattacccatttaccaggttgctagatcagggaagccactggaggcaggggacgctgacaaagccactgtaccgggagcaccaacgttctaaataccccagctggctgctgagaagggcttcgcggggggccacacaggaaggagatgattccaatagtcccgtgagatgaggaccttaactgggggatgaatgcggaagctgcagcaaaggagagtctacagactgtgtggtgtaggaggagcacactggggctgtaacattgtggaagtctggaggagaacctggagtgatgtgactgagtttagtgtggagcaagttggattggagaagcaggccaccttcttccaggggcagatatccagcaaatgcaattggaagggtgattctggagttcataggagagactgaggcaagggatgtcaattttggaatcatctggaaagaagttgggccgacacaagaggtggagggagagggtagaaaaggtacagagaacagggctgaagacagaatctaggtctaccgagaaggagcccatgaaaggaacggaaactatcaggagaaaccataagggaaggtcaggactgtgcggggtgtcaggactcaggagaagagggaggttcaatgggggccggggcccgggctgcagggacaccacggaggagggcgcccaagaaaataggtttagatttagaaagaaggagatctctgggctagttcaagataactatttgagtggtggcttatataaaccaggttgccactccttggggcggggcatctgtatctcggatccaattggttgatggggagatacaaaggttcacctctttgcttccattacggagggccctgaagggccaccccagctccatagcttcccaagggatccgccgaggcctctgtggaaagcagcacagttaaagttcattctctgccgaatcctgtttccctcactctctcaaggtgttgttcccaagagcacgtcccaggagacctcccacataccatctccatctctgtgcagagtctgtttcctagaaatccaaccggaggtacagggacactgagaaagggcgcaggaaacaaaacttggcctctaacggagcagtttaaacagacagggatggttagaaagactcagagaaggtggtgtgaaggaaagagcctggggaatggggagcgaagaggaagcttattcgtagtagaagatggattttcaaaagccggatggaagagagaagagtggagtaggcccgaggaggggagaatgctggaagagggtaagggtgaggggaggtcagtattcacc

SEQ ID NO: 22746 - DNA, 1905 bp, Artificial sequence
  DNA replication origin
acagctgcctcggactctgacttaattccctccgcgtgctctgaatcgcagagaggcaaacccccaaacaaagagccggcagctcgcgtgcggggctcccgggcgcgtcctgccggctgggctgggagagccggcgccggggcgtcgcggccgagcgctgggcaggcggggactagagggccggcaggaagcctcagtgggcgcaggggcgcgggccgggctgcccacacgctgaccttcccgggctgggagggaggagcgctggctgcgggcggtgggcggctgggcggccccgggagccgccgctctcagtctctctaggcgcagctcccttcgccgcttccggagcccctggcagggtaagtgcagaagcgcgcccgaggagtgggggcgccgcgggagggggctgggggtccaggagaggcgcctccacctccgctgcccgccccgccggcagtcccgagctagactgtcccgagcttcccccgggcgggcagagggaagccggctggggatgaggagtggaggaggcaggaatgcctgggacactcgcggggcatgtgagcaggtattggtgtctgcatgggacacgcaacacggtgtccataactatgcgcatgagtctgcctttctgcacttgtgccttgggagagagctctgggcctctgagggcctcgtgccgtccagcgtgcccggggcatgtctgttcctcttgaaaatgtcattctttgtccaccctgaattcgagtagctgcctctcatggctacaccaaaatgctgtatctggtgcacattgctttcagagggcctgtctgcctgtgcagggatgtcctcatgttctgggcacgtctgtgtatttgtgacaacatggctgtgtaggccctgtcacctgtgttttcgtgcccatccctgcatgtgcagttggccggctccgtgtggaaagaaggcatggaaggttctggggtgtatccttttcaccagccatatgtgcagtgtgcacatgtgtgaattggtggaaagtatgaaagggaggcagcccagttgggcttggcgggacagcatcttaacttgagtctaagctgctgtgtgcaggaggaataagtgttccagaggtctccagttcgtggcaagtattgtgaggtgagcgtgggggtggggggtgaggagaagaggcagcttctggaaaaactcataagtgcactctggggcatagggtgtgtgtgggggagcgtgaagaagagaatgagggtggtattaggccaaagtggatagtctgtgttcaatttgtgggcagctggattgcagtggaaagcagcagttagaggctggagacaggtttgaatcagaacttaatggttgtcactgtgtcagtagcattgttccctggacagataggtcatctggggctcagttgctttttgtgcaaaatgggactaataaccactggccccatctgtctcccaagggactggaggctccaattaatgcctggaaatgctttgatgatagttaagactcctagggtaaggggcactactggcctacaggggccaagttggtggtctggcgagggcttaggtggcccagagctgtttggtttgtgggtagcagagggaggcatttgtgtgctgtttcccactatattcagcatagcaggaattttatacccacctttggactcgtgtgtaaaatatgtacaggcctgtgtgattccccatagttcttgtgtgagtgctgcagaacaagaggaaaactggcgttgatgtctttaagtctgcctagagcaccttgactttccagagagcctttcttcagatgagcccaggacatttataaccaccaacttgcttttctttttatgccgccaaatgaagcagtaaggagcacccttcacagtttgtagcc

SEQ ID NO: 22747 - DNA, 712 bp, Artificial sequence
  DNA replication origin
caggaggatggaaggaagcaagggaggaagggagggagggagggagggagggattgattgatttcaaccccttttatattctggatggagaaaccaaggcctagagagaagtggcttttccatagtcacacaagaaagccaaaggaagcatggagagcggaaattaggaatcctaatgctcagtttagtgcccatttaaccaattgggctgctgacccacaatgaagctgcttggccgggaagcaagtcattggtgtctgggctacagcaggcctagagtcctgagctacagcagagcagctagaaggggttatcccaggcttcatcctgacttgtctcacctgccacggcactgtgcagaccaaatgcatatccccctcgactgtgaccctgtctcccagcagatcctggcagcacagaggggcagaagaccatggtgtggggggggggggggtcccaggccattcagcaactcaaaaaggggtgcagcagaaaagccatcacctgttctttcttagatggcaagcctggaaggtgggcagcagccacgttcagtgggatgttgatgtacgaagagaagggctttgagactcggcagaaggtgcttccctcccacggcctccctgactcctgaagtgatgctctcaagtcatcgcactcccctgctggggttcaagtcctccatcttctctgccacctgtcttagccccat

SEQ ID NO: 22748 - DNA, 826 bp, Artificial sequence
  DNA replication origin
cttggagctgtccctgcccccctctcccagcaaatcattctgtcctctgtaccaactccaggtcttgcacgtttccatagttacactcatactctatttattttattggttaccttgtgtgcctcctcttttagcctcttgattaaacttcgttcatcttaatatccctagcagagggctacacatgtaaggaaggaaggaaggaaggagggagggagggagggaaggaaggaaggaaggaaggaaggagggagggagggagggaaggagggaaggaaggaaggagggaaggaaggagggagggagggagggaaggaaggaaggaaggaaggaaggagggagggagggagggaaggagggaaggaaggaaggaaggaaggagggagggagggagggaggcaggacaggaggatggaaggaagcaagggaggaagggagggagggagggagggagggattgattgatttcaaccccttttatattctggatggagaaaccaaggcctagagagaagtggcttttccatagtcacacaagaaagccaaaggaagcatggagagcggaaattaggaatcctaatgctcagtttagtgcccatttaaccaattgggctgctgacccacaatgaagctgcttggccgggaagcaagtcattggtgtctgggctacagcaggcctagagtcctgagctacagcagagcagctagaaggggttatcccaggcttcatcctgacttgtctcacctgccacggcactgtgcagaccaaatgcatatccccctcgactgtgaccctgtctcccagcagatcctggcagcacagagg

SEQ ID NO: 22749 - DNA, 967 bp, Artificial sequence
  DNA replication origin
ggcaggagaatcgcttgaacctgggaggcggaggttgcagtgagccgagatcacgccactgtgctccaggctgcgcgaccgagtgagactctgtctcaaaaaaaaaaaaaaaaaaaaccgaggtgtggggggaagaaagtaccagaagatgatgccaaaaagtcaggttaaggccagacagtaagagcaccgaggccatgcaaaagagtttttgggcttggtgcctggggcatgggagctggtggggacttctcagccgggggtgccttgggggatcagcctgtgggcggaacaggagccaggagccgggagccaactgaggtggggaaccgaggtggacagtgtggcggggagatggagacaggtttgagggcagaggggaattggcacatggttgtcattgagagaaggaggagcctacagtgaccctgtggtgtctgtgggtgggtgggtgggtgggtgatggcgcggcgccatgtatgagactgagcagggaggaggagcacagatgatgagtgtggttcccatgggtgagctcctgtccaacccagagacttttcagtccagtgtggggcttggcatgtagcaggtggccagtaaacacaaagtctactatcaccctgtacacttcccatcaccctgtgcatttcccgcatcctgagccatgggctcctcctcactgagggtggagaactcccctccgcagaggatccttccttattgggattcaagtgttcctggctcctgccccatccctttccttccttcattgcagaagccctatggtagcgagacaaagaaaaacgcctacatttacttttataccctctgcctgctttcctccaggtctgctgccttatttctctcggcccctcaggcatgtgcagccactcaggttaatgcttcaccccatcatgtttctttcctatgaacataaagttcctaaaattacacaacaggggtgacc

SEQ ID NO: 22750 - DNA, 951 bp, Artificial sequence
  DNA replication origin
ggctcagtcatggcgggctgctcagtcatggtgggctgcaggtcccgagccctgccccgcggggaggcagctaaggcccggcgagaaatggagcacggcagctgctggcccaggtactaaacccctcactgcccggggctggcgggccggctgctccgattgcggggcccgccgagcccacgcccaccgggaactcgcgctggcccgcaagcgccgagcgcagccccggttcccgcctgcgcctctccctccacacctccctgcaagctgagggagctggctccggccttggccagcccagaaaggggctcctacagtgcagctgcgggctgaggggctcctcaagcgcggccagagtgggtgccaaggccgaggaggcgccaagagcgagccagggctgcgagggctgccagcaggctgtcacctctcaataggacgtgaaggtcggtcggggtctggttgtagaaggctttaaacaacaagctaataaatttatacttcacactgtagacaagttgcaagtcactgaaacatttttaaacagaggagtggatttgcaaatgcagtgtcttggaaatattaagctggaagcagtgtgaaggatggtttggtggggagagaccagaagcaagcagccaagttgggttgtgcagtaaaccaggcagtgcagtagaggcttggacctcaagagtgacaatagacatggagaggacaaaggccgtacccaccaggctgtaaatctgcattgtgtccctccatcctcccctcgcttctgccctggaggcttatatttagagagctgtactcctaacgtgaggccctgggctttgtctcaaaggtaaaggcaaaagttccttatgtggactacctctgcatttgttattaaacagccttagatgatgccattaattgaatgaactcagaggccttcttgataaactctcaaaactc

SEQ ID NO: 22751 - DNA, 1024 bp, Artificial sequence
  DNA replication origin
cccctcgtggggaaactttggcggcgctacttgtgcgaggtgccatgctggtgcgtagggaggcggcgtgcttccccgctccgggcgtgcgggcgggcgaccgagggaggcggcagtgcccggcgcttcagccctggcgtcgggggttgcgacggccgagggttccggggagcttggcccggactgctcggccggtttctcgtggcccgggagcctgtgtctgggaggtctgtgggttcgcctttgaagtcgaactgttgccatgtttgaattacgtcagggcaaagccatgaggaggaacaagccccggcagcgcggcgtgcgggaggcgcggcctgcgggaggcgccgggccgggctggcgcggggcccgttgttccggcgcaggtgagggaggtggcggcgagcgacgcggttcacctcccgctgccctcgccctcgccccggcgagcggcccccgcaggaactttcctcccgacgcgagatgtcttatttaccaacaaatccaccagggagcattcttacttgctggctcggcgtctctctcggcagtcaccggagtgcccgagggggaagcacgatttacggaaggtggggacccgagggccctgggaggagcggggaggcattttactgctttcagagaaacgggtgagggcggcgagcacctcctccccagccgagctgtggcccgcaagtccaggggacccagccccgacgacgcccgataaaccaccgtggggaagttccggggctccctgttgccctactaagggaagtgaggactgtgggcgaattgtgcgtgcggccagtttctttgtgtgtttctagggggtggggggagcggggaagggcaaggtttgttttggtgtagggggagttggtttcttgaggtggtagggcggtgcagtttgttctggtaactatgaccctagtcagtttctttgtttttattttcttcctgtaaccttccattacttcaggcactcggaagattaggatttactcttgagttaaacagggac

SEQ ID NO: 22752 - DNA, 1091 bp, Artificial sequence
  DNA replication origin
ggggtgcaggctccagacaaagtcagctcccggtggcgccctcccgccgctttctggccgaactggcgctcgggcgcgatttaatgacattgttatttattccgcgtgcgggctttgcggctgcgcccaccggggctttcgcctccaggcgctgggttattaataacaggcgcgggggtggccccaagggcacggaccccgcctggcgcgccggccccttcgcttgcagccgcactcggaggcggccggtgagtcaccgggcgcgcgggctgccccccgaccgccgtgcctgcctcccacccgccagccacccggccccggccgcgaagtttcggccccgcacgtgacgcggctttcgggcctcttcgggagacggggagtcggactcagctcggctcccgccggggtagcgtccgcggaggagccggtggccgtgcggagcgagcgcggggcggggaccggtcggactctgccctctgcgccgcctgccgctctgcggtgccggccaagtcaccttttggaatcctgtggatttggccgcgtctgggagctggcagggacctttggacgctcgggacccagcaccgcgctttgttgacactgcctacactgttcccgagtttaaattcagttgggtgcaccgtgtgttagtgcctggttttcccggaggggtaccggtccttccgcttgactcatttgatggcgcagtgcggggctgtgctgggcaaacgacgccgttaaaaggggccgctaaagggcgatgggcgggggcagggcagcggagtgcgcagtgtcgagaggaggccggggagaaacaactgatttcatttttcacgcctgttcctttctgcttgcctccgcgggatctgaatcttgatttgttgttgttgttaaatgggtgagagaagtgacatctaccgcctgaactttgtgttaaagacttaggtcatagcctttcagaacaacttcctttggacaaataattccttattgattgcactaacgtaaatttttcgcttttcctttggtgggggtggggagactgggaagaatatattaaataataaacaatagtaaacaaaactgttcag

SEQ ID NO: 22753 - DNA, 1055 bp, Artificial sequence
  DNA replication origin
cggccgcgctgctccaggggccgccgccgccgccgcccgggaaggctttctgcggaggctgccaccaccgctccggctgtggtctgtgcgcccgccctagggcgacactggcgcgcccatggccgcgcagccgcctctcgccgccgcagcctgcctcctcgctcggcgcgggggaagcggccgcgggctcgcgcgcggcgggtccggagcccggccgggtgggggaggggcgcggggggagtgtcggcctgagaggccctcgcagccgcagctgcgctcgcgagctgagagccgccgcgtctggcgcccgcgggtcagctgagcggcgctcgggctgtgggagcgcggggcgggcgggggcgccggggctcggcgcgtgcgacggagaggggtggggggcgcgctcgcgagggacggaggcgcgcgcttctaccgtgcgcgcgcgcctagcgggttcggaggccaagcctggcgtggggccgcattcgtgcccactggccccggctgcggcatcgagggcgaccctgcacacacccctcctcgccctggccagccgataagagggctagcctcagtgtgggggtctgtcttctaaaggggttgtcacccatccttatttcttttaatgcagctttggggaaggtgaacagccgctctgagatcatttcgcataacggtctgaaccatcgtcttttaaactgtgacctgtgtgggggtgcctgtctcactttaaggtcctcccttcccccagccgtcaccccatttacaggccatccttagtgacttagtgacaagtcaaccgtgagggggaaaaaacacaactcaatacccacaaagcgttgagacttctagaaggagtgcagtcaccaacccccgccttctgtcatttatcctgacattttccaggtcagtgtaaatagccaaggcgctccagttccgcagccctgtacccatccgatgttatcggctctccccgcaagtaacaatcggaggctaaagcaacaggaattagaccatgaactctgctcctcccaaaggcacggctttcttgccct

SEQ ID NO: 22754 - DNA, 1550 bp, Artificial sequence
  DNA replication origin
gcccctgcgtgcggtcagcagccgtgcggcatggcccgggctgcggcggccgcgggtagcgaggggctccggattctgcttattcagagacgcccgtccgccatgtctcccgggccgcgtcactgcagtctcgccctgggtctggcgcgctccggctcgcggctcgctctctcgctccacctgctccctctggccctgcagcagccggtgcggaatgatgcagtctcggggccggctccctcccttcccgcgtggcggcggctccgagcagggggcggggagcggatggagtcagcgcggggggcggagggaaggaccagacggaaacatcccgaggcgcctcccgccgggcgcgcgggccgccgcccgctgcaccgtgaggcgcgccaggaggaggcgcaggcgacgggtctgggactgggaagcggtggggcgcgcgcggcgggggagcctccgccctgtccggctcgcgggggcgggagctcctcccagggctttgtcccggtggcagtagaagaccccgagagcggcgtgggcgcccgggctcttttgctacgtcgagggccgaagctcaggaaactgcctggaacgctttctcccgagaaaagcaaacaaaactatcgcggtcgcggtccgcgcatcctcctcgtcccctgggcgcgcagaaggctttttgggccacctgcccccaaaagaccgctgggtttcccaaagctttcaagacgcaccccaaggcgccctcctccgtcgtccccctctctccctgcctctcccaagtctggcctgggccacctaacactctcaccagataaccttactatcctcacaggacagtccgctaaatattgctcgccctcacccagcgtatcacaagagcgctatccactcagaaaaaaaatatctccacaatacatgcacccaggaaacctctagctaggtactgtatatcttgccccaatagtttccatcaaagcaccttactctgtgtcttcaataaaggaaaactgcttgaaattccctatataagataccaacgatgccctgtaataagcattttttaaacaataagagctaagagttcttgagacccataccaagcattcttctaagtatgtaacatgcgttctctccaatcctaacaatgctttgaggtaagagccattatcctcagtttacagggggtgaaaggcaaagggagatgtgatttgtccaaagtcaggcaactctggaatcttaactcgggagcactaaacgggatcattatgttggcttcaggttcactcattactcatacaaacccagcaactacatattacatgcttttaagataatcacattaatccatatgaagagtgatgatgaacggttacaaaaggaggtgaaagcaaagtaagagtggagtaaatgaaagagtggagaagggtcgagaatcaagaggaagaacgcaacatgagagaaaagaagcaatttctgtgtaacgggaggctgtgagacccacagatcagtgggtctttccagttccctctcttcttctgcatggcacctattcc

SEQ ID NO: 22755 - DNA, 983 bp, Artificial sequence
  DNA replication origin
ccccgccgcgcgcgccccaccgcttcccagtcccagacccgtcgcctgcgcctcctcctggcgcgcctcacggtgcagcgggcggcggcccgcgcgcccggcgggaggcgcctcgggatgtttccgtctggtccttccctccgccccccgcgctgactccatccgctccccgccccctgctcggagccgccgccacgcgggaagggagggagccggccccgagactgcatcattccgcaccggctgctgcagggccagagggagcaggtggagcgagagagcgagccgcgagccggagcgcgccagacccagggcgagactgcagtgacgcggcccgggagacatggcggacgggcgtctctgaataagcagaatccggagcccctcgctacccgcggccgccgcagcccgggccatgccgcacggctgctgaccgcacgcaggggccggccccgaggacacatgcggcggcctttgccgcctcgcccctgaccctctgccctgttctccatgttgcatttctcgtcagtttctcgggcggtgtagctgccgctgccaccagagccggcggggcatcgcgctgctcattcatccggccgcactttcttttccgtttccacccatcccttcccatttccttctccctttccccgccagcttcgcatccatctcccccaccccgtaaccccctcctgcctccatccaccggggctatggccgcagaagaggtattgcagacggtggaccattataagactgagatagagaggctaaccaaggagctcacggagaccacccacgagaagatccaggctgccgagtacgggctggtggtgctggaggagaagctgaccctcaaacagcagtatgatgaactggaggctgagtacgacagcctcaaacaggagctggagcagctcaaagaggtgagttgcctgtcacctctccctttcctggccctcactccccccacccgcaaggcc

SEQ ID NO: 22756 - DNA, 1857 bp, Artificial sequence
  DNA replication origin
ctctactgcggcgtctcctcagcgagtgcctcctctccctctccttcccggtacgctccctcccggcgtcgcggcgagtttggctgcggcgactcctgcggcagtcgcagcgtctcggtatctgcagctcccgcactcactcaaagccgctaccgcagctgccaggccggggctgcctccaccccttcctctctggagccaatcgccagcaggtccccaagggcgggaggagagcgcagagggttcagcctgttagcgccgccgccgccgccgccgccgcctcctccggccggggaagcagccaagaacttgctgtgcccagcggagcgccctgggcgcggccccggagccggagccggttcgctctggccggccccgccctgccgcgccactgcctcgccctttggccgaggggagccgcgcgggcgcgcacctgcggccgcacacctggggtgctgcgaggcgggggccgcgctcacctgctggccacgcagtgccctcgggaagaagtccagctactctggaccatgtccagggtgcttgcattctcgcagacccgcactctgagggtcgcgtatgtgtctcaagccgttgtgctgaacccttgatcttatgtcctaaaactaccgaataagtatttcagataaggaaaccaaggtgctgaacctacagtggggtcacatagcactgcagagctggagtctccgcaccgaagtctgtccttactccactgaactaaacatcttgccaggagtatcgggacagaaaatgaaataagaggtgtggaaataaaagaggggtagaggttaacaatccaaaggtttccagaagagcagcagaccctccattcaggacttcattaggaatgcactttacagtccttttggttgttttgagacagggtctcgctctgtcaccaaggctgcagtgcagtggtgtgatcatagctcagtgcagcctcgaccttctggtctcaagcgattctcctgcctcagcctcctgagtagctgagacaacaggggcgcgccactactgctggctaatttttgtagtttttgtagagatgaggcctcgctatgttgcccaggctggtctctaactcttgggctcaagcaatcctactgccttggcctcccaaagctctgggttacaggcttgagtcactgtgcccagcctagagtccttttaaattatcatgttttcgtttttaacaccagctaaatactaacctgaagaaatgcttttttgtttgttttttagataccgggtcacaccctgatccaagctggagtgcagtggccctatcaactcactgcagcctcgacctcctgggctcaagggatcttactgcctcagccccaccactagctggaactacaggcccatgccaccacactcagctaattagtagtatttatttatttatttgtttatttattcttagtggagatgaggttttcctaggtcgaccagactggtctccaatccctgggctcaagcattcctcccaccttggcctcccaaagagctgggattacagccgtgagccacagtgcctgaccaaaaaaatacattttaaattgacttgcttatctgcatttgaaaattcactattctaataacaaagaggctgtgtcccaaaaatcacacagataggaggcaaaaagccaccattacaagtatcccagctcaagccaagttccccagccatcacttccatcttggaagccaccccgcctttcttcacatggtcattcacccaggtaccatctccagccccctgaagtgtaatggtaattcgatctttctcagcctttgtgaagggcagttcaactgtttcagtctccctggctgcta

SEQ ID NO: 22757 - DNA, 1204 bp, Artificial sequence
  DNA replication origin
ctggcagctgcggtagcggctttgagtgagtgcgggagctgcagataccgagacgctgcgactgccgcaggagtcgccgcagccaaactcgccgcgacgccgggagggagcgtaccgggaaggagagggagaggaggcactcgctgaggagacgccgcagtagagggcgcccccggagtcgcgccgaacctgggcatgcaggcgacgccccccaggggccgctcgcggctggacgggagcgggaggagtcggggagcggcggtcgagcccggcaggatgagcgacgagggcggctccaacttcaggcgggtggcgatccggcggaagtccaacccctcctacctgccgcccggggtgccccggccctggagcaggcccgcgtcgcacctgggacgtgtagggaccgctgccttcaagggccaggtgccctcaggagccacaggtaagcgcctcggggcgcgggggaagggtggccccggcgcgtaggtgcgggtgaggggcgctcccagcgccctgcaggtgcgccctctcgtcccccgctgcggaggtaactggttcgggaggttcattgtggaaggctgcgctcggccacccactcccttagctatgctgtcccttcccccagaggaccttgggcaggaacccgcctaccgccgagcttgtcctggaggtcacttctcagaaaattcagaaagtacaggtagaattctctttttctctctaacttttgttaggatttgaaaagaccagttttctagctactgaagcttaagcggcttcgctaaattcctgctttgggcagccgtggtggaggcctaatacggtgaaggggaggctggtgtccgcccaagtctgacaacctaggtgtggtgagcaaccttcttagtgcctggattttcttaaagggacgcttgactcccaggctgactgtgaaaagcggcaaggaaagctgttcctaacatcagaaaacggaatcattattgctgttttcatgttaataggttcagatgtcagtaatgcggtgttttgatttctgaattctcattgaatcttaaagaagtcctcaaggtgatctattcaaggcgatctattcaaggccacgtaatctcccctgtcttgtaaatgtgttctcttctccccaggcgagtttgaaactagggatttcttttttctttgatttgcaaaacttctttaaaatcccctc

SEQ ID NO: 22758 - DNA, 1113 bp, Artificial sequence
  DNA replication origin
gagcgtctctgcccggccgcccatcgtctgagatgtggggagcacctctgccccgccaccccgtctgggatgtgaggagcgcccctgcccggccgcgaccccgtctgggaggtgaggagcgtctctgcccggccgccccgtctgagaagtgaggagaccctccgcctggcaaccgccccgtctgagaagtgaggagcccctctgcccggcagccaccccctctgggaagtgaggagcgtctccgcccggcagccaccccatccgggagggaggtgggggtcagcccccgccaggccagccgtcccgtccgggagggaggtggggggggtcagccccccgcccggccagccgccccgtccgggagggaggtgggggtgtcagccccccgcccggccagccgccccgtccgggaggtgaggggcacctctgcccggccgcccctactgggatgtgagaagcccctctgcccggccaccaccccgtctgggaggtgtacccaacagctcattgagaacgggccgggatgacaatggcggttttgtggaatagaaaggggggaaaggtggggaaaagattgagaagtcggatggttgccgtgtctgtgtagaaagaagtagacatgggagacttttcattttgttctgtactaagaaaaattcttctgccttgggatcctgttgatcggtgaccttttacccccaaccctgtgctctctgaaacatgtgctgtgtccactcagggttaaatggattaagggcggtgcaggatgtgctttgttaaacagagcttgaaggcagcatgctcgttaagaatcatcaccactccctaatctcaagtacccagggacacaaacactgcggaaggccgcagggtcctctgcctaggaaaaccagagacctttgttcacttgtttatctgctgaccttccctccactattgtcctatgaccctgccaaatccccctctgcgagaaacacccaagaatgatcaataaaaaagaaaaataaaataagttaaatttcccctgaccccataaaacaaaaacagtcatagttacaagactaagcatagaaacacttttcccacatgggctggccttgacaaagagttttc

SEQ ID NO: 22759 - DNA, 1273 bp, Artificial sequence
  DNA replication origin
acagggttgggggtaaaaggtcaccgatcaacaggatcccaaggcagaagaatttttcttagtacagaacaaaatgaaaagtctcccatgtctacttctttctacacagacacggcaaccatccgacttctcaatcttttccccacctttcccccctttctattccacaaaaccgccattgtcatcccggcccgttctcaatgagctgttgggtacacctcccagacggggtggtggccgggcagaggggcttctcacatcccagtaggggcggccgggcagaggtgcccctcacctcccggacggggcggctggccgggcggggggctgacacccccacctccctcccggacggggcggctggccgggcggggggctgaccccccccacctccctcccggacgggacggctggcctggcgggggctgacccccacctccctcccggatggggtggctgccgggcggagacgctcctcacttcccagagggggtggctgccgggcagaggggctcctcacttctcagacggggcggttgccaggcggagggtctcctcacttctcagacggggcggccgggcagagacgctcctcacctcccagacggggtcgcggccgggcaggggcgctcctcacatcccagacggggtggcggggcagaggtgctccccacatctcagacgatgggcggccgggcagagacgctcctcagttcctagatgggatggcggccgggaagaggcactcctcacttcctagatgagatggcggccaggcagagacactcctcactttccagactgggcagccaggcagaggggctcctcacgtcccagacgatgggcagccgggcagagacgctcctcacttcccagacggggtggcggccgggcagaggctgcaatctcggcactttgggaggccaaggcaggcggctgggaggtggaggttgtagcgagccgcgatcacgccactgcactccagcctgggcaccattgagcactgagtgaaccagactccatctgcaatcccggcacctcgggaggccgaggctggcggatcactcgcggttaggagctggagaccagcccagccaacccagcgaaaccccgtctccaccaaaaaagtacgaaaaccaatcaggcatggcggcgcgggcatgtaatcgcaggcactcggcaggctgaggcaggagaatcaggcagggaggttgcagtgagccgagatggcagcagtacagtccagcttcggctcggcatcagagggagaccg

SEQ ID NO: 22760 - DNA, 1218 bp, Artificial sequence
  DNA replication origin
gggcagccgggcagagacgctcctcacttcccagacggggtggcggccgggcagaggctgcaatctcggcactttgggaggccaaggcaggcggctgggaggtggaggttgtagcgagccgcgatcacgccactgcactccagcctgggcaccattgagcactgagtgaaccagactccatctgcaatcccggcacctcgggaggccgaggctggcggatcactcgcggttaggagctggagaccagcccagccaacccagcgaaaccccgtctccaccaaaaaagtacgaaaaccaatcaggcatggcggcgcgggcatgtaatcgcaggcactcggcaggctgaggcaggagaatcaggcagggaggttgcagtgagccgagatggcagcagtacagtccagcttcggctcggcatcagagggagaccgtggaaagagagggagaccgtggaaaggggagagggagagggagggggagggggagggagagggagtgggagaggggaaatttaacttataaggcagtattgtgatatgcctccatacttacctgccctttctttctgaactcttgcaggcagcagtacctgtccaaagatcgctttagttccaccttgctccacaagcagcacaaccacactggttggtgagaatgtatctgaagaagaggctcagggaataaatgggaacaggccagcaaaacactcagctgcaagtccaaagccacaaggtatgctcactgggagtttgtgttcggggtgggtacgttgttgatcaatgaaggctaaccagaaaaatgatggccacaaagaaagtgttttaagctagaaggaaggaattgggtacattattttttagagaagagtccatctgtgcatcttctcaggcagaggttgctatttgttctgctcctgaaacaacatacatttctctatatggatcttttcatgttgctgaaattgtttgcatgtcatcttaacggaactgtgatctctttattatgcctgatctagtacagggacttactgtctgtgtaataaatgtgtttggagctactgttagaaagaaatgatttgctagatgtcagtatctgtaaaacataattctaaaacagcacttcgtgtacttatcaagcatgtgacttgaaaatattaaggaggtagggcatgaaaacacctgatagtaaggtcttccgcagaaaggaacagtaacagcc

SEQ ID NO: 22761 - DNA, 773 bp, Artificial sequence
  DNA replication origin
cgtctctgcccagcctcccatcgtctgagatgtggggagcgccactgccccgctgccccgtttgggatgtgaggagcgcctctgcccggccacgaccccgtctgggaggtgaggagcgtctctgcccggccgccccatctgagaagtgaggagcccctccgcctggcagccaccccatctgggaagtgaggagtgtctccacccagcagccaccccgtccaggaagtggggggtcagcccccaccctgccagccgccccgtccgggagggaggtgggggccagcccctgcccggccagccaccccatctgggagggaggtggggggccagctcccgcccggccagccaccccatccaggaggtggggggcgcctctgcctggccaccccttctgggaagtgaggagcccctctgcccagccaccaccccgtctgggaggtgtacccaacagctcattgagaacaggccatgatgacgtggtggttttgtcgaatagaaaagggggaaatgtggggataagatagagaaatcagattgttgctgtgtctgtgtagaaagaagtagacacaggagactccattttgttctgtactaagaaaaattcttctgccttgggatgctgttgatctatgaccttacccccaacccggtgctctctgaaacatgtgctgtgtccactcagggttaaatggattaagggcggtgcaagatgtgctttgttaaacagatgcttgaaggcaacatgctcgttaagagtcatcaccactccctaa

SEQ ID NO: 22762 - DNA, 994 bp, Artificial sequence
  DNA replication origin
tattcgacaaaaccaccacgtcatcatggcctgttctcaatgagctgttgggtacacctcccagacggggtggtggctgggcagaggggctcctcacttcccagaaggggtggccaggcagaggcgccccccacctcctggatggggtggctggccgggcgggagctggccccccacctccctcccagatggggtggctggccgggcaggggctggcccccacctccctcccggacggggcggctggcagggtgggggctgaccccccacttcctggacggggtggctgctgggtggagacactcctcacttcccagatggggtggctgccaggcggaggggctcctcacttctcagatggggcggccgggcagagacgctcctcacctcccagacggggtcgtggccgggcagaggcgctcctcacatcccaaacggggcagcggggcagtggcgctccccacatctcagacgatgggaggctgggcagagacgctcctcacttcctagacgggatggcggcggggaagaggcgctcctcacttcccagactgggcggcaaggcagagatgctcctcacttcccagacggggtggtggccgggcagaggctgcaatctcggcactttgggaggccaaggcaggcggctgggaggtggaggttgtagcgagccgagatcacgccactgcactccagcctgggcaacattgagcactgagtgaatgagactccatctgcaatcccggcacctcggggggccgaggctggcagatcactcccggttgggagctggagaccagtccggccaacacagcgaaaccccgtctccaccaaaaaaatatgaaaacccgtcaggcgtggcggcgcacgcctgcaatcgcaggcactcggcaggttgaggcaggagaatcaggcagggaggttgcagtgagcagagatggcggcagtacagtctagcttcggctgggcatcagagggagaccgtggaaagggg

SEQ ID NO: 22763 - DNA, 1042 bp, Artificial sequence
  DNA replication origin
aacatacacatgcatgtatatggcataaggaagaggtccagtttcaatcttctgcatatggatagtcaggtattccaggaccagttattcaatagagattcctttccgagttgcttgttttggttgactttgtcaaagatcagatggttataggtgtatggcactatttctgggctctctattctgttccaattgtctgtgtgtttttgtaccagtaccatgctattttgattattgtagaaatctgctgcactaaagagctgaagcattcctgatctgctggccacaacattttgatgggtggagccagccaaagtgcttcactggggcagtggcagtgggatccgtacttgctcacatgtgccagcaactgcagcagtgtggtggggtacctgtgtgtcagttggggaggggtactggtgggagttgggctgttgtgttcctgtgtgcacttgcactcaggtggtggcatggtggtggtggggtgctggcaagggcagggttgatggtgtctgtatttgcactctcactggcatcagtggcaacagaggtgagcattattgagtgcagagcctcagacctctgtgcctacattaatgccagcaatggtggcatggtcaggtccctgcatgtcactagtggatgggggttagagggttgtggaggtgggtaggtgggtggtggggcgatctcaccctggcagcagtgggtggtgaggggtgggccagcagggatggggaggcaaggtccatcagcatgtgcatgccagcaaatcagtagtaggggtggcttctgggctagtgtatgctgcaaagctgcatgagagaggtcacagttggggagggtgtaggtaggctgttgcaagcaatgctcatggagctctctgacacagtctgagggcccctgggaagcaccctggttgggtatctgaggctgccctgtagccagactaggaccccaggaggggccagcagacagaggaatgctcagatcggactggcctcaactcataatcgagggcagtcgcttgctctgtccacat

SEQ ID NO: 22764 - DNA, 1675 bp, Artificial sequence
  DNA replication origin
attaatgccagcaatggtggcatggtcaggtccctgcatgtcactagtggatgggggttagagggttgtggaggtgggtaggtgggtggtggggcgatctcaccctggcagcagtgggtggtgaggggtgggccagcagggatggggaggcaaggtccatcagcatgtgcatgccagcaaatcagtagtaggggtggcttctgggctagtgtatgctgcaaagctgcatgagagaggtcacagttggggagggtgtaggtaggctgttgcaagcaatgctcatggagctctctgacacagtctgagggcccctgggaagcaccctggttgggtatctgaggctgccctgtagccagactaggaccccaggaggggccagcagacagaggaatgctcagatcggactggcctcaactcataatcgagggcagtcgcttgctctgtccacattcaactgtcaccccaatgctgcagtcttctagaggagcgtggtgaatgtattagtctgttctcattctgctaataaagacatacccaagaccgggtaatgttggggtgatcagacccaacaccatgtcgtgggggtgatgaagtccactggagtcaaaggaatgagaaaagacagcttgagagagaaagtgggtccagggggccaacacgagtatggaggctgcgaaggtcctgagctctggaagcccagactatctactgttgatcaaacaaagaaacaggtggtgagaatgtgggggtgaaagggcaagtgcttgatctacagctgtgatggtttagcatttcctttgaggcatatggagcatgttctgctacttgagacaatggggagcatgttcttctagtttaagctagaagcaaggagccagcaaatctagactcattccagaggtcatgaggggttttatgccctgagccctggacattatgtcagacaagcaagccctgcctcagctttttttcccccaacactcagctttttcctaacagggtaatttataagaggtttaagtgactcacagttccacatggctgggaaggcctcacaatcatggcagaaggcaaatgaggagcaaagtcatgttttacattgtggcaggcaaaagaccttgtgcaggggaactcccatttataaaaccatcaggtcttgtgagactcattcactacaatgagaacagtatgggggaaatggccctcagaattcaattatctacatctggccctactgcccttgacacatggggattattacaattcaaggtgagatttgggtggagacacagtgaaaccatatcagtgctactgggggataggcactcctggctgtgctccactgcaaacatttccacaccaaatcctctagactccacacaggctggagtcctgcccctatcacctctctaaacaagtctctttgccagctcaagtgttcatgggggttgtggagtctcttgctgccaggattccagacatatgtggacagatatatgtttccttgttcaactcacctcttccccaagaatcactaggggccaggaatgagtcctggtgcttggtatccccatgcagagttcccagcttcccccagcttcagcccgatgcctgtgccctttctgtttttgctcacaatactttccccctgaagatctgcttggagtgtgctggt

SEQ ID NO: 22765 - DNA, 1258 bp, Artificial sequence
  DNA replication origin
aagagttcagggtctaactgaccctgaaaaggtgacaacaggacagaggccagctgagcccctccacaccctaacagctaccaggcacatatggtgctcaattccccagaggccccaggaagggctctttcttaatcagtaaaatgggggccccaccagcacccacacatgcggtggtgtccacgcacaccagagaatgaaactcctgctgtgctgatgtgggggacaaatatccctgtccccacattccccagcgtcatccccacatggtgttgagcttggggtgcccaagacaacagcccactgatgcagcagcccaagggatgctgtgtcctggagggacctgcgggacctagagggcatttcagtcagagaatctccctgagtttgtcattcaatggccctatgcctcagtttcctccactatgacacaagggagaaatcccaccccacagagctagggacccagtgaggccaccacaccaggttaaatggctggagtgtacaaaagctgggctgagggtacttgccctgggtgtctcgccctgggactgaggtccaccagtccatggccaggccagcctgttggggaggtctcccagttccaagtccctgcagttgaggcccccagcgcattgggggaggcacagggtgggatggagtggaacgaagtcccatcataagagccctgggcagaccttagggaacaagtattaaactgagactcgagtccgaagccggctccgccgtttggggtgacatgagttccagggccagggaacaaagcgttctggttttagacctgcaggaagatctgtgaagcgctcttgggcagggcacatgttgccgggtatgtgcttgaaaagagcctaagaagagggggagtctggaaggaactgcgatgccaagggagagggtccagccttcctgcttcagcacctgggctcattcagcaaagtttcctaagaaagccagaaaaaaaaaatgagtatgggtcccatactcagccaaaaaaaaaaaaaaaaaaaaaaaaaaattccaaaggccaggagggctaatgggactttactgggactatctggcctaatcctacaaacaagccagccatagtagcccatcagtcctctgggacgggtgaggaacctgagatggtaggagggcccccagaaggtccaggcagagccccctaggaccccacaccttcccccgtggcagctctaaccccagctttttcactagtaaggcactggggctgctg

SEQ ID NO: 22766 - DNA, 1673 bp, Artificial sequence
  DNA replication origin
cgaccggtcacctgggctgggagggcggcgcaggggcggaagcggcggtccgggacagtctggctctgcagcctctccccgccgcggtccgtctagtccctccctggcggctgcggagccctcccaggacagggaccacaaactctccagagcgggaagccgtgacctggcgaggctgccacagggaccgctcgagatccgaaccgctcagacctggcggccgctggcggctgacccactgcgcgggtttccgtagagctcgctgtccacccggccctgcggcctcggctcttgcgtgtgcgctgtggtgggtccctgctaggggcgaccctatgggccagcttcccacgcctggtccccaagccgcacccaccctagctccctgggctaggggactggctcctcctgggggccgtgcggtgggaggcaggggcgttaggggagagggaggggtcgagggcagcccctgctctgtgcacagcgaggtggggcgcaggcttctgttgcacagcatgcggcttcagctgggactgtgctcgggctccgagggggtatcggtgccggaggcgatatcagagaggcttcagcaagaaggagccgcggatctgacgcctggggtgtgagttggtcattttcaggtggaagagggcaggaccgaattgcaggtggagaaggctgtgtgtgcgcacacctgggggtgaaggggacgcagcctgtctacctggcccatgaaatgcgggagcagcgggttcacagctccattgattaagcaagtctgggacacacatgtagctaagctgagttctgtgccaagggtcccaacacccactcccccaggaagacacaggtttggaggttgggtgcttgtcaggcctaagaatggagagcaggggccagaaacaccaagtagggggaacccacactagggctctgagggacgacgatgtggggagctggtggcagagcctgagctggcccaaggttgcagggtggggagagattcaaggcatagcggggactggtgacctcagttcccagaatgtcccagcctggcctcccggtccagccagcaagtacagggtgctgccctgtaaagactctgggggtgcctcagctcccctcaccacacttgacgggtgacttctgtgtccaccctcacaagaagaggtatcttctctcactttcaggcaagcccaggaaagtcaggggcctgcgtgaaccaaagaggagagaaggcgatgacctcagcccagtgtttctgcctcacctggcttatggccttggggacttgatttgcaccgcaggaaaatgggcaatgaaagcccctccctgactggcttctcactccactgtgcccagcccacagcacaatgcccaccctgcagctcctggtacagcctgcgtacctgcagctccaggtacagaggctgtgctggctctgggctgacctcaggaccttctgatggttggaaccctcgggatgcctcatgttcaccctttggcacccacctgacagctcagcatgtctgctgtatgacatcttcaatgcctgctctagacaagcccaagttcccccggagtggcagagggaactgagctggaaactaagtcccgactcactgaaccccaagtgggctctccagcctaccccttcagttcacaactccaggcaa

SEQ ID NO: 22767 - DNA, 1121 bp, Artificial sequence
  DNA replication origin
gatttgtagagtgtatctgtccctctggtaggagccgtggcgtggagcgtgcccatggggcctgaggcctgggtgtctctcgtgtcctcgggactggagtttactcgaagtcggtggcaatgggaatccgggtgcacagggacggatttcctcgtgactggcaatggcaatgtccttcccctggggaaagaagcccataggtcctggagcagaggttttggctggcatttgtgggaccctctgcccctggccgccacttgtcctgggcttgaactgttgtgtggcgccggatgagtaaactgaattgcctgggcatcccgggagcgtgaagacaccaggcacctcagggaacatataccaccccgccccagctggagccaggctcctggtggggctgcagcaaggcggaagaggtgggatgctgttgcctggcggtgctgcagtggtgcacccccacgaggaggtcccaggctgctgtggggccgcaggcgaggggaaaagtgggagcagagtcaggggaaggttgtgaagcacgacaaaagggggaaagagggagggagggggaaggcaaaagcctacagcacccggcattcccagagatcctcccattcaagtactaaccactcaaggcctttggtctctacaattagccagccatgtctatgttctttccttcagggcagtgagttctctcagtccctggctgggtccagaagtgccattcagaagtcagggagtagagtcaaacattttagaagtaaaccagacattctattgcattgcagctgagttggcattgaaatcacaagacacagtccttcctattccttctttccttttccaaaggcacagtagccaccaggactccaggacacaaggagtactgccaggctaccaccaatgttcccttaaggcccaaagcctcttgtcagcttgtgatgaatgctgcctggcctgggacttgcagttttcagggcaatgggctcctcactggccctgggcaggtccatacatgccaaccaagaatcaagtcctagaatcagggattccaaaagcttgcttggtgttctacccacctctggccttgctggtacctaagtggcaagacaaagtccccttta

SEQ ID NO: 22768 - DNA, 1223 bp, Artificial sequence
  DNA replication origin
ggatcgccgcagcaccgccctgctgttgagtggggacgccagagttttccatcccctgctcagactttgagctttccgggaggccccctttcctccgacgctccagtccttccccagtctcctgagctcccaagcctccaccacatcggacccactcaggacgggttgtgctcccaggcgtgagggtcctgggcccatggtcctgggatcccctcctgtcctcctcctggccttggagggattgttttggttcctagctgcccctcctgcaaggccccctcttgccccacccacccagagctgccagggctgcccaggggggaacagccggcctacgcctgcgggccttttctctcacaatgtccctaaagggtagcttgtcccgacaaggacatggcccgtggccaagtgagtggggcggggggcaggggggtgttgctttgccccgccctgccactagaaccggcagcctaatcccaggagagagaggctgactgtcagccagacacaccccaccactaccacgtgcaaaaccaccccacccccacagacacacatgggtgcacgcgtgcgggcacacagacaccacacacacaaagatacagacagcttgaaggagagcaagggaaagagggatggagagagacaaacagcaatagagagagagacagagacagagacagaaagagcacgagatggagggggaagaagagaaatacaggggtgagagagctagagagccagagcaatagagcctgagaaaggccagtgctctgctctggtagacagggctctttcgagcaggctggggtaaggtgcttgagccaggccagaacaggggggcagggcagcccatgcaagagggccaacagaaccctgagacgtattttttcttggattggttggttgctttgggggtgcatttcgtatggtccttcttttgttggctcctccgtgtcttcttggtgtggtgggccccgagatttgtagagtgtatctgtccctctggtaggagccgtggcgtggagcgtgcccatggggcctgaggcctgggtgtctctcgtgtcctcgggactggagtttactcgaagtcggtggcaatgggaatccgggtgcacagggacggatttcctcgtgactggcaatggcaatgtccttcccctggggaaagaagcccataggtcctggagcagaggttttggctggcatttgtgggaccctct

SEQ ID NO: 22769 - DNA, 764 bp, Artificial sequence
  DNA replication origin
ttctcaggctctattgctctggctctctagctctctcacccctgtatttctcttcttccccctccatctcgtgctctttctgtctctgtctctgtctctctctctattgctgtttgtctctctccatccctctttcccttgctctccttcaagctgtctgtatctttgtgtgtgtggtgtctgtgtgcccgcacgcgtgcacccatgtgtgtctgtgggggtggggtggttttgcacgtggtagtggtggggtgtgtctggctgacagtcagcctctctctcctgggattaggctgccggttctagtggcagggcggggcaaagcaacacccccctgccccccgccccactcacttggccacgggccatgtccttgtcgggacaagctaccctttagggacattgtgagagaaaaggcccgcaggcgtaggccggctgttcccccctgggcagccctggcagctctgggtgggtggggcaagagggggccttgcaggaggggcagctaggaaccaaaacaatccctccaaggccaggaggaggacaggaggggatcccaggaccatgggcccaggaccctcacgcctgggagcacaacccgtcctgagtgggtccgatgtggtggaggcttgggagctcaggagactggggaaggactggagcgtcggaggaaagggggcctcccggaaagctcaaagtctgagcaggggatggaaaactctggcgtccccactcaacagcagggcggtgctgcggcgatccag

SEQ ID NO: 22770 - DNA, 1271 bp, Artificial sequence
  DNA replication origin
cccactcacttggccacgggccatgtccttgtcgggacaagctaccctttagggacattgtgagagaaaaggcccgcaggcgtaggccggctgttcccccctgggcagccctggcagctctgggtgggtggggcaagagggggccttgcaggaggggcagctaggaaccaaaacaatccctccaaggccaggaggaggacaggaggggatcccaggaccatgggcccaggaccctcacgcctgggagcacaacccgtcctgagtgggtccgatgtggtggaggcttgggagctcaggagactggggaaggactggagcgtcggaggaaagggggcctcccggaaagctcaaagtctgagcaggggatggaaaactctggcgtccccactcaacagcagggcggtgctgcggcgatccagtgcacgcccttgccgccggcgatggcgggaggctcttggaggccggaaagcgcagcgcagcggcccacagtgctccggcgtggagggggagagcagcccggcagggggcgagtggctgaggggtccctgatccgagccccgcggcctccgagtggggatgaagcctggagtcaggcaggcgtggctgggccaggctcttgtgtcatccaggcatcactgccggtgtctatggccataccaccctgaaggcgcctgatcttctctggtctgtgaaactaagcagggtggggcctggttagtacttggaagggagactgactgggaataccgggtgctgtaggcttttggcttcccgctccctacctctttcccttttttgtcgccctgcttcccaaccaccccctgactctgctaccccttttccacctgcctgcgcccccaccacagctggagacttcctcctggggctccgccactgcagcaccgccaggcagcagcatcctacctcttctacctcactgcagctccaccagatcccccactctagccagagcagggcgggccaggaccagacccagaaggcgcaggcccaggttccctgccatcctggttgccttcctgctccacgaacgcccaggcaattcaattcactcatctggtgccaccacaaacatccaagcctggggaaggggcgggcaggggcagagggtcccacagacaccagccaagacctcctccagaatgcatgggctgcattttccagggaaggacattgccttcaccagctgtgaggaaaacgtccctgtgcacccggattcccattgccatggacttcatgtaaactccaatccc

SEQ ID NO: 22771 - DNA, 853 bp, Artificial sequence
  DNA replication origin
gtgtgtggcgcaagcacacctcaccctttggactcagcttgagcaggtttaagctgtcccactgagcaagcacccagcaggccgccgttctgtgggtcctggtcctcctggcatttgttggggtgcgaaggccaccgaggaacctgagggttggagggcgccgcttctggatgagccagggcagcgtaggcaaaatcccagagtgccaggaccagttgggagattccttctgcctgcgcagcctggctgggctggagcagggcaatggtccttgctgcctggctcacgagagcaccctgtgggggagccccaggagcccaggacatgcggggtgcgggaagtgctgttgtccaagccccggtgggggtgaaggcgaccgacgaggaaggagggtgacacccgcctggggccacgttgcacaggccgccagtgtgcgtgggtgccctgccaccctggcctggatgcctggccctgatgctaaaaccaaatctgattcctggactctgggaggcctgtctctctggccagttcttcctgggtggtgatgcctggaaagcaatctttctcaaagtctcggaggagcagggtggtctgggatcgggtgactgcgatctgctttcacctgccttcttgcgggctgcgtttcctaggccagggccaagattcctgtcggtgctgcctcagctggtgtgatctctcattctgaaaccaaatctggcccctgggctccggaatgccaatggcttgggccagctgttctctggtggcgatgcctgggtacaggttccactaaaagcacgctcacagggcctccctttcactcggggtccaaacgagtctccttcgccgtcct

SEQ ID NO: 22772 - DNA, 1017 bp, Artificial sequence
  DNA replication origin
cacgcccacggggggcaccccaaagcgtcaagaaggcctccgggggaaggaaacatgacgccaggcttgaaaggggacgttgaggctgcaaggggaaaaagcggtgggccggggtactcccacggaccacagtgccttcccggcagcctctgcgccgagactgggggggtgagcagcaccggataaaagcagcgaggctggggtccttccatggaggacagtgccttccagcagcccctgcgctgggcccgggggtgtcgtggagtccctggcttgcacccagggtgcatgtctagcccatgggggacaccccaaagcggcaagaagtcccccagtggaagggaacaggacgccagactccaaaggggacgttgaggcaatcaggggaaaaaattcccacggagaacagtgccttcccagcagcctctgccccggacccaggtgggtcgtggagtccctggcttgcacccagggtgcatgtctcgcccacgggggaggacaggcagagatggagagaggaatggagacacgcagggacggagtgatagacgttgttagggtggtagggagggacagagacaggaagtgagggacagacagggagacggaggaacactgagagagagggagggagcaagggacagagggaggaaagcagagagaaaaagcagtcttctgcctccaggagcaacaggacccccgggctcctggaaaatgttaagcgcccagtgggagttaagggctgggccggcggggcactcactggctctccggatcgccagactgggttacttcatcgcggagcgattcgtatgaattccatcgcccaaggaatgggcgatttcttccaagaccaaagagccaagactcaggtagcagcccgtttttcacccacatgttttacagactacacatccccacactgagtactgcaacggagcacgaggaggatagtcccatccacacaggagtcactcaggacgactgaagcgtgatttcggattccacgtttctttg

SEQ ID NO: 22773 - DNA, 1626 bp, Artificial sequence
  DNA replication origin
ccctgaaggaggtcaaagcggggtgcaggaaggaggcggaattggagagggaacgacgagcatgggcgacacccctacctcggcaaaccccagcacagcaccttggaaagcccgcagatggggacgggcgcctcccgaagacacagcgggcaccagtggtctctcgggagggacacctgctgcgtgcttcggggctccgggtccggtgggcatgagcgggcgaggaaactaggttccgggtataacaggagaaaggaaggaaggtagacgtcaagggctgaattacacaggacacgccacatcaccaggtcccccgcgcacgggtgcagggaaccttgtgtggaggtttgactttcaatagatcgcagcgagggagctgctctgctccatagaaaaccctgacccagaagcaggatgtctacaaatagtttagcatccggttccccaaaaacacgttatgtgatgggtcagggggtgaccgcccttctggcagcagcccatttcctacgatgaggggctctctgcaccggatcctggttcccggcgcatggcgggacatgcccctcctgaggcagagcggcccgccggaggggacggcagaggaccgcctatccaaggccaacaaagccaagcacatacacaaaatgtctgaacctgcggttcctctcgtactgagcaggattaccatggtagcaacacatgggcaacaacacaaggggaacgcaaacagtaaaactaacctgtctgacatggatctaaccataatgcttttagggcatgcgcaccgctgttgggtgaatccattctagtccgccttgcccttcgcaaagaaaagagaactctccagacgcggtggatcacgcctgtaatcccagcactttgggaggctgaggagggaggatcacctgagatcaggagttcaagatcagcttggccaacatggtgaaatcctgtctctacaaaaatacaaaaattagccaggcatgatggcgggtgcctgtaatcccagctacccaggaggctgaggtgggagaatcgcttgaatccgagaggcggaggttgcagccagccgagatcgcgccattgcactccagcctggacaacaagagtgaaagtacctctcaaaaaaaaaaaaaaaagatacaaataattatatgggctctgttgcccaggctggagtgcagtggcttgatatcagctctctgcggcagcctccatctcccgggttcaagtgattctcctgcttctgcccctcgagtacctgggactaaaggcaagcgtgccaccaagcccagctaatttttgtatttttagtagaactggggtttcaccatgttggccaggctggtcttgatctcctgacctcaagggatccacccgccttagcctcccaaagtgctgggattacaggtgtgagccgccacacctgcgctatgtgttttttaaatctctctttctagggtcatgagaattctcattaatttcacttagagctcctggagagaaaagcctctattattgtcattgtaacagtaaaaaaaagagagatttttttcttttgagacagagttttgctcttgttgcctaggctggagtgcaatggcccaatctcagctcactgcaacc

SEQ ID NO: 22774 - DNA, 1415 bp, Artificial sequence
  DNA replication origin
aatgaattgcaacttttttctattattgtacaccttgaaggtgaggttaattaaatcctgttgtggggtttgagggccagaatttaatttttggagttttatttaatgtttggagcagattgggtaataaaatgtatattgaggataagacggccttttgaccttttagggtctaaggctgtaaagcgtctcagggttgctgccgaatgagccatgaactgggctgggttttttgtatttgatgaaaaagagtctaaatgctaactgatttgggagaggtcagataaagaaaaaggagcattaaccttgactatgtctttagctccagccaactttttaagaggaaattgctgggcaggtgggggagggctagtcacggaatgaaactgtaagccagactgagtgtgaggaggggaggtgataaaaggattatagggtggaggagtggaggctgaggaagaattgggacctagctcagcctggtgaggaggggagaggtcagatgggtctgtagaaaaggaagattagaaagactcagcaatgcttggggttgggactcagagggcaggtgggagggaaagaaggaagatttgggatgagttgcattgggcacagagactaggaagggagtgatatgtaaacgaatgcctggatgtcagacacctcagaccgtttgcctattttacgacaagaattatttagatcttgcaggatggaaaaattgaaagtcccattttctggctctttggaactactgtcgagtttgtattggggttaagcagcattgcagaagaaaataaggcatttaggttttaggtcaggtgtgagttgaagaggttttaagtttttgagaacacaggctaagggagaaggaggaatggagggtggaaagttgtccatagtgaaggaagcaagcccagagaaaagagagagtagagacacagagggaggggtttcgggggttcttaccctccagaaaagcgggaaagaggtcggggcacagaaataaggggttggggtgcagagataagaggttggggcacagaaataagggattggggtgcagagataagaggttggggcacggaaataagggattagggtgcagagataagaggtcagggcatgcaaataagggattggaggttcttgcccccctagaaaagcgggacttgatgctaagggtgaaggagaaggggttgaagggttcttgcccctgccccagaaaagcagagaaggggtagagacatggagagaaggggttggggtacttgcccctctcccagaaaagcgggacttgccgctaagggtgaaggaccaaggcagatgtccctgcgtggtctgacacctctgaaacctgggtgaataatcagagaggcatccctgcaatgattaaacaccaagggaaggctgct

SEQ ID NO: 22775 - DNA, 1715 bp, Artificial sequence
  DNA replication origin
cccaacactggcaaaaatgacccccaccatgcatgcatggggcccaggggacactgggcatccctgattcacacccacagagtgcctcagacaagggggcctgtccaaggtggcaggaaggcttgaaatgggaagtcaaggcacctgtgctgtggaaggaatacacaaacagcgaggcagaggtcccccccacgggcagaagtgcctccccactgcgcatgcacagggcccaggggaccctgggcatccctggatcacaccttctgagtgcctggggcccatgggggccagcccaaggcggcaggaagattgaaaaggcagatagatggacctgtgttgtggaaaaaaaaacagaaacggcactacagaggtcccctccacgggcaaaagtgcctccccactgtgcatgcgctgggcgcaggggaccctgggggtccctggttcatgaccatggagcacctcagggccacagggggcagcccaaggcatcaggaattgttgaaaggggaggtcgaagcacatgtgttgtggaaggaaaacacaaacagtggggcagaggtcctccaccacgggcgaaagtgcctccatgcacaggcccaggggaacctgggggtccctggtttgtgcccatggagagcgtgggccccacaggggtcagtcaaaggcggcaggaaaacttgaaagaggaggtcgaggcacctgtgttgtggaagataaacagaagtggcgaggcagaagtcctcccaccacgggtgaaagtgcctccccatgccacatgcatggggcccagggcaccctgagcatccctgggtcatgcccacagagtgcgtggggcccacgggggtcaggaagtcttgaaaggggaggtcgaggcacctgtggtgtgaaaagaaaacagaaatgacatggccgaaaaccccccacaagcgaaagtgcctccccatcgagcatgtgcagggcccaggttaagctgggtgtccctggtttgcacccacagagcgcctcagacccactggggccagccgaagacagcaaggagtcttgaaaggggtggttgaggcacctgtgttggggaacaaaaacacaaatggtagggcggaagtcccccccacgggcgaaagtgcctccccaccgcacatgcgttgggctgaggggaccctgggcattcctgctttgctcacacagagggccttggcccaagggagccagcccaaagaggcaagaaggcttgaaagggacagttgaggcacccgtgttgtgggaaaaaaacagaagcagtgcagcagaggtcccccaccatgggtgaaagtgcatactcaccgcacatgtgtggggcccctggtttgtgaccacaaagtgcctcggcatacgagggccagcccaagtttgcaggaatgcttgaaagtggtggtctaggcacctatggtgtggaaggaaaacacacgtggcgtggcagagatcccccccaccacgcatgaaagtgccatcccaccactcatgcatgggtcctaggggacactggatgtccctgcttcacagccaccaaggatctcggcctacggggaccagcccaagtcaacaggaaggcttgaaaggggagttccaggcacctttggtgtggaaggaaaacacaaacggcgaggcagaggtcctccccccacaggcgaaagtgcctcctcatcgtgcaggcttggggcccaggggaacctgggcat

SEQ ID NO: 22776 - DNA, 1086 bp, Artificial sequence
  DNA replication origin
ggtcagccccaccgcctggccagccgccccgtccgggagggaggtgggggggtcagccctccgcccggccagccgccccgtctgggaggtgaggggcgcctctgcccggccgcccctactgggaagtgaggagcccctcagcccggccagccgcccggtccgggagggagttgggggtgtcagccccccgcccggccagtcgccccgtccgggagggaggtgggggttcagccccccgcccggccagccgccccgtccgggagggaggtggggggggtcagcccccccgcccggccagccgccccgtccgggaggtgaggggcgcctctgcccggccgcccctactgggaagtgaggagcccctctgcccgaccagccgccccgtccgggagggaggtgggggttcagccccccgcccggccagccgccccgtccgggaggtgaggggcgcctctgccaggccacccctactgggaggtgaggagcccctctgcctggccaccaccccgtctgggaggtgtgcccaacagctcattgagaacgggccaggatgacaatggcggctttgtggaatagaaaggcgggaaaggtggggaaaagattgagaaatcggatggttgccgtgtctgtgtagaaagaagtagacatgggagacttttcattttgttctgcactaagaaaaattcctctgccttgggatccttacccccaaccctgtgctctctgaaacatgtgctgtgtccactcagggttaaatggattaagggcggtgcaagatgtgctttgttaaacagatgcttgaaggcagcatgctcgttaagagtcatcaccactccctaatctcaagtaatcagggacacaaacactgcggaaggccgcagggtcctctgcctaggaaaaccagagacctttgttcacttgtttatctgctgaccttccctccactattgtcccatgaccctgccaaatccccctctgtgagaaacagccaagaattatcaataaaaaaataaattaaaaaaaaaaaaaaaaagaacagagtttccaaactgctcaatcaaaagaaatgtttaactctgtgagatg

SEQ ID NO: 22777 - DNA, 1347 bp, Artificial sequence
  DNA replication origin
aactccctcccggaccgggcggctggccgggctgaggggctcctcacttcccagtaggggcggccgggcagaggcgcccctcacctcccagacggggcggctggccgggcggagggctgacccccccacctccctcccggacggggcggctggccaggcggtggggctgaccccccatctccctcccggacggggtggctggccgggtgggggggctgacccccccatctccctcccggacggggcggctggccgggccaatgggctcctcacttcccagtaggggcggccgggcagaggcgcccctcacctcccggacggggcggctggccgggcggggggctgacccccccacctccctcccggacggcacggctggccgggcgggggggctgaccgcccacctccctcccggatggggcggctggccgggcggggggctgaccccccccacctccctcccggacagggtggctgccgggcggagacgctcctcacttcccagatggggtggctgctgggcggagaggctcctcacttctcagatggggcagctgccgggcggaggggctcctcacttctcagacggggtggttgccaggcagagggtctcctcacttctcagacggggcggccgggcagagacgctcctcacctcccagacggggtctcggccgggctgaggcgctcctcacatcccagatggggcggcggggcagaggcgctccccacatctcagacgatgggcggccgggcagagacgctcctcacttcctagatgtgatggcggctgggaagaggcgctcctcacttcctagatgggatggcggccgggcggagacgctcctcactttccagactgggcagccaggcagaggggctcctcacatcccagatgatgggcggccaggcagagacactcctcacttcccagacggggtggcggccgggcagaggctgcaatctcggcactttgggaggccaaggcaggcggctgggaggtgtaggttgtagtgagccaagatcacgccactgcactccagcctgggcaccattgagcactgagtgaacgagactccgtctgcaatcctggcacctcgggaggccgaggttggcggatcactcgcggttaggggctggagaccggcccggccaacacagcgaaaccccgtctccaccaaaaccagtcaggcgtcgcggcgcatgcctgcaatcgcaggcattcggcagactgaggcaggagaatcaggcagggaggttgcagtgagccgagatggcagcagtacagtccagcttcggctccgcatgagagggagaccgtggagacggagagggagagggagaggg

SEQ ID NO: 22778 - DNA, 2800 bp, Artificial sequence
  DNA replication origin
gagggaatttctttgtcttgctcttgctccggctccctgtaactgcataccatagtatctctttcctttttgggtgataatgccccatccataatcaggttactaacaaaatggaggacaggacttcactcctccccaaacgcctacggggaaaggtccccttttactgagcaccatggctacaattttaactgttactacaaaataaaagttgctacattgtcataatgatgggtttttcctattacctgaaaaattattaaccgagtgtctgtagccagggagaaaaacacctttaaagtttagatatgcatcagtatttccctcaagaatagcacaggttaaagctttcataaaaggaaaacaaaaataaggagttgaaaaacatagaagtataaattaacagccacaaaaaggggaagttagagagagactatgaaaacatctttgtcttgtggaaagatacaatctgagaagcaactctgcaggacttggctgaaagtcaacgggaggctgatcatatgaagtggtagaagccgcgtaatttgtcacatcaagcatctgtgacaaacccacatagaatccaaggaatgtaggtgatctgacaaaagccctcacgtttaaaatttgccctaagtttccacaaatccaccaaaaatttccccgcatgggccacgttttcagatacagtttagctatctgttcttgtgacactagttgcatttgaagagttcttgggagcggcgtgcggtgtctcacgtccataatcccagcagtttgggaggccacggcaggtggatcacttgaggtcaggagtccgagaccagcctggccaacatggtgaaaccctgtctctactaaaaatacaaaaattagccgggcgtgcatgtgcctgtaattctagtttctcagcaggctgaggcgggaggactgtttgaacctgcgaggcagaggttgaagtgagctgagagtacaccactgcactccagcctggttgacagagcaagactctgcctcaaaaaaaaaaaaaaaaaaaattatcggggcttgggtgcagtggctcacgcctgtaatcctagcactttgggagtctaaggtggaaggatggcttgaggcagggagtttgagacaagcctgggccacatagtgagacatcatctctgccaaaaaagaaaaaaatccatgttgagacatttttgtgtaaaaaaagaaaaatttacctgggcgtggtagtgtgcacctgtaatcctagctacttgggaggctgagactggaggattgcttgagctccaggagtttgatgctgcagtgagctatgattatgccactgtgttccagcctgggcaatagaaggagaccctgtttcaaaaaaaaaaaaaaaaaaaaaaaaaaaaagctggacacagtggcccatgcctgtgatcccaaaaatttgggaggcccaggcaagtggatcatctgaggtcaggagttcgagaacagcctgaccaacatggtgaaatcctgtctctactaacaatacaaaattagtcaggcgtggtggcacatgcctctaatcccagctacttgggaggccaaggcaggggaatcgcttgaacctgggaggcggaggttgcagtgagctgagatcgggccattgcactccactctgggcaacaagagcgaaactctgtctcaaaagaaaaaaaaagctctactatttttacggttacaatgacaataatagaggcttttctctcgaggagctctaagtgaaattaacgagaattctcatgaccctagaaagagatgtttaaaaagcaaacacataggccgggtgcagtggctcacgcctgtaatcccagcactttcggaggctaaggcaggcagacggcttgaggtcaggatttcaaaaccagcctggtcaacatggtgaaaccctgtttctactaaaaatacaaaagccgggcgcggtggcatgcgcgcctgtagaccaagatactcaagaggcagaggcaggagaatcacttgaacccgggaggtggagtttgccgcagagatcaagacactgcacgccagcctgggcaactcagcctcctgagtggctgggattacaggcacccgccatcgtgcccggctaatttttgtatttttatagagacagggttttaatatgttggccaagctgatcttgaactcctcatctcaggtgatccgccctcctcagcctcctaaattgctgggattacagtcatgaaccaccgcgcctggagagttctcttttctttgggtagggcaaggcaaactggaatggattcaccggagagctgtgcgcatgccctggaaagcattctggttagacccatgtgagacaggttagttttattgtgtgttcctcatgtgttgctgccatggtcatcctgctcagtagaagaggaacaacaggttcagacatttggcctatgtccttggctgaggagccaatggggtaaagctaccatatgtaggattatgactgaacgactctaagtcagaatcccgcccaggagggatatggcagctccacggaccttttgttggcctcggataggcgatcctcgccgtgcgccgggaaccggggtctggtgcagacagcccttcatcctgggaaacgcgctgctgccagaaaggcggtcactccctgacccatcacgtaatgtgtttgtggggaacctgatgctaagctattcgtagacgccctgcttctgggtcagggttttctatggagcagagcagctccctccctgccatctattgaaaatcagatctccacacaagggtc

SEQ ID NO: 22779 - DNA, 1584 bp, Artificial sequence
  DNA replication origin
tgtcatcccaaggacaacagtgtcttgtccggtagcccctgcatcgggcctggggtggttgtggagtccctggcttgcacccggggtgcgtgtcgtgcccacgatgggcaccgcaatgcggtaagaagtccccgagtggaagggaacaggacgccgagcttgaaaggggacgttgaggcagtccggggaaaaaatttccactgagaacagtgccttcccggcagcctctgagtgggacccaggtggacggtggagcccctggcttggacccagggtgcctgtcttgctcacggggtgcacgtgaaagtggcaacagggcccccgggggaaggggacaacatgtcaggcttgaagagggacgttgggccagccagaggaaaacagcggctaggctgtggtcgtcccacagaccacagtgccttcccggcagcccctgagcctggcccaggcgggggggtttggagtccctgtcttgcaacagagtgcgtgtctcgcctaagtgtgcacgcgaaagctgcaagaagggctccgggggaagggaacaggatgccaggcttgaaaggggactttgaggcagtccagggaaaaactttccacggaggacagtgacttcccgacatcccctgcgcctggccctgggggtcttggagtccctggtttacacccagggtgcgtgcctcgcccacgggtggcaccccaaagcagcaagaaagccccggggggggaagaacaggatgccagacttgaaaggggacgttgaggcagcccaggaaaaaaaggggcgaggctggggtcctttcacggatgacagtgccttccctacagcccctatgccagtcccgggagggtcgcggagtccctgtcttgcacacaatgtgcgtgtctcgcccacggggggcaccccaaagtggcaagaagtcccccgcgggaaggcaacaggacgccaggcttgaatggggacgtttaggtagcctggagaaaaaagcagcgaggctggggtgatcccacgaatgacagtgccttaccggcagcccctttgccgggcatgcgggggttgttgattccctggcttgcacccagggtgagtgtcttgcccacggcgggcaccacaaagcagcaagaaggttcccgggggaaagggacagcacgtcagtcttgaagggggaagttgaggcagccccggggaaaaaaagcggggatgctggggtcctctcacggacgacactgccttcccagcagcctctgcagtgggcccgggagcgtcctggagtccctgtcttgcaccccgggtgcgtgtctcacccacggggagcaccacaaagcggcaagaaggccactgggggaagggtacaggacgccagggttgaaggggatagtggagacagtccaaggaaaaaagtggcgggatggtgtcgtcccaaggatggccacccctgcgccgggccagggatggtcgcggagtccctggcttgcacccaggttgtgtgtctcgcccacagggggcaccccaaagcagcacgaaggcctccaggggaagggaagaggacgccaggcttggaaggtgacgttgaggcagcagggggt

SEQ ID NO: 22780 - DNA, 2292 bp, Artificial sequence
  DNA replication origin
cgagtctgccgcaggggctgccgggaaggcactgtcctccctgggaagtttttccacagactgcctcaacaacccctttaaagccaggcatcctgttcccatcgcccagtgcccccgtgggcgagacaagcaccctgggtgcaagtcagagaatcctcgcctgtggcctgggtctctcttgtccttgggacgggagtttacacgaagtcggtggcaatgggaatctgggttcacaaggacgttttcctggtagctggcaaaggcaatgtccttccctggaaaaagcagcccatgggttctggagggggtcttggctggcgtctgtgggaccctctacccctgcctgcaacttccccaggtttggacgtttgcggcggcaccagatgagtgaattgaattacctgggctttcctggagcaggaagacaaccaggatggcagggaacctgtgcctgcgcctttggggtctggtcctggcctgccccgccctgcctagagttggggacctggtggagctgcagcaaggcggaagaggtgggatgctgctgcctggcggtgctgcagcggtggacccccacgaggaggccctggggtgcggtagggaaaaggggtagcagagtcagggggtggttgggaagcagggcgacaaaagggagaaagacggagggagcgggaagccaaaagcctacagcacccggtattcccaggcggtctcccttccaagcactgaaccaggccccaccctgcttagcttcacagaccagaagaaattaggcatcttcagggcactgccatagacacaggcagtgatacctagctgacacaagaacctggctcagccatgcccgcccgactccaggcgtcactgccactccagggccgcagggctcggattgggatacccctgagccactcgcctgctgctgggctgctctcccactccatgccggagcactgtaggctgccgcgctgcgccttccgccggcctccaagagcctcccgccatcacaggcaaggccacgcactggaccaccgcggcgccgccctgctgttgagtggggaagccagaggtttccatcccctgcccagacttcgggttctctgggcagcctccattcctccgacgctccagggcttccccaggctactgagctcccaagcttccaccacatcggacctgttcaggacagtttgtgctcccaggcgtcagggccctgggcccacggtcctgggataccctcctgtcctcctccttgccgcagagggattatttttgttccctcgccgcccctcctgcaaggccccctcttgcctcacccacccagagctgctagggctgctcagggctgaaccgccggcctagccccagggaccctttctctcacaacgtccctaacagcgtcgcttgtcccgacaaggacgtgacccacggccaaatgagttgggggagctgctttgccccgcgctgccactagagctggccgactgatcccgggagagagaggctgatggacagccagacacacctcaccagcaccacgagcaaacccacccctacacccacagacacacatgggtgcacgcgcgtgggcacacagacacacacacacacacacacacagatacacaaagatacagatagacaccttgaaggagagcaagggaaagagggatggagagatagaaactgagggagagagacagcgataaagagagagacagggaggaaagagagagagaaggtgacagagagatggagggggaagaagagaaacagagagagggtgagagagctagagagccagagcgatagagcctgggagaggaagcgctctgctctggtagacagggctcattcaagcaggctggggtagggtggagggtgattgagccaggccagaacagggggtcagggccctgttctgcaagaggaccaacagaactctgagacgtattttttcatagattggttggttgctttgggggtgcgtttcatagggtcctccttttgttggctactccctgtcttcttggtgtggtgggccccgagatttgtagagtgcgtccgtccgtgtggtgggagccatggcatggagcgtgctgacggggcccgaggcctgggtctctctcgtgtcctcgggactggagtttacacgaagtcggtggcaataggaattggggtgcacagggacagatttcctcgtgactggtgacggcagtgtccttcccctggggaaagcagctcataggtcctggagcagtggttttggctgccgtctgtgggaccctctgc

SEQ ID NO: 22781 - DNA, 853 bp, Artificial sequence
  DNA replication origin
ggccgcccattgtctgagatgtggggagcgcctcttccccgccgccccgtctgggaagtgaggagcgcctctgcccagcgcgaccccgtctgggaggtgaggagcgtctctggccggctgccccgtctgagaggagcccctccacccggcagccgccccctttgagaactgaggagcccctccgctcggcagccgccccgtccgggaagtgaggagcatctccgcccagcagccaccccatccgggaggtggggggggtcagcccctgcccggccagccgccccgtccgggagggaggtggggggtcagcccccagccggccagccaccccgtccgggagggaggtggggggcagcccccgcccggccagccgccccgtctgggaggtgggggggtgcctctgcccggccaccccttctgggaagtgaggagcccctctgcccggccgccacccagtctgggaggtgtacccaacagctcattgagaacgggccatgatgacgatggcggttttgtcgaatagaaaagggggaaatgtggggaaaagatagagaaatcagattgttgctgtgtctgtgtagaaagaagtagacataggggactccattttgttctgtactaagaaaaattcttctgccttgggatgctgttgatctatgaccttacccccaacccggtgctctctgaaacatgtgctgtgtccactcagggttaaatggattaagggcggtgcaagatgtgctttgttaaacagatgcttgaaggcagcatgctccttaagactcatcaccactccctaatctcaagtacccaaggacacaaacactgcggaaggccccagggtcctctgcct

SEQ ID NO: 22782 - DNA, 1405 bp, Artificial sequence
  DNA replication origin
ctgttgggtacacctcccagactgggtggcggccgggcagaggggctcctcacttcccagaaggggtggccgggcagaggcacccccccacctcccagacggggcggctggccgggcgggggctgccccccacctccctcccggacggggtggctggccggctgggggctgaccccccacctccctcccggacggggcggctggccgggcaggggctgaccccccccacctcccggatggggtggctgctgggcggagatgctcctcacttcccggacggggcggctgccgagcggaggggctcctcagttctcaaagggggcggctgccgggtggaggggctcctctcagacggggcagccggccagagacgctcctcacctcccagacggggtcgcgctgggcagaggcgctcctcacttcccagacggggcggcggggaagaggcgctccccacatctcagacaatgggcggccgggcagatatgctcctcacttcctagacgggatggtggccgggaagaggcgctcctcacttcccagactgggcagccgggcagaggggctcctcacatcccagacgatgggtggccaggcagagatgctcctcacttcccagacagggtggcggccgggcagaggctgcaatctcggtactttgggagaccaaggcaggcggctgggaggtggaggttgtagcgagccgagatcacgccactgcactccagcctgggcaacattgagcactgagtgaatgagacttcatctgcaatcccggcacctcgggaggccgaggctggcagatcactcccggataggagctggagaccagcccggccaacacagcgaaaccctgtctccaccaaaaaaatacgaaaaccaatcaggcgtggcggcgcgcgcctgcaatcgcaggcactcggaaggttgaggcaggagaatcgggcagggaggttgcagtgagcagagatggcagcagtacagtccagcttcggctgggcatcagagggagaccattgaaagagggagagagagagggagaccgtggggagagggagagggagagggagttgtgtctatttaacacattttcttatcctaaaccaagtattagaagctttgtatttccctcacactgtcctgttagccattttcccctgtctaccacctccctaatgctaagctttattagtcattttaaaatagaaccaaatctttttaaatacctgtgatgtgtgctcataactagcctgggtgtctgtataatcttccttttattctcataataatagaaagcagttaaattactggctgatcaccttgaacttgttggggcttgggtttcttttttaggctaggtctgtaggaagctcagagtatttaccaaacacatctaacttggcag

SEQ ID NO: 22783 - DNA, 1146 bp, Artificial sequence
  DNA replication origin
cggtggagaaggggcgggcgcccgcgagccgtgaatcacctcctcctcttgctgcctcagcgccgccgccacctttccattcagtcgcccaacatggctggagcgcggcggaggtgagccggccgcccgcccgcagacgccccagcctactgcgcccgagtcccgcggccccagtggcgcctcagctctgcggtgccgaggcccaacggctcgatcgctgcccgccgccagcatgttgggcgccccggacgagagctccgtgcgggtggctgtcaggtgaggacagtctgccggcggcgggcggcgggcggcgggttgagggcgcggcaaggacctggctgtggcgcggagcaccggctaccggggtggagcgacctgaggggcgtcccggccgggttctgcggctgaggaaactgaggcagtgagtccccgctggcctggcacgcgcggccgggtgctggcagggcgactgcgccgccctcacgccgtctgtgtttgcaggtggctggcggctgcgcggcgccgggtccctggggggcgtcttgacttctctgggggaaaagccctcgtcactcccctccgtcccctcgcgggatcagtcacctcaggtctggccgccttgggctatcgcctgtccgggaggagctgcctgtgcgcggggctgtggtgttcttttttattagttctagaatgtctgtcatacgtgtccatgcagctccggccttcccaggcaggagacaaagcatctgactatcagcgccggcgaccgcagggcccgccgcgcgcccactcgggttctgatgtctgtgcaaatgagacatctttttcagcatcacggggatctagacatgcccccgcgtgtgggtagaggagacagatctagcctcttgggtgttggaatgggagtggaatttaaggtaaaatccactggggagaggtctacagaaggaggaaaactctttagccagaggaagggtgaaatgggtgactgtgtgaaacatactgacattaggcagggtggatacaatgtaatcgtaacgttacccaggccagggtgtgagtctggaaatactaggtacatcctagtattgaaattatatttcggccaatgacaggcacgagtattcgatgtaatttcggctgttt

SEQ ID NO: 22784 - DNA, 1221 bp, Artificial sequence
  DNA replication origin
cggagcctgagcagcctgatgggcgagcggcgcaggaagcagccggagccggacgcggcgagcgcggccggggagtgcagcctcctggctgccgccgaatcgagcaccagcctgcagagcgcgggcgcgggcggcggcggcgtcggggacctggagcgcgcggcgcggcggcagttccagcaggacgagacccccgccttcgtgtacgtggtggccgtcttctccgcgctgggcggcttcctgtttggctatgacaccggggtggtgtcaggggccatgctgctgctcaagcggcagctcagtctggacgcgctgtggcaggagctgctggtgtccagcacggtgggggcggctgccgtctcggcgctggccggaggcgccctcaacggcgtcttcggccgccgcgctgccatcctcctggccagtgccctcttcaccgccggctccgcggtgctggctgcggccaacaacaaggagacactgctcgccggccgcctggtcgtgggactcggcatcggtgagttcgggctccgtgaagggcgcccgggatcccattgtcaccgcccttgaccctgggtgttgcgtgcctcttgcccatcggggtccccgtctggtctcccagggtcagagaatcctccacttctctggcctccagagcccatctgtttgttggtccagcctccaaggctctcccgggaggtgggagggtcgggggggagggggtgtcactctagtctccctcgagcgcacgtggaatctttgataggccacggaccagtcagtccaagtggttgttgcctctcagcacttccagaaacctagctgagcaccagctctttccttgatccagcctaacctgatgctgcttcttgagcttacgagggtctctgctttcctgcactgtcccaccttgcctctccactgctagcccctttcgttttctggggctcccagcctggaacctagaccatcgtcaagttacagtgagataatatttagagttaagtaattctggactctgaaaggtttattagcgacccctgccctctttgcttatctagcatttgtctttagatggcatctccttttgcttttatgctttttctattgcctttcagctttcattcttttcccaagtaaattccattctcctctgtttttccaactttttcatttgaatccttttttatccattctcctctttgtttttcctctcctgct

SEQ ID NO: 22785 - DNA, 1147 bp, Artificial sequence
  DNA replication origin
cagccaggaggctgcactccccggccgcgctcgccgcgtccggctccggctgcttcctgcgccgctcgcccatcaggctgctcaggctccgcagcgtgtactccacattctcgcttgccttgcgggacatagggcaggggcccggggctgcccggggggacgcggctccgcgggccggcagtctcggcgagctagacagcccgagccggcgggagcaaccgccgctgccgccgctttcttcctcccggcttccgctccggctgccacggcagcagccgccgccacggccgctccggggagaaagttgctgcccgccgcgctccgacgctgcggagttggagcccggcgggtctcactccacactcacgccccgcgcctgccgagctggcgctgcggagcgggcgggaggcgggaccgcgggtcacgtgcaaccccgggccggcggggcggggcccgggaaacgtcccgccccctccttgggcggggccaggctcagcccgccccggacccctaaaccccgccctcccggtgggtgcgacctctgacctaggctccctcatttagggctctggcaaccgtatggaattaaccctgccttccgagctgcagcggtggagcaagccaatgtggcgatgccatcaggcaacaggcttccagacgggaagccacccagaatgtttgccgtgtttggagaggagggagagagcacctaaaccagcctcactgtccttccagcagcctagagagagggctggaaaaaatatcctagaataggacctagcaagtacccttccttttatagtattgtgacattacccagcgtggtctacttccctggcattaaatgtgtttgttctggagcaattcagggctgcatgctcccatttctatagctagtttccactctcatcgccagtccctcctcaatttatgcttattttaaaggaatggtacatttgattctttgaggacagagaacatatctctgtggtgaatcccaaaccctccttccatggatccccgacctgtaaaagaaaattcacatatatgcattccactcatgtaacgggtaattcccagaaatagaaagaaaactcaagaccctgatttgtgattcggcaggcagtctccatttccccgccccaac

SEQ ID NO: 22786 - DNA, 921 bp, Artificial sequence
  DNA replication origin
tgcccggccgcccattgtctgagatgtggggagcgcctctgccctgccgccccgtctgggatgtgaggagagcctatgcccggccgcaaccctgtctgggaggtgaggagcatctctgcctggccgccctgtctgagaagtgaggagtccctctgcccggcagccgccccgtctgagaagtgaggagcccctttgcctggcagctgccccgtctgagaagtgaggagcccctccgcccagcagccgccccgtcggagaagtgaggagcccctccgcccagcagccgccccgtctgggaagtgaggagcgtctccgctgggcagccaccccatccgggaggtggggggcagcccccgcccggccgccgccccgtctgggaggtggggggcgcctctgcccggccgccccttctgggaagtgaggagcccctctgcccggctgccaccccgtctgggaggtgtacccagcagctcattgagaacaggccatgatgacgttggcggttttgtcgagtagaaaagggggaaatgtggggaaaagatacagaaatcagattgttgctgtgtctgtgtagaaagaagtagacataggagactccattttgttctgtactaagaaaaattcttctgccttgggatgctgttgatctatgaccttgcccccaacccggtgctctctgaaacatgtgctgtgtccactcagggttaaatggattaagggcggtgcaagatgtgctttgttaaacagatgcttgaaggcagcatgctcgttaagagtcatcactactccctaatctcaagtacccagggacacaaacactacggaaggccgcagggtcctctgcctaggaaaaccagagacctttgttcacttgtttatctgctgaccttccctccattattgtcctatgaccctgccaaa

SEQ ID NO: 22787 - DNA, 1309 bp, Artificial sequence
  DNA replication origin
tcagagagcaccgggttgggggcaaggtcatagatcaacagcatcccaaggcagaagaatttttcttagtacagaacaaaatggagtctcctatgtctacttctttctacacagacacagcaacaatctgatttctgtatcttttccccacatttcccccttttctactcgacaaaaccgccaacgtcatcatggcctgttctcaatgagctgctgggtacacctcccagacggggtggcagccgggcagaggggctcctcacttcccagaaggggcggccgggcagaggcgccccccacctcccagacggggcggcggccgggcgggggctgccccccacctcccggatggggtggctgcccagcggagacgctcctcacttcccagacggggcggctgctgggcggaggggctcctcacttctccgacggggcggctgctgggcggaggggctcctcacttctcagacggggcagctgccaggcaaaggggctcctcacttctcagacggggcggctgccgggcagagggactcctcacttctcagacagggcggccaggcagagatgctcctcacctcccagacagggttgcggccgggcataggctctcctcacatcccagacggggcggcagggcagaggcgctccccacatctcagacaatgggcggccgggcagagccgctcatcacttcctagacgggatggcggccgggaagaggcgctcctcatttcccagactgggcagccgggcagagggggctcctcacatcccagacgatgggcggccaggcagagacgctcctcacttcccagacggggtggcggccgggcagaggctgcaatctcggcactttgggaggccaaggcaggcggctgggaggtggaggttgtaggtagccaagatcacgccactgcactccagcctgggcaactttgagcactgagtgaacgagactccgtctgcaatcccggcacctcgggaggccgaggctggcagatcactcgcggttaggagctggagaccagcccggccaacacagcgaaaccccgtctccaccaaaaaaatatgaaaaccagtcaggcgtggcggcgcacgcctgcaatggcaggcactctgcaggctgaggcaggagaatcaggcagggaggttgcagtgagccgagatggcagcagtacagcccagcttcggctcggcatcagagggagacggtggaaagagagggagagggagaccatggggagagggagacggagagggagagggagaggaacaatcttcttatatggtttgaaggaatgagaat

SEQ ID NO: 22788 - DNA, 1277 bp, Artificial sequence
  DNA replication origin
gccccggccagccctgggtgtcggaccgcagcccccccgcgcgggcacctcaccaccgcccagccccgaagcgcagcccccgcggctgcggagccggcgggcagggccgaagtcgcagtgctcgacgtgcgcctccagctcgtgcagcctgaccgagtggccgcagccgcgggcgcggtagtcgcactggactcgcagcttctggatgaggctgcgcagcggcagcacccggtacagctcgccgggcgccaagggctggcactgcagcgggcaccggcgcctccgcaccgcccagggcaacaggcagctggcgcagaagacgtgcccgcacggcgtgcacaggggctcttcaagcacctggccgcacagtttgcactccagagccgggtccacggcttctgcgaagcgctccagggcaaagcccatgttagggatggggaagaaagggggagcgaaagcagagtccgtcttctccgagcccccctgccttccccgggccacccccggggcagccgtctcgcggcggcggcagtggagggaggtggcgggtgggaggtgtgatctcactgtttgtttggcttgaagttttcaggctcctgctaggtcccctgatttcgcccgtattgacgctaatagaagtaacctccagagacccccgcctccttcgttgccctgcgatttatgttctttcaaattttggccgcccagcttacaatggtccttgggaacactgtgttctccttcgcctgaacagtgaacttcaagcatcgaggcgcctcgccctgggcagggctgctgatgggtaaagcgctaatgttgagaaacaacttttaaattcaccacaatgtaagcttcgggagagcagaatctttttgtctgtctggttttccgctgaatgcccatggcccgcccggcgtcgagtctatctccaatatgtttgaaatcgaagcacttttgttctttcacatcaaaactacaaaatcagaagttaggaaactgtgaccttaggaaatcactataaggaaaataacactaggaaatccacagggccaggcttctcaaaccgtgatccagaaatcaggtgagttagaatggcgcgatccttgacctagcagcaaagatggggaaaaagtcaagggcccgcctcaggacactgccttcttagggagcccatgaacagccatgcaaggcctcctcccgagtgaggaagctgggattctgagtctgactccaggttcagttgccacagcatccatcttctacttccacgggcgttt

SEQ ID NO: 22789 - DNA, 933 bp, Artificial sequence
  DNA replication origin
cccgctgcagtgccagcccttggcgcccggcgagctgtaccgggtgctgccgctgcgcagcctcatccagaagctgcgagtccagtgcgactaccgcgcccgcggctgcggccactcggtcaggctgcacgagctggaggcgcacgtcgagcactgcgacttcggccctgcccgccggctccgcagccgcgggggctgcgcttcggggctgggcggtggtgaggtgcccgcgcgggggggctgcggtccgacacccagggctggccggggcgggggcgcgcgcggggggccgccgggcggccgctggggccgcgggcggggacccgggcctcgggtcctcgcctggaggcggcgcgagaaggcgctgctggcgcagctctgggcgctgcagggcgaggtgcagctcacggcgcgcaggtaccaggagaagttcacccaatacatggctcacgtccgcaacttcgtcggcgacctcggtggcggccaccgcagggtaagcaaaggggggtgggcaccgcgggcatggtcgattggggtgggaaaaggagcggttctttctgacgcttcaggattcctttggaattgggcatccttcctcactatgcagcaggaaacatccacaccctgatcatactttcctgtcattatcttacgaatggattggcgtcgaagttaaggattgtcccttttctgattatattacgattggaaagagttaaacagattcgattctaactttcccccgggaaagtaggaattgtgaaaactcattttccatccagactctcgttttccatctttcaccctcctgcccaccgtctctgcctattttttgagcacttgtcccgtgcctgaagcaaatccgagaaggaaagacagaaagcgaagactttcccggcccagcctttcctctcccgcggccaccagcatccc

SEQ ID NO: 22790 - DNA, 1832 bp, Artificial sequence
  DNA replication origin
ccgttccttcttccagggacacggcgagctggctgaaagcgtaaaggagcgagcagaagccgcaggccacacacagcaccacgacgcgcaggtagcgccgcatcgccccggccgcgctcctccttcgccgccgccgccgcgcccgccccgacgaactggagcggagggaggggcaccgcgcagccgcgggcgcaacaagttcctcacccgcagccgccgccgccgccttgcgcccgctcccttccttccctccccgcccaccacctaggcgagcgcagtcgcggctccggagccgaaggactacccgcccggaagcctggacaccgcctctgccgccgcgcgctcaagggtcagcggcagcgacgcaaccccgcccctcccccgggcgggagggctggacgcgccggcgcagttcgcgtgggagggacgcagggctggcgcgcagagggtggtgtgagtgcgcggaacgcggcgcgcctgagggctatagctagcgcaggccgacgcgcaggtgaatgggagccctgtgggtctcgaccgccgagagagggggagcgaaagcctcagggctctggaggcagttgacctaaattctaattatggtccttccacatggtagtttgtgacattgggcaacctaaattctctgagcatgtttcttcgtccctaaaatggagctactatcctcatcatggggtggttgtaaagattaaactgtttaacgctcgaaaaccgcctaacacttagaagacacttgactaggccagtttcctctccatcctcccccagcctctaagtttctgtgatactataatgtgcacgagccattttcaccccgataagctcattgcttcgtgtgtttggtatgcggaccttacctcttgcctcccagcagacagtgagttcctgtaaggcagggctcttccctttgacctttttgacctccctcacaactcattattttcatgtgcaaaacaattagtattctctccacagagcttctttcttccccagttcttctccctcttcttctgtgtttccactacgttcattcattgaccatttataaagcatcacttgtgccaagctctgtgtgagtacctaggggtataaagaggcctaagtggagcgtgggtgggacagcggatacttgtaaataagcgcaacgcagtgataacagacttaagatccaggcctgtaagggtgtgggcatacacacaaaggaacaatcagttctatctgtgagtatggtcaagagagacttcatagcaaaggtggcgctagagtcttgagtcgggtaagggaagtaattccaggctgaaggatcaataaacaggctcttgtgtagggaactgttgagaagtttgataccaccagctaagtgaatgcaagagagggtatgatgagcgataagcgcgtagaaggggccagatatttgagtgctttgtttagcacaccaaggagtttgaatttaatctgcaagacattagtgaaccattgaagggtttttaaatagggaagtaacatgatcacaattgcattttagagagcagattctggctgtagtgtggaggctgaaacagagagaggagagattggaggcagaaagcagcaccagtgccaaaaagtgagggaagggatacttaaaaatacacacacacacgaacacacattcatggggaaaaatcatgcgtttaactgctgaaattgcatctggggcgttgaaaagtttggccatgagatacaaggtggggaaatgctgcgcaaaatagtagcagtctccatttggatccttggctccctataccaaaaaagtagtggttctgtgacca

SEQ ID NO: 22791 - DNA, 1059 bp, Artificial sequence
  DNA replication origin
gacggggcggctggccgggcggggggccgacccccccacctccctcccggacggggcggctggccgggcggggggccgaccccccccacctccctcccggacggggcggctggccgggcagaggggctcctcacttcccagtaggggcggctgggcagaggcgcccctcacctcccagacggggcggctggccgggcggagggctgaccccccacctccctcctggacggggcggctggccaggcggggggctgacccccccacctccctcccggacagggtggctggctgggctgaggggctcctcacttcccagtaggggcggccgggcagaggcgcccctcacctcccggacggggcggctggcggggcggggggctgacccccccacctccctcccggacggcacggctggccaggcggggggctgacccccccacctccctcccggacagcacgctggccaggcggggggctgacccccccacctccctcccggacggggtggctgccgggcggagacgctcctcacttcccagatggggtggctgccgggcggagaggctcctcacttctcagacggggcagctgctgggcggaggggctcctaacttctcagacggggtggttgccaggcagagggtctcctcacttctcagacagggcggccgggcagagacgctcctcacctcccagacggggtctcggcagggcagaggcgctcctcacatcccagatggggcggcggggcagaggcgctccccacatctcagacgatgggcggccgggcagagacgctcctcacttcctagatgtgatggcggctgggaagaggcgctcctcacttcctagatgggatggcggccgggcggagacgctcctcactttccagactgggcagccaggcagaggggctcctcacgtcgcagacgatgggcggccaggcagagacactcctcacttcccagacggggtggcggccgggcagaggctgcaatctcggcactttgggaggccaaggcaggcggctgctccttgccctcgggccccgtggggccc

SEQ ID NO: 22792 - DNA, 960 bp, Artificial sequence
  DNA replication origin
gtccgggagggaggtgggggggtcagccccccgcctggccagccgccccgtccgggagggaggtggggggggggggtcagcccccccgcctggccagccgccccgtccgggaggtgaggggtgcctctgcccggccgcccctactgggaagtgaggagcccctctgcccggccagccgccccgtcagggagggaggtgggggtgtcagccccccgcccggccagccgccccgtccgggagggaggtggggggggggtcagcccccctgcccggccagccgccccgtccgggaggtgaggggcgcctctgcccggccgcccctactgggaagtgaggagcccctctgcccggccagccgccccgtccgggagggaggttggggggtcagccccccgcccggccagccgccccgtccgggaggtgaggggcgcctctgcccggccacccctactgggaagtgaggagcccctctgcccggccaccaccccgtctgggaggtgtgcccaacagctcattgagaacgggccatgatgacaatggcggctttgtggaatagaaaggcgggaaaggtggggaaaagattgagaaatcggatggttgccgtgtctgtgtagaaagaagtagacatgggagacttttcattttgttctgcactaagaaaaattcctctgccttgggatcctgttgatctgtgaccttacccccaaccctgtgctctctgaaacatgtgctgtgtccactcagggttaaatggattaagggcggtgcaagatgtgctttgttaaacagatgcttgaaggcagcatgctcgttaagagtcatcaccaatccctaatctcaagtaatcagggacacaaacactgcggaaggccgcagggtcctctgcctaggaaaaccagagacctttgttcacttgtttatctgctgaccttccctccactattgtcccatgaccctgcc

SEQ ID NO: 22793 - DNA, 1259 bp, Artificial sequence
  DNA replication origin
gaagtgagaagcgtctctgcccggccgcccatcgtctgggatgtgaggagcccctctgcctggccgcccagtctgggaagtgaggagcgcctcttcctggcggtcagcccgtctaggaagtgaggagcgtctctgcccggccgcccatcgtctgggatgtggggagcacctctgcccggccaccaccccgtctgggaggtgaggagcgcctctgcccggcgaccaccccgtctgggaggtgaggggcgcctcccccagccgcccggtctgggaggtgaggggcgcccccgcccggcagccgccccgtctgggaggtggggggcgcccccgcccggcagccgccccgtctgggaggtggggggcgcccccgcccggcagccgccctgtctgggaggtggggggcgcctctgcccggccaccccctctggggggtgggagggccccctctgccccgccaccacgtctgggaagtgaggagcccctctgccgggccaccaccccgtctgggaggtgtacccaacagctcactgaggacgggccatgatgacgatggcggttttgtcaaatagaaaagggggaaatgtggggaaaagaaagagagatcagattgtgactgtgtctgtgtagaaagaagtagacgtaggagactccattttgttctgtactaagaaaaattcttctgccttgggatgctgttaatctataaccttacccccaaccccgtgctctctgaaacatgtgctgtgtcaactcagggttaaatggattaagggcggtgcaagatgtgctttgttaaacagatgcctgaaggcagcatgctcgttaagagtcatcaccactccctaatctcaagtacccagggacacaaacactgcggaaggccgcagggtcctctgcctaggaaaaccagagacctttgttcacatgtttatctgctgaccttctctccactattgtcctatgaccctgccaaatccccctctccgagaaacacccaagaatgatcaataaatactaaaaaaatttaaaaaacaaaacaaaacttacaaaatataaagcccaaccttcagagctgtttatctatcatccctgagcctgtaaaatgaaattaatactaacacctacctcatggcactgtgaggactaaatgagaaatggaatgcaaagtgtttagtaccgtgttcaggcacacactaagtgctcaaaaaatgtttgctatattcattactactgtgcaaatctacggaaaaaaatactaa

SEQ ID NO: 22794 - DNA, 1169 bp, Artificial sequence
  DNA replication origin
gtcacaatctgatctctctttcttttccccacatttcccccttttctatttgacaaaaccgccatcgtcatcatggcccgtcctcagtgagctgttgggtacacctcccagacggggtggtggcccggcagaggggctcctcacttcccagacgtggtggcggggcagagggggccctcccaccccccagagggggtggccgggcagaggcgccccccacctcccagacagggcggctgccgggcgggggcgccccccacctcccagacggggcggctgccgggcgggggcgccccccacctcccagacggggcggctgccgggcgggggcgcccctcacctcccagaccgggcggctgggggaggcgcccctcacctcccagacggggtggtcgccgggcagaggcgctcctcacctcccagacggggtggtggccgggcagaggtgctccccacatcccagacgatgggcggccgggcagagacgctcctcacttcctagacgggctgaccgccaggaagaggcgctcctcacttcccagactgggcggccaggcagaggggctcctcacatcccagacgatgggcggccgggcagagacgcttctcacttcctagatgggatggcagccaggaagaggcgctcctcacttcccagagtgggcgactgggcagaggggctcctcacatcccagaagatgggcggccaggcagagacgctcctcacttcctagacggggtggtggccgggcagaggctgcaatctcagcactttgggaggccaaggcaggcggctgggaggtggaggttgtagcgagcggagatcacgccactgcactccagcctgggcaacattgagcattgagtgagcgagactctgtctgcgatcccggcacctcgggaggctgaggcgggcagatcactcgaggtcaggagctggagaccagcccggccaacacggcgaaaccccatctccaccaaaaaatacaaaaaccagtcaggcatggcggcgcgcgcctgcaatcccaggcactcggcaggctgaggcaggagaatcaggcagggagaggttgcagtgagccgagatcgcggcagtacagtccagcctcggcaacagagggagaccctggaaagcaggagacggagaggagggagagggggagaccatg

SEQ ID NO: 22795 - DNA, 1277 bp, Artificial sequence
  DNA replication origin
gccgcaggtgggagccgctgtctgggtcccagggctggatggcagccggcggcggggactgaacgcgggagggctgcagggtgcgcgccggcgaggggcttctcgttggaagctgagggacagacgtggggacccgtggctgctcggccccaccgtccagccgcagggcgagtgctgctccgtggaggtgacacggcgccaagagcggcgcgaggctttctgctggaggagggtaacggggaattcgaaggcgactgttctatgctggaggacaaggggcactgttctctcggggcttcgcgtcggcgccgaggaggggttcgctcgctgcctctgcgtcctgagctcggcctctggctcctggggccggggacgcagagaggggctggagccggtcgacccacggcccagggcgccccctcgcggcctaagcagcggccgccgcctggagcgcagagtttgcggggcccagggggcgccgacgcccgctctgaggcgtctctgctgctgcggcggcggggatggggacgacccaggggaccccctgcagccatcactggcagccccatcaagaattggccggctgagttttcccaaagtacggtgacatcctttccttctcgcttcctccagccccatttttaaaagctcggcctttcccgttagtctgtgtccttataagccaggctatgtgtggaatttgtttttacaactcgagtcttgtgacttctcaaacactttcttgaagtgttttctctggaaacttgtttcaaatgggtgctgtaagtttcacaaagaggagtgttgttcaggagccaacaggtgacggggcgaaacctgagtctgtgtgtacattggagtcaagtctggctgccgtttcctcgggccactgttgaaaatagaaatccaaaaaatcaatagaagactgaggagaacacgattttgagaaaatatctgcatcccccattatggaaaataatgggctcattagagcaccgccttgtgtggtgcccctcattccatggcatgcattttggattttgtctttacatactcgtgtgcggataatctgaccctagaagcgccgcgctggcggaggaccaggctttgtcgtcatgtttcctccttttgtttcttactgtcatggaatgtacttgtgcatgaaattagaatgctttgaaagagttccacatttcctcttggaaaaatggatagtttcttgaccattgggtgatgtgtgatagcccactcagctgttgggaaatgtacaagctgga

SEQ ID NO: 22796 - DNA, 1404 bp, Artificial sequence
  DNA replication origin
cgctttcagggccgagccggggtacgcgtgggcgcgcgcccagcggcctcgatcccgcggcggcgtccgcgctccgcgttttcgctcgcgccgggccccgcggccgagggcggggtgcgcggcggcgccgcagcgcgcggctccggagcccgagcgcactccgcctgcagcccagctgccagcgccgtctcccgcggccgccgccgcccgacagcgcgcccggaacatgccagcctcgcgcagcctgcgctgacttccccgagacgcgccgcggtcggcacggagactttctgggctctggatggttcgtgcgctgctcaccctcgcccacccctgacgccgcggaccgcagctcctcagccccgcagccccgcagcccagcagccccgcagcggcgccgaggacagtgcagccgagttgcgtctccctcgcgcgaggtgagtggcagcctggatcccggcggattccgcagagggggctgcggcgcggtggtggggggcgagcgccgcaggggtagggccgggcaccttcgctggcaccgccggagtctgtgacacccagactgggtcggtgtcgcagaagatcagggagaaggtcataatcggtttgttgggctgtgtagacagggaaagcagatattggctgcagcatcgccagggctccgcagaggctctccgcatggctcctgtttgctgcatcacaaccaactcttcccttggttttctccggcgtggaaacaggttctgtagcccgagggtcgaggcgatgcggggcgccgggaggcgagggtgcgttggcgtgttcccgccgcttaggatcgcctgtcacctactggcgtccggagggagggtaccgattctctcctctagcgctggggaaaggggctggtggctttttggcagaggcgaatcaactcccaccactctccccaaccccctgccccgcgatggtgtttgctgaatgtagcacagatatagggaaaaaatgggagcgtcttcctctcttgaggtagaaaaagttgaagaaactaggcatgttaatagttattaggagcgggactcaggatgcagcagaaagctgttaaattttcattaccctctaagaaaaacaaacggcatcgccagtgactattggcagtgctgtgttattcttgggactttgggaaaattgttcacagattgtcttcaggaggctgaagaacgaggttgggggttgggagagagggaggacggctgcatcacgcttagttccagcttgcctaaggagggttcaggatcacaagccgaacgcgtttggttgctgatttttaaaagggtatcagcggcagaactgagaccatgaacaaggcaaacacaccacgggaaccagcctaaaggaaaaaaaaaaagcaccaacaactacaac

SEQ ID NO: 22797 - DNA, 1360 bp, Artificial sequence
  DNA replication origin
gcgagggagacgcaactcggctgcactgtcctcggcgccgctgcggggctgctgggctgcggggctgcggggctgaggagctgcggtccgcggcgtcaggggtgggcgagggtgagcagcgcacgaaccatccagagcccagaaagtctccgtgccgaccgcggcgcgtctcggggaagtcagcgcaggctgcgcgaggctggcatgttccgggcgcgctgtcgggcggcggcggccgcgggagacggcgctggcagctgggctgcaggcggagtgcgctcgggctccggagccgcgcgctgcggcgccgccgcgcaccccgccctcggccgcggggcccggcgcgagcgaaaacgcggagcgcggacgccgccgcgggatcgaggccgctgggcgcgcgcccacgcgtaccccggctcggccctgaaagcgaggtcgggcccggctcgggccgcgcccgggggcagggctgcgagcaggcctgggaccggctccacgcgcagccagtggggcagagcagcaggcggattatgcgcagggagaaaaaagttcaccaaccgcggtccagagtcgcaagtgcggctcgctcggagcctctgccccgcccccgattataagcctttttttttttttttttttaaccaacaatcccgatggactgaaacacaggaagagtgaagggacggggtggggggtgggggagagacaaacccaatttcctctgatcaaacgatttgggtaggggtgcctatttgagttccttctccttcggggggtgtgtgaagggggcagttaattaaacacttagattccttccggcgcgccttgccgagctggggacccgtttggactcgatcctgtctcgtgtaatcccacaggctggtctgagtctctgccccggaaccggaggagtgatctttcagagcaagaagccaaagttcagcctctagtccgttcccttccccgcctcgacggccctggtcgtctccatgaaaactcagtgtgggggatcgtgcccgcgaaaacctcagcccaccgcaatgtccagagcctgacccaagtgaacgtggcgcacttaaaagcgggttcaaagcattgatccgaacacggtgacaatttttcactggccaaactactctccacattttcagtctgctcaattcccagagctgggctctcaggcgcactcacccacgttgaactggggctcagcctgtttgaaagttctgccctgacatttgtgtcacactaaaccttagaaccccccaccctctccagttccggatcggtggagtctcaccgtgtgggtactatttccctggactgcagagggcagacacaggcggcagctgttaacccg

SEQ ID NO: 22798 - DNA, 976 bp, Artificial sequence
  DNA replication origin
cagccggcccagggcccgcgctgctgttccctaggctgctgaggcgcggagagcggcgggcgagagggaggagagggatcggagcgcgagggaagccggcttggctgccggcggctctggtgggcctccccgatcggggtccccagggtggaaccatgtgggtggccaagtggctgactgggctgctctaccatctctcgctcttcatcaccaggtcttgggaagttgacttccaccccaggcaaggtaaagtcaccgcgagacgccttcagcggctaagtgggggcgcggggcccgagtgggacatgcaggtcgcggggacgagcggctcagcccgttggggaacgctggccctgctggagctcccgggactcccggaccagtcagccggagaggtcgcgactgcgccgggtttcgaggaatcgcgcgcgcctaagacgcatcgcactcccaggaccacacggcgggggcgcaaggggcagggggtcgcttgcacccggagggaacgagttgggggctgcggggaggttaggaggtactggggaaggaagtgggttgcttagggccattagtggtagggtctttgcttggggagggtagggcaagttgggggtgtgggaaagcagagcactaaccgtcccagtgcacgtgtgtgtgtgtgcgtgcgcatcagcatgtgtgcatttgtcttgcccctggctgtactgggacctgggacctttagcggggacgtttggtggaagaagtttagagttggacaatgaggaacgcgtgggagctcactggtcctgtcgctgttgttgcagaagccctggtgaggacactgacctcctacgaagtagtgatccccgagcgggtcaatgagtttggagaagtgttccctcagagccaccacttcagccggcagaaacgcagctccgaggcgctggaacccatgccgttccgaacccactatcgcttcactgcctacgggcag

SEQ ID NO: 22799 - DNA, 1311 bp, Artificial sequence
  DNA replication origin
gctgacccccccacttccctcccggacggagcggctggccggacagaggggcgcctcacttcctagtaggggcggccgggcagaggagcccctcacctcccggacggggcggctggccgggcggggggttgagccccgcacctccctcccggacagggcggctggccgggcggtgggctgacccccccacctccctcccggatggggcggctggctggggggggggctgacccacctccctcccggacgggtggctggcccggcagagggggtcctcacttcccagtaggggcggctgggcagaggcgcccctcacctcccagactgggcggctggccgggcggggggctgaccccccacctccctcccggacggggtggctggccgggcgggggctgaccccccccacctccctcccggacggggggctgacccccccacctccctcccggacggggcggctgccgggcggagacgcttctcacttcctagacggggtggctgccgggcagaggggctcctcacttctcagacagggcggctgccgggcggaggggctcctcacttctcagacggggcggttgctgggcggagggtctcctcacttctcagacggggcggctgggcagagacgctcctcacctcccagatggggtcgcggccgggcagaggcgctcctcacatcccagacggggcggcggggcagaggcgctccccacatctcagacaatgggcggctgggcagagacgctcctcacttcccagatgggatggctgctgggaagaggcgctcctcacttcctagatgggatggcggctgggcagagacgctcctcactttccagactgggcagccaggcagaggggctcctcacgtcccagacgatgggcggccaggcagagacgctcctcacttcccagacgggatggcggccgggcagaggctgcaatctcgacactttgggaggccaaggcaggcggctgggagatggaggttgtagcggagctgagatcacgccactgcactccagcctgggcaccattgagcactgagtgaaccagactccatctgcaatcccggcacctcaggaggccgaggctggcggatcactcgcggttaggagctggagaccagcccggccaacaaagcgaaaccccgtctccaccaaaaaagtacgaaaaccagtcaggtatggtggcgcatgcctgcaatcgcaggcactcgttaggctgaggcaggagaatcaggcagggaggttgcagtgagccaagatggcagcagtacagtccagcttcggctcggcatcagag

SEQ ID NO: 22800 - DNA, 912 bp, Artificial sequence
  DNA replication origin
cgggagggaggtggggggtcagccccccgcccggccagccgcccagtctgggaggtgaggggcgcctctgcccagccgcccctactgggaagtgaggaccccctctgccgggccagccacccgtccgggagggaggtgggtcagccccccccccagccagccgccccatccgggagggaggtgggggggtcagcccaccgcccggccagccgccctgtccgggagggaggtgcggggctcaaccccccgcccggccagccgccccgtccgggaggtgaggggctcctctgcccggccgcccctactaggaagtgaggcgcccctctgtccggccagccgctccgtccgggagggaagtgggggggtcagccccctgccctgccagccgccccgtccgggaggtgaggggcacctctgcccggccgcccctactgggaagtgaggagcccctctgcccggccaccacaccgtctgggaggtgtacccaacagctcattgagaacgggcggggatgacaatggcggttttgtggaatagaaagcggggaaaggtggggaaaagattgagaaatcggatggttgccgtgtctgtgtagaaagtagtagacatgggagacttttcattttgttctgtactaagataaattcttctgccttgggatcctgttgatcggtgaccttacccccaaccctgtgctctctgaaacgtgtgctgtatccactcagggttaaatggattaagggcggtgcaagatgtgctttgttaaacagatgcttgaaggcagcatgctcgttaagaatcatcaccactccctaatctcaagtacccagggacacaaacactgcggaaggccgcagggtcctctgcctaggaaaaccagagacctttgttcacttgtttatctgccgacct

SEQ ID NO: 22801 - DNA, 1039 bp, Artificial sequence
  DNA replication origin
gcggagccaggcagggaggaaaggccacccgggacggcggcggacttggaacgatattatttatttgcgttgggcgtttttttaagggatgggaggagtgagtgtgggagggggaagctgtgagtttctctggccgacagcgtaggctctgggagcgcaggggggagtctttccccctctctatgcagatctggacgggttttttttttgttttttgtttttttctggacggacggaaggtgtgtccagcccatccattcatgtcaccagccccacaaagtgacagacgcggccaacaataagggtagtgctgtggcaaggggaggggactcgtagtgggaggaggtgggcgtggaggcgacgtgaatcgggcgcgctcgccacctccccgctgccgtgcagagccgtggcactctcgctagagcccaagcagtcccccaggcgtggggtctggtggacgctggcctggagcgcccggagggcggggtgggggtgggggggacgcgctgtcgtctggggtgtctccgcgtactcctgttgggcgaaccctggctctccggtgttggttgtcacttgagcaactgatgggcttccaggggaagtaaacggagtcgctagtggctggaggggctgttatcagggtcagtggaaggtatcaccgagactgttgtagctgtgccgcccttgaaaagttacctctgaaagagtgggttgtttgcgtattaaacgaggcccttatgttataagggagaaggagatgtgtttttctcggagaccttttaagaaatttctgtttccagtgactcatttccggtcaccttttaataagatttgtttttaaggattgtggggagagctgcatacagctccttcactctagaagagaggatctaatacgttttgatctagagaaggagctcatagtcggagttggttaaatgccagatgacagatggttgcgtccaaaacctagagggaaaaaaccaccaccaggtcctcctagacattggtagttgtgtacgtctctgcagggagacgg

SEQ ID NO: 22802 - DNA, 944 bp, Artificial sequence
  DNA replication origin
cccccgcggagagcacagcgcccccgcgcagtccccgaacttcttcccgcgtcggctcgggctctcgggtggggacgcggggacccctcgctcaccgatatccccatcgtcgtcgtcctcctcctcctccatttgtagcaaaacattcctgctcatctttttcatgtctccctcagaaggcggctccgaacttggcgcgaagttgggggctcccgggttccagaacggcgcggctctcccaggggccggatcggggaccgcggggcgtgtgtcgcttgggctcaggggccgctgagcccagccagcgccggggaaagccgagccgaggcacccaccgaccggagcccagagccggaggacgcctctcgcctgccgagcggagcccggagactgagcatgcccagtgcggccgccgcggctcgctgcggaatgattgaacttccccggttttacgaggcgcgcagaaggaagtcggcaggcgagactgcagagggagtagtgcgatcctgcgcgcgggggaactagctggagggcaaggcgggaacacgtgagtgcgggagtggactgggttccctgagcattgatcccaaacagggcagcttttcgttccaaggtcgtctgtggacacacactgtggcttgctttgttttaacgtctgatactggagaggagggaaatgctgctgcagcacaactgcagaaccctggaaggcgaactcgtttgaatggcttttaaaggcgacgtggagctaataatggggggatcttaaattactctagctccgaagtgggaaagtggaatctgtacgggtaggttaagattacggtggagtcggggtgggaggagaggcaaaactcagagaataagcaaaagaagaaggggcgggacggacgggagtgggggtggagagaattttctaaataaacgtgtgcacaaaggcagga

SEQ ID NO: 22803 - DNA, 1829 bp, Artificial sequence
  DNA replication origin
ccattactgtatgtaataacagtgtgacaaaactgacaagaactaggctatagatgtaaggcaattagctgtgaagggagagttatccagcaggaaggatgggcatcatcatgctgtgtcgtgacttaatgattactaagtgataaatgtggatatctcctgaggcaaaacttcaaataagtgaaatttgttcttatggccccacttttcttttttggcatacactttcttgcttctgagtccttcttgtcatggagaaaagtcccagcccagagactaaatcttagtaggtgatcaatatctcttattaaattggtatatgagtggatgggtagatgggtgggtgaatgggtaggtggagagcagatggatgggtgggtaggtgcatggatagatggatgaatgggtgggtgaatgggtgggtgaatgaatgagtagatggatggataaatgaacatgtgggtgggtgggtggatggatggattgatggaagggtggctgggtgggtggataggtgaatggatgggtagaagaatgggtgggtggatggatggaaggatggatagatggatggatggatagatgaatgggtgggtagatggatgaatggatgggtggatggataggtgggtggatggatgggtgaatgaatgggtggatggatggatggatggatggatggatggatggatggatggatagatgaatggatgaatggatgggtgggtggatggatggacagatgggtgggtggatggatgattgggtggatgcatggatggatagatggattggtggagggatgagtgtgtcaatggatggatgggtggataggtggatggatgaatgggtagatgagtggatggataactcattcaccaaaaaatataaggagttgatcatatgacccatccacatttccaacagtgcttatctcaagggtgaagtgttaatgatggaattttggggatcagtgaagaggtgtttttagacagaaaggacttctttctggtactctttggctttttgggcttagctctttgaggctatgctgtaaaataaagatagatgataccaatcttttaaggccattatgaggattaaagacaatatttgcaaaatgtccagccatatcctgcacatagtaggtggtaaataataataactcttagctcttgtcataatttcctttcaagtcatgttgtcatttccaagcataacccatcatttaccccttgatatacctacagggaacaacccaatgcctacctaataaacttcttctcatcctttaaggcccagcctaatatcccattaatagacaagccttcccaaatcccacttccataccaggcaaatatagtctatcctctctctacttccattattcatataataactatgtaaaataggtattattattcccagatgctgggacaagaatgaggcaagcaagttacctagggtacaaaatttaaggaggcacttacactcagggttgtgcacgagtctcccatacctctccctaggcctggtgctgattagttcctcttgattgaagaggaagcccaatttcaagcagatgaagtgtcttcctggtaggtggcagcagggacaaagccaatattcttattttattacacacaagttcctagagcagagcctggtacccaattgatgctcaataatttgtcaaataaataaactgaagctgtagggtaggtagcaatttggcctgatatttgatgtagtagtaatgatgataatgatgatgatgatgatgatgataaaaatccagtctttactacatgtgtactgtgtgctaggca

SEQ ID NO: 22804 - DNA, 859 bp, Artificial sequence
  DNA replication origin
agtttcggcggcggcggcggcggggctagggcaggcggggctgggggtggggagggggaggtctgtgtggtggtttgtggaaagcgcggtgacagcgtgtatttcggccccggctccgcggggccctcgcacacattcacgcgcggcctcggccgctgaggccggggcgtccccgggcagaagcaccggcggcagctgagccgctgcgcgccgcccgcctgcttccctccccgccagcctccctctctgccgccgccacggcctggcagccagtgccacacagcgacccccgagggctggccgcggcactgcgcctggctccacaccgccccggcagatcctcgcggggaacaatagactcgactcgccgggcttagggttcgtctgcaatgtgccgcacatttcacacgcacacaaagccggcggaaaggggggcggtgcggggaaacggccactaccggttgttccagggttaggggtggaggcgatgttcgcgtccccggcccggctgttggaagggccgcctcggagtccccgcccgcccgacagaaccggtgtggcgctctgaagggaaaggaagctcaccggggtagcccctcacgctacgcaacattcacagatcggaataaagtcaatttgttaccttctgtttttgtaaaatctaaaggaatcggcttttatgagccgtatgctagtattttggggcctggttagcacattttctatgaattatccacacgctaactttagcaaactatacgttaaatacaatgtgaactgtctgtcctagttctgtggaaatagagtaatgctcttaattcatcttgccgctggttggcttcacatatcaaactggagt

SEQ ID NO: 22805 - DNA, 1115 bp, Artificial sequence
  DNA replication origin
tctttcagagattacgcaccttctctaaatgctatagcaaattaaagcaatggaagcagagtcctaggtaactccctgaacccaacccatgcaagccgttttttcaaaagtgtcacaacttctcccaccttttcagagcagcttgcttggtggggtaggagtagttgaagtcgctgttggaactgtagctgctgctgtcttcatccggggaaatactgaatcgtcccatttcggccttcttcatgctaagcactgggaggaatcgggtgcagctagtagcgctgggctccttttgtccttggcggtgggtgcagcggcccgcgagtcggcctgcgaaagtagaggcggcgcgtcaggaccgcagcgccagcccgccgcggtcacgtgacgccgcccggaggcgcagcgcggctgattcatcccaggccaggcgagtggaaaagtaccagccgcgcgcgaggggcgggggcgcgccgaggggcggaaaagtacagacggcggagccgcggggagaacaaagatgatgccaccgctgtgttgcggccgtcgaggccccctactccggcagatttcagtatttcaccctctctattgtccctcgtcggagtggagggggcgagggggggttctgttttgctttttcccagtcgctccaaacttgcacaggcactcagggcacacatccagccccgaccctggctcgtgtgcatgcaacctaggcgcacggctttccgtttctagcatttggaacagcaatgctgcgtaatctgtcctttactgcccggagtccccacacggagaaatgcctctgccgcagacagccttccccaggaggcggaaagggccgacactactcctctctcgaggggggcgaacgcccgggccccgggagctgggggtttgtttacacacgcgcgccagtgccctcaagcacacccgtccacaggcagctggcccgcgagtgctacgcccgcccagcccctcctatgtccggaaagaaaactgatgcaatatcgatcgtcgattgtcaaatgttcccaactcgtcttccccaatcttggcctctcctgtaatacatgcccaagcccacctccgccgcccccagattcctggct

SEQ ID NO: 22806 - DNA, 1372 bp, Artificial sequence
  DNA replication origin
cgccagcctggggcgctgcagcgggcggggcgtgcgcagcgccgctccccggagagaaaggaacctccgcaatgtcggggcccggctgcgaccggaaaacggcgggggaagagagaaaaggaggagggagggggaaaaggaggtggggatacgaaggagcggggaggcggcgggcggggcctgcggcgcgcagccccagtagatctccggaaattttccactaacgctccgagcgccagagccgcccgggcgcagcccgcctctgcgcgcccgcgacccacgtgacggtgattcattcggcaccgcctccccagcccgcgcgcggacttggagccaagagtgggagcaggggtcggggggaggagaaggtggaggaggaggcgaagaggaggcggggaggaggcggggaggaggggggaagggttcggggagagggaggaggggaagcagaggggacgatgaggtgcggaggcgttggcaggtacctgggccccgccgcccgggtgtgtgggggtcgggtcgggggtccagcaaagccccatccagtcgagcctgggcaagctgagaggctgtcgggtgcgctccagttacgctcccctgcgtcgtggaaaacctagagagccctacagcgtcagggctaatcccgggacgcctcgaggccccgcggagttttcgcgaacgcgccgggcggtgcagggatgtcctgcttgggagagtgcagggttggaagcgggcacgccctgttggcagctgccggcgcttgtgtacgtggctgctgacgtggagaactgtagctgtggaaagcctgcgccccaaggagggacgcgggggtgcagtcgcggcccattatctgtgcccgggaagtcctgaaggctctaggagctgtcagattaaacccccagacccacaagaaaatccctgaagcttcggtgagcgtgggatttggcgtgcagttggttccgtatggttccccattaagacttggaagtcggcttaccaagatttcctcttacccttcggctgtgttgagtagatattacacagacaccccgcccatgactctgctcttgcaggaaaacatttatttcaaaaatactgcaacggtttcatctctcatgtccttttaggttctttctagtaattgtgaacttttcctctcaagtcattccatcaaagtcttggaagcaaatgaaaaaaacatactaccctgaaatagagttcacatctttctttaccaacttgcctttcccaggaagacatcgtggtgggtttgcagttcaggtttcctcacagcctctcctgggggtctttttccctctctggtaccttgaggcataggacagaagggagctgctgaagtttctggatgtcg

SEQ ID NO: 22807 - DNA, 955 bp, Artificial sequence
  DNA replication origin
gagcccccaaggagtctctttcaagggagaaggcgagagcagagctggatgtgggcccctggtctctgggcggtgggcgagtctgaaaactgcgccagcggttccgagggcggcttaccgcgcggtcggattgcccggcctgctgcgcgctggagtgaagggcagggcggtgcagaaatgcgaacggggacggatagtggggtcgcggcaaccgagctaagagaagcctagggaggaggggcagaaggcgggaattgattacaggttagagctgatggaggaaaaattgagagaagagcgaatgaaggaagaaagtgagacgggggagagggaacccggacccgggaagccccgagaagcgtaagccgggagcacccttgagtccaggagaggtggcgagcgcggcacaccagctgtgcgcccaggcagcgcgcggtgaggtactcttcatctagcggtggtacaggtggacgctgcgctctgggccagggcaggtgccggttgtgggggaaaacggcgaatctcccagctcctctttgtgatccagcaggcagagatggaagattgcccttactttgagcaccaggactgaccctggaatgctcaccgggctgctgacttggaggaaaaggggtgaactaagttaggaaactcagggatacgtggtcgcgggtgtgccagggcatttgcagaggagtgcaggaggcagtgatgcgggcacttgtgaaacttgtgaacttgagcacttgtgaatctcccggctagggccgggacaggttggcgcttgtctatttctcagagtaaaagctgcatctctacctgtctcagggagatattaaatgccgaggtcttaaatgcacagtgtgaaggtagtaggagtggctctagagcaataagcccatcctggcaggcacttcccgcagactctccctagcccagagccccatcctccaag

SEQ ID NO: 22808 - DNA, 1373 bp, Artificial sequence
  DNA replication origin
tctctgtactcagcatgacatcctctcataaataccaaatgggatgccttaaacgactgggaaatacatgctaaatgggtacttagatgtatttagacagcttatttatcactgaatatggcaaaactctttgtgtgctcttttggggaggtaaagaatgtcacaagcgatggagcaaagtagaaaatgtgccacatggaaatcaaccatattgtaaacagtacatgcctattatggcctttccacaccttacagtttattactatgggagctcttacagctccttcctgggctttcattcttttgacaaatatttatcattgctgggctaggttctgttctgggcactgggaatacaccaccaaacaaaacagataaaaaatgcctgtcctcgtggaacttatatagtaataaaagatgtaggatgtcgcatggagatgaatgtgatggagatgggatggggtggggtggggtggggtggggtgggatggggtgggcttgggacagagttggggaatcgactttaattaacctggtcagaggccaggctgagcaaagacctgaaggaggccaagccagtcaggccggaataggaggagtgttttagaggaggggcagaagcctgaggggcagccagcttggtgcacagagactggcagatgagagcacagggagtgtgggacagcgtggtgggaaatgcggctagagaactggctggaggtggatacaagccgacctttgtaagggctcaaccaccactgcactttagaatcccctgtggagcttttaaaccaagtgaatcagaatctcctgcggtgaagcccaggcctggggatgtttttgaaatctccacatgtgcctccagtgagtagtcagaggaaggacatgagctgccttctgctcagagggatcctgagctttaagaacagaccccaggaggggacgggtggatgcagggaggccagtcaggtgctgcaatcatccagggagggagctggtgactgggatgtgggatcaagtggtggtggtgagaagagctcagactccaggtatattttgaaggcagagccaagagaatgttcctgcagatcaggcatagggagtaaaagcagaaggtagtcaaagatgacaccaaggttttggggctgagcaattggaagaatggaattgccatttgactgaaatgagaaaagtcatgggaagaacctagaaggcatttttacatcatatacgaacactttgcatggaaatgcccatagatagtaaaatgctcagtacctggcacgtaaaggattcactaatgcttttaaaagacagtatgtgtggtgaggctgaagggcaagtatctacagctgagtatctttaaggtggtt

SEQ ID NO: 22809 - DNA, 1307 bp, Artificial sequence
  DNA replication origin
aggaggaaagcgggaggaggcggcgaggccgcggggcggtatgagggggcgccggccgcctctcggattggctgcgccgccgccccctccgcatcgcgcgccccccaccacgcgcccagcctgctccctcccgcaggctccgagctgctgcccgcaggaggcaggacgcgcaggggtgggaccggcgccccagcccgtctcccggccccgggcgcgcgggaaccccgggtcctgcagcctcccgagtgcggagaggcggggccgcccgctgccgcccggctgcctgcgccccctcccgcggccccggctctgggagcggggcgccccgcgcgcgggcacacggcggccagagcgccgaggcggtaccttcagcctgcaatgagaggaacccgggagagcccccgggagccagcgaagagcttggctgctgcgtccagggctgctgctgccgccgcggctgcttgaaactcctcaaagttgagagccggctagagggtgccgcccgccgggagccggagggaaaggaagtcggaaggtgcaagagtgacagacacggacagacggacgcgcagaccttcggaaggcactgcgtaggcagcctccccggagcccacgaggctccccagcaccgtgagttttttcctggatgggtggttgctaagtatttccgtttaattgtttgtagcgtacgtttgcgtatagttgtgtctgttggagggagtttaaaacaacaacaacaacaacaacaacgcaggatgcaccttaggaaaaaattgagtttctgatggtgggtgagacggtgggttgtatggagagaatgtgactgtacatttttataagcaggactaacccaggaaagaggaaaaaatacatttaacagtgaagaggcaacacagagctccctattgtgaaataaaacccatttcaaaagttattggaaagaaagtaaggtatggctcttatgggttaactagtggtagtcagtttctgctttttactccctctgaattattaattgtttgccaggttcactggtgggaggctgagccggtggaaaagacaccgggaagagactcagaggcgaccataatgtcgttacgtgtacacactctgcccaccctgcttggagccgtcgtcagaccgggctgcagggagctgctgtgtttgctgatgatcacagtgactgtgggccctggtgcctctggggtgtgccccaccgcttgcatctgtgccactgacatcgtcagctgcaccaacaaaaacctgtccaaggtgcctgggaaccttttcagactgattaagagact

SEQ ID NO: 22810 - DNA, 1399 bp, Artificial sequence
  DNA replication origin
agtaggcagtagcacctagacagttgggagaaaaacctagagtgtactgttacagatgacaaaaaatgagttgaagaaagtgagaggttagcagtgccaaatgccacagagggaaagaaagtgcattatatttagtcataaaaagactattcagagtttttgttttttttcttgagacagagtcttgctctgtcgcccaggctggagtgcagtggcgcaaactcagctcactgcaacctccacctcctaggttcaagtgattctcctgcctcagcctcccgagcagctgggattacaggtgcaggccaccacgcccggctaatttttgtattttttttttttttagtagagacggggtttcaccacgttggccaggctggtctcgaactcctgacctcaagtgatccgcccacctcggcctcccaaagtgctgggattataggcatgagccaccgcgcctgacctctatttagagtttcaataagattttttttaaagggtggaaggccaaccgcaggtggctcatgcctgtaatcccggcactttgggaggcagaggttggggggcagggggaatagcttgggctcaggagttcctagatcagcctgggcaacacttcgagatccccatctctactaaaaacacaaaaattagccaggcgtggtggagggtgcctatagttccagctactcaggaggctgaggtgggaggatcgggagatcgaggccacagtgggcggtgacgggcccactacactccagcctgggaccaaaaaaaaaggaggggggggaatgaaatgagttacgtaaatgagattatatggagattacagtacatttgcctttgataatataagacttgttcttgagcatagtctggggaaaaagcaacaaagtaaaagatacaggaaaaaggatgagtgatggggcaaaatctccaaaaaggtaggagaagagtcaaagctttaggcggagggaagagaagtaaggtgggagggagagagacggaattagaaaaacatttgtttaggacagtgaaaaatacctcactaagaagggacagttgcagatgcagataggtcttctgactcgtagcctcaacaactaaattaggtttaagcttctttcaggcagtgtccatgtttgaccatatatgcacaactcattcaaaaacaaaactagtacaacgctttgttgggaactcaaataaatgaataaaagcgcaacaagtcagtgagatgctgacgggggttagatgcttttccatttcacccatcaccgctgctgctcgagcaggcccaaaaactctcccagggaccctgcgatggggcgggggtgcgagccagcaatcaaaaacttccagcgctgggggtatcactttcacacccgctgtcccggcg

SEQ ID NO: 22811 - DNA, 773 bp, Artificial sequence
  DNA replication origin
gcttctgtcagtgttcagccagggggacaagggcacttcgtggtacattatctggaagggatctgtcaacgtggtgacccatggcaaggtgagccctccctcctccccaccccagtgccctgggtcctaactgctccctggtccatgtcctcatgggcagtgcctttgttgatctactgctgctgaccccgtgtctcctgtgtgggttgttctcctgccgtgggtctgtcctggcaagagctgggggcggcaggggcggcaggggcgggctgagactgaggcctggctgcaggggctggtgaccaccctgcatgagggagatgattttggacagctggctctggtgaatgatgcaccccgggcagccaccatcatcctgcgagaagacaactgtcatttcctgcgtgtggacaagcaggacttcaaccgtatcatcaaggtgctgctgctggggttggggagggcaggggccattcgtccagagaagtgatgtggagagaggagtagggaccagagcagagggcctgtaagaagcagggcaggtaagagatgctgggctatgacagctggcagtgggaccatagccctgggtgtgtgtgagaaggtgaagcccataaggcacagaaggagttcagtgagaccagtgacttcaggctcagtgtgggagaccaggggaaggatgggcatgcagggggcgggggactaggctgtgggggaggcaggatgcatggaaggtagggaaggctgaggaggtggagccaaagtcggaggtg

SEQ ID NO: 22812 - DNA, 1605 bp, Artificial sequence
  DNA replication origin
agccccatggccccgtccaggctgcagctcggcctccgcgccgcctactccggcatcagctccgtggccggcttctccatcttcctcgtctggacggtggtctaccgacagccggggaccgcggccatgggagggctcgcaggtaccccgggacgctgggcggcgcggggcgggtgcgcggctgcggggcgggcgccgtcagctgctccaggacgctccccgcgagcggcgcttccccgcggagcgggtggagtgtttactcgaaaacagcggttggcggcggcaggccccacgcgggcccgggctcctgggcattcctgggtgcctctgagacccgatgcccgcccgggcgccacctgggggtgccgacggcccgccactgccggctgcacagacctgccgcgccgcccgggttatctgtcacggcacactgcctgtcgccctccgcccagttgccccacgacagtgtcccctccgcgcgcccgcggcgctggtcgcctcctatccccaaacacacacacacacacacacgcacacacacacggttgttctgagggatcccctgccccccaggcgccccttccctgggtgctgggtgagggcagagagggaagaagtgggaaaggaagagggctaggggtggctggggaagcccatctccctccttccagagggctcccccgcagagccctctgctgagacccacagggaggacggcgttagggatctcatagaaactggacattctctttccacccatgttggtgcctttttgctacccgtctgctgtggctcctcagccaagctctgccaaatcctgcaggccagccgccctttctgtgcttctgggagggaaggggaagcatcggtgcgctgatgggggctctgggctgaccagtgctccttgttgtgcacatttgggctcgcagtttaacctctctgcgccatagaattggtatgaagatgaaaaatattatctctactttctaacattttaaaaaatgctttctatgtgtcaggcactatgttaagcaacctgcttcccttatttcatttaatccttacattagtctcatgaagtaggccttacgattatgtccattttacagataaggaaactgaggcctgaagttaaataaattgcttacccgggattacacagctacatgaaataatatgtgtgggaaaggactttgggaagaaaatacgtataatacttttacatatgatgattatattccattactaaaatcctcggccaaaagaaccctaaatggaataactaaaaataactaatttactcactgccacagggagtgctgagtgccatccctgggtagagtcgcagcatgaggtggggttaatgccttagaagaggggcatacagggccccaccctacacaatgccaacaaagcactgggtcaccaagaaggggggatgggcaccctggctagggtgttctctgcctgcccagctgcctcaccacctgtgggatcctgaggacaactggcccatctctgcgcgttatctacagagccctagttcctttccccactgcaccccgccaccctccatgtttgtcaaggttcacttctccctgccac

SEQ ID NO: 22813 - DNA, 861 bp, Artificial sequence
  DNA replication origin
tgagctgggggtgggcaacacagcaggaagcccggtcagcaggtgaccctgccgggtattgtgtttccttgtaatattttccccctgtttctgtggtaaccttccctggaggccccaggccttagggctacaggaaggtgcccccagacagccctttccttagaggcctgagtattaggaggagtccccagatctagccacctccctaacccttttggctccctaggatcaggggcctgggaatctaggcgagtggcctgagtgagcatggactcgcgggctgggggaaggccctttggcgtcttctggggggaagggagagggaaagaggggagctggacgcccggaagggccctgagcaacttgagtcgctggcctagcctcttgtttcctcccaacccatccccactgccctcctccagtctccctcctcctacaagggagaggtgggtagcatgctgcctggggcaaggggcaggggtgggggtggcagaggtgggagggatgttttcatcagcagagcatagctcctttggtcctggaccagttcccagaggcaaaataaattcaggacagcgtctgtttagtgtgggtctgcatgagatgtgtgtgagcacacactgggtgcgtggtgggtatctgtgtgtgtacccctccccccagaccctgtgtatgctgatgtggtggttccgggcaatttgtgatctatgtggtggttctgtgttgggtgttttgggaatatgcacacataaaagacagatgtgcatcatctgtatggtgcacaccttttcaggttatggccctgtgtggggtaaacatgtccatatgtatggacatgttttttgggggtatatatctggg

SEQ ID NO: 22814 - DNA, 1178 bp, Artificial sequence
  DNA replication origin
cccgcggggcgcccacatccgcccgccccggggcagctacaggcccaagggagggagttggaggccccggccgccggtgtgcgggccccacgtcccatcacccctgttcccggggaggacgagccgagggaccggggagggagggacggccgcggtggcccggcgagggggcggtgctccggggcggaaggtttggaagcgcgagggcaaagggcaggacccactgagttggggctgggctttgtggggctggacatcagcgcccccatcccgtggagccgggcagggccctactcagatccttcggcggggaaagaggtcccttggaggggtctctggctgggaggtttctctgagcattgccccccatccttgctcacccatcagggtgaagagacacctgtgccctggtgagctgtggaggtcaatgccggcagcggcgcgggaagcggggcgccgcaggctgtgtgaggggtgggggacaggatgtgcaccccccaggcctggggtctgttggtgttggggagtgtgagagcaggcggcaaatttggcggatgggctgggttcccacgaccagagtttctaggcctgtgggccaggagagagccctctggggcccgcaggccacccagtgccccacccccattgcttcccgctgtggctgcccgtttgggtctgacctccccagccacggctgctcctcactccttctccccgctggctgtcttgcgcacccaaaggcctccccctgcatctggacactggctgtctcgctgccaacgctccctgcccactcccctaggcaacatctgcctgaggcccagctctgcctgccgctttctagggtgagaatggggcatcggccctcagcggccctgctgggagctcaagatcaacttctcagcctgttccctggacttgcatctggacctgtgggaccttcctcaggacccctattcagctatagggctggcaggagactgtgactcaggtccctgccctccaatgagacgctttggcggccctttccccctcccaggactccataggctgctaggctgccgctacccatgggttattaagtcattttcttcttctctgcagtcatttctgagggaaactaaggcacagagtagtcccagtgagtggtacccagcccagtgaacctagactggaac

SEQ ID NO: 22815 - DNA, 1111 bp, Artificial sequence
  DNA replication origin
cgagctgtgcctgagggaagggaatagaatctatggtttgaagttcaccgccagcatggccaagccctcctaggccactgtgggctcttgcttccaatcagacatgactccacctctggggctgcctcaatttttccttctctggattcttggggtttcttaggattgcgggagatagaatggggtcaggggaagctgctccttggtttacaatggtggcgcctcacgctgcagagagcccagtgttcctgcgtggtggacctctccccttcctaggagcagctccagattgctggaggcagacacggctgaccggctagcccaggaagcacaatggcgaggtccttagcccctgacccctgaatctgaccttctctccagctaaaagcggagggagaggcagggagggccactgcctaaagccggccctgagctgagtttattagctgagggagggctggaggcggctgcattccgactcacagactggaacatttctgtgatccgctgtaatgcactgggggacactgggcacattgctgaagtttgactcatagggaccgggagggggaaagaggggggttgtggagggagaggaatgggaggaagagaggaagaggagaggagggaaggaagtcccttgagaaatttctttaaaaaaagaaaactttcaaaatctgcaccacccccacaccctttttcttttaataggaacaggctggacccttccgttcccctcagcaggcatggtgtgtgtgtgggggtgccagtgggggagggctgggcagtgattcaaatcagatcctggaactttcctgaggcaagtcgtgcttatgtgtgtgtgtgtgtggtggggggtgtccgtctgggattccttgtatgggacatgggacaccacgcgtgtcccactgtgcccgcgtgtggctgcgtgcttgtgggctgtacgggtatgtagtgtgtgcacgggggtccaccccgaagccccagtgtgtgctgtgtaaatgattctgccccttgtaaacatggatgcgtgctcgtgtacgttgtgtatgcgagggtgcgtgcgcccaggtagctgggtttccgggaattgtgcacggctcggagcgcc

SEQ ID NO: 22816 - DNA, 1378 bp, Artificial sequence
  DNA replication origin
gagagacagtgtcctgtctcttctgtctccctaagcctgttttcctctataatttgaggtctcaaagtgagcactgagctgatttatgcaaatgaatccagtagggcctatcgcccaagctgacctttctagggtatacagggtagcttggccaggctacagaaatgggaaaataggtgcaaccttcctgatcctcctgaaatcctcaagtgttgtcttgaagttgaggggaaccaggaccaggctgcggggagtaccacagggactgcagaaagggcctggcctcccctcccgaaacactgcacatctggagtgatctgcccatctggctgtatccctggggcaatggccacagctgctatttgagggaggagacatccagctccttagccagggcctggggccggggggtgggggggtggtgggtagtgggggctataaataagaggaccaggggggcaaggttgaccttttggggcggggggcaggagctggtgacttccccctctttgcttgagtccagagccagagttttagcaaaacaggaagaggcagcagcagcttctgggaaagtgggagtggctccccttcccccacttgcctggggccttcggatcccagccaggacctgggagaggtggagtcatctaggcaaggagagggaggggcagacccacgcagactgggccccagcttcagtgccctcaaatggcgcagccggggcacaggaaaaggagaatgagacagagaagggcagcccaatggagtatatctgccacccctcgtcccctcctgttcccttctataggcattagaaatggagctcaaaatgtgcctgtgacccaggtagtgtacatggaagttcgaggtcaagttgagcacacctccatctctcatcccctcccagcctgtggtgagctaagcctaagacagagtgcgtgggagggagggctctagacaggaggaaggacacctctgggcttctggaaagagatccaggacctggcccaggtggagtgatagaaaaatcttccaatgaactatcaaggtgaggggatccaaaggtctgggtggtcctgggtgagtgtttttccagaataatggggcatctacagggacaagctcaggagagctaagcctcagtccagagaccctcatgaagtcaaagactgaaggaattatccaggaaatgttgcctggctttgcttcgcctgagtgaggctggccactgagaatctgtccttcagtgtctgtctggagacatctggttggagctctggctggcccacacctgtagtagggcctgcacctgtgtctgtcatgtactgcccttgtctcccgagcctggagccccacacttcacctgctgggagggtct

SEQ ID NO: 22817 - DNA, 747 bp, Artificial sequence
  DNA replication origin
gggtgtgagaagacagctcttcctactccccaacatacacgcgtgcgcgcgcacgcgcgcgcgcgcacacacacacacacacacacacacacacacggtggaaactctatacccctgtgcctagtcagaaacagtgacggggagggacccagggaccaggcctcgaggtatgaggaaaatccatcctgcccaagtgagggggttggggagtcacagaaaggggcagcttctggggctgagggttccactgcctcctgtttttaggcaaagagtttccagggcttcatctccaagtcctaaggctagaggcccccagcagggccctcctctggtggagctgggctggggaggtgggtgggtgccatgtggacctgccccagccccttcccactgttcctcaagaggccaagtggggaggaggttggggggtggttgtgggggcagcggcgctgagtttgggatgctggggctcagggagactgggtaagagctgggcaggacaccgtgggaaggggagtggtgggacctaggagggaggggaacaaagaccagggtgcctgggagctggaggttttaatacctcttgacaacaaatgaatcataggcaaattctgtggaaatgatggcgtaaagaaagatgtgttatttcaaggccccagtgtgttgttgtgggaagagagtggaacggggaggagcaggaggcctaatggcgcctgtaggtgggggcccgggtagagttcctggggg

SEQ ID NO: 22818 - DNA, 829 bp, Artificial sequence
  DNA replication origin
gccaggtggctccctcctgctgtgtggggcccagccttctggtgcccccctgctccctcatggccagagttcatggaaacttctcaggtcactgactctcaccttcctttcctcctcaggagggtgggcccagccccgctccctgcagcctggcccctccgttccctgaaggtcctgctgtcctggcgcagtggggaggagggcaggcctgggggctggacagcagcagggccagggtggtgtaagcaaggggagatgcgcctctgcttcctgcgaccttggcggtgagcctggggacaggggtgaggccagagacggacggacgcaggggcccggcccaaggcgagggagaacagcggcactgaggcagaaaggaagagggcggtgtgttcacccgcagcccaatccatcactcagcaactcctagacgctggtagaaagttcctccgaggagcctgccatccagtcgtgcgtgcaggtgtgtggaggtgaacaagtgtcgggtatgcgcaggtgtgagggggtgagcaggtgtgtggggtgcgcaggtgcgtgtgggtgagcaggtgtatgggggtgcgcaggtgtgagggggtgcgtaggcgtgtaggggtgcacaggtgtatgggggtgcgcaggtgtgtaggggtgaacaagggtatggggtgcgcgggtgtgaggggtgcgcgggtgtgtgggggtgcgcaggtgtgtggggtgcacagatgtgtgggttgctcaggtacgcaggtgtgtagcccgcgctttggggccgcaggagagggaggtctgagagaggctggcagtcaaggctgccccctgcaggcgg

SEQ ID NO: 22819 - DNA, 1130 bp, Artificial sequence
  DNA replication origin
aggcagagaacttttattccccccgccgaagagtttccctctgcgattgatttacaatctgtaacatacaaagacagggctggaatcccagccgtcggaaacgtgcccaaacacgtggaaaaaaaaatcctctctacctaatacactttccaggcttcgtttgtcctgaatataatcccagacagtggaccttaccaaaggaggggtagaaaggtgcagtccgaacagcatttggacccgactacaagagccatctctaactataccggttgaaatagttgtagcaaccgtagcaatcgaccagcctgctccccttccctgacacacacatacacacacacacacgcacacacacacacaccacgcagcctggctcggtgagttccagaatttagaaaagtaactcattgtagtacctcggggcggcggggaatggggtaagaccgcggggaagggggcgctattttcgggggcatttgaaaagcacggtctggttggaatgttatcgtctttcagatggcctctcctactggaagtttctgtaccctttatcagaagagaggcgcaggcggacggagggaagtcgagatgagcgctagggctgcaccttgctccagggccagctgggagggggagggtaccctaaagaggcgctgaggtctcagagggcctatcggaagccgttctttgtggcctgggatttcagcccaccagtgtcagagtgttagtcccctttgtctaactctgctttgagcccaccagccaccaagccttggacaggctgtgaagtcaaccctttggcgtttgcttgctccctcgctcgcgctctctctttcctacttcacctaagttcgatgagttgagatctgtttttgctgaactcgaagtgcttcgaagaggcgagctgtgtgcatgtgcgcctaattatcaaagctggtggaaaagagcccatttatatctgtgcgcaaacttctccgagccaacactttgcaagttcagtattctagcgcaacgtagggacctgcaaatacttgcaactgcgatgggcaccgaggaccctgggacagagtccttgattggcagaactcttcttggtgaacttctgcgtgtcctgtgcctaagtcggcgcg

SEQ ID NO: 22820 - DNA, 1786 bp, Artificial sequence
  DNA replication origin
ggggagccccgaggcgaatcatggctcaccgcggggcctggctgagccgggcccgggcggagcgcagcgaaacggcaggagcacggcgcgggtccgggtctctaccgcgccctcatgcaggaggcccttggagcaggagggggaagcgggagacccggcagcccagcagcgctctgcgtcttctccccgccgcggcgcccgttatatgcgcccggcccctttcgaggctggcgaactcgcccaaaccgcgggccgccccctgccccccgctgggctgtaacctgaaccgcccgcccccggagcccgcctgggccctgccagtgcccgcacctgcccaagccggacccccctctctgggagtcacgcttcccgccctccacccctagtgcgccgagtggcctgatcgggcggggcgcagagatggcccctgccccccaaacccggggctgcggcgctgcccccctctgaccacaggcgggaagggtggcctccggcccctcccctcggagttctgccggagttggaggggagggggtgtttgcagaggcgcaggccgagagccctagaccaaggacggaaaagacatgggagggaggagggaaagcggtagaaaggagcagcggagggcgagggggcaccgcgtcaggcgtttgggagtggggacagggaggagcccacagagattcagagtcctaaatcttggagacaggctagctgagccagatctgaagggttaccccgacctatcttttagcccttccctgcagtacctggtccccagactcccacctggacgttcacagcgactgccctccacccctcccccatccagctctgcgttgaaggcttcctctggagcacaggccgaagttggcctgagccgacagccaggaaaagagctggtgtgttactgcacagaaggagacctgtgtgaaggtgtggggggcaggggcaggccctgggaaggggactgaaagagccacagaggacggagggagccgagactaaacggtgcaagctgcctgctgtggggggactgtctagctccaggctcagacgtggtgtctgctcttcctggctggggtccgggagtcccccggggagtgggcactgccggccgtcgtagagcagctttggccagggacggttggtcactgctgcggccctggccagggatcggggaggccgatccagctggcgagttctgtgagccggggagaagcgccagaatttcccagtcggccccctagccctccgcttgccgcctcacctcaccttccccggtgagcgccctctctcaccttagccaaactgccttcttcccagggcttagctggtctcttctcttggtctccggtgcctcctttcataccagggaggaaacgtccccaaacagaccttccttttgagcgatatggtcccccaaagaactataggcaaaatgaaactcagaatttggggtctgacttaaccagaacttctgccctcctgggcagttttgtttctctggagctttccccctagaagctgagagcacttgaaagaagctacttctgggccttaggcttccaccaggggtcctgggaccccatccctagcctatcatgctttgacacttgtcctggtagaggctggagttccaagtgctctggttggaaagggaaagaactcattgttgaaggaaatgcttctaggctttgtccagtctggatggagatggggaagaattcaaccagtttccagcatctcccctaccttccacgggccttgtctgagtctccatgct

SEQ ID NO: 22821 - DNA, 986 bp, Artificial sequence
  DNA replication origin
ctcgcctagctatatctggggaatcggccggatagttccattggggatcgcctcagggaactgctctaatgccttcctggaggtgtggttcatgaagccagcagttatcagcatgcgattgggctagagaaaaaactttcccattcatctggggagagggtagaagttaggatgacatttaggtcactccagattaaattgtaggacagagctcgatgtcggaattcctgtatatatttagtggggtctgatgagaaagagcctaaacgctggctgattcgggaaaggtctgatagagaaaaaggcacatgtaccctgactatgccttcagctccagccacctctctaagaggaaatttttgggcaggtgggggagagctagtcctaggacgaaactgtaaaccggaccgggtgtggggaggggaggtaatagaagggttatagggttggggagcaaaggctgaagaagagttggagcctgattcagcctggcggggagcgacctgaggaggagcagtctggggaggaggtgagaggtcagatggttcagtagaaaaggaagattcagaagactcagcaacgcttggggttgggactgaagggacaggccagagggaaagaaggaggatttgggacgagttgcattgggaacacagactagggagggaacaaagtgtgaaaaatgcctggatgtaaggcacctcagaccatttgcccattttttcaacaaaaattatctaggtctcgtaggatggagaaatcaaaagtgccgttttctggccatttagaaccattgtcgagtttgtattggtgcaaagcggtgttgcagaagaaaatgagatgcctagattttaggtcaggtgagagttgaagaggttttaagttcttgagaacacaggctaaggcagaagaaggaggaatggagggtggaaggttgcccatagtaaaggaggcaagtttaaagagaagagtagagtcatggagaa

SEQ ID NO: 22822 - DNA, 1520 bp, Artificial sequence
  DNA replication origin
acgcacggcacgtaaatgacgtgtgtctccatggtaaccaggaagtggcgaagaaaaagggaggatggctggaagctgcagtggggctctggagtctggactagcggggtggggggaggagaggggacgctacagtggcttcggccaaggctggaaagagcgtgtggtcgcaatgtttaatagggaagtatgagagagccgtctgctgcagaaacctccaagtccgggagagatcgtccctcccctagccggggtatgagacccagcgagactgccctggaaagatttttccagcccgcattcctttctcagaggatggcgctaaagtcgagtcctgcctccctgtcctccagcgatgcgcaggaaagcggagagggtagagaggctgttgctaatgatcccagagttgagctggggcacggtggcgctctggagccggacccaccgggcctgacggtgcagaggcaggaggagggcgctacggaggtttctgcagtaaatcagccctctagctatagaaatcaccggagcgggggaaggatgggactccctcctttatgagaccctaccgctcctacgcaggtctctgggagtttgtcccagatggggaggccaagtgcttaagttttgagaatgaaagctccataaggggagagatttttgtctcccctgcaccctccatcacggaatccccagctcctaaaatagtgcctggcacctagtatgtagatgcttaatatagttattgaatgaataacaaaaaccaccaagtcccacgctctcatccagaactccccaagccaaacgtagtgggttttaggagacctgaattcagtttcgtttctgccacttattcattcagcgaccttggccacatcattttcctcatctgttagggaattggactggataatctataatactatttctaattctgaataacagtctgcatcatctcacaggtgaaaaggtaaactgttgaccgttgtgtggagggtatggatggggggactgtgtgttagagtaattcccgctctctctttcagtgcccaagttcagacatacactgagtatccccaacctttgtgacaagccctttccctatttaaggggtggagcaggaagggtggaggaagaagaaaaattgtctttaatatacgtagatgattgcagattgagaaggaatcagcacctgggcagagcacaataattaataatgaccctaggaaattagggaagccaagtgatcggaagccaaaaatgaagttcataagaataaatctgggaaagagaaacaaactatatcacttcaagatagagaagaactacgtaaaggtgagtgttttgtagactggcggttcagtgacagcaaatgtgttacctttgggtttccctggttatgtgcttggtgatgaagagtgaggctggcccagggaaagttttgtgacactagaggactgcttgacctataccaatcttactgcttttaaaatagaaacaagtggggactatcctaaatg

SEQ ID NO: 22823 - DNA, 940 bp, Artificial sequence
  DNA replication origin
ggtcatgatctccagcagaccgtcctccattgagtggcagaagcgggtggcggaggctctgggtcgcgtccagcccggcctccggggtgggggagggggtggagggggagaggtcccgggaggggctagcgggagccgagggaagcggaggctcccgagactggcggggagccgacgtgagagacgagtcctgggcagagggcgcaggcaggatcgcgggaggccgagaagaggctgcgggacgaggacccggcgagggtcccagagccggcgtctcttgggatcgccccgggacgaaagtgccctgccctgcctcgcctcccggatcgcgcccgtgtcagcgccgccctctgggcgccacaagcagagagcgcctgccggttccgtgggtcacagacgcgctcgcggaggggtccgcgtccaggctgaggccagcggcgcgtcggactcgggactcccccaggccattaccgggcagcgcccgcgagtgtggcagcagcagctggggtgggtctcccgggggtgtcgcggatgctcctctgtttccaaggcgacgcacggcacgtaaatgacgtgtgtctccatggtaaccaggaagtggcgaagaaaaagggaggatggctggaagctgcagtggggctctggagtctggactagcggggtggggggaggagaggggacgctacagtggcttcggccaaggctggaaagagcgtgtggtcgcaatgtttaatagggaagtatgagagagccgtctgctgcagaaacctccaagtccgggagagatcgtccctcccctagccggggtatgagacccagcgagactgccctggaaagatttttccagcccgcattcctttctcagaggatggcgctaaagtcgagtcctgcctccctgtcctccagcgatgcgcaggaaagcggagagggtagagaggct

SEQ ID NO: 22824 - DNA, 888 bp, Artificial sequence
  DNA replication origin
tggctgaggcgcctgggcccagtggcgaatcccgaggacactcagccactcagctgccagcggaaaaaactgtcgggggaccatcgaggggctgctcaagctccgtgctcagagtgtcccagttggtgctccaggccatctccactcacaaagggctgactctggcagctctcaagaaggagctccgaaacgccggctacgaagtgcgcaggaagagcggccgccacgaagcgcccagggggcaggccaaggccacgctcctccgggtcagcggcagcgacgccgccggctacttcagggtctggaaggttcccaagcccaggagaaagccgggacgcgcgaggcaagaggagggcacgcgcgctccctggaggaccccagccgcgccccggagctcccggaggcgccgccagccccttcgcaaggcggccaggaaggccagagaagtgtggagacggaacgcgagggcgaaagccaaggccaatgccagggcgaggaggaccaggagggcaaggccgagagccaaggagccgccgtgtgccagagccaaggaggaagcgggagcgacagcggcagacgaggggcgaggacaggccgtgaaggaagacaccacgccgaggtcagggaaggacaagaggcgaagctccaagcccagggaagagaagcaggagcccaagaagcccgcacagcggaccatccagtagccaacgcgggctaaaaccgaccggacatctagcgggcaggggaagactccactaaagacttccacaaagacctcccctaaatctgaaggtcttcctgatccagttgggaatgcatcttgtgggagcagcttcactcccaccacggaccaatgcctttcccccataggccccaagaagagcggct

SEQ ID NO: 22825 - DNA, 903 bp, Artificial sequence
  DNA replication origin
cggcccccccgcccggccagccgccccgtccgggagggaggtgggggggtcggccccccgcccggccagccgccccgtccgggagggaggtggggggggtcggcccccctgcccggccagccgccccgtccgggaggtgaggggcgcctctgcccggccgcccctactgggaagtgaggagcccctctgcccggccagccgccccgtccgggagggaggtggagggggtcagcccccccgcccagccagccgccctgtccgggaggtgaggggcgcctctgcctggccgcccctactgggaagtgaggagcccctctgcccggccagccgccccgtccgggagggaggtgggggggggggtcggcccccctgcctggccagccgccccgtccgggaggtgaggggcgcctctgcccggccgcccctactgggaagtgaggagcccctctgcccggccaccaccccgtctgggaggtgtgcccaacagctcattgagaacgggccaggatgacaatggcggctttgtggaatagaaaggcgggaaaggtggggaaaagattgagaaatcggatggttgccgtgtctgtgtagaaagaagtagacatgggagacttttcattttgttctgcactaagaaaaattcctctgccttgggatcctgttgatctgtgaccttacccccaaccctgtgctctctgaaacatgtgctgtgtccactcagggttaaatggattaagggcggtgcaagatgtgctttgttaaacagatgcttgaaggcaacatgctggttaagagtcatcaccactccctaatctcaagtacccagggacacaaacactgcggaaggccgcagggtcctctgcctaggaaaaccagagacctttgttcacttgtttatctgct

SEQ ID NO: 22826 - DNA, 1527 bp, Artificial sequence
  DNA replication origin
ctgaggacagaactccgtgggaggcccagtagccagagcggaaaatggtcagtcaggcaagagtgcgggcaagtggccacagcaggctgcgattccggcgcccgccgccctccaagcgtctcgggccgcaccctccccacagcggcgggcgcggaggtcccgggttcgcgtttgggggcgcctgagccgcagccccgccccctcccgtccctccctccctccctccctcccactcctctccctcccactcctctccctcccactccccgcacctccgccgccgcagagccccggaagcgggcggggatttcctgtgcccgccccgccccgcccgcgcctgccgggccgccgtctccgcctgtcgctggctccgccggccgccggctcccagacgcaagcggagggcggaggggaggggcaggcggcgcccgggagggaggcaccgggccgcgggccaagcctaccgggggtgagtggagccgggccggagggagctgcggctggagggagggacgcctggcttcccggggcggctggtgggggctcggtcacccataggggctgggaggaggatcggcgcgtcttccgggttgctgcctttcccgggggtctgccccgctgacattctgtgcccgcctctcgccctgtctccccgtgcccatcgcaactgtcaggccctgcgggctcccgccgctgtcactcgcgcacaggttaccccgtggctccctttctcttcacttgctcatgccccagctcatgggaaacctgttttctgacctcacttcccctgctccagttctgccttgctcggattctctgaaatctgaccctttccaggggcactgtgacaagaagaagggaagaagcaaccttacccctgagcaggctcccgtcccgcccatgccctacccgtggcaggggccagggttctctgatggacggagccaactcgtccgtgtgcccttgggctactcatttttataacatggccccttttctgttcatcagcactggctgcagaaacttccttttgcaggtcccttgctacccatatgtgtgaagaaaagggggaaatgaaagccctagaacccacactgcagtgggcatgggatcatcctggaaccaggagaaacgaggttagggctaccaccttaaccgcccaggtgctggctctgcgtgaatatcttaggaaatgcaagctgaggacaggtacccatcccatcctttgctgagatttttgctagcacttccacggatttctgtcagtggtatagaaaaacttacagctggcccaatgggctctgcacaaagaggcttcccattaagagactctgctacctgggggagatggagaaagggtttgagacaagtgtccagatatgtagctagaggtaaagccttcagggaggatttgcacaggagctagagaaccagaaagatgggacgaagagggagaattagtgccctgtgtgttaaaagtggatacagagctggaattcagagaagagagctaaaatggaagtttcc

SEQ ID NO: 22827 - DNA, 901 bp, Artificial sequence
  DNA replication origin
tgtcagcggggcagacccccgggaaaggcagcaacccggaagacgcgccgatcctcctcccagcccctatgggtgaccgagcccccaccagccgccccgggaagccaggcgtccctccctccagccgcagctccctccggcccggctccactcacccccggtaggcttggcccgcggcccggtgcctccctcccgggcgccgcctgcccctcccctccgccctccgcttgcgtctgggagccggcggccggcggagccagcgacaggcggagacggcggcccggcaggcgcgggcggggcggggcgggcacaggaaatccccgcccgcttccggggctctgcggcggcggaggtgcggggagtgggagggagaggagtgggagggagaggagtgggagggagggagggagggagggacgggagggggcggggctgcggctcaggcgcccccaaacgcgaacccgggacctccgcgcccgccgctgtggggagggtgcggcccgagacgcttggagggcggcgggcgccggaatcgcagcctgctgtggccacttgcccgcactcttgcctgactgaccattttccgctctggctactgggcctcccacggagttctgtcctcagggttcgtcaattacctggaattgcgtaaccgcccgttacaggccagaccgaggccgagagcgatttctccagacaacagtctggaattcctcaaggagcgtaccctctagttttcacgataggataaagggcttgagagagcactgaggaggagtcacttattctgcctgaggggaagtcaggttgctatctgaagttggccttgcggctgctgtcccatttgcgggagccgtagccgcaggtgacacctgagctctcgaaatgtggctggtctgaa

SEQ ID NO: 22828 - DNA, 929 bp, Artificial sequence
  DNA replication origin
ccgtctgataagtgaggagcctctccgcctggcagccaccccatctgggaagtgaggagtgtctccgcccggcagccaccccgtccgggagggaggtgggggggtcagccccccgccaggtcagccgccccgtccgggaggtgaggggcgcctctgcctggccgcccctactgggaagtgaggagcccctctgcccggccagccaccccgtccgggagggaggtgggggggtcagccccccgcccggccagcagtcccgtccgggaggtgaggggcgcctctgcccggccgcccctactgggaagtgaggagcccctccgccgggccagctgccccgtccaggagggaggtgggggggtcggccacccgcccggccagccgccccgtccgggaggtgaggggcgcctctgcccggccgctcctactgggaagtgaggagtccctctgcccggccaccaccccgtctgggaggtgtgcccaacagctcattgagaacgggccaggatgacaatggcggctttgtggaatagaaaggggggaaaggtggggaaaagattgagaaatcggatggttgccgtgtctgtgtagaaagaagtagacatgggagacttttcattttgttctgtactaagaaaaattcttctgccttgggatcctgttgatctgtgaccttactcccaaccctgtgctcactgaaacatgtgctgtgtccactcagggttaaatggattaagggcggtgcaagatgtgctttgttaaacagatgcttgaaggcagcatgctcgttaagagtcatcaccactccctaatctcaagtacccagggacacaaacactgcagaaggccacagggtcctctgcctaggaaaaccagagacctttgttcacttgtttatctgctgaccttccctccactattgtcctgaccct

SEQ ID NO: 22829 - DNA, 1345 bp, Artificial sequence
  DNA replication origin
atttctcaatcttttccccacctttcccccctttctattccacaaagccgccattgtcatcctggcccgttctcaatgagctgttgggcacacctcccagacggggtggtggccgggcagagggactcctcacttcccagtaggagcggccgggcagaggcgcccctcacctcccggacggggcggctggccgggcgggtggccgacccccccacctccctcctggacggggcagctggcccggcggaggggctcctcacttcccagtaggggcggccgggcagaggcgcccctcacctcccggacgggactgctggccgggcggggggctgacccccccacctccctcccggacggggtggctggccgggcagaggggctcctcacttcccagtaggggcggccaggcagaggcgcccctcacctcccggacggggcggctgacctggcggggggctgacccccccacctccctcccggacggggtggctgccgggcggagacactcctcacttcccagatggggtggctgccaggcggagaggctcctcacttatcagacggggcggctgtcgggcggaggggctcctcacttctcagacggggcggttgccaggcagagggtctcctcacttctcagacagggcggccgggcagagacgctcctcacctccgagacagggtcgcggccgggcagaggcgctcctcacatcccagacagggtggcggggcagaggcgcgccccacatctcagacaatgggcggccgggcagagacgctcctcacttcctagatgtgatggcagccgggaagaggcgctcctcacttcctagatgggatggcggcagggcggagacgctcctcactttccagactgggcagccagggagaggggctcctcacatcccagacgatgggtggccaggcagagacgctcctcacttcccagacggggtggcggccgggcagaggctgcaatctccgcactttgggaggccaaggcaggaggctggaaggtggagattgtagcgagccaagatcacgccactgcactccagcctgggcaccattgagcactgagtgagcgagactccgtctgcaatcccggcacctcgggaggccgaggctggcggatcactcgtggttaggagctggagactggccggccaacacagcgaaaccccgtctccaccaaaaaaatacaaaaaccagtcaggcttggtagcgcgtgcctgcaatcgcaggcactcggcaggctgaggcaggagaatcaggcagggaggttgcagtgagccgagatggcagcagtacagtccagcttcggctcagcatgagagggagaccg

SEQ ID NO: 22830 - DNA, 856 bp, Artificial sequence
  DNA replication origin
cgccccgtctgggatgtgagaagcgcctctgcccggccacgaccctgtctgggaggtgaggagcgtctctgcccggccgcccagtctgagaagtgaggagcccctccgcccggcagctgccccgtctgagaagtgaggagcccctccacccagcagccgccccatccgagaggtgggggggcagcccccacctggccagccaccctgtccgggagggaggtgggggtcagactccacccagccagccgccccgtctgggagggaggcggggggtcagcccctggccggccagctgccccgtcagggagggaggtggggggtgcctctgcccagccactgccccgtccgggaggtggggggcacctctgcccggccgccccttctgggaagtgaggagcccctctgcctggccgcctccccgtctggggagtgtacccaacagctcattaaaaacgggccatgatgacgatggcagttttgtcaaatagaaaagggggaaatgtggggaaaagatagggaaatcagattgttgctgtgtctgtgtagaaagaagtagacataggagactccattttgttctgtactaagaaaaattcttctgccttgggatgctgttgatctatgaccttgcccccaacccggtgctctctgaaacatgtgctgtgtccactcagggttaaatggattaagggcggtgcaagatgtgctttgttaaacagatgcttgaaggcagcatgctcgttaagagtcatcaccactccctaatctcaagtacccagggacacaaacactgcggaaggccccagggtcctctgcctaggaaaatcagagacctttgttcacttgtttatctgct

SEQ ID NO: 22831 - DNA, 1146 bp, Artificial sequence
  DNA replication origin
tccccagacggggaggcggccaggcagaggggctcctcacttcccagaaggggcggccgggcagaggtgccccccacctcccggacggggcagtggctgggcagaggcaccccccacctccctccctgacggggcagctggccggccaggggctgaccccccgcctccctcccagacggggcggctggctgggtggagtctgacccccacctccctcccggacagggtggctggccaggtgggggctgcccccccacctctcggatggggcggctgctgggtggaggggctcctcacttctcagacggggcagctgccgggcggaggggctcctcacttctcagactgggcggccgggcagagacgctcctcacctcccagacagggtcgtggccgggcagaggcgcttctcacatcccagacggggcggcggggcagaggcgctcaccacatctcaaacgatgggcggccaggcagagacgctcctcacttcctagacaggatggcagccgggaagaggcactcctcacttcccagactgggcagccgggcagaggggctcctcacatcccagatgatgggcggccaggcagagacactcctcacttcccagactgggtggcggccgggcagaggctgcaatctccgcactttgggaagccaaggcaggaggctgggaggtggagattgtagcaagccgagatcacgccactgcactccagcctgggcaacattgagcactgagtgaacgagactccatctgcaatcccggcacctcaggaggccgaggctggcagatcactcccggttaggagctggagaccagcccggccaacacagcgaaaccccatctccatcaaaaaaatacgaaaaccaatcaggcgtggcggcgcgtgcctgcaatcgcaggcactgggcaggttgaggcaggagaatcaggcagggaggttgcagtgagcagagatggcggcagtacagtccagcttcggctcggctcggcatcagagggagaccgtggaaagagagggagagggagacggtggaaagagagggagagggagaccatggaaagagagggagagggagaccgtggaaagagagggagagggagaccgtggaaagagagggagagggagaccgtggaaa

SEQ ID NO: 22832 - DNA, 1236 bp, Artificial sequence
  DNA replication origin
tcttgtaccgcccttaatccatttaaccctgagtggacacagcacatgtttcagagagcacagggttgggggtaaggtcacagatcaacaggatcccaaggcagaagaatttttcttagtacagaacaaaatgaaaagtctcccatgtctacctctttctacacagacatggcaaccatccgatttctcaatcttttccccacctttcccccctttctattccacaaaaccgccattgtcatcacggcccgttctcaatgagctgttgggtacacctcccagatggggtggtggccgggcagaggggctcctcacctcccagcaggggcggccgggcagaggcgcccctcacctcccgggtggggcggctggccaggcggggggctgacccccccacctccctcccggacggggcggctggcctggtgggggctgaccccccacctccctcccggacggggtggctgccgggcggagacgctcctcacttcccagacggggtggctgccgggtggaggggctcctcacttctcagaaggggtggctgccgggcggaggggctcctcacttctcagacggggtggttgccgggcagagggtctcctcacttctcagacggggcggccgggcagaggcgctcctcacatcccagacggggcggcggggcagaggcgctccccacatctcagaggatgggcggccgggcagagaggctcctcacttcctagatgggatggcggccgggcagagacgctcctcactttccagactgggcagccaggcagagaggctcctcacatcccagatgatgggcggccaggcagagacgctcctcacttcccagacggggtggtggccgggcagaggctgcaatcttggcactttgggaggccaaggcaggtggctgggaggtggaggttgtagcgagccgagatcacgccactgcactccagcctgggcaccattgagcactgagtgaacgagactccgtctgcaatcccggcacctcgggaggccgaggctggcagatcactcgcggttaggagctggagaccagactggccaacacagcgaaaccccgtctccaccaaaaaaatacgaaaaccagtcaggtgtggtggcgcgcgcctgcaatcgcaggcactcggcaggctgaggcaggagaatcaggcagggaggttgcagtgagctgagatggcagcagtacagtccagcttcggcttgccatcagaggga

SEQ ID NO: 22833 - DNA, 906 bp, Artificial sequence
  DNA replication origin
gagcctctctgcctggctgcccagtctggaaagtgaggagcgtctctgcccggccgccatcccatctaggaagtgaggagcctctctgcccggccgcccatcctctgagatgtggggagcgcctctgccccgccgccccgtctgggatgtgaggagcgcctctgcccggccgccccgtctgagaagtgaggagaccctctgcccggcaaccaccccgtctgagaagtgaggagcccctccgcccggcagccaccccttctgagaagtgaggagcccctccacccggcagccaccccgtctgggaagtgaggagcgtctccgcccggcagccaccccgtccgggagggaggtggggggtcagcccccaccaggccagccgccccgtccgggagggaggtgggggggtcagccccccgcctggccagccgccccacccgggaggtgaggggcgcctctgcccggccgcccctgctgggaggtgaggagcccctctgcccggccaccaccccatctgggaggtgtacccaacagctcattgagaacgggccgtgatgacaatggcggttttgtggaatagaaaggggggaaaggtggggaaaagattgagaaatcggatggttgccatgtctgtgtagaaagaggtagacatgggagacttttcattttgttctgtactaagaaaaattcttctgccttgggatcctgttgatctgtgaccttacccccaaccctgtgctctctgaaacatgtgctgtgtccactcagggttaaatggattaagggcggtacaagatgtgctttgttaaacagatgcttgaaggcagcatgctcgttaagagtcatcaccactccctaatctcaagtacccagggacacaaacactgaggaaggccgcagggtcctctg

SEQ ID NO: 22834 - DNA, 947 bp, Artificial sequence
  DNA replication origin
gcggcccaggcaagggcaaggagctggggctgcgggcagtggccctgggcttcgaggataccgaggtgacaacgacagcgggcgggacggctgaggtggcgcccgacgcggtgcccaggagtgggcgatcctgctggcgccgtctggtgcaggtgttccagtcgaagcagttccgttcggccaagctggagcgcctgtaccagcggtacttcttccagatgaaccagagcagcctgacgctgctgatggcggtgctggtgctgctcacagcggtgctgctggctttccacgccgcacccgcccgccctcagcctgcctatgtggcactgttggcctgtgccgccgccctgttcgtggggctcatggtggtgtgtaaccggcatagcttccgccaggactccatgtgggtggtgagctacgtggtgctgggcatcctggcggcagtgcaggtcgggggcgctctcgcagcagacccgcgcagcccctctgcgggcctctggtgccctgtgttctttgtctacatcgcctacacgctcctccccatccgcatgcgggctgccgtcctcagcggcctgggcctctccaccttgcatttgatcttggcctggcaacttaaccgtggtgatgccttcctctggaagcaggtaggtggccagggaggtagggatggagggcagcaggtggggaatttctcacctcataagcaggtgggggcttagtgaggaagggcgggtgagtcatgggtggaagctgggtgcagggatgtctggctgtatctgggaggaggagcaggaggtgggaggctagggttgaggggtctgcctccatgtgggatctggggtagaggacactgctgaggggagggagggccccaggacccaagcctgaactctgtcaccatgggccccagtctccggctctttagcccgctgaaatagtgcagtctg

SEQ ID NO: 22835 - DNA, 3282 bp, Artificial sequence
  DNA replication origin
ggcggccggggtgaagggaaggggaccgggctgcgaggtcccctccccgcggggtcttgatcccagaacagtagctgcttgtcttcccaggactgggggaggaagcggccggaggagaggagggggcgcgcggagggaggggtcccattatttggcctcctccgcccctaccccgctgctaggaaggggagtgggcaactcggcccccacttctggggagggggagggggatgcccagacaaaaggagcttgtgcctttaaggcggggagtccgggagccagcggggaggggacttctggatccggggtagagggcggctgcgctggacagctcgggagggggcgagggccgggcggacggcggacggcggacggcgggcgggacggccaggacgcgcgggctcggaggaccgcgggacggccggccggccggccggagcccgcgggggcggcggggcgggggcccagggcaggcgcggagccgggccggcaggtgagcgcgctgagggctaggggaagtggccgctcgggctcccggtgcgccaggattggaacgcacccgagcggctctcgacaagagtttgtgggtgggggcgccgaagccttggacgggtcgtctcggcagtgttgcccgagggagttggggttggcaaagggaagtcatggaggcagtgggatcgaggactcctaggtccggcgctcgccacccccgtcgcccgccgcctgcctccctccacggggcgagttccaggctggcccggaggccaggaggatctggcacgtactgggggaggggctggcctgagttttttgctgcggggctgtggggtgtctccgagtttgggggagattccatttaggggagaggaaccggcctgggcagagggagggatgccctctgtctgcgggagtccctctccttcccctcacccaaaaccttgggaatgaaaggggtggggtcggctccccacatcccccaaggcctgccgcagggtgggcaggggagctgactttattcaaagcagactctggggctcgactgaaaggctagaggtggaatcaggcgtgggagcctctttgcccatatcctctccttaccagattacccctgtgagctggagggacctggtgggggttgcatagtaaagggtgatgtgggagccctctgtaatctttagggagagtgaggactggggatgggagaaggcggcagcgggcactggaccgacagatacaggccctgggtaggctcctctacatctggaaaggcccagaattgaagaattgaggcccatgtccgagtatggtgggtggtgctggcactgctgggccccgcctgggcagtgcctcttaccatgaactttctgaagtcgtttttaatcccctggagcctccttttgccaaggagggcaggggcagatgggccctggggatgggatagacaggaggtggccaggaaggcttggcaaggcagtgggcagagccatccttagggctgggccttggccttggctggttccaaactctggtctcagcctgatcagggtttgggagggacttgaggtctgggaggcactgagcctgggcctgccaggctgaatgggacatggctgtggctgtgggagccggtggtatgaagaacagcagatctgtgagagtgcaaatggaccaacactcaggggaggagaaggtagaggcacaaggcttaggagcctgactctggggaggagggaggtggtctgtgctcccagggctcatagtgatgggttgctggacaaagtgggttgggggaccatatagagaaattttgtggcttggaacagtgctctaccctgtttcctgccataccagtctggcatggggtgccagaaatgttgggaggccggcaagttctgcgggatgggcagtgcctggagtggagcccagggtgggatggttgcagttggttggacaattacatagctctgaagctatccccttggggggggtcagagtgttcctgggagggtcatgcattctcctggatagcatttgcccctttctctgtgagtatgagccagatgctaggatgtgtttccagggggcttggaacatggccagaaactagtcctttgggaacaggtccgggccagtgctggtgggggtggtgtgttgggggagataagaacagggaaggggactggtgaatggaggaggctgaagcaaaatgttgtgggtggtggatggtggtgggaaacctgctcactctgggctctgtctccagcagctctggggactgacagccaaggacacagggactgatagaaccaggcatctgactggctagaaagacgtgtgttcttgctcatgatttcctcatctttccatctcttgacgatgacagaggtttgggtttaaagtgttgtagagtgaggagaagaactaatatttttcaagtgtgtacttcttgacaggcattattagattctttcctgaggaccattatcatttccattttgcagatgaaggtactgacacagagaggttaaataacttgcccaaggcagtgtggctagcaaataatcacgctaaggtttggaaccctggtctcatgccaaagatcatgcttctaatgaagtattttgaagagcaaggctttctttggtgaccttttccaaatgccagcctgaccaaaagtcttgtattcctgatctgtccttccagatggtgctgttggtgatgttaagaggttgaaggggccaggcatggtggctcatgcctatactcccagcactttgggaggccgagacaggcagatcacctgaggttaggagttcgagaccagcctggccaacatggttaaaccctgtctgtactaaaaatacaaaatttagccgggtgtggtggtaggtgcttgtaatctcagctatggggaagccgaggcagaattgcttgaacccaggaggcagaggttgcagtgagctgagattgtgccactgcactccagcctaggtggggcagagtgagactccgtcttaaaccaaaaaacaaaaggaggttgaaggacgtgctgctctgtgggatataggagaaggggtgctgacagatcttggctgagggtgactcagggatgggaggtttggggtatgcagagaattccccagcctgccttctgcgtgtgggtccctgggtgtctgcttcaagcgctgcccatctggcttgagctctcattctatggccacctggggcaagtgctgagtattcctccatcctgtccccgagtgagtacaaatgtcagtgctg

SEQ ID NO: 22836 - DNA, 1181 bp, Artificial sequence
  DNA replication origin
tggaaggaggagctagaggtctgactgagggaatggagagggggcctcaaaaggaagccaggcaggctgccttcttcccagctccagaatggcaccccctctaaagtcacactcacctacgtacatcctggagtgaaactccttctcctttctgcttccaccattactctaatcctcaaagggttaaccagctttcacacgattttcccatctcccaggtaacttgggcagctgctccgtgctggaaataactaaagacccagtttctcagttcgtgcacttagcaatgcaccccagtagcccctccaacccccagcagagaagcacagccctttgggtaaaagatgcctgggggtgaggctgcaagttggcaggtgcgggggaggggctcccagagagtagggcggggggttgtgggggcggcagggagagtgccccttccctgggtccctccactgggccccgaggttcgcctcggggccgctgccccagagactggggggaagaggaaagaagtggtgtgcgggcaagcaggccgcacacacctggcgccttgtggaatgagagcttaattaattattaaactgagttcccgcgggagggcgcagggccgtgacaggcagggcgggaatggctaggtgggggctggggctggggcaggggcagggaggaattggggatgaagagtgggcgcggggcgccggcccaacccctgggaccctgacaggaaggaaggcgaccctcggtgggcggggcgggggatgtagccgtgaggggtgggtttgcgggcgcgctcggggacccccggggtgagggcgggagaggaatgccggaggaggcggccggggtgaagggaaggggaccgggctgcgaggtcccctccccgcggggtcttgatcccagaacagtagctgcttgtcttcccaggactgggggaggaagcggccggaggagaggagggggcgcgcggagggaggggtcccattatttggcctcctccgcccctaccccgctgctaggaaggggagtgggcaactcggcccccacttctggggagggggagggggatgcccagacaaaaggagcttgtgcctttaaggcggggagtccgggagccagcggggaggggacttctggatccggggtagagggcggctgcgctggacagctcgggagggggc

SEQ ID NO: 22837 - DNA, 1376 bp, Artificial sequence
  DNA replication origin
ccgcactgcgacctaggcgacagagtgagactccgtctcaaaaataaataaataaataaataaaaataaagtggaaggtggagagatggtttctatgctatagtttcaggcagagaatgtggagggagggaaggagagaaggttgcgggaagccagggacaactgcttgcctgggccaacatcccctctctccccacctcccttctcctatggaaacttaagctgccgcagggcccagcggagctagtccattagctgtggtcagcaggggagtgtaggtggggagggccctctctccctccaggtcttcttgccaaatgaaaggcaaagcgtttgctccctctactagagtcaaaacaaaacaaaaccataaaaacctccacacgcatttttaacacacacaaataacataacttctttcctctgaatggtcgaagctgagcaacttggaggtgggtgggtggtaggggctccgtgacccactagactagactacagagggagtgggggaggaggtgccttctcaaagcactttccaggttaaatccagcctcgggaggagggagtggagagagaatttactctcccccaacttacctccctcagaaatgggggcaagtggagggtcagctgagcagagagggaggaacagtctcccgagatcccggggatgggaggattgaggggaggggtcccggaaactcccaggggaagtgggttaaaagaagggccgggaagaagggtgggacgccctccactggaaaggggagagcgttctagttaatgctgaggggaagttggggacctgggtcaatcggagtcagcgtgtgtctgtctccatgaaggggggtccgtctctccccgccccaggcgccgtctttggtctggagaagggtccagcctggggtcgttgggggtgtgaagggaccaatgagcggtctgtccgctcagaagggtccagagagagagccaactggaactacacccccgctcccccttcccccgccagaacttgggcttgtcctgtttgacgcacccgcagaaaggggcgggaggggtactgacccgaggagcggtcccgcgactctgtactccctgctgcccagtcccggccaggacgctgcccggcttagctggggcgcccctcgagaccaggatggaggtagggacgggctagggtcccggaagggcgcgggtgtctcgaaggagccccacggggtgggaataagtagagcgcagcctggggtctcctactgggggtctcgagctgggactgcagttcctggagaaaggagggggagaggggttcgtcctgggcttgggcggtgtctggatccggggtgcgtcccccctgctctggcctgggcagcgccgcc

SEQ ID NO: 22838 - DNA, 794 bp, Artificial sequence
  DNA replication origin
cctgggcagcgccgcctgctggcagggccggaccctgcggccccgggaccggacaccaggcggtgccgccacctggagggcgcgtgtagccgccgggccagcgagcccaaggggcgctgcagcgggtcgagaaggagccgcgtcgcttcgcctcgcccttccccttcgcggagctgagacccgctgcaccagaacccaggagaggggggagacggcagagactccgcgggcgcggggcgatcccagctgggctctctccacagggatgccgatccctctggagacacagagccgagccggggacgggtggatgggcgccttgacgcttgggcgggcgagcagagcaccagcactcttgcttttcggtcctttcccccgccgaggtcggggtcgcagccgccgccggaggatgggcggccggcgcacggagcagggccgggagggagcagaagcttccgccaagagctcaggagctggggcagccctggagctcttcctgcccttctgcccgcggcggcggaaactccagagtccctactctttctcgggaggactttagggaagaagcagagcggcaggggaagccgaggagcgagggtgcgacgtggggatggaaggacagtgggaggcacacggaaaaacagaacgaggaccttagacaggagagacggaagtggagagaggctgggctgaaaggcagggagagccagagactgacagaggcggcgagaaaggaagggagagggagggagggaggagggaggagaaagagggagggaaccaggggagaggga

SEQ ID NO: 22839 - DNA, 1921 bp, Artificial sequence
  DNA replication origin
aggatgggcggccggcgcacggagcagggccgggagggagcagaagcttccgccaagagctcaggagctggggcagccctggagctcttcctgcccttctgcccgcggcggcggaaactccagagtccctactctttctcgggaggactttagggaagaagcagagcggcaggggaagccgaggagcgagggtgcgacgtggggatggaaggacagtgggaggcacacggaaaaacagaacgaggaccttagacaggagagacggaagtggagagaggctgggctgaaaggcagggagagccagagactgacagaggcggcgagaaaggaagggagagggagggagggaggagggaggagaaagagggagggaaccaggggagagggaagggagcaggcggcggagcccggcgggcgtggggcgaggccaggcgtgcaggcgggagcagcgtgcagagcagcggccgggttttgctcccgcctcggagcccctggcccgggggagggggagaggccgctagcctggtctatgtctttttctgactccagtgcaaccttcctgctgaacgaggtaaccgtggggggggtgtggggtcgtgggaagggggttccccactgggtgggaggagagctccgctccaagctaggaagggggcacgcgtttgggggagactgcaccgatggggaggcagggaaaccggaggaagtgaggccaggggtggaagaggcaccgggttagagaggagggagcggccagagctggcagcttcctagtactgggattggatgagaggagaggactgactgaggagccagaaaaaaaggggctagattacaagaagggctctgccaagctcccctagcgcctgtccctgagttccctggcagcctagcagccagaatggtaggggcctccacctggtccagatcttaaaaactgctggggaggagtctttaagtcttcccagaaggcctagcttctgtctcagtttccccattcagtgcccagggactgggatctgcccagcttcctggtacacttagaggagaagctagaatatattctgaaacctcccaagaaggtttcaatatattccagctcccaaacctgattattcaggcttttcctcttatgtcttgcttctatgacttgggtacctgccagctgccagtctaacaactctctcctagaaagaatcagcaggaggagcctctcccctgatcctttattgccctcagctctctccctttatgcccagccatgaaaaagaaaagaggttagggctacatggacactgacaggcacatgtcctgtcacaggacaagaagtcaccaagttggtattagaactagagtaggcaggtgtgggtgagaaatgaaaggaacattgggtagcaacccagagatatgagaagaaggagggaagctctgaagctactgcaggacccaggggatgggcccaggtatgaggagcttgaacccatctcctggggatggttggcatggcaacacatgcctcaggagcagacttagacaaccttgtcgcaggagattacaaggagtgtgaggaaggagtgctgccgatggcagatccgctgttacctacagccccaggaccttctgtgggtggagagagtcccaaaaggagaggccaggagagtggatgcagggatgggaagagaaacagctgcctccaccactgctttcttcactagagccatctcccaggagaagagcaccttgagggtcttactctttgacacctctccaggcccctgaaagaaggaattgaagagaaaggatgaaagagggggatacaaggaatactgcgtaactgggtgagggcacaaaagtgggcagtgtctgggaacttccaatacagaagaatccagtatatgaccaaaccccagttggtgctgga

SEQ ID NO: 22840 - DNA, 1711 bp, Artificial sequence
  DNA replication origin
cccaacttccccgcccccaccctcatcgtgggcactcaccgcctccgagtcctcaaacccgggcacgtaggagtcgtcatacatgggggagtccgggtcgggggagcgagcggcgccgggggcgggagcggcccggaggcaggggcaaggactgcgggccgcgcccgggagatgccaccgagccccgcagccctgcgggcggcggcagggagcgagagagcgcgaaggagggagcgagccgcgaagaccagctgctcggagctcagatcaccgctccccccaccccacccccccaaacccagccggtcccaccccgagcgcggctgaggaatctggcgccggctcctacaacaatagtgcccgcccacctgaccccctccccgggagaaggcgggggcggcgagggggcggcggccaccggggagcccgggccaggccgggagaggggaacgaacccgtgctaggtggaaggtgggtccccgagcacctacggggccgtggcggcggggaggaaggggaggagaggctgcgggcagggcggatccaggcagggaggaggcggggcgaggagagatgcggagacagagacgctcggcaacccaggaactactccgccgggaaacaaagggctgcggcgggggagggagggggcgctgagaccgcgagggagacgcgacccgggcggagactggagagggcgcaggtgtcgaggaaaccggagagagagaggcagagggaggacggagaggacaggaaaatggggagaccgtgggagacagaagaggcgcgggaacgagcggcagacgggggaggggtcccaggcgacagcagggcgggtctgggcccgtgcgtcccggaggctccgaaagcaaaccccgcagtggtcccggggaggaatgggcttggtgcccccaggctaatgacaggacggcagctcctgccccaacaggtgcccggccccctcagtacggggacgctgcggcaaaggcggtgttgcccaacccttgagaaggggggaactttccgtgagctgggtaggcctccccacacctgttgcacggatagattttgtcttagtcctgccaggatgggggttcccttccccacttccctgccaaggattgtgccagacagtgccaaggcatccgtgggaactggggcagaaaggggctgttttaggtgagcctaaagggaaggggaaagaagccagagggtggaggtagggggatagttgtgggtgggatcctggctacactcgggttgggagaggaaagggccagtctcctcggagtcactagggtaaggccagattctccccttagcagaagggcttgtaccactctgcaccactcagtctcctttacaggagcattgagatttggggtaagagagccgcagcccttatcttgaggaaactttccccaaagatccacccatttgagctctttccttttttcatctcctgagcaaaattccttctttgatttttgactgcctacctttgtgccccacgaggaggatgtgcgtagacaggggttacacttggaggcctcctggtgcccatgctcttggccctgagctcagtccttttccttcccaatttctcacacccgggagttcagcaatctgctcatccctccttggcttgaggagaatcagaaatccaaaactctgacatggcttagtaagatctatggtagaaagcactgtg

SEQ ID NO: 22841 - DNA, 969 bp, Artificial sequence
  DNA replication origin
cccggtggccgccgccccctcgccgcccccgccttctcccggggagggggtcaggtgggcgggcactattgttgtaggagccggcgccagattcctcagccgcgctcggggtgggaccggctgggtttgggggggtggggtggggggagcggtgatctgagctccgagcagctggtcttcgcggctcgctccctccttcgcgctctctcgctccctgccgccgcccgcagggctgcggggctcggtggcatctcccgggcgcggcccgcagtccttgcccctgcctccgggccgctcccgcccccggcgccgctcgctcccccgacccggactcccccatgtatgacgactcctacgtgcccgggtttgaggactcggaggcggtgagtgcccacgatgagggtgggggcggggaagttggggtgacacctcctctcccttcaaccctttccccggttcaggactttgaaaaacgcctcagtggcagggcagggtttgtaggggggcgctctaagaacgtggggagatggattttcatgccaagcgttccccagcgacccagactcagaccctggggcatcgggtgtgtgcagagagggggcagtataggggaagggctcaagcaggtggctccacggcccaggaaagaggggtgggagaaggcagggctggaggccgagggcacagaggctctggagagggaacacgccatgtctggagttccaaattctggatttctggggtctgaacacaacagctaggagagccgccgaggtggttggggaggcagacattctagacctcttgtgcctcaagcaaacgacacatcagggagctgagaggacatcagggagccaggggccaacctcttcagacagacggatcctaaaacttgaggagctccattattcccttccaccccctccatctctgcgcattgcctcatctcctcaccctttctctagccca

SEQ ID NO: 22842 - DNA, 1824 bp, Artificial sequence
  DNA replication origin
ggggctcctcacttcccagtaggggcggccgggcagaggcgcccctcacctcctggacggggcggctggccgggcggggggctgacccccccacctccctcccggacggggcggctggccgggcggggggctgacccccccaccttcctcccggacggggtggctggccgggcggggggctgacccccctacctccctcccggatggggcggctggccgggcggggggctgacctcccccacctccttcccggacggggcggctgactgggcagagaggctcctcacttcccagtaggggcggccgggcagaggcgcccctcacctcccggacagggcggctggccgggccgggggctgacccccccacctccctcccggatgggcggctggccgggtggggggatgacccccccacctccctcctggacggggcggctggccgggtggggagctaaccccccccacctccctcccggacggggtggctgccgggcggagacgctcctcacttcccagacggggtggctgccaggcggaggggctcctcacttctcagacgatgtggctgccgggcggaggggctcctcacttctcagacggggcggttgtcaggcagagggtctcctcacttctcagacggggcggccgggcagagacgctcctcacatcccagacggggcggcagggcagaggcgctccccacatctcagacgatgggcggcctggcagagacgctcctcacttcctagatgggatggcggccgggcagaggctgcaatctcggcactttggggggccaaggcaggcagctgggaggtggaggttgtagcgagccaagatcacgccactgcactccagcctgggcaccattgagcactgagtgaacgcgactccgtgtgccatcccggcacctcgggaggccgaggctggcggatcactcgcggtcaggagctggagaccagcccggccaacacagcgaaaccccgtctccaccaaaaaaatacgaaaaccagtcaggcgtggcggcgcacgcctgcaatcgcaggcactcggcaggctgaggcacgagaatcaggcagggaggttgcagtgagccgagatggcagcagtacggtccagctttggctcagcatcagagggagaccatggaaagagagggagagggagaccgtggggagaggggagaggggagagggagcctgaagcttttctatctatggattcttctctgaatctttgggggtttttttgagatggagtttttgttctgttgcccaggctggagtgcaatggcacgatctcggctcactgcaacctctgcctcttgggttcaggcaattttcctgcctcagcctcccaagtagctgggaatacaggcatgcgccaccatgcctggctaatttttgtatttttagtagagacagggtttctccatgttggccaggctggtctcgaactcttgaccttaggtgatccggccacctcggcctctcaaagtgctgggattacaggcgtgagccattgtgcctggcctgtatacagagttcttatcaggccctgaaagtataggttagaattcaaggcagaggacagaatgctcctaacagaaactcagtggggttgtttgaattatcttgtagattaagcttagagcaggtatggggaaaggattgttgggattgataggaatgaaaaatgatgagggaatatagatagcagtatcttcttggcttgtggtggtggccatgtaggctaaattcattgtatattaaagagttaaggagggccaggcgctgtggctcacacctgtaatcctagcact

SEQ ID NO: 22843 - DNA, 1032 bp, Artificial sequence
  DNA replication origin
ggggggtcatccccccacccggccagccgcccatccgggagggaggtgggggggtcagcccccggcccggccagccgccctgtccgggaggtgaggggcgcctctgcccggccgcccctactgggaagtgaggagcctctctgcccagtcagccgccccgtccgggaaggaggtgggggaggtcagccccccgcccggccagccgccccatccgggagggaggtaggggggtcagccccccgcccggccagccaccccgtccgggaggaaggtgggggggtcagccccccgcccggccagccgccccgtccgggagggaggtgggggggtcagccccccgcccggccagccgccccgtccaggaggtgaggggcgcctctgcccggccgcccctactgggaagtgaggagcccctctgcccggccagccgccccgtccgggagggaggtgggggggtcagccccccgcccggccagccgccccgtccaggaggtgaggggcgcctctgcccggccgcccctactgggaagtgaggagcccctctgcccgcccaccaccccgtctgggaggtgtactcaacagctcattgagaacggaccatgatgacagtggcggttttgtggaatagaaaggcgggaaaggtggggaaaagattgagaaatcggatggttgccgtgtctgtgtagaaagaggtagacatgggagacttttcattttgttctgtactaagaaaaattcttctgccttgggatcctgttgatctgtgaccttacccccaaccctgtgctctctgaaacatgtgctgtgtccactcagggttgaatggattaagggtggtgcaagatgtgctttgttaaacagatgcttgaaggcagcatgctcgttaagagtcatcaccactccctaatctcaagtacccagggacacaaacactgcggaaggccgcagggtcctctgcctaggaaaaccagagacctttgttcacttgtttatctgctgaccttccctccactattgtcctgtgaccctgcc

SEQ ID NO: 22844 - DNA, 974 bp, Artificial sequence
  DNA replication origin
gtgaggagcccctctgcctggctgcccagtctggaaagtgaggagcgtctctgcctggccgccatcccatctgggaagtgaggagcgcctcttcccggccgccatcacatctaggaagtgaggagcgtctctgcccggccgcccatcgtctgggatgtggggagtgcctctgccccgccgccctgtctgggatgtgaggagcgcctctgcccggccgccaccccgtctgggaggtgaggagcgtctctgcccagccgccccgtctgagaagtgaggagaccctccgcccggcagctgccccgtctgagaagtgaggagcctctccgcccggcagccaccccgtccgggagggaggtgggggggtcagccccccgcccggccagccgccccatccgggaggtgaggggtgcctctgcccggccgcccctactgggaagtgaggagcccctctgcccggccgcccctactgggaagtgaggagcccctctgcccggccaccaccccgtctgggaggtgtgcccaacagctcattgagaacgggccaggatgacaatggcggctttgcggaatagaaaggggggaaaggtggggaaaagattgagaaatcggatggttgccgtgtctgtgtagaaagaagtagacatgggagacttttcattttgttctgtactaagaaaaattcttctgccttgggatcctgttgatctgtgaccttacccccaaccctgtgctctctgaaacatgtgctgtgtccactcagagttaagtggattaagggcggtgcaagatgtgctttgttaaacagatgcttgaaggcagcatgctcattaagagtcatcaccactccctaatctcaagtacccagggacacaaacgctgtggaaggccgcagggtcctctgcctaggaaaaccagagacctttgttcacttgtttatctgctgaccttccctccactattgtcctgtgaccctg

SEQ ID NO: 22845 - DNA, 1249 bp, Artificial sequence
  DNA replication origin
ttcaagcatctgtttaacaaagcacatcttgcaccgcccttaatccacttaactctgagtggacacagcacatgtttcagagagcacagggttgggggtaaggtcacagatcaacaggatcccaaggcagaagaatttttcttagtacagaacaaaatgaaaagtctcccatgtctacttctttctacacagacacggcaaccatccgatttctcaatcttttccccacctttcccccctttctattccgcaaagccgccattgtcatcctggcccgttctcaatgagctgttgggcacacctcccagacggggtggtggccgggcagaggggctcctcacttcccagtaggggcggccgggcagaggggctcctcacttcccagtaggggcggccgggcagaggcacccctcacctcccggatggggcggctggccgggcggggggctgacccccccacctccctcccggacggggtggctgccgggcggagaggctcctcacttctcagacggggcagctgccgggcggagggtctcctcacttctcagacggggcggctgggcagagacgctcctcacctcccagacggggtggcggccgggcagaggcgctcctcacatcccagacagggcggcggggcagaggcactccccacatcccagacgatgggcggccgggcagagacgctcctcacttcctagatgtgatggcggccgggaagaggcgctcctcacttcccagatgggatggcggccaggcagagacgctcctcactttccagactgggcagccaggcagaggggctcctcacatcccagacgatgggcggccaggcagagacgctcctcacttcccagacggggtggcggccgggcagaggctgcaatctcggcacttcgggaggccaaggcaggcggctgggaggtggaggttgtagcgagccgagatcacgccactgcactccagcctgggcgccattgagcactgagtgaaccagactccgtctgcaatcccggcacctcgggaggccgaggctggcggatcactcgcggttaggagctggagaccagcccggccaacacagcgaaaccccgtctccaccaaaaaaatacgaaaaccagtcaggcgtggaggcgcgcgcctgcaatcgcaggcactcggcaggctgaggcaggagaatcaggcagggaggttgcagtgagccgagatggcagcagtatagtccagcttcggctcggcatgagag

SEQ ID NO: 22846 - DNA, 2069 bp, Artificial sequence
  DNA replication origin
tgcagccgctgccatggtgatgggtctcgcgagaactgccgctagctaccgcgcagctatcgcgcgatcggggaggtgggaagtatcccgggctgggggtgggggtacgccgcacagctccagtcgccgtcgcggcttccggtgctaggtggagggaaggaaggagggagccggggagtgggccagggcagcagccgggctgaagtcggcttggggagccagagggagcggagcggaacctgcggggcagaggcggcggccgcagcggcgcagctgatagcaggaacaggtgagaggctgggaagggaaggcgggtcccggtagagaagaggctcggtcagggtgagggctgaggagatagagcgcctcccgggccccgcccggcactgcttggcgtggggcggtgggattcttcccacccgagagctcagagagggtgcgtcgggccagcttcacgcctgcccccgcatttgaaggacgcagagctggggtgggggtggggggcgcacacggatttgtcctccgcctcgctcaagggggcgacctgggctgcagttaggttgtcgcctgcaggaggtgtgctgttgagggagaggaaaaccgtccgaggagaggtgatgagggggcggtgatggctgtttgtatcttttctgttaaagggctagggaatgctgctttcttctactccctctccctcccccaccttagcaataggagacgggagagaagccttgctgtggttacaccccctcccccatcatagggcaggggtgcgtaggggggttgggggttagccaacagggcaggctgctggggcaccacatgggcgctattgtggtagaggttgcgctttcgagtctagggaaccgcaggttgggaagagggcagcaagtggggagagggtggagaggaggcaggagaaggaggagggggatctgatcttcctgggagaagagaggtggggccttcctccccaggcggagcgggggcggtctcacaggaggagggagcatcttgtcactggccctcagtttgtgtcttccaatccgctttctttctttaggaagtaccaggattcccggaacagaaaatggagccattgcttacgcgaatcgtttgagggaaggggcgggagttggggaggtggagttccctgttaaaacgggccacttgattagcaaagtggtagctgttattttgggggaattcccgtcttgattgcattaaggcgggtctccatctttccaggccaggaggaatgtggtggtggaggtggaggattgtggtatgtggtcaggagtgagaagaaatagtaaggccgtcccggtgagggagaaatgtaacctaaaacctgtctctgctgttgttggattgggtcacccctggtctatggcatgaaagttttattgggaggagatctgctgcaagagtctgattgcttgggtcagtgcaacaggacagaatctagtcgctgcatacctccttccctgtcctcaatcaggtaggtagtaacagtctttgctgctattttgtcttgggcttgttgttggggtaggtgtttccacttgccgtgacttgggacatgggacagtgttatgggacagtggattatcatagcccattggacttgagtttgaaaaacatgtctgtaaaagttcattctaagaaagaaactaatccattaaggttcagcttttcaccgaatgaatgattgaccttggattcagccaggaaaggctcccatgtatcacatattcacatgcgtcctgtttcccagcatagaattattaccttgcatagttagaatttttatagttgtctatcttgcttttccaaagagactagacgcttttcgactgcaggaactggatttcgtctcctcttccacaatgcccatgcaaacagtaggtacccatgatgaatttagaatgtaaatagatagaactcaacaagctttctaactgtagtttaaggaaagggcaagagatggcttggctgtcagcagaagtgcctggaaatagcttagcaagggtacaaagacccttagcctttgtaattaagaagttttt

SEQ ID NO: 22847 - DNA, 1912 bp, Artificial sequence
  DNA replication origin
ccttgtctcccaggccatagaaacaccgacccggggtggggagagttggaggggtctggaccgcagaccccagacgccttcttggttcccagggctctaagcaatgagattctgggcctgaagttgcctggcgagccgccgctgacggccaacaccgtgtgcttgacgctgtccggcctgagcaagcggcagctaggcctgtgcctgcgcaaccccgacgtgacggcgtccgcgcttcagggtctgcacatcgcggtccacgagtgtcagcaccagctgcgcgaccagcgctggaactgctccgcgcttgagggcggcggccgcctgccgcaccacagcgccatcctcaagcgcggtgagcctggctgggcgggtcggcgctgccgcggaggctagggggtgggcggcagggcgaggcgcgcggaggcgggaagggatggtttcgcggctccgggaggggcctctcctggaattccccgccccccccggagccgctctgagccaggtctggccactcgtctgggcccctgcgcgcctaacttccacctgcgtgctgccagcgaggcagctgggtccctgctctcctaccctagggcccccctttcctgcctccgctcagcttaatctgggttgcacctgtgaacaagagatgcccccagtcctggaagcttcaaacgcccccctattccctccaccattttctctccccccatcttggctggacaagcccaggctggtgtccccagtgtctcagcgggggtggggtgacgcccccaaccgtttaagggttaaatctgctcccctaattgctggggttcccaggagccaaagctgggaacaaagaccctgatgactttgaagctggggagccagtcccctcctctgtgctgtgggggctccaggtgttgctcacctgagcaggtgaagaacggctggagaggcagagaacaggtcactgctggcctggtctgggaggcatggctgcctctcctggtttcccactggagttcactccctgaggtgtaaagacccatgggggctcagcccagagatgggggcagtgctctggggactatggggttaataggcagctgccatctgcaggggaattcccaagacttgtgcaaacagcttcacccctggagggttggagttagggggatcagaaggctggcccaggagccctagatcctggggtagcagaggcctggtctctaagcgggtgctgtctctcgtcttctcagggctccggagagcccctgcctaaaatgaagtgagggtccccctccttccccacagggcctggtgtaggggaaggcttggacacccaaatggtgagcatgtttatttaagtctgggaaaggcttggcagcctgagcttctgtgacccccaaaacataacaaagaagccaaccttttaagagggccttagggaaaatcactccccaacctctctcctcctctcagtgttttatagggtaatagcaggttaggataaacataaaaagggcagtcttgaagggcaaatataaaactacatcttgggaagcggaagggcagctccatagctccagtgctttgggggtgctaggatggtggtaggtaggttggttaaaagactgattaaccctgaagtgaatttaaaaaaaaaaaaacaaaaaaacagaaccacaaaggctctgctcccacctcacccacccaagctccctgcagggttgggggaatttctaaggctttcagatgtagaactcggttgtacacatcttcaaagacctcagggactccctcttagtcatctcccgactccaggggtctctccctgtgggctagctctttcatctacacctgaaaatcacagacttacagaatgagaatgggcctcagagatcatcttgacccatcgtctcctgcc

SEQ ID NO: 22848 - DNA, 1542 bp, Artificial sequence
  DNA replication origin
gagaaactgacgcaaagaggagtgatgaaagatgtggccatctgggccccattctggctccctaggaaggttactacaccctccctgcagccttggcgaccccagatcaggtgagaggaactctggccacctccttcttcagtggggccaagcctgaacccaggcgtcgggggagagggtgtgtgagagagagagagtgtgtgtgtgtgtgtgtgtgtgtgtgtgtgtgtgtgcgcgcgcgcgcgcgcgcgcgcgcgctgggaggagggggaggctgcattcgcctggtcaaggctgggagtggagggtagggtggggaagccccaggctcggggaggggctgcagctccgtcagcccggcagagccaccctgagctcggtgagagcaaagccagagcccccagtcctttgctcgccggcttgctagctctctcgatcactccctcccttcctccctcccttcctcccggcggccgcggcggcgctggggaagcggtgaagaggagtggcccggccctggaagaatgcggctctgacaaggggacagaacccagcgcagtctccccacggtttaagcagcactagtgaagcccaggcaacccaaccgtgcctgtctcggaccccgcacccaaaccactggaggtaattagacctgggaaagcagggagggcagggacgtgcacacgaggaagagacaggcacgtgtgtagtcagacagacagacagacacgcatccacccacagaagcacagagacgcatagagagccagagatattgctagagataaagacacagagaataaaggagtgcccccagatttagaatgcaatgaatgtgagagccaaggggtgaggaccagacgggcgactatggaggaggggagcttgtagttaggcaaggtgggggatagggaagaggactcagtctgtgccacggtcccttttaggagggagccaggctctcctccccatctttcctgcacctggagcctctcctctttccttgctgctcagggagggggcagtgtgagtggggaactcattcttagacctttctcatggagcctacttgcccttgatgacacctggaggtgacacccccttaggtggtggggaacctcctccctatccctctccctagccctgtgagggcggggaagctagtcgtggggccctggaaaagggagcagtaggcgaggttgtggagcaagtgtttgtgagtctgtgtgtctgagtttgcaagtgagtgtgtgtctgtgtgccgggcgttgtgtctgattgggcaaggttccaggggtgctcgcttgagtcctgagctgggacaacgccttgactcttcttctttaagacctccaagcctcagggactctgggaatcaaggggtgtttcttcttgttttgtttgaggaggaatgagaagggtcagtagggtggcaccggtgggttaggagcccgaagaagggcgtcacttggttccccaagcgagccgccctattcctgaacccgcatcaagtctcccgtcccgcaggtcctgatcgatctg

SEQ ID NO: 22849 - DNA, 1585 bp, Artificial sequence
  DNA replication origin
tcgcagtctggctttaacaaccctgggggcgggcggcggacagcatggctcgcggtcccggctggtgggctgaggcggccacggcgggcggcaccgcctcttatagttgcggcgctggctgaagtgacgggaggaggctgcccctccgggccgcactgtggcaccagggcgcaccggttaggggcgcagacaatgggcagcgagcggggctgtggttcccgcccgtctgagccgagagctgacgggttggccgtcggggctcacccccgccccctgcccggtggcccccgcctccgggcctgcactggccgcggacccctccccttgggacaccctcccacgcgcgcccgcctcactcagctgagcgtccggagcccgtcgaggactagcatccgccagggggcgcggcgagagtgtgctgcggggagagcccgccaggggcccagcccgcctcgccgcccgcggtggggttgtcccctcgacgtcaccccgggcccctccgacgtcccctctctcccccatcctgagtgtcggaaggaaagctgtggttctgggcagcgactccggggagatgcttaaccgcccaggaacccccgatggctggacagagaaggaaaaaggggagacgggggcgtgagtgcggctgtggtcagggaaatcccggggatgagttgtgggggtgagctaaccaaaaggagcctagcggtggagagaaacctaaagcaacaggcagtttgctcatgtgcgccagaagaagcgcacaagtggctgtgtgtgtgtgtgtgtgtgtgtgtgtgtgtgaagtggaacaacgtgaatatgggtgggagtgagaatgtgctgtgttctgagggtgcatcctcctgtgtgttggtacgtgcagaaactccttgttctgacgaaggatgttaggaaactttccaaagaattttggaatttagctcaagtcagaaaaggtcatggagtcaccttgtcacagtcaccgcctggggcagtgtgtcaggaaggaggtggcaactgtcgacaggagactcagaagcatgattgagggatgcagagtgtctggactgtgtgtggagtgggtggatgagcatgtgcatgggaagattaaatatgtgtgtatgcgtcattctgttgccctttgtacctcgtggcatcctatggcgtgtcacactgtggtatgtgtcaaccagtgcatgtcattgggggagagagccgagcctacaaccaagatggtattgaggtgaacccagcctggagtggctaagtctctgaggcctaggctcagaaaggatgggaaatggtgcggatgtccactgtatgtatggtgatggagaggactgggaagacaagggttgctggctacattgaacctagatgaggaaacttgtgcctccatgtgtttgcttctctttggatgtttctgccaagtttctgtctttccctaaagctctagttcccaccacactgggatacccagagtgcctgtgaccatctcatccattgtacacttttctcttctctcccagggactcctactcagcttcaaggccatttaggcctcctattgaagaagtgacaggct

SEQ ID NO: 22850 - DNA, 1759 bp, Artificial sequence
  DNA replication origin
gtttctcgacagcctgtgggagaagggagcggggatcagcgagggggtacgcggggcgcggccagcaccctcatgaagggcttgggaccggaatcccacccccgactccgcactttgagtcctgagagccagggccggcagtgctggaaagctggtctctagggctagtagagaaagcaggtgcgtgggcacgcagccacgtccacgggcgtaatcacaccttactgggagattctagggcgcattttggctcgatagcggaagtggagcagccccagagagacaaaccgaagagaggggagcggaagaaccatacatccccaagacttcttcgcagcccaaaactttcggcccattttggcggtgcaagccttgctgggcgagaggccagacacacgcctgcagagagcagcttcccaggcgcttttgagagaggctgggggaaagcggcggtcagccggcgtccgcgacccgaaactttctttatctggggcagtagctcagaaaagttaagcttcgtttccagggtgcacggctggaaaacgcctggtagaagtctggccccgagctggcgctgggcacgaggcacttggcaaggttgattgtgtgaccctccaggcgcctgggacaccttctctgaactcgcccgcccatgccctgggggtgaccccgcgtttcccctgctcccggaagcgtcgccttcctgggcacccacctcggttgacgatcttgccgaagaggtggggccctggagcagtgggacagttccagcggcgattccggaactgccacttgcactcgcgcacggcactctgcagccccccactcacgctgtgcaggatccccggattttggcgtatcagacgccgctgtttgcggctcaacagctgcagactgggctcgagtaccagttgcagactcttggagtctgtaagcaggttcgtggaggaggctacgttcacaatacccctggtgggacgtatgatagctcaggctcaggaaggggatccgcaccctaaccataaaaactgtgccacccggtcctcttcctgggggtatgtggctggagagaatggcgggagattaataatacccgctctcccaggctcactaatttgaaagaactgggcgtccagacttgtgtgtgcccagtagtcccagggctgctcgcctgagccctaggtccggagactggacagaggaggtacccggagaccgagtgtctaccttggatctccgagcctcttccggtcagcctgagcgagataatcatggcctgcagttcttgcccacccaaggcgtgaaatgcttaggagtcccaccctcttctcccctcctttctaggcgaactcctggcccttcacttcccgaggtggggaaacctgtggtgagccaccgccgtgaggctggagttggcgctcaaaggggaagggcggtgctagatgagagtgggctccctgcctggggtatcttaggcctccgcgggcggatcattcgccccacttgtacagagctggagtctggggcagtttcatgccagatcgcccttcggtgtcgcggagggaagtcagagcggggagggagcctgtcggcagacggatcccagagcgtgggagctgggtagggttggcccctggctctgtgccgcgggacaagtggcgaccccgcaccagctcacttaccaccatcggccactgctgttggcagccagggctgcgggcagagcggccagcgccagcagcagcgtagcagaaaccca

SEQ ID NO: 22851 - DNA, 1073 bp, Artificial sequence
  DNA replication origin
ggatgtatggttcttccgctcccctctcttcggtttgtctctctggggctgctccacttccgctatcgagccaaaatgcgccctagaatctcccagtaaggtgtgattacgcccgtggacgtggctgcgtgcccacgcacctgctttctctactagccctagagaccagctttccagcactgccggccctggctctcaggactcaaagtgcggagtcgggggtgggattccggtcccaagcccttcatgagggtgctggccgcgccccgcgtaccccctcgctgatccccgctcccttctcccacaggctgtcgagaaacggcgtttatcttcgctatcacctccgccggggtcacccattcggtggcgcgctcctgctcagaaggttccatcgaatcctgcacgtgtgactaccggcggcgcggccccgggggccccgactggcactgggggggctgcagcgacaacattgacttcggccgcctcttcggccgggagttcgtggactccggggagaaggggcgggacctgcgcttcctcatgaaccttcacaacaacgaggcaggccgtacggtgagctttgagaggctccgcaccctaagcggagcggcaggggccaacctcgggctggggaagtgacggtcggtgagataaggcaaggggcaccaggagagggcgtcctgggagagccggaggcttggaacgaagacggagaatagaggagacagtggctgagggcaaaggtatgtctggcccgcggacaggtagaagaggttgcaaatcaagcacagtctcttcgctgtacagattcgaaaaataagcctgagaggccgagactgactcgccgcggcggagcagggttgggcagggtttccaaatctcagcggaacatttcgcgcctcccttcccctgggctcagctaggcctgggcctttgctgaggtccggcccccgtggcgtccgggagagggcagtgtctgggagggtgactctggcccggtgccctgggacactctttcttcccctatccccgcagaccgtattctccgagatgcgccaggagtgcaagtgcca

SEQ ID NO: 22852 - DNA, 1541 bp, Artificial sequence
  DNA replication origin
gttgggattacaggcatgagccactgccccaggccagtatttacttttctgttggtggaagggcttcacccctgtccaatgccctgaccacagctgaagaagccaagcttcagggaccaatagctccacattaggggcagcagcactctgctttagtttctcttcctactttttggaagatggtcacagttatcattcaatagtagctattttctgaacagctgttccaggcaggaaaagcaggcactgaggttgtttaacccccattcaccaagtatatgcacctgtccatatcacacagccagttgctgttccacgaggaagaagaaccctgcagggttgtttggctactgaccaggttcctctctcaggagagctggattcccagtggcctcgttagggtcatccaagggtcagaatctcagggtcctctggcaaggttaggaaaccagtcccccaacagcatattctatttgtttgagagaggtaagcttccaagcctgggagtggtaaaaggggaggataggggacaccacaaacaaggttgtgttctggattcaaggaaaagccaccaagtcatcgataaaaatagagattttattctgcagaggaagatgctacactggtgggggcgaggagccgctaatagctacagtggaaggaaatactgattccaggaggcaaacgcatctttgagaaactgaggagagaagagggaccagaaaaggctgcagggagaaaggagagaagagtggagagggattgggttgggttggaggtggtctttgcaaaccaggctgggacccagcacaataaatagttttatttacaacatccaaactcgtggctctgtatccacgtttcagtgcaaattatttacacactgatgaggaggcaggacaggaaggggtaggaggtggcccagggaggcatggctcacagctgttcaatggctccacgacagagactgggagaatgggggcatttctgctggttcccccaacctcatttccacatcatcacagctgcccttttgccctgtaacctcctgcttcagctacaggtggggaggagaaaggccctgatgcccaggtgtgggttcagggtctgcacccatggcaggagaataggaagggacttaggaggacccggagaaaacgcaggacaaaggggaagaagagaggcagagaggtcgctggcgcgatggagcaggcagaatgacaccatcaggagccgaccccatggcggaggggacccatccttctctcacctcctggccaagcagggggcagtgcaacaaggggtctcccgcggagagggagggaggtaggtccggggcaggtccatcaggatggcaagagggttcatgccgccccaggcaagtggtttgaggagtccccaggtaggaggaagtgggagagatgggatgcgtatgaaccgcggggagtgtgactggaggtactcgggtgggcgaataaccgggtcttgagtgctagcgagtctgtttgggggagggctcgaggagagcgttcctgggggcg

SEQ ID NO: 22853 - DNA, 948 bp, Artificial sequence
  DNA replication origin
tagagctaacttgaaacctggcagtccgggttcctggaagtctctgggatgaatcttcctggatagctctgaccagtgtcttccctccggttcagaaacccaaagaggacaccttcctccactgaaccaaggccagcggcccagctcctgtcagatcgtcgccaccccccaccgcaggcggtcctgccccactccgagttctgcccagagtccctctgggtgcgggcgggagtgaggtcgagataattggagactaaagccataagtggtttgagagcggggttggggacctgaacgctgagcgggagttggagttgaggggtctgggttggagtgggagcagaggcgggcagggggccgggggctgggggccggggcaggaccgggcgactgagtctgggagaagcccccgcgcccgcggagccggcagctaaatttaccccggctgactcagcccttgcccggaatggggggtggggggagggcgccagggcagtgggaagagccgacaggggtgggctgggggcaaggaagggagagtcccggctgggggagaaaagaggtgggccaggagctcccaacgaagaaagcagccccctcccctcacacagagcgggaagtagcagaggagtcccgggggagggccactgtggggaaagggtcagtgaaaggaagacgatgccaaggctggataaagggaagcttagatttattgagcgcctactgtgtgccaggcagtgtgcaaggcgctttacatacattatcgcattaaatcctcacaacaaccctgcgaggtaggtgtttataaacccccatttgacagatgaggaaactgaggctcagggaggtgaagtgatgtggccaagttcacatggctaataaatggcagacagaggaggtgtccaaggatcggagagaaaaaaaaaaagacttcggtgtctgagtccc

SEQ ID NO: 22854 - DNA, 1137 bp, Artificial sequence
  DNA replication origin
cttgtcaaaagcggctgtcgagcagtcgccttttacaccagcccggcgggggccgcgggggcgaagctgagggcgggaggccgggggactccacactggaggagcgcactttccgcatcttggggctcccggcccccgaagtaaacctgcgggacgcccccacgcagccaggtagcccagagcaccaagccttaggcccagcagcttcgggagcccagggcagagccgaggggtcggaagtggcggtggtccagcggcgcgccggccggggctgggcgcggaccccagggccctacgccggggccctgcgagaagccgtgtcccgtatccgccgccacacagcccctgactcggacacggacgaagctgaggagctcagcgtccatagcggctcctctgatggaagcgacacagaagccccgggcgcctcctggcggaatgagaggaccctgcccgaggttggaaacagttcgccagaggaagatgggaagacagcggaactgagcgacagtgtcggggagatcctagatgtcataagccaaaccgaggaggtcctcttcggggtgagggacatcagagggacccaacagggaaataggaagaggcagtgagaggccccttcttgtatttgtgtccccaacgcatccatccttgggtccactggtccccattcttccccacagacttcctttgcttctcttttccttgtatctttacccatacctgttctcatccttgaaatataaatgaaaggaagggaagcatatgcccattaatgattttgtttcaggagaggtgagaatgagcagatttaattaatgtctgttatgttcagggcacaagggtgagctcttcgcaggggctgatgcactgggtgtggagctgagcagagaggcctaaccaggatcaggcaggagggcagggatggtggcagccataggagggcagggtagggtagggcctctgaggaggagggaaaaagtgaaggagaggctttggacctggtgacagagtgatcagatgacagaggggttcttgggagaagaggcataggtccagcaacaaccaacaaagcagaaggagggctcaccttggtgtcacaagtcttggatttcaatcccaactctgccactgagt

SEQ ID NO: 22855 - DNA, 1253 bp, Artificial sequence
  DNA replication origin
cacagccgccgccccgccggccctgggcctccagggtgctgcaggaggcgaccaactggcgggcggggcccctggccgaggtccgagctcgggagcaagagaaaaggaaagcggcgtcgcaggagcgggaggccaaggagaccgagcgaaaaaggcgcaaggctggtggggcccgacggagccccccgggtcgaccccgcccggagccccgcaacgcccctcgggtggcccagctggcagggctccctgctcccttgcggccggagcgcctggcgcctgtggggcgagcgccccgtccatccgcgcagccgcagagcgacccagggtcggcgtgggcggggccctggggaggtcggcggcccgggcccccaagctacgaggctcacctgctgctgagaggttctgccgggaccgccccacgacgccgctgggaccggccgccaccctacgtggctccaccttcttacgaaggcccccataggaccttggggactaagagaggccccgggaactctcaggtgcccacttcatcagccccagctgcgactccagccaggacagacggagggcgcacaaagaagaggctggatcctcggatctaccgggacgtcctcggggcttggggtctccgacaggggcaaggtctcttggggggatccccaggctgtggagcggccagagcaaggccagagcccggcaagggggtcgtggagaaaagcctggggctggctgctgctgacctgaacagtggtagcgacagccatccccaagccaaagctacagggagcgcaggcaccgagatagctcctgcggggtctgcaactgcggctccctgtgccccgcatcccgctcccagatccaggcaccacctcaagggctcgagggaagggaaagaaggagaacagatctggtttcccaaatgctggattccctcccctaaaaagcagccgccccgccatagccagacactccccagaccctgggctcccggaggcaccggatggagagaatctctgggtcttggagagggggcaggaccggagaccctggagggttggaaggcgacccgccgtgcccacaccttgccccgcagttcccagggcctgtcccgtggggaaggcgtctttgtcattgacgccacgtgcgtagtgatacgatcccaatatgttccaaccccccgaacccagcaggtgcagcttttgccctctggggtgacacgcgtggtgggggattcccccagccaatcgaagccc

SEQ ID NO: 22856 - DNA, 1102 bp, Artificial sequence
  DNA replication origin
ggcaggcagagaccttgagttccaatctcatcactctatgttggggaaactgaaatctgaggcaggaagccaggggcagaaccctggtggtcaggcaacctgacaagcaggagagtaaagggttaaaacggcaggaaggttgaagaaataggggcgggggagggggcactgtcagcttggcaagaatcataagtccctcccccgcccactcgtgcgatcccatcaggcttgggggacaacagcagtgggaaggggcgtccaatcccgggccccagggggcggccgtgcacatgggggaggtagcagcgcggagcagtccgcgcggtgtcacatgcgcgcgcacacacagagacaggcacacacacgtgtgcccgggtatatatagttcccagtccccgggcccgcggctctgcagtgggcgccggctccctgggctgggagggggctcctggggcgggtgggagggtggggggccggggtggggtggggcaggatgctggatggcccactgttctccgaggggcctgacagcccccgggagctccaggatgaggagtctggcagctgcctctgggtgcagaagtccaagctattggtgatagaagtgaagactatttcctgtcattatagtcgccgcgccccttctcgacagcccatggacttccaggccagccactgggctcgcgggttccagaaccgcacgtgagtgaagcaggggtgaggggaagagagtggtggggcggggagtggggtccggacctccccgcaggcaccagcgagcactgctggtcccccttctctttcccacgccttccacctctgcccgctcccgagggctggggcctgactcatcccgttgtttgggggaacagaagtgggtgtgagaaagggcaggaggtgagatggggcagacgctgttaaagtgtgcatggagagatggcgaggagtcccgcttcgacttcagtcctaacatatacgcacgtgcacacgcgcacacactcacacacaccccttcacatggctgccccaagtggtctccagtgctcccagctccccggacctcggctcccttcccccacaaactgctcacctgggttcctgc

SEQ ID NO: 22857 - DNA, 980 bp, Artificial sequence
  DNA replication origin
ttcccctcacccctgcttcactcacgtgcggttctggaacccgcgagcccagtggctggcctggaagtccatgggctgtcgagaaggggcgcggcgactataatgacaggaaatagtcttcacttctatcaccaatagcttggacttctgcacccagaggcagctgccagactcctcatcctggagctcccgggggctgtcaggcccctcggagaacagtgggccatccagcatcctgccccaccccaccccggccccccaccctcccacccgccccaggagccccctcccagcccagggagccggcgcccactgcagagccgcgggcccggggactgggaactatatatacccgggcacacgtgtgtgtgcctgtctctgtgtgtgcgcgcgcatgtgacaccgcgcggactgctccgcgctgctacctcccccatgtgcacggccgccccctggggcccgggattggacgccccttcccactgctgttgtcccccaagcctgatgggatcgcacgagtgggcgggggagggacttatgattcttgccaagctgacagtgccccctcccccgcccctatttcttcaaccttcctgccgttttaaccctttactctcctgcttgtcaggttgcctgaccaccagggttctgcccctggcttcctgcctcagatttcagtttccccaacatagagtgatgagattggaactcaaggtctctgcctgccactctgctggtttccatggggctggggtgcaggaggggctggcccacggctggggggctatttttagcggcagtggctgttcgggtgcagagatgagatgagtaaccagctcccatgcggtggagagaggaggcggtggcttttaccaagcttttgtgcgactctgagggagagctgccttccctaagctcaaaaagggtgacccctacacccgtatctccttgtcagctcagtgctgcagcctaggactgct

SEQ ID NO: 22858 - DNA, 700 bp, Artificial sequence
  DNA replication origin
gggccccagggggctgcccgatgggtggaagttccctgtggctactgtgtagtttgtgctttgaggcttgcccaaggtggggccgggcccaaaatggctgttgatcccatggggtggcgggagaccaggctgagggacagggggctttagggaaggctcccctactgcctgagggaaagtgaaacgcatgggagagggggtgcccacaaatgcacccgtcccaggggaccggacaaaattggggggctgcccacttgggaccttggcatggagctcacctgctggccccgcgggcagggctgctgggaaccccccagcccccagcgaagtgtgggctagagacccagccttaaaggcaacttcagggggctggggtcggggtggcttatgcaatggggcaaatgggtcacgggactgagggcgtgagggtgggcgagaataagggtcaggggactggaagcgaggggtaacgggtgatgggcaaaaagcttcagcagacagaggccggggtgtcagtggagactgggagctggactgggactgaggactggcaggcactcgggagaaagggtcggagggcagtgagcgagggggcagagcacagcagctctcagggggcggaggttggggccgaggagtcaatgggggctgagcatatgggtcagtgtaggagccagggcgaaagatgtctgggtgactt

SEQ ID NO: 22859 - DNA, 1963 bp, Artificial sequence
  DNA replication origin
agataaggatggttccccagggggagggaacaagggcagctcctcaggtgcagggcattggcctggctcctcagggggcttttcaggccgaggggacaggggtggcttctcaagctcaggggacagatgcgattcctcaggccggggggacaggcatggctcctcagactggggggacaggtgtgattcctcaggttggggggacaagcatggctcctcaggcacaggagacaggtgcggctcctcagtctggggggacaggtgcaattcctcaggctgaggggacagatgtggtccctcagcctggggggacaagtgtggctcctcaggcacagcgcataggcatggctcctcaggctggggggacaggtgtggctcctcagcctgcggagataggtgtggctcctcaggccggggggacaggtgcggctcctcaggccggggtgacaggtgcggcccctcggaccgggggcagagttgcggctcctcaggtagtggcaacaggggtgactcctccagcggcagggacatgagcgagtcctccggtggtggggaagcaggtgagtcctcaggtggtggggatgtgggggagtcctcaggtggtggggagaggcgtgaagcctcaggtggaggggacgtgggagactcctcaggcggtggggacaagggagattcctcaggcggtggagacaggcgtgacaccacaggcaggggggataggcgcgatacctcaggtgggggggacataggtgattcttcaggtggtggggacataggcgagtcctcaggtggtggggacaggcgtgatgcctcaggtggtggggaaaggggagactcctcaggtggaggggacagaggagactcttcaaatggtgggaacagacgagatgcctccggtggtggagacatgggtgactcttcaggtggaggggacatgggtgactcctcaggtggtggagacaggcgagatgcttcaggtggcggggaagtgggcaattcctcaggtggcggggacaaaggagattcttcaaatggtggggacaggggcgatgcttcaggtggtggggatagaggcgtctcaagtgcaggagatgggggtgactcttccggtggagacaagggcgactcctccagtggagaaaaaggtgatgattcaggtgggggagacagaggagactcctcaggcggcggagagaggggcgattcctccagcggccgggacaggtgcaatgcctcaggaagtggggatgcgggcaattcctcaggtggtggtgacaggcgtgatgcctcaggtggtggggacgtgggtgattcctcaggtggtggggacaggggtgactcctcaggtgggggcagcagtggcatctcctcgtttaggggggcctccaactggggctcaagttggacccctgctttccctgcagacacaacaacacgatgctcctatctagctcagatctactccacagaaagtgtggggtctggggcaatgcacaaactgtctcttgccatagaataaaaggggatgaatttcagggaccctcaaaccctactcacctagtggtttggcttcacattgcaggggccctggttccttgggttgcatagaggtcacgtgcccaccctttggctgcccttggcatgcaacgtacagagcatcgggctcgtcagtgggggtatcgccaggctctgggggtgaaaatctgcagagggtacaggggagcaggcactgtggctctcaccagctaacaaatcctagagagcacactggggggaggcacgaatgctgtggatggcactgcccaccttagggctctcctctcaaagtccactcaatttaacaaggcccctgccaatgtcagttcttccaacctgccagcccaatctcagtcagtccccaccacttacctgctacacaccggggtatgctgctcagcaacggagcggatagtctgacctccct

SEQ ID NO: 22860 - DNA, 1662 bp, Artificial sequence
  DNA replication origin
ccaccgaccagagccggccaggccgggggcggggcagctcccgaggccagaggggaagggaggcgagcgcagggcctggagcggccggaggggagcgggcagagggctcgcaccgcccgccccttccttttcctcgcctacctagcctcctcccttccccggggggagcagaaggtggggggctcgaagccgccgagggtgagcgctcggggtcgagaagcccggcgctgggtgtgtgtcaggttcagccccgcggccccgccggccccgcgtcgccgtagctcgcgcggccccgggcgccggccggggcggggagaggggctcggcgctcctgcgagggtctcacgttccatccgggccaggcgcggggcggcgcggcattccttccgggctgctggggaggcgcctcgacgttccatctggagagcctcgacgttccgcccgagcccggcgcgggcggccggggcgctggccgggccctaggactgagaggccgcccggcgacgcggatgcggagcctgctcgcccaagatcaaagccaccggtgctctctttgtgtccgctcgggattcgccgccctggggctgtccatggaaacctaaactgctggaacctgaggcagagaacccctctttggcttcttgctgtttttttgtggggggagggtggccactccgacctggatttaccgttcttggcccccctaagcccccccgtgcggggggcggctgtgatcgctctggcggttggaggtcggggagcggcccgggctctggccatgttctcggatgaggatttctggatcgccctgtgaagaggtgagtgaagtccgcccggccagggcccagaaagggttggactgggggcacagccagatggactatcttagccggagctggcctttaggttggagaagggggtgccagagctggggagcgttcctttggcagggtctgtcaagggaacctgagccagtcaccagggcagaactgaggcctggtgtcttggggtgtgcctctttaaagactgggggttcagggaaccacgggagtttgggaacctggccagatagcctctctgcctgtttatttttgtgttgggggagctcgactaaactaggacccgggccctgatgccagcaccaatcccaggctgctgcttctcccctcagggttccttgtgggccttgggacagagcaacttgggatggtgggggagggtgtcactgccaggtcagacttatgccagttggactttaaggttgttcctaccgagttgggcacccaaagcagtccctggaaaactcaaggaaccccagatccttcaccaggccttctttcactgggcaaagggagagtgtgtggaaactgactagttgtgatgaagggggtagctggggcaagaaggaggcggggctggggcagttctggccctgctgttcaactttaaactgcccctgcctggcaaagtgaccccagtgaggccgagtgctgtcttagcctgctttgcctcccctcctcttgggatggatctaatctccagaggattatagaggaggccgttgagatttgctccctgcgaatgtaggctgcaaaaaatggcttttgtcttttgccttctcccggcctggtatggagagctggctgcccatgagtccctggc

SEQ ID NO: 22861 - DNA, 1455 bp, Artificial sequence
  DNA replication origin
cgcgccgccccgcgcctggcccggatggaacgtgagaccctcgcaggagcgccgagcccctctccccgccccggccggcgcccggggccgcgcgagctacggcgacgcggggccggcggggccgcggggctgaacctgacacacacccagcgccgggcttctcgaccccgagcgctcaccctcggcggcttcgagccccccaccttctgctccccccggggaagggaggaggctaggtaggcgaggaaaaggaaggggcgggcggtgcgagccctctgcccgctcccctccggccgctccaggccctgcgctcgcctcccttcccctctggcctcgggagctgccccgcccccggcctggccggctctggtcggtggcaccccctcgacccccggctgactgtgatcgcaggcggcctagaggtgcatggcccaaccccggctcccggcaccggggggtcaggaaactgagcggaaagtggggaacgaggcagccatttgcaaccggagaggaaagtagtgcagcgcggcgccgctccgcctccccccctccgcctcctgttcggccggtagggtggttcctgcgaaggggctatttcctggcccaagagctgggcagcggtcgtgaagattcgtgaagccttcggcgctagatccgggggggccttttgcccggggcaccccactcgagagggggagaaaggagaagaggcggccctattttgtgttggagcggagcggcggagggatcccgccctctcggaggaaaggctgtgactctgcagttctacgcacacgctgcgggatccttccgctccgggttaaccccgaccgcgccgggccggcagcagggcagacacgtgggaacgaagcccccctcctctccgccgcggccctggagccgcctcatttaccgcccaggccgcgaaactaggactctggccgctgtctaattccatacccttgcagtcgttggtccctgaagttccaactgccccttgctttggccaggggcagtctttcccgggagggggatggaagaagagccaggagattggccgctgctcagcatcctgggaactggagtccgcaaatggagaaagtgaggtacggcgcctggcgctgcagagggtggactcttgccacgtttggggacccgaagaaaactggacgagtccctagtcgttcctcctgactcccagtcccccgtgtgaggaaggactgtcggtgcccacacagtcactatacacacctccccatcgaaacataaaggtagagcctcccttttcagggtgcccccactcccacctccagtccttccagatattcagtacccgtgtcccttttttagtaaactgaggtagcctcgctgctacctggccggagtactgtcctggacaagatcgcaaaacatactctttgcaggcaccacccccccaccataagtctggatgag

SEQ ID NO: 22862 - DNA, 790 bp, Artificial sequence
  DNA replication origin
catgccgctagtccgctacaggaaggtggtcatcctcggataccgctgtgtaggtgagtctccgccctgcagagctcggacgcgcagcagctttgtagccagaagaggcgcgctgccgtgggaacgcgacccagggaggaatgatgacatcgtaaggatggggttgtagagcgaggattggaagagtggaggaatggaagagtggaggattggaagagttggtggtgtgtggaggctgcaggaagcgggagcacttaagggttaatgcggacctggctgcgggaatctcagagtggtcccagcgttactttggggataggggtggggtcacaatttgaaaaccgggacgcggtctccgtggggacagatagtcgcaggtgtcctggggcggggcggacttgatcctagggaatcttggatcttcctacgagtgggatggggtggggaaggcggcgggaaaggcttcctgctgcgcttctgaatgcatccggtagccaaagtgcggagaccctgggtgaaaagagggtgagggtagacacaaaggatagcattgcttgaggcactcacagactgtggtgttaatttggggtctcctttggtcctgggccacagtccgaaaggacagaggatgtgaatgtggatggatgatttggatacaactgtcacactgctccccacagggaagacatctttggcacatcaatttgtggaaggcgagttctcggaaggctacgatcctacagtggagaatagtgagtagacttctcccctagtgtgctggtggtatgcg

SEQ ID NO: 22863 - DNA, 1367 bp, Artificial sequence
  DNA replication origin
cagtgggcgcaccgcgcttttgcccccttgagactgctgcacgcgctaggggcgctgctccccggcggggccgtccagccgactggcatgcattggtactctcggctcctctaccgcttagcggaggagctactgggctgagcgtcccaggcatagaaacctcgaagcgcccgaggaaacgagggcctgctggctgagatatggggctgtgggcagcagacgatgccgactggaagggagggagagggagggggagggagaaaatggggctatgcctggcttaggggcaacctcgtactgagaggaggtgataccgggtcctaggtaggtagggctgatggtgcgcactccttaaagaggactatttagcctctcccccagtgcttcagccccacccgataattttattttatttcttatttataaattgtaatataatgattcccttgcccagcttgccaaggtgaggggctggggcatggcattaacactgtctgacacagccagccagtctgacatctgacgttttcctgcaaggtgggctaataaagggaaggctttcaggagcttactggaaaacacttccattcagagggtgattcacctccagagagggggataaaggtggccaacctgagttaacagcttacttccggctccccctccttcctcagcagggtctttgggacccttttcctcccttcagaaggggcatcccaacccataagcaacagagcccacaagagtcgtacccttttccaggctgctgtttccgtctcccatccagagaggaccagcatttcgctcctgcggctgaagggtccagggttgtcccaggtgggaaagactgtgcacacctcttctctgtttataggggctccagcaggggctcaggcccctatgagtactgatactcaaagcatctagtcccctattgttagccagtagtcctggtccccatcctaccttggtggcagggcctggatggggtggatgttttttctgatatgccactgggccaactgatgatccatgggaaacctgggtaataatttgcaatcgtcgcatagtcatggcctgaaaaaggaaggggggcacagtaagaggctggaatatttccttactgaagggctgctcagagagagagaatggattcagcctgggtgtatgtgggggaagtagattccctaaacaagggcatatcagcattacaacccgagctcccctcctgatcgctggccctgattgttgtttctactggcttggtcttcagcgcctcctcctccctctcccattatcaccagctctacttccctagcctgggtgtttttggaacctttaggttccaacgcagtagacacctggaa

SEQ ID NO: 22864 - DNA, 1403 bp, Artificial sequence
  DNA replication origin
ggagtccggagtccgggcgttctggcagcaccagagtcctgcagcagagacgggctgggctggcactcacccacgaccccccttccctgctatgatggtttgtcagtagcaggtcctagacaccccccgcccgctcccggggcacgtgggcagagctagcagcagccaggtgcacggagccacaagagctctagggcactctgggggcagctgtgcctgctgccctctctggtgcctgtggagatgcctaactgacaggagagttagtgaggacaagaacgctcccttttggccgaggtccgctgtatccatggctctcctgaccaatctactgcccctgtgctgcttggcacttctggcgctgccagcccagagctgcgggccgggccgggggccggttggccggcgccgctatgcgcgcaagcagctcgtgccgctactctacaagcaatttgtgcccggcgtgccagagcggaccctgggcgccagtgggccagcggaggggagggtggcaaggggctccgagcgcttccgggacctcgtgcccaactacaaccccgacatcatcttcaaggatgaggagaacagtggagccgaccgcctgatgaccgaggtaaggagggcctctccctacctgcgccggggcactgccagctcctccgttttcctatggcagcccaggtgggtgagtccagcttcacctacagagagtttagccttagagatttcccttgtcaccagccccaggggggggaaaaatccttgcagtctggacagagtaattaggacggctcccgactagaatagtctgggatggggaggggaggagggactgactagtgagagtgaagctggtagaggcagcgagggcggggaaaggaggatggcggcaggcgagacgggaaatggctgaggcgtggaccgggggtcagccacccagccaggcaggaagggctggggtgagctgggggccaggagctggctaggtagcagacagaagcctggctcctgacctgattgtagaaaagctctgtgggccgaaaagaagagactgaaaagggctgggacaggggtggccaagggtcaggtcaccagaccatctacctgaggaggggctgggcagacattgcttttggcatgggaaacgtgtcctagaaccaggacacatctattctagggtctattctagggctatcctagggtctaaacgataatcttggggttaaaaagtaatcctcagtgagaataacagatggacccacctgagaatcagagggctcctaagtcttccaagctctgcctatctcaggggctttccttggaattacataattaggataaattcaactaccatttttgagcattggaaccacctagagtgaggtggaagagaaggaccacct

SEQ ID NO: 22865 - DNA, 1910 bp, Artificial sequence
  DNA replication origin
gagaggggaagcgaggggaggcaagagcagccgcctcgacggccgcttcgacctcgcctcgacggcagcggcccagccctgccccctgacctctgcttgagcgccgccaggtcctccgccagcccgtcgcgctccacctgcacccggtcacgctcgcggcccaacagctccagctctcgccgcagctcgcgcagctcctgctggcacagctggtcggcgcgcgccggctcctggccccgggcttggctcagctccccgcgcagggccgcgttctgctgctccagaaagcgtaccttctcgatgaagttggcgaagcggtcgttgagctcctgcagctcctgcttctcgttgctgcgcgtggccaggaactcctggttgagggcctcggccatggagaagtcgaggcgctccgagggcaggcgcaggagggcgcccgctcccgctcgggggctacggaagctgcccaggcgcaccgaggagctcggggacgcggagcccagcaggcggctgctggagaagcgggagctggacgagtaggagaaggccccgggggatagtgagggcggtggaccgaaggtacggcggtatgaggtggagctgaagccggcccggaggcccgacgggtggtggctcattgcggccaaggatgggcagtcaccgttcgcagagctaggccgggggctgggaaggagccgcagaccgctgcgaggcggctttatagccctgcggtctcagggggggcacgggcagctcctcccactggcctgatggcccgctggaggggggttgtatggggagggggatgccccacccctgcggaacagcaggagcgccttcccctcccttccctggttgcaggcctctacccacttgattgccccctgttgccgctggggtgggggtcacttcctcccaacaagcacccaaagctagaacctagggtaggaaggcctgacttgaactagagtccctgaaaattgcgaggtagaaggacctgaagttaaagggcaggcttctggcacaggagtagggaggaggccagctggagggagagttgacctggcttaggccccatagctagtgccttgacttgccccctgaaggccaggctctattttcacctgctgtcagctacccctccttcaccacacccagagaggaataggagacaggggcgcagaggcagatcgggctggggaagagctactctccctaatccccagggccctgtgaagggctggtgcctggcgccagctctgctgctaatgggctgaccagcccccctccccctcccctgaagacggcccagcagaggttgtctgctgatgtttcagccttaaagacacagcccccaaacctagacctaccccgcaacaagccccaatgaggtgggtacatcatagggggctgagggtggctggacccagctctggatcccactcgggagggtctgccccatgccacgggctgggctaagtgggccttttgtattctgtcttggtttactggattctccctccccccaaccccacaccaattgctgctcagtcatgggctttacaggaaccagagtgattcctgaggtaggaaggggagggggctgaggggcaacagcggctgccaaggctgagagatggatggactggcaggagctggtttccagtattgatgagttgcaggtaccagggatgggtggggctggatggggaagagatggggaaagagaaagtgcccatccccagcagtctgaaagagagaaggccccagaacaggtccacaaacctgcgcacgcaaacagatgcatacacacagctttgtatatctatgcgcacacacactacatacacacacatacacacacaatcacacatcccaccacaccctcccctactccagagttagcgagaagg

SEQ ID NO: 22866 - DNA, 1415 bp, Artificial sequence
  DNA replication origin
cagctcccgcttctccagcagccgcctgctgggctccgcgtccccgagctcctcggtgcgcctgggcagcttccgtagcccccgagcgggagcgggcgccctcctgcgcctgccctcggagcgcctcgacttctccatggccgaggccctcaaccaggagttcctggccacgcgcagcaacgagaagcaggagctgcaggagctcaacgaccgcttcgccaacttcatcgagaaggtacgctttctggagcagcagaacgcggccctgcgcggggagctgagccaagcccggggccaggagccggcgcgcgccgaccagctgtgccagcaggagctgcgcgagctgcggcgagagctggagctgttgggccgcgagcgtgaccgggtgcaggtggagcgcgacgggctggcggaggacctggcggcgctcaagcagaggtcagggggcagggctgggccgctgccgtcgaggcgaggtcgaagcggccgtcgaggcggctgctcttgcctcccctcgcttcccctctccatcagcagcccaagggtgtggctccccttaccaacccaggtgtgtgcgggcagcatccctgcccacgggctccaagtgccccccgctacccctttgctctgagtgtttggggaggtgggagaagtgggtatctgtgcctcccctgagtaatgaggaaacccccttttcagctcccagtccgttagagacaatgcggggcaattccattagacagcctcagccctccatttagagtcctgggcagcagaacagcctctaaccggatcctggggggcgtgcggtctggggtgcgagctgggcggcgaccccgcagttcagcctctgcacgctcttcccgtcaggttggaggaggagacgcgcaagcgggaggacgcggagcacaacctcgtgctcttccgcaaggtgagtccgagcccctctccgagttcagcctccccaccgctacccccgatctcagtatccagaggtggcatcggtgggcgcggggagaagggggtaacccagatgcctcctgaggcagacagggaaggcctggtccttccttggtctgcgcagcccctaacttatcttgaacctccactgccacccctcgaaggacgtggacgatgccactctgtcccgcctggaactagagcgcaagattgagtctctgatggatgagattgagttcctcaagaagctgcacgaggaggtaagtgggcccggtatcaggggcggtttctgaggttgtggggtggtctcgctggagctggcgggtggagcggaggcatcgccctggggatcaggacgatgctgggtagacgcagcccctccaccctagtctacaggtggttagactcccacccttgcgccacctggcggcgggcagcggggctgtacctccgaa

SEQ ID NO: 22867 - DNA, 2044 bp, Artificial sequence
  DNA replication origin
gaaggacgtggacgatgccactctgtcccgcctggaactagagcgcaagattgagtctctgatggatgagattgagttcctcaagaagctgcacgaggaggtaagtgggcccggtatcaggggcggtttctgaggttgtggggtggtctcgctggagctggcgggtggagcggaggcatcgccctggggatcaggacgatgctgggtagacgcagcccctccaccctagtctacaggtggttagactcccacccttgcgccacctggcggcgggcagcggggctgtacctccgaaacctggcctctggtctcgcgcccgcgggggcgcagggctgtacgccctgccctccctggcgcccacttctgttcgttcaagcgtttcttctcttttctgtgcacgaactgcgtggcccgcgtggaatttgcgccgctgtccatcctctgcctgctcccggccgtaggagctgcgagacctgcaggtgagtgtggagagccagcaggtgcagcaggtggaggtggaagccacggtgaagcccgagctgacggcagcgctgagggacatccgcgcgcagtacgagagcatcgccgcgaagaacctgcaggaggcggaggagtggtacaagtccaaggtgcaagagccgggagggcctgcgaggcgggacgctggggtggtgtcgcgcgtcccagccgactaaagcctgggttacccccacttctcagtacgcggacctgtccgacgctgccaaccggaaccacgaggccctgcgccaggccaagcaggagatgaacgagtcccgacgccagatccagagtctaacgtgcgaggtggacgggctgcgcggcacggtgagtacgaagctgcgcgctcgggcccggggagcggacgatgaaatgttctgcaactggccccttccactctcctaccccagaacgaggcgctgctcaggcagttgagagagctggaggagcagttcgccctggaggcggggggctaccaggcgggcgctgcgcggctcgaggaggagctgcgacagctaaaagaggagatggcgcggcacctgagggagtaccaggagctcctcaacgtcaagatggccctggacatcgagatcgccacctaccgcaagctgctggagggcgaggagagccggtgagggtggagctgctggggcggggcagggcggggtcgggactgggccgggcagggcggggcctgggcaggggcgctgacaacttgcttcgcctctaggatctccgtgcccgtccattcttttgcctccttaaatataaagacgactggtgagtctggcttacagcctgtacctctccttgtccacttctgccctcctcgggctcttgctctggctcacctcagggatctcttctccccacggaacttctgggtcctggcctgtacccacccctactcctcaaacccgcccctcccctgccctcagggatagcagtgggagcctaagaggagagattcccacgccttcccccttgaaccctttatcctgctttcttcagtgcctgaggtggagcctccccaggacagccacagccggaagacggttctgatcaagaccattgagacccggaatggggaggtgaggcaggtcccctaatgccaggaccccaccatttcccatattatttctgagccccagcctggctgtcgctaatcttacttagggtgggtaattcttggggagagacagagaaggagacagagaacgtggatagataaccaggagcctctgctggttaccccagggagtggggctctatgatccaaaggagtaggatggagggtggcgctgaatggcttgtgcccatcatatgccctgtccccagcaggtggtgacagagtcccagaaggagcagcgcagtgagctggacaagtcttctgcccacagttactgaaccccttggtccggagccttgactctgccctaggcctgctcaaagcccaaaccctaagaccactcctgaattgtctcctctccctctgcatgtgtctaaaaggtggtaccaggcatcc

SEQ ID NO: 22868 - DNA, 821 bp, Artificial sequence
  DNA replication origin
tcaagccgggtcgggggctcgggccagccttcaacaccgttggcagcaatcggaacgatcaactgtaccctcagtaccgcgacctcgcccggtcctgccaatggccggcccctagccggtcctgaggcctcgcgagagctcccgtggctacgccttccccggcctcggaacggccccatccttcctctttccccgcctcccagcggcgctccactctcggattggctgattgatccgagtcagtttttttcctcgccagaaagcggttcgacaattggtccttcttttggcccctcctgcgatgcccgcggattggacggctgagtctggctacgcgggcctccgcgggagcgcgaccgggccaatcaagagcttggcgtattttacaaactgagaaagtagctccagcagcacccgagagggtcaggagaaaagcggaggaagctgggtaggccctgaggggcctcggtaaggtaaggcacgggggtcttgaagggaacgaaggctgctgggttcatagggaggagggcagtttggggcccgagggcgaaagagtaggctcggggtgtctggagatagcacccataagagcggtcttgcaggcgccgggggcttgtgggcgcgtggattagggcggaggtatcagggatggcaggacaggtgccccgagaactggttgatctttgatcttagattctgcctgccttcttccccgtctcaattgtagccatcatgaccacccggcaagccacgaaggatcccctcctccggggtgtatctcctacccctagcaagattccggtacgctctcagaaacgcac

SEQ ID NO: 22869 - DNA, 1988 bp, Artificial sequence
  DNA replication origin
cggcagccattgcgcccaagagtgaggaagatttgctggccctggcagcgtcgcggctgagccgccgcaagagggtggcgggcgcggccgtcggagtggccatggtgctgctgctgctggtggccatcccgctgctggtgcacagctcccgcgggccagcgcactacgagatgctgggtcgctgccgcatggtgtgcgacccgcatgggccccgtggccctggtcccgacggcgcgcctgcttccgtgccccccttcccgccaggcgccaagggagaggtgggccggcgcgggaaagcaggcctgcgggggccccctggaccaccaggtccaagagggcccccaggagaacccggcaggccaggccccccgggccctcccggtccaggtccgggcggggtggcgcccgctgccggctacgtgcctcgcattgctttctacgcgggcctgcggcggccccacgagggttacgaggtgctgcgcttcgacgacgtggtgaccaacgtgggcaacgcctacgaggcagccagcggcaagtttacttgccccatgccaggcgtctacttcttcgcttaccacgtgctcatgcgcggcggcgacggcaccagcatgtgggccgacctcatgaagaacggacaggtgagatgcccctctccccaacccagctcagactggtcgctctctagatctccctgcactcatcccacaacctgagattattccccgaaacagcgtcactgaatccaggaacgcgaggctgccaagaacgatagatgacttcatttacccacagaggaaattgggggccagagaaggaaaaccttctgcctagggcctcacggagtgtaggaatggtgttagaattagaactcaggacttaaacctgagtgtctctgcagctgtgacctcacattgcaactatgggcaacaccagatgtctttggtgtctcgccctgccaactcgcttcttttctcgtcctgtcttgggctatcctttcttctgcggcagcccccctggcctttgggtctctcagccttgcattggaccagctaactggagtctaggctccttcgaattagaatggaatccatgtctcaggcaataggaagtcagcagctgttctcatgttgagggcattcgggttggatgtttgaggaaaaggtataaaaggaagaaaacatttgcctgctcacttcacctgccgatcagctgttctgttgctcaccccagggctgggggcctagaacggccttgccctcagcagagtctgtggcttggcagctcaagggccagccaggtggctggaatgaatggatttgggggaggaaagaggcaagggacaggtagaatagccttgggccctggcctggtcttgtaggccccacaccctccctagcaatctctcagtatccaggttccacagttccctgcccttgtgggcagttggagtcactgttgcctctgttttcggggaatagccccaaggactaagctctagcaccaaaatttcacacatagtgggaactagaggccgcaggtgtggggtaggtgggagaaggtgccagagctgcacaggctgcagagggaggttggggctgagtggtgacctctggatgtccagcatgaagggggtggtggcgacccaggagcttcaggcctgcaggagcctggtaccgcggcagcatctacctgccccgagacctgctttgggatctcatcccagccgggctgccccaggaacccggggaaagggagtgagtgtgcgtcctcatggagtgaaagaatatgtatgtgtgtcagggagtgtgtgtgagtgcggagtgcgatgtgagagtagagcggtgtctatctgtatatgacatcgagtaggtgtgcttggtccatgcagggtatctgggaggaggtggagggggccagtgtgtaactaattcgtgcgggtttcagagggggaggggactgcgcagctcccactctgtattcttcagtgc

SEQ ID NO: 22870 - DNA, 978 bp, Artificial sequence
  DNA replication origin
cactcccccactgcccctaggttccttcccggctctgagcgggttcttcagggtttcgcggcccccgctgtatctttacttttaccctttacccggagtttggcattctcagaggccagaggaaacccaaaacagcgatgggataaagaggggtcaagatacaaacacgcagagaagacaggggtagattcccgagctaaaatgagggggagggacctcacaaacaaacagaaaacaaaataagaagggctagaaaagatagaaattcaccaccccacgcacctcagcgcccgtgaccgaataacatggtaaaggattcaactgatactagttggcctgaactggaaaaggcaaatctctagccaaccctacccccacccctcagtattggggcgcggagcggagtgtgtgtgtgtgtgtgtgtgtgtgtgtgtgtgtgtgtgtttgtgtggagagagagagagagagagagagagagagaaaataagagaacagatcagcccgggggagcaagcaagaaaccgacaagaaagcagagaaggagcgacagaaatcaaagagaaggaaagctagatagagatgcagagacagagacaaagcttcgaaaagagacggactgacagccccagagggggagagggagagacagagacagaggaagagagacagagccgggacaggttgacagatcgagagagaaatgtaaatggcgcgctgcagagagacacccaggtccgtgtttggactccaatgtgacatatcaactgtggggaagatgcgggggcagggcggctctgccagcagtgctaggctctgggcctgtgcattgtgacagtgtgctccaaagtgtggaggtggccatgggatcctggccctgtgtgtccctgggtgagtgcgattgtggattgtgtgttgtctttgtgtatgtatatgtgagggctgtttgaagggaggtatttgtatttgtcttcctcctag

SEQ ID NO: 22871 - DNA, 1774 bp, Artificial sequence
  DNA replication origin
ttcggggagtgcccggggccataatcccccacccttcggccaatgcctcaggccacagtcctccactgccccgcaggaggcgctcctgccgcaggtccgccctcgccctgtcctgggcgcctaggctgcagccgcaccccgccctctcccgggccgggcccaggagctccctgggcggccggctgagtgacgggcggccggtgattatgcggaagggggagcggggtgcgccgcgggcggcagcgctgacccttcacatttccgatccgctgggaccctcatccatccgaagctgctctttgtctggccgcctaattgccggcggacaggatggatggcgggaccgacagccgcggaatccctaataaaggccgcggccgccggggagggagtgcaggagggagggggagcaagagggaagggatggaagaagatgggaggaagcaccgggcagcggtctctggctccgaggcgctgcgcgcggcgctcactgaagtccagcccgcctggggtgctagttcggggtccaggtccgggtgcggtgggttggggctcgttaagtgtcctgctcgtcagagaaaagctggggaccccaagcagaaagagcatcctagggccttcctcgcttagccgagccctcgagacttggagcttagcactacctcctggtctcggggctctcatcagtatgcgcccctacctcaacttcccgcaccccacccgcctcctttcacctgtgggtctcccagacccggagtcaatatcccagaggagaaatgaggggtctgacagctctctgtgcagccgatccccacatttcattaactggaggctggagctggcaagcggtggaggcagaggggggcacaaagggaggtggaggagtcaaaggctaggagcagcacctggccaggggtggagggctgccgaagtaagtcagcaacagctctgacctggcagacaccttggaagcagtctttacccactctctgagaagccaggagcttgtcttcagccctgtggaccctggtgcgatactttgaacttaaggttgcactgagttttggtgccagaggcactggctgatgagtgggagccctgggcctggccgtgatggcagaggcaggagggtagtctctgcaaggaggcaaaccatgagcaggttcttgggctgggacggttttcccagctgcagtcggagaacagccggcttcaggcttcccttttgtcccttaagcaaattttccttgactcgcttcgttttcctttgccttcctttttctctgccctctcttcctccatctggacggttgttctctgaaactaactttggccatcctttagccaacagttgagcacctgttgggcatcatgcttaacagtgtcagggtgggggttgggggatacacggagccaagacccaacccttttggcctcacatacaaaaggctcccggaagccattcaaatctcactgcccactcctggcctgcctctctcactcttccactgccttgggtgccatttgtctcctctagggaactgagaaggaagccaggaggtcataactctaattccaggactatcccttacagggtgataatggacaagccatttcccctttctgggccccagtttttttatctttaaaatggggacaatagatctaactctaaagggtgctgtgaggatgcaacgagaagttgcatgttaaagccctaaaatacaataaggactcaataatgttgtttccctttccatgccgtcccctgtcc

SEQ ID NO: 22872 - DNA, 1679 bp, Artificial sequence
  DNA replication origin
gctggacttcagtgagcgccgcgcgcagcgcctcggagccagagaccgctgcccggtgcttcctcccatcttcttccatcccttccctcttgctccccctccctcctgcactccctccccggcggccgcggcctttattagggattccgcggctgtcggtcccgccatccatcctgtccgccggcaattaggcggccagacaaagagcagcttcggatggatgagggtcccagcggatcggaaatgtgaagggtcagcgctgccgcccgcggcgcaccccgctcccccttccgcataatcaccggccgcccgtcactcagccggccgcccagggagctcctgggcccggcccgggagagggcggggtgcggctgcagcctaggcgcccaggacagggcgagggcggacctgcggcaggagcgcctcctgcggggcagtggaggactgtggcctgaggcattggccgaagggtgggggattatggccccgggcactccccgaagggaaactggggctagcggcttggggcctcccagtggggaagagggaacaaaagctgcggagaccggaggcccggggtccagggcgccccctgctgggaagctgggaaccaagccttagaggtccggcaggtacagatggaaccaggcccagggcgacccctcctagggaaaccaagggtttctagcctggcgcgcctcctgccggctttgaatgacactgcgcttctatgcccgctccgttcagtgaaatccaaccaatccgcatccgctcaaaaaaggctccaagtcctggcgaacccgaggggagccgagagggagttcaaggagtccaggttttactgcagattctttggcgctagctcccagctgacaaatcaacatctcaatctgacaattagtggtcaagatgcggggtgaggggctcttacagccccggccgcttagccctcccggcgggaggcagaggggtgggcggtgctggcagtgatgaacgactccaggggggcccgtggccccgagcgcgcattcattactcgactgacaggcgggtggcgggccgggcgggctgcgagtggacgtgccgggaaagaggccagtagcaggaggggactaaggcaagcgtttaacagtcccactgctccatctgctcccggtccttcgccttgaccctgggacttgacttccttgagctcggcctcccagttgttggagctggccctggctgggaagcaagggcggggacctaagccctcttctggggttaggtgatttaaggtctgagatgtcaaggaagggtattaggcaggtctcaagactaggcgattcggcctgacctctgagagattgtgcgtgactgtgcactcagagatggcgtgtatgacagggattgatgaatgtggatcgcacgtgggaggtcagtgactgtgtgtgtcagtaccaggtatgtgtcagtatgattttgtcagtggaggtgtgagattccctctgaggatgagccaccacccctccctgtgtgtccgtctccccactaccccccagctggctgtcagctctgtctccagttatggaggaaatggcagtgcgcacggtgacagctgaggtgtgctgctggggtggggggtgggggtggtgctagatgttaactgtgagagtgctggtcaggacagctgctccctt

SEQ ID NO: 22873 - DNA, 1212 bp, Artificial sequence
  DNA replication origin
gggcggagggggcgggggccaggcggagggaggttgggaggagggagggacagcagggcatcgaccaggcgtctgtgctcagaatgtgaagtgacccgcgcgtgcccgagccctgacacggtgtgaccatccttgggttagcaatcacctctggatgggggcaggaagaaagccctcctccttctcctactccagtgtccgtggggtattctgctgggctggtgtattcttagagagaagagccccaagaggaacaaagagagagccccccaaaatgtaggaagacaaatttggaagattcctaaatgtggaaatatgcagacacaaaggagggtacaaagcctgggcgccgtgactcacacctgtaatcccagtactttgggatgctgaggtgggtggatcacctgacatcaggagttcaagaccagcctggtcaacatggtaaaccctgtctctactaaaaattaaaaaaaaaaaaaaaaaaaagccgggtggagcctgtagtcccaggtgttcaggaggctgaggcagaagaatctcttgaatccaggagacggagattgcagtgagccaagatcgagccactgcactccagcctgggagacagagtgagaccccgaaaaaaaaaaagaagaggacgtttacagagataaatatacagaagctccaggagataccctagccccaaggaacaacaagacaaagggaaggggtcttgctgaacaaaacagggggccagagatccagagtcagcccagctctctgctctgtaaacccaggaggttcagggctgggaggaggccaggttcaacttcttggtgtttttgagaatgaggattgagagtggagaccaagccaaactgaagagagttattatggagaggaattagagtgcagttagcattatcctcccaaggcataaactagtaattaacttggacttgagacccaaaaggttagggtctccgaggctgctagtacaggctccaaagagataggctgccttggaggtctgaaggtcagcctctctcttcctgagcatcacacaggcatctgctcaacatctaccaactcctctctggccaccaccagcctaggtaggccacatgggttggagatcacatctcacatttggagaccttgtgtatgtgtatgtgtaggggtatgggctagacaactctggcagtaatcactttgttccccagggcacag

SEQ ID NO: 22874 - DNA, 1085 bp, Artificial sequence
  DNA replication origin
gatgcggcccgggggccccgcccggggtcgatattcctgattgggaagcggccgcttcgcggagcccgcgtgtaaatcacctgggctgggggagggggcgtggggagcctaccacgtcccaggctcgcgaagccaggaggggtcgggacccgggcggtaccggagggcgacggaatgagaacgacaggccttagagaaccagagagaagcccgcccagggcctccccctcccccgctcagccctgccaactcccccagcaggctccagtctcgcttcagcggccgccacccttcgttgcccctggagccgccggggaggccagtgtcggagccagccatgcggcggctcctctctggccgctcccgcggggccggggcttcggcggctgctgtcacggagccgacaggccgggccggccgggaaggggcgggtggcgggggggagaggcggcggggtgaggctggctcagcgctggcactcagtgggcgcgcaacgtatgtttgccgaattgaaaggctgggacaccgagcggcgcagggcagagggtcggagggcacaggcggggtaggagatggcccagaccgggtgagggcagaagcctcactcacgggggaagaaggcactcgaggtcgctctgaggaccgctgggctgggatagaccacccatcccccgccggggagacccgggtagtaaagaacaagacagaatgggacaggcaggacggtttggaccccacctacaagcgcctccaccaccccagcctccgatccttgtcacgctctgctggggaaaccgaggcagccgatgctgagaatagccaaaaagttaaaagcggggtcagcgacgaagctggggcagcaaccagaattcctgcgtgggttttttggattcctccgcccacgcggggccagtttgcgggtaaatgcaccaccgcgccccgcaccacagctcagaccctttcctctcgctgcagtttgtcagatccccccacctcccactctgcaccagtttatagaacaacaatttggggaaaacaatccgggcggagtgacggccccgtaattgtgacaaagtgagtgcggg

SEQ ID NO: 22875 - DNA, 902 bp, Artificial sequence
  DNA replication origin
tgaacttggctaagtcatgcagcttcttgggcctcaatttccttctctggcaatctcgtggatctccgaggtcccccagtctggacttgcgggggcttcgggggacggtcggcctcgcgggtgtcacctcccggcagtaggcagagcgcttccctccaaacgccctcagccctcatctcggcctggagaggaaatgctgctctctatatgacctcttagggctcactgaggggcctaggctgggaggggccccaaagcgacgcctcagactgctggggggcgggggcggacaggagcgctgaataatgaatgagacttaattgggcccgcactgcgcgacggcgcgctaagctttgcaaacagcgtgggcggcggcggccgccgctggacaaacaaactatctcccggctcaggtggtggggcgggggcggcagccatacaagggagagggaaggggctggccgccggggcacccggggccgcagcgcgcccccaggtttacttcccgaggaacccagaaatgcggggctgcgctggcggcccagagagtgggggtcgggaaggggctcagggttcgatctcaggaagggaggagtggggagggagagaagcggattgtgcggggagagccaggggcccaagggcaatgtaagcgcgaggaaaagctgaagaaacgagtggagggcagaggagaggggagaagtgagcgaggaaaaagcgcaccgggggaggggcgacggggtcgggggagcgggagaagagctgttaccgggaggaaagggaagagcgatggaggaacaagcgaaggaaggcgcaaggggccgggagaagaggaattgaagagtcaaggagagggatgggaggtgaccggaataagaacgagggggcggcagggcgggggg

SEQ ID NO: 22876 - DNA, 1931 bp, Artificial sequence
  DNA replication origin
tactttgtccccaaccctctccccgagtctcttcctttccccggtaattcccagtctccggtggcgcgcgagcctgcggacggtgcgagacgcgagggaccgggccccgagaagagcggtaacccgactggtcggagcccgcctctcgccgccccgcgcctctccccgatcttctcggtctccggtgcgcgggccgtctcgccgctcgagccgcgctcgcgcacccgttggctgccacagcctcgagcttggcgcgccggattcgcgccggcgcgagtacgcgccctgagctctggctggctggctggcgcgcacgcgcccgagagggctccggggcggggcgagccgctgcctgggcgagggtcggggtgatctgctggatctccggcagcatcctgcagtccggcccaggagagaagtggggaggcggcggtgggggcggggcggcgtccggctctgagagagctgggggaggagcgcggcggcgacggcggcggtggctctagaaggggaggtggaggatctcctttcctcttctcagacccgggagcgtccgggacgcggagcccggagctggggcgacgaggcgattgcgggggcctgggctaggtgaggctaagggtgctgggtggcggggttggcgggggctcagagggcgccgaggtgcggggagcgggttgagggaggaaaaagagggagggggtagttgggggcggggggacgggaaggagggggatgtgagcccttagaggcccgaagtgcccagagggtggaaggttcctggggtctgtggggcgggtgaaacacccgcgtcggagttggggagtttccagacggataggccggggaaacaatggagtgtgggggggactctggcgtgagcgtgtgtggggtattggattttaagaaacaacgagcgagatagaacgaaagaataggatcatttgggatgagaagtacaatgaattaggaatgcagtagggatgcgtaaggtcacctccgtggctgtgcgaggtccttagcattcgggggcaataatgagatttgaaaataagggagagaagggcgttcttggaattgaagggggagacgaaatggaaaatcaggcgaacagacgcagagacataaaatagatgtggttaggacttggattaaagcagaaaggtagattcagtcagttttggactacagtgatatttttctcataattcatccagaatgattaggttcttttagaaagtggatctttctcaagcttgtccctctgttaaggagtacaagccgttctttaaataatttgattatcgcttgtccattttattgataaaacatgcctgtgatatttacttcccctctgtttagcaggctactgttcctaatttacctacggttaatgaagcaggagaggacagatcaccaaaaatatcttgctttaagttaggtcagtgataatgcagatttcagtgttttggagagaaccaaaagcttggttgtttgttttcagtttgaccaaaaggtgatggataaaattaagttacctgtactttgttagaattgcaatttctcactgagaaatgttcttgtgccatctgctactggttttgtgtttgtgggagagagttggggttctgccttaaattatttcttgatgttaacttcaaataggctgcctcataccttccagtttcaattaaggtgatttgggaatattgattatgatgtttgcatttccttaatatttggatttccagaccaaatttgtgattgtactagatagaaaattgccgattttgaaattgtaatgaccattgtgtgctcctaagtagtccatgttaagccttttatttgttgggcattaagttttgctgactcatctaagatttatggacattaatcagtttgtatttctcagctaggtcttggatggtagc

SEQ ID NO: 22877 - DNA, 1383 bp, Artificial sequence
  DNA replication origin
ctactgggaagagaggagcccctctgcccggccagccgccccgtccgggagggaggtgggggggtcagcccccggcccggccagccaccccgtccgggagggaggtggggaggtcagccccccgcccggccaggaggcgggggggtcagccccccgcccggccagccgccccgtccgggaggtaaggggcgcctctgcctggccgcccctactgggaagtgaggagcccctctgcccggccagccgccccctccgggagggaggtgggggggtcagcccccaacccggccagctgccccatccgggagatgaggggcgcctctgcccggccgcccctactgcgaagtgaggagcccctctgcccggccagccgccccatccgggagggaggtggggaggtcagccccccgcccggccagccgccccgtccgggaggtgaggggcgcctctgcccggccgcccctactgggaagtgaggagcccctctgcccggccaccaccccgtctgggaggtgtactcaacagctcattgagaacgggccatgatgacaatggcggttttgtggaatagaaagggggtaaaggtggggaaaagattgagaaatcggatggttgccatgtctgtgtagaaagaggtagacatgggagacttttcattttgttctgtactaagaaaaattcttctgccttgggatcctgttgatctgtgaccttacccccaaccctgtgctctctgaaacatgtgctgtgtccactcagggttgaatggattaagggtggtgcaagatgtgctttgttaaacaaatgcttgaaggcagcatgctcgttaagagtcatcaccactccctaatctcaagtacccagggacacaaacactgcggaaggccgcagggtcctctgcctaggaaaaccagagacctttgttcacttatctgctgaccttccctccgctattgtcctgtgaccctgccaaatccccctctgcgagaaacacccaagaatgatcaattaaaaaaaaaaaaaaaaaaaaaaaaaagaaaccattcagtagccgggcacggtggctcacacctgttatcctagcactttgggaggctgaggcgggcggatcacttgagctcaggagttccagaccagcctggccatcatggcaaaaccccgtccctactaaaaatacaaaaattagccaggcgcactggcgtgtgcatgtagtcccagctactcaggaggaggctgaggcaggaagattgcttgaggccaggagacaaactgcagtaagccaagatcataccatggcactctggcccgggcgacaaagctagaccttatctttaaaaaaaaaaaaggccaggcacagtggctcacgcctgtaatcccagcact

SEQ ID NO: 22878 - DNA, 1272 bp, Artificial sequence
  DNA replication origin
ggccgggcggggggctgacctccccacctccctcccggacggggtggctggccgggccgggggctgacccccccacctccctcccggacggggcggctggccgggcagaggggctcctctcttcccagtaggggcggccgggcagaggcgcccctcacctcccggatggggcggctggccgggcggggggctgacccccccacatccttcccggacagggcggctggccgggcagaggggctcctcacttcccagtaggggcggccgggcagaggcgcccctcacctcctggacggggcggctgtccgggcggggggctgacccccccacctccctcccggacggggcggctggccgggcggggggatgacccccccacctccctcccggatggggcggctggccgggcagggggctaacccccccacctccattccggactggggcggctggccgggcggggggctgacccccacctccctcccagacggggtggctgccgggtggagacgctcctcacttcccagacggagtggctgccgggcggaggggctcctcacttttcagacggtgtggctgccgggtggaggggctcctcacttctcagacggggcggttgccaggcagagggtctcctcacttctcagacggggcggccgggcagagacgctcctcacatcccagacggggcggcagggcagaggcgctccccacatctcagacgatgggcggcctggcagagacgctcctcacttcctagatgggatggcggccgggcagagacgctcctcactttccagactgggcagccaggcagagaggctcctcacatcccagacgatgggcggccaggcagagacgctcctcacttcccagacggggtggtggccgggcagaggctgcaatctcagcactttggggggccaaggcaggcagctgggaggtggaggttgtagcgagccgagatcacgccactgcactccagcctgggcaccattgagcactgagtgaacgcgactccgtctgccatcccggcacctcgggaggccaaggctggcggatcactcgcggttaggagctggagaccagcccggccaacacagcgaaaccccgtctccaccaaaaaaatacgaaaaccagtcaggcatggcggcgcgcgcctgcaatcgcaggcactgggcaggctgaggcaggagaatcaggcagggaggttgcagtgagccgagatggcagcagtacagtccagctttggctcggcatcagggggagacc

SEQ ID NO: 22879 - DNA, 1145 bp, Artificial sequence
  DNA replication origin
aggagctgcctggaaaccagagggtgggtagccctaggagtaagggtcagacgtcctccgtgtgaccccgtgggcggaaagggtgtgtggtggggaggggagcgccagaccccttgtcctgcccctccatttccctctggcatttgtcacctcttgcctctcctaagcgcgctagagggtcaggtggtaaatacaggggaccggcaggggtcagacactgcgaaaaaacttccgaaccttgtgcgtgcgggtcctggcaccaggagagcgaggaaggccgagccccgcgcctcacgcagctcgtcctggagagctccgcgcggcgccgcgcggggtgctgccctggggcggctgcagggagccccttcccggcggggcggagccgggcccggggcggccgtcttttcttggcctcccgcgctgcgacggtcccccggacttgcctgccagcgccgctcctcctccctcccacgatttgccagcgagcgcggctgccgcccgcgcccagaggagccgccggggccaaaacagcaatttgttccctaacgagcgaagcggtaggctcagcacccccatccctcgagacgcactcacagtcaccagcatcagaaagatgctacccctcatcagcgacgagagccaaagccccaggcacctgtatctaaatgagctggcgctttgggaagggaggacgcgctcctccttctccggtcctgtgaagcctggaatctggtccccaggacgaggagtgaccctgaggagtgaccctaaggagtcgggagatcctactcccatctcatccccagccttggctggatcctggctgtaaagtaatcccctcccccagccgttcaaggcttcctctccaggcggcggtccagctgtctactaaaaagaaggacattttaggagtcagttcactttgagacaggataaggccacaattgaaatcacccacccacttgggaaccaggtctgccacttgctgtccctgtgattaaattttttttttaattttggtctgtgtgaatttttttttttttttttttttttttgtgacggagtctccctctgtcgcccaggctggagtgcattggagctatctctgctcactgcaacctatgccgaccaagttcaagcaatta

SEQ ID NO: 22880 - DNA, 902 bp, Artificial sequence
  DNA replication origin
tcctcgtcctggggaccagattccaggcttcacaggaccggagaaggaggagcgcgtcctcccttcccaaagcgccagctcatttagatacaggtgcctggggctttggctctcgtcgctgatgaggggtagcatctttctgatgctggtgactgtgagtgcgtctcgagggatgggggtgctgagcctaccgcttcgctcgttagggaacaaattgctgttttggccccggcggctcctctgggcgcgggcggcagccgcgctcgctggcaaatcgtgggagggaggaggagcggcgctggcaggcaagtccgggggaccgtcgcagcgcgggaggccaagaaaagacggccgccccgggcccggctccgccccgccgggaaggggctccctgcagccgccccagggcagcaccccgcgcggcgccgcgcggagctctccaggacgagctgcgtgaggcgcggggctcggccttcctcgctctcctggtgccaggacccgcacgcacaaggttcggaagttttttcgcagtgtctgacccctgccggtcccctgtatttaccacctgaccctctagcgcgcttaggagaggcaagaggtgacaaatgccagagggaaatggaggggcaggacaaggggtctggcgctcccctccccaccacacaccctttccgcccacggggtcacacggaggacgtctgacccttactcctagggctacccaccctctggtttccaggcagctcctgcttgcggagacacctcataggagcagctggatccattttccagagcgtcaagttgaggatgagaaagtctcgagggccgggcagctgtgcgcgcagaacccccgccccatctgcttttagatttcccgggtgcggctggagcccctctagagc

SEQ ID NO: 22881 - DNA, 1900 bp, Artificial sequence
  DNA replication origin
ggcaggtagagatggggagccggggcaagaggtgggatggagcaagaggggttggatggggggatgggaagatgggatgacatggggagatggagaagatggcaacagaaaggaggagggacagtggatggggctggtgccaggctgggtgagactgcaaaggtgaggcaggctggccaggtggcccctcaccgctcttccggtacaggatcagctcagccttgaactccttgtgctcgtccagggccttgcggatctgttggcggacgagctcactggtgtctggcccataaaggaaggagcaggcacagccccgctgcatgacctcagcccgggagaagcccgtgaggtcacagaagccatcagagcagtagaccacggggaagagccccgccacctgggcgttgcccagcacgaagttactgtctgcaagagagcacttctcagaggaggcgtggggtgaaggggcaggaggcctaccacccctcctttctcaaatgcctgcaaccaaagagtgggttttccaaaccccaggaatcctgcgtgtgttaaggcagggctgtttatgaatagcaatcagtgtgtgtcacctgtttgtcagtgccctgcagcaggtgtgagtacattcaaggatcagcacatgtgaactgaggtcggtgaatgaagcgctgtgcgggcactgtgccttctggagggtgtcctgagcaatgtggggtaagggctgggattggggaatccctaatgaggactgccctgccagctctgggccagcctcagccccacctctacttctgccaggctcacccactagccaggtacccaggttggctgtctggcttctcccactgagacacacctagactggaggcaaccccagaccaccatacatcctgctgtctgtgttttagccctagctgcctgacctggctcaggaattagtgaatgtgatcaagaatgggggtgtaagaatggtgactgagcacgggagccaggagccaggaatgtattggggagtggggggcactgaatcagcaggctgcaggagccaagcacactggcaaagcagatggaggagcccggagtggggagagcgcagggctgggctcccaccccctatcaggaaccggagaccaaggaggacctaggcagagagctgggaagccccacgggggatgtgagggagaggaggagggaggggctttcatcacttcccctgtgctcagagcccccagaaccggggatccagagctcggggcgccttctccaaacttccccagtcctgatgggagtccccaaaccatcttcttggggctagatggcctccccaagtctagggggttcaggctatgagacacggggcttggacacacggtgctctcccgagtgccgcctactcttatctccgtttgcaaatctcttttctaaatctgtgttttgagccctctcagctgtccctgagcactgttcacccgcctcgccttaccccaccagtccgagggtagttgctgcgacagcgccagacgcaggggtgggatgggtcagactgactaggttcgggttcgagacccggctaacagagagcatcccaggacccacacccagggacttctggccctgttgcctcgcctgaagcagtgttgaccccgaaccttcgaaccttcggggaaacagcgcctagcaggagacgatggccccagcctcaagaggggcgggtagggaggagagggtgagaataggctggcgccaagctgggctgctgggggttcggggaaggcgggagccctggcgagggtccggcggcccgggtgcaagtgggcgagggtcggactcacgcgtgccgtcgaagcgcgtagcgatggtgtccaggaaggtgttctgcggcgccaggaggccccgcatg

SEQ ID NO: 22882 - DNA, 1205 bp, Artificial sequence
  DNA replication origin
gcaaagaggccttgacagctttgtaacctgcccaaaggcctgccccagccttggaggacacaagaggggaaagactcgaagaacttaaaagcaggctttgcccagagctccacccccagtcaggtttgctgtaggaaagaggaacctggtgggtctgtgctcaaccttattaactggtcagaaagtacctgcttcacaggtacaattgggtttgtttgctttcagtttcttaataaagttgacttaaaaactccaactttgtctcaatctgtctatttggaaaaaatattcccataccgaggaatgtggagatgagagcagcacaggcctctcaggcagcctgagtgggagtgaaatgaatgcaggtgcatgggggacccccgtactcagactgggtgccaaggccccgcccgggcctgcggcacccaataccccgaccacagcacctacatgcacctacctgtctccttccatctgtcggggccccctcggttcttggtttcgctgatgtccttgtgagagactaggaagagagccacctcccctttctcattctttatgggtatcacatccaggagacaccagaacgggagccctgggcacaaaaacaaactcagcccacctcctattctcagcactgcctgaggtgacagaggccctggctccactgacatcccgggcaagacacaggcaggatctagcggtttcctgggggaagggctggcagtccagtttcactgaaggcagggcttgatggaattgggggaaggaagcaagggagagcaaacatgacggtcagacctgtcgtgtggtagatctgccctgccgaaatgcggatgtttttctgttggatgcgggaaacccgaggttggaactgaatgcaggctgaggctagggtgaggcaggtagagatggggagccggggcaagaggtgggatggagcaagaggggttggatggggggatgggaagatgggatgacatggggagatggagaagatggcaacagaaaggaggagggacagtggatggggctggtgccaggctgggtgagactgcaaaggtgaggcaggctggccaggtggcccctcaccgctcttccggtacaggatcagctcagccttgaactccttgtgctcgtccagggccttgcggatctgttggcggacgagctcactggtgtctggcccataaaggaaggagcag

SEQ ID NO: 22883 - DNA, 772 bp, Artificial sequence
  DNA replication origin
tttctaaggctgatctggacacctggtgactctgccaaggagcagacagtcatacgaggccacctgccgggtgtggtggctcacacctgtaatcccagcactttgggaggccgaggcaggtggatcacaaggtcaggagatcgagaccatcctggctaacatggtaaaaccctgtctctactaaaaatacaaaaaattagccggcgtgctggcggatgcctgtagtcccagctacctgggaggctgaggcaggagaatggcgtgaacccaggaggcggagcttgcagtgagcctagatcacgccactgtactccagcctgagtgacagctcaaaaaaaaaaaaaaaaaaaagccacctgcatctggaaacccggctaaatgtcagttacctggaagctgacaaagggctggagggctggggaggaagaggtcaggtttgattttggacctgaggcgcatcgagagttaaaaacagctggaatggaatggtttggctagagaaagggtggaagttgagatgctcactcggtgtcagtggaatagccgagggaaagcaaggtgaagggggagagctgtgaggaaaggtctggagaccctggaacttggaggagctgggaggaggccagctgagggctgcatcacccacagctgagaggaactatggttggcagggtcaggtgatacagggacttcaaggaggatgagggtttggtcccagaaggtcactgtgaccttccaggtgacattttgggtgcagaggtgggggtggaag

SEQ ID NO: 22884 - DNA, 1112 bp, Artificial sequence
  DNA replication origin
gggtccaactgcatcctgtgaccccaagccacagccacacataccctctgcctcaccattctagatcagccaatccgccctctctcccttgcaccccatggcccccagctctgccaggacctctgtggatcttgggatcccccatccaacaccctagagctcctgcaaccctccagctaggctcaagagtgactcccagcacacagccttgggagagacctcagcgcacaaccctactccatgccaaggccaggtggagaacttcgggctgaggggcaatccagcctctgctccgtggcccggtctagcctgtgactacgtgtgtgtgtgtgtgtgtgtgtgtgtgtgtgtgtgtgtgcgcgcgcacctgtgtgaatgtattcgcctgtgtgctcttgtccacgaaagtgtgtcttcaccctctgcctgagtgacagtgtgtaggtaccagtgtacctttgtccctctcccaagtgtgcacagccttttcagtgagtggctgtgttgaggcgcctgtaaggggcatacatgtgtccttgtcttcttgactgtgtggggcacacacatagccttaacagtgtgtgtgcatgtccatgcaggcgtgcttggcacctgtgtgtgaggctgagtggtttgtgtggctgtggggatggatgagactgaatggggaggggagggagggccttctggagttgatgggctcagagaaatgcaggaagaggagtcccgttggacaggtggaggtgagggcggaggtggcctcaccatccatcttttggggttgaggctgtggttgaatgcagtgagcaccccagtccttttgcccacgccagccaggccctccgactgggcccgttacctgggatgggtgccagccatgggggaaggggtgtgatttcccttgtgtcatcctcagtgccaataggagctggctggggaaatggcagactcttctgagggttgagggggtggagaggggtgtgctaggctggcagtgaaggggcaaagcggcgggaagccatggggctgggtctgtgtctgcgtgtccccacccccagggcccggcatcctcgcccacagtcttcctgcctgctcaggccctgctgttcccc

SEQ ID NO: 22885 - DNA, 1142 bp, Artificial sequence
  DNA replication origin
gagatcgtgtccacctacttacgctgccaccttgcagtcactggggcttctctgagctttgaccaggactccataactactcctgactccaccctggctgtttctctctcagtggccttgtggaggtcccctctccaggttttccacagatcagggccatggtctcacacacacgtgcccccacgccctctctcccaccctcacaaacctaggatggcgagcacggtgccacccttgagcacctccatggagccagagcagacaaagtagagggcctgcagggcatcgccttggtggatgaggtactcgcccggcgtgcagaaggcgggccgcagggccagagacagtgcccgcaggcagccgcggctggccgcctcaaacagtggcagctgcaggacctccttgtgcaggtgcatggcgatgtctgcgcgcagctcgtcagggaggctctgcagcagctgcaggtgagcaggtgcgggggtgggggggttgggagtggcagaagaggaggtggcctccagccagcccctctccaccctggcaggcctcaggaacaggggaggcatgggagggacctgaggcctctctcacaactccaagctccacacagggtggcagcgagggggcttcctccacctccctctcaatcactttagcgcccagagcagcccagcttcccacctcagtgagtaccaagcccccagacctaactgcggttcagagggccctccaagccttcttagctgccctctgtcccatgccgctgtcccctcaagagagaagggaggcacaggggccaaaattctgcattcatcctcccccactcctgataattctaggctattgcaaaccccctgagggagcaaaggctagcaggcccagccccggaggccgcacctcggtggtgtcgatgccattgttcaccgcccaggtggcctggaagtactccagcatgcgctgcttgaggggcttggggatacggtggatgcggatgtagtcgcgcaggtcgcgcgtgcggctgtggtacagaaagcggcgggcgtacatgcgctggatgatggccgtcacgttcccaaacaccaccgcgtgcatcagggctgggggagggtgacgagagggggtcacctaggggacctggcccg

SEQ ID NO: 22886 - DNA, 1174 bp, Artificial sequence
  DNA replication origin
cactgaggtgggaagctgggctgctctgggcgctaaagtgattgagagggaggtggaggaagccccctcgctgccaccctgtgtggagcttggagttgtgagagaggcctcaggtccctcccatgcctcccctgttcctgaggcctgccagggtggagaggggctggctggaggccacctcctcttctgccactcccaacccccccacccccgcacctgctcacctgcagctgctgcagagcctccctgacgagctgcgcgcagacatcgccatgcacctgcacaaggaggtcctgcagctgccactgtttgaggcggccagccgcggctgcctgcgggcactgtctctggccctgcggcccgccttctgcacgccgggcgagtacctcatccaccaaggcgatgccctgcaggccctctactttgtctgctctggctccatggaggtgctcaagggtggcaccgtgctcgccatcctaggtttgtgagggtgggagagagggcgtgggggcacgtgtgtgtgagaccatggccctgatctgtggaaaacctggagaggggacctccacaaggccactgagagagaaacagccagggtggagtcaggagtagttatggagtcctggtcaaagctcagagaagccccagtgactgcaaggtggcagcgtaagtaggtggacacgatctcgcaggtgtccctggggccgagcgagtggagggccagcctttgaaaggagccagtctatgggggacagaggggagctgcccttccttcaggaggaaaatcagaagctagggatggaagtgctggggagagtgtcaggcagggctaaaaaggggaggaacaaaagctgtctttgtggtcccccaggaacagtgagatgtgactttcctgaggcagatcacagagcaggcccagagcccagatgggtgacagagctcagtctccaaacagtcagggagactcattctgatgaaatggtatctacagtgtatatacttcccttcctgggaaaagaaggaggtgaaaaaggaaatcagttccctagacgcagatgaagaaattgcaggtgtggaatggacacaatagtagtgctgataacagggggctcacagcgtgactagccctgtcccagctccttactgctttgtctcactctaacctcacaaaacc

SEQ ID NO: 22887 - DNA, 961 bp, Artificial sequence
  DNA replication origin
ccagctatccccagcggcctccccgccccatcggccacggcccgggccgcagggggcgctgtgggaccgccccgagcccctccacccccgcgcggggatgttaccatgccagagcctccgagcagctgggccggctcagcccacccgccagtaagagccgctctgattggccaggccgcagccgggagggcggggccggcggggggtcgcaccccttcgtggccggggctccggtggctcccgccggcgagcggggccccaaccggcccggtgtgttcggtcccggccccgcccccccggcacggagaaccaggccccgcccccgcgccgccgcgtcccgggtccgccccccggggggcggggcacgcctgctcccgcctctgactgacggtcgggggccggcgcctctgcctctccccgctgcctgcgtcctggcttcgcagtcgccggcgctccaggagccgaagcgttcacgcagtgtgtagggtgcctttgcgctgcacagcgaatttaatttgctgtgtagctcttttacagtacttttaagttagttaactccagaactatttgttgagcacctgtgaggtggcagggtctgtctcagggactgagcacacagcagcttggaaaaaaaaaaaaaaaaagacaaatccccgaaatcacgcccttgtggggcgtacacgtgcttctcgcgtgaccctgaagttcacttttgggacctggctcccactgagcgctgaactcatgagagcagggcccactctttgacagaagttaaaaatgtgaggtacatgcttgctgtgcggctgaggaaactgtaacctggagctctgcggggaatgcgctgaaggccttggggctggagagtgacaggccccaggcacacgggtgcagaaaggcgctgaccgccagcctgcaaagccccgcaaaaggcgcttcctgttccctttattcccccctc

SEQ ID NO: 22888 - DNA, 2701 bp, Artificial sequence
  DNA replication origin
ggcgactgcgaagccaggacgcaggcagcggggagaggcagaggcgccggcccccgaccgtcagtcagaggcgggagcaggcgtgccccgccccccggggggcggacccgggacgcggcggcgcgggggcggggcctggttctccgtgccgggggggcggggccgggaccgaacacaccgggccggttggggccccgctcgccggcgggagccaccggagccccggccacgaaggggtgcgaccccccgccggccccgccctcccggctgcggcctggccaatcagagcggctcttactggcgggtgggctgagccggcccagctgctcggaggctctggcatggtaacatccccgcgcgggggtggaggggctcggggcggtcccacagcgccccctgcggcccgggccgtggccgatggggcggggaggccgctggggatagctgggaccccggggagggcgagggaggccaagggtgagggaagagagcccgggaggggggatgggggcggggactgggggcgaaggggcgggggaggccatgatggagcctggccgggggcgaaaggtgcgagagtggcgggactgggtgaagagtgggattgggagaggtgggggtgggttcgcggagaaagatcgggaaagaagagagagggcggagatgaggggactgaggggaccaggggacaggtggggaccagtttcccctcctgggatatttggtgtgcgacatgcccttcccccagccccagcgcccgttccctttggaagcctgggtgctcctcagaccacttggggactccctgcttcaccttcctgcatttgcaagagcttgtctcctgaggtggagagggggcctctgaagaaaggggctcccagcccaggccatcaacaaactaacgactctgtgtgaccttgggcaagtcactacctttctttgggcctcagatttcccatcaatttttttaaaaaggaaatgcatgaaaattaaatcccagatctcttccagggtctaaatgaataggtttttgaggaggaagtttaggagaatgggtttggtagggaagcaaaggaaaggatgaagatggaggcgaggccttgggctggggctggagaaatccccacgggtgcggggggatggtagacagaaagcctgccgggctggggctggctagccttatcctgttggagggatggaagaactctaaggagaggaggaggttgaaacctaactccacaatgatggagaccaaaagtaacattcgcttcttcagagggagagtgatgagatggcaggatcagaaagaagcaacaggggccgggcgcggtggctcatgcctgtaatcccagcactttgggaggccgaggcgggcgaatcacctgaggtcaggagttggagaccagcctgaccaacatggagaaaccctgtctttactaaaaatacaaaattaggcgtggtggcccatgcctgtaatcccagctactctggaggctgaggcagaagaatcacttgaacccgggaggcagaggttgtggtgagctgagatcgcgccattgcactccagtctgggcaacaagagcgaagctctgtctcaaaaaaaaaaaaaaaaagcaacaggaagatactttctagtaaggcagatctttggggagcaagaggaagagtagggctggtccaggaaagttggaaactaggatggtctttgaaacggaagggcaggtgctgtttggggcagctgaagaagggccgcaggtagatcacagggtaaccagctggtctctcagccttttttttgatgatggctaccactttctgagagatgtgcctcccagccttcatcttcaggaagtgggaatgagtcagaccaagcagaccttgggaacacctggctcgctgaggatttctggattgtgtaaggattggggttaaaaaagaaaaaaggaaatgtatctgaatgtaagcagtatcatctgtggcgccatcatccttgctgggaggcagctttgtgaactggttgaaagcacaggctttggagtcagactgcttggattccaaacctgcctctcccatttaatgtcttggaaccttggtcaggttacttaatctctgaacctcagtttctttatctgtaaaatgggaataataacctctgagatggttgccaggattaaatgagtgtttgacacagtatctggctcataataagtgctcagtaaatattagctattagctgttatcattccctctttctgttttttttcctactgcctctccattcttgtccttttctccttttattcttctgagtgctaagttctgagatgccccttagatgtgaagtcccagaagtattgattgcatctttggtggtgggaaaggggtggcccctcactggcccaggtgaacatatgatgatcagatgatcaagtgtctcttcatcatctctcagcccacaaatgtgtttttgttccagggaagacacaggatctgcttctctttcagcaaccatttctatatccttccctgtcactagttaatgtcttcatattctcacccagaaataaaataagacccaaagttttatggcactgcagcaggtaggagagggacggggtgtttcaggaaagcagggacacaacacgggaagctcagcgaaggaagggctttggaagttctgtagtagtttatgtttattcca

SEQ ID NO: 22889 - DNA, 1019 bp, Artificial sequence
  DNA replication origin
cgagtcccgactcctcggccccgtcgagggcgccgggggttccctggagtcccgctggcgggggcgcgcggcgagggcggaggcagcgtagcggacagccgcaccgaagcaaggcggacggaggcggccggctcttgctcacacccgccgcctcgccgcgctcggcgcgccgcccgggcgctgcccctccccgccccccgcgctctttcccttcccccgccaacctcgcttcctcccacccacacccggccgagactcgggcttcccccgcgagcgccgactgcagcccgcgcgacgcgcgccccattcatgcaggccccgcctcccgcccagaggcctcacaggcggcccggcccgccccacctgcgcccgattgacggccgcgtctgccaatcacagcgcctcccgcccttgacggcctcgtgccgggcgccgagcgctccctggcggcctcagccggcatcgaatcaccgcggttcccagagggcgtgaggggctggcgtggacacaccgggaatggaccgtaccctttttcaaaaggaactcatgatgtatacaagtaagtaaaatattatacaaggcatggcgtacaaaactaactacaagagaagtagaaacaagcaggatactcagaagagggagagagatagtacctgttaagagtcggggtgagggagatcatagttggaccaggcattgagggatgaggaagcccttacccgacagaggcaggggaaaaaacgtttgggaggagagaagcttaaccatctggctgcgtgtgaaaatggagaggcgggagaagaacgctgttctgggctcagtcggcggctgggtcgttgacatttgcggtggaaatttgttgtctagccgccatcttcttccagtgagagcacccccttttcttttaggaaaccacctctcccctcttctcagtctaaatggagctgaattttatccccagttccaaaggaccgcatgacccaggcccagtcagtcacaacattttcctcctctaccca

SEQ ID NO: 22890 - DNA, 1013 bp, Artificial sequence
  DNA replication origin
cggtcatctcatccgccgaagcagtgggtggtggggtgtgccagggacccccttttcaccttcttatccacctgcctccttggtcccttcagggaggggtccccgtctccgggggctgggcatgaagagagccggtccagtctgtggtccccagctccagcggggccgtggcgtggcgcagcccctcagccctgactcccacaagaggacagcgagtcgtagagtgagtcactgagagactccgaggtctccagccctggggggcccccgctggccactctgccttcctcggccatgtccgaagtgctgggggtgcggctacccccgaaaggtgggccctggggcgtaggggacgggcggctgggctcctggcttcgcttccggtccacgggcagggcctgggaaaggaggggcagctcgggaggaagctcctctccacctttcggcccagcctcagaggcactgagctctgaggggcgtctgtgcacctgatggggggctgctccagagggggcccaaggtggggtatacttcagaggaaacaggctggaggtacaactgagaacagtcctacaaggttctggggagggacagaaacctttccccacgagagaagtgcaaggagggcagtggggagggccgctcacagggcatcccaggggtcctcctcccagagggtgcagcactgagactgtgcgacacacaggccgtaccttactggagaaactggtctccccacatcactccctcctgctcccgagtcctttccctttcctctgctgcaattctcaccatgggggtcctgggcagcccctccagttgtcggggtgggcacatgagagggtccgaggagctgccggctgccctagtattggggaaggtccagttcttggccagctggacaggaggggtggggcctgggtcttcacagggatctgtccaggaacaaagggaaggtggatggagctgcctgggcagctccaggatgcccaggggcatcccaccctcccacc

SEQ ID NO: 22891 - DNA, 1349 bp, Artificial sequence
  DNA replication origin
acaaacacggaaaccatccgatttctcaatcttttccccacctttcccccctttctattccacaaaaccgccattgtcatcatggcccgttctcaatgagctgttgggtacacctcccagacggggtggtggccgggcagaggggctcctcacttcccagtaggggcggccgggcagaggcgcccctcacctgccggatggggcggctggctgggcggggggctgacccccacctccctcccggacggggcggctggccgggcggggggctgacctccccacctccctcccggacggggcggctggccgggcagaggggctccccacctcccagtaggggcggccgggcagaggcgcccctcacctcccggatggggcggccagccgggtgggggggctggccccccaccttcctcccggtcggggcggctggctgggcggggggctgacccccccacctccctcccggacggggcggctgccgggcggagacgctcctcccttcccagacggggtggctgccgggcggaggggctcctcacttctcagatggggtggctgccgggcggaggggctcctcacttctcagacggggtggttgccaggcggggggtctcctcacttctcagacggggcggctgggcagagacgctcctcacctcccagacggggtcgcggccgggcagaggcgctcctcacatcccagatgaggcggcggggcagaggcgctccccacatctcagacgatgggcggccgggcagagacgctcctcacttcctagatgggatggcggccgggaagaggcgctcctcacttcctagatgggatggcggccgggcagagacgctcctcactttccagactgggcagccaggcagaggggctcctcatgtcccagacgatgggcggccaggcagagacgctcctcacttcccagacggggtggcggccaggcagaggctgcactctcggcactttgggaggccaaggcaggcggctgggaggtggaggttgtagcgagccgagatcacgccactgcactccagcctgggcaccattgagcactgagtgaaccagactccgtctgcaatcctggcacctcgggaggctgaggctggcagatcactcgcggttaggagctggagaccagcccggccaacacagcgaaaccccgtctccaccaaaaaaatacgaaaaccagtcaggtgtggcggcgcgtgcaatcgcgggcactgggcaggctgaggcaggagaatcaggcagggaggttgcagtgagccgagatggcagcagtacagtccagcttctgctcggcatcagagggagaccgtggaaagagagggagagg

SEQ ID NO: 22892 - DNA, 978 bp, Artificial sequence
  DNA replication origin
agtgaggagcccctccgcccggcagccaccccatctgagaagtgaggagcccctccgcccggcagccaccccgtctgggaagggaggagcgtctccgcccggcagccgccccgtccgggagggaggtgggggggtcagccccccgcccagccagccgccccgaccgggaggaaggtggggggccagcccccccacccggctggccgccccatccgggaggtgaggggcgcctctgcccggccgcccctactgggaggtggggagcccctctgcccggccagccgccccgtccgggagggaggtggggaggtcagccccccgcccggccagccgccccgtccgggagggaggtgggggtcagccccccgcccagccagccgccccatccggcaggtgaggggcgcctctgcccggccgcccctactgggaagtgaggagcccctctgcccggccaccaccccgtctgggaggtgtacccaacagctcattgagaacgggccatgatgacaatggcggttttgtggaatagaaaggggggaaaggtggggaaaagattgagaaatcggatggtttccgtgtttgtgtagaaagaagtaacatgggagacttttcattttgttctgtactaagaaaaattcttctgccttgggatcctgttgatctgtgaccttacccccaaccctgtgctctctgaaacatgtgctgtgtccactcagggttaaatggattaagggcagtgcaagatgtgctttgttaaacagatgtttgaaggcagcatgctcgttaagagtcatcaccactccctaatctcaagtacccagggacacaaacactgtggaaggccgcagggtcctctgcctaggaaaaccacagacctttgttcacttatttatctgctgaccttccctccactattgtcctatgaccctgccaaatccccctctgcgagaaacacccaagaatgatcaattaaaaaaa

SEQ ID NO: 22893 - DNA, 1827 bp, Artificial sequence
  DNA replication origin
gtctcttccgtcactgaacagatgaggaaactgaggctcaaagggaaacgtccccatggcaggttggaaatgcgagtccatttacactcagatgtgtcccctgccccccacccgtggacatgtttagctttggtgagaggatttgagctgggaaggcctgaatgaggcagccagagaaggaaagactggggtggagggggtggtgtgaaattgaaacagcaacaaaaagcccggctctcagaaaatgggatttaggtctggttcccagaagactgtgttagacctaaagggccactgaggaagactgcggacttccttctttgcagggagcatctggctgaggcagcctggagacaggcacgcaccagaagacttctggttccatccaggcccaaggaccactgaactggagcggtcttctccatcccccagcaagcctgtgcgtgagctggggacaaggggcagaggaggcagaggtccccctcacaccaggaagggaacagcgccactaaagggcctggtggaggcagggtggaggtggaaggagactcagcagaaggggtgagttctccatgtttacggaactgaacactccccaggcctcccactgcctcccactccccagcccccctcatcacccggatctgaaggatcatgtccacctaaatcgagttcagcctccaccctgccactccgccccccagagcctcctggaccctaatgcccaggcccccgacacacatacggcactcccaagtgaggtgtgaccaatggcgggaggtggtatcacccagtgacatcatttgaggcccaaagagcttgcatacagggagaggagggtctgagggtccagggaaggatgtcattggctctgaagctcctctcaaagagaagaagggggagtgtaggggaggtccttcccctgttttctctgcccaatccttagcaacccaaacagagggcccgagtaccctcccccttagccccaggccctagtggttgtataattccacaggctattgatgttacataagcctactaggccagccgagtctctgccccagcccctcccctacaattcaggcctaaaactggagaagagatgcttcatccggacccatccatgcctggccaaaaccaaaacaacaattagagcatcttgatgcagagttgtcatagcaagccccaagcacagggatggagccaagacgcccagatgtggaacaatggcagggagtagggtgggggttgtttccgtggagggtgggaaagatgagcataaagtggttgggtttgggactggagggttgggccagagggggttgcccgataggcactgcccctcagggctcaccctggcacacacatacccatgcacacacatacagtcacaccagacgcccgggctgactcctcacggggggcctgggtatctgtgaggagccttgtaatgctgtaatgccaaagcaggggtggcagggtgacaggggaggagaggcgcgcctgcgggcaggaagaggcctcggtccattccttgacaccggcctttcggtcctctgacttcagcaaggaccacggaggaccttcaaactagggccaggggaggatgctttcgtggtccagagggcttgctgaggatgacagggagccgggagccggaggatggaggatggtgcaggctggggagatgccggtacctttccctgggtcatggtgccgtctctcggggaaggggtccctgaggcccgggtggccgcttgggtaaccgcagcctgcctgcgtctcttccttcctccgcgtgggttctagcaacatccactgcagccg

SEQ ID NO: 22894 - DNA, 1432 bp, Artificial sequence
  DNA replication origin
ggcacggtggctcacacctgtaatcccagcactttgggaggctgaggagggtggatcacttgaggtcaggagttggagaccagcctggccaacatggtgaaaccctgtctctactaaaaatacaaaattagccgggcgtggtggtgcgcgcctgtaatcccagctactcaggaggctgaggcaggagaatcacttgaacccggaagacagaggttgcagtgagccaagattgtgccactgcactccagcctgagcaacagaacaagattttctctgtaaaaaaaaaaaaaaaaaaaaaaaaaaagactttgataatttgtctgcctacctgggccctgctttctcagggactttaggtgggtccctgggcagtgagagggaagcagaaggtaagtggccacccccacctgtcccaggtcttagtttctcgtcccatcctagcaggttcagatacttcttttaggcagatttgtgggtgctcgctctggggcagcccaggacattctggtaggagactcctcagttaataatacctcacatacttccagcacttcttggtcttttatgtgcttttacggccataacctgtgcgtctgacagtcaatctaggatggacagagctctgttctaagcctctttttcgtaggagctgcagctcagagaggttaagggccttgccaaggccacgcggccagtgggtgactaaattgggacttgatcccagctcttgagattgcaaaccccatagtgacactgcagcagctacagaaaacggggcctgatgatggctgggtcccagtgacacgtctggggaagcggggagaacgagctctggcatgggaggaatggaaaaggggggaagatggagacggggtgatggaagctaagcgtggaggcaggaagagagctctggcaggggttgtagaggctttgagacagaactagcggtgtctccagaaagaccccgtgaaatgtcccagcagggctgaaagaaacagaagaggtgtcctcccaccccatgtctctgtgaaccaaggcagggagggacctactgtgtgcatttcacaggcgagaaaaaggagcaaggataggtggctattggcttgccccaggcccacaggagcgcagggcccaggggccctgttagaagcgggcagcacaggcgagacttccagaccttcccctctaccagggatgatgaaatagatgatgagaggggaggtggagatggagacagaaatcagggccgcatccaaagagggaggaggaaaaggcagaggcgcagctggagctgcagagaggtgcagagacagtggagatgaggccctgatgcccggctctggtttcacgcgggcagcgtcagctggtcggtgtcacggagttcccgcgtcctccgcccgctcagcccccgcggacccatccactggggttg

SEQ ID NO: 22895 - DNA, 1554 bp, Artificial sequence
  DNA replication origin
gcgtgccggtgccggcgcgggtgccaagccgccctctccgctcgcccccaggtcttctggatcggacccctggtgggcgccatcctgggctccctcctctacaactacgtgctgtttccgccagccaagagcctgtcggagcgcctggcagtgctgaagggcctggagccggacaccgattgggaggagcgcgaggtgcgacggcggcagtcggtggagctgcactcgccgcagagcctgccacggggtaccaaggcctgagggccgccagcggcctctacggccccgacggacgcttgtgaggcccgaggcagaagggcccaccccgtccctcctctcccgcaggtctgaagttggccccccagcgcagagtagctgcttcctggacgtgcgcgcccaggccagtgctgtgagcaggcggggaggaggctgccggagggagccctgagcctggcaggtcccctgccctgaggctgtgagcagctagtggtggcttctccagcctttttcagggaactgggaacttaggggactgagctggggagggaggcaggtgggtggtaagagggaaactctggagagcctgcacccaggtactgagtggggagtgtacagacccctgccttgggggttccgggaatgatgcaactggttttactagtgtgcaagtgtgttcatccccaagttctcttttgtcctcacatgcagagttgtgcatgcccctgagtgtgaacaggtttgcctacgttggtgcaagtgtgcatggctggggacttctcacttccccttgcaccccttcctccccaacctgcaataaatccgcttctcctgcagtggatgagtgtgggtgccagtcctcctcaggagaaggggaagggaaggaggccactttgagagggctgaagggagggccttgatttccagccgcaatctggctcctcctggaaaatttcccccacctgcagcgctgggccccaaggcttgccaagactcattgctggaggtagagaggtgtcaaccagagaacagctcccctagacatggcctctggaaaaaggaaatctttggtggccaaagatttcctttctgtggtgagggagaacctctccaaagaggaagcaggcatatgagtgcgcacgccttcacgtgtgtgtatgctgtgtgtgcccgggacccccgtctccaggggtgccccagacccagagattagcctcccacttcggcgcagaaaacaaaagccctttgtgggacccgggcctttgtcttgggtgaggggagatttgcacctagacacttcttgaaaggagacactcagtttcacaagtgagccctcttgcccagcacacacctatggctggctgggcaaggcgctcaggcatgcaaccatgggcaccaggcaatacccatccatcacccatctcactctccccagtcctcaggcagcagcttttccaccccaggaatctctgttccttctctgtctgcctctccacagcccgtgatcccctgcttctggctcctaccactggacagtcattgtggatagagcagcct

SEQ ID NO: 22896 - DNA, 1371 bp, Artificial sequence
  DNA replication origin
acccatggaagaaaggacagactgacctccggccttaagaggagagacctgggggaggagctgctccagcaggaaatgccagagctgggcaggaacaatagcggggtttctttagcccttgttttctttggcatcttagctgccacagagcccagagcccgctcctccaagtccttagcattcctgcaggctcctcccctcagccctgcctgacaaactgacagaggaggcacctgttctctacttcctctgcaccctcccgctggactcttccccctagcttagcaccacactaaaccctcaaggggcttttaaaattaacagtcacaacgtaaggagactttactgagccttactctgtgccaggcactgtgctaagggcttctctaacacacatggggatgggagtctttaatgcagctcctctcccgggatcctgggggtgggtcctccccctctaagccctagagagccctccagcctcgttctccacatgcccgacctggagtgggtgggaagagggagagggtggtgtgcgaggaggcagcaggtcacaaaggggttacaagctcagagggaagggggatgggaactggaagaaagtgtcacccagaccaggggtagaagaacttgactttggggagactgagaaagaccacatgtaagagagagagacatggaaaatgaggtagaaacagacagaaacaaagaaaggcacaaaaattaagaggcagaggaaaggtgaaaatagccaggagacagaaactgcaggatgagagaaatgaatagagagagacagagagactaagacagcaaaaggcaggaaggaaaaacagaaaatgagaaggtgtgagagagagagagatggagaggtggagaacagagagactgaaatgagaaagagacctctcggagagagaccgagaggaagaggctggcagagggagagggtcagagaccaaagacagagacaaaaagagaaatagggttttgcaaagactgactgacagaaacagatttcgaggggagagagatcaagaccaagtgagggtttgaaggagacttaggggaggtggaggaagagaaggagagtcttagatccagggtgaggggcttctagcaggaagagggaagacgccaagaccgcgcttgggaggtcagtggtgcgtctctaccccccctgctcccccactccaactcccagagtctcaaggcctcacgtcacacccccgtcccgtcccgtcgacaaggggaaccccggcctgggagagggcgcctccggggatccgttgcctagtccaggtactgcccagctaccgggcgtcgaggattgcgaagcgtcggggcaggctggcacggtgcccacttttc

SEQ ID NO: 22897 - DNA, 1362 bp, Artificial sequence
  DNA replication origin
ttaaactctgctggactcatccatctgaagtgggctccgctccagggctccattatttgccttgagtgcctgccccaccctcaccccagcccaatgtcggtactgctcactccgacaaggtggcccagggtgacagacaggccaatggacagggctggggagcccacagggctggtgcggcgggagtcagtggaggcgaagatgcagagtgccagctggaaggtcagaatcagctccaccaccatggcctggccctgcgttgtgttgttgttgagctgcaaggggatagcgggttaggaccccggccaccttctggctgtatagccaggggctcggggagtagggcttttggcctccagggacacttagagcaccttggcacctggaagccaagtcctgtggacatcgccccagcgaagccatttgttaaagacactgtacatttcatagtttgcacaggcttgaagctcaggcctgtggccaaagggcagagcgtcagggtagcttttcctggacacgggcctatcaatggctctgcccaacccccagcccccataagctggcatttaccctccatcctgtgggcagctgcccggtttgcctgcctcacaccccatcccggcctcctgcccgtgcctggccccatgccagtgccagccttaaacccgtctctccagtgcggctgactcacagcttgacaatggccaagcaaatcctcctctgtgtttgattaatgaacccagtttgcatggggttgggggctgactctggggctgcaggaggtgggagggaggcaggggtgcggggttgaggggaggagcacaggttggggaaagagggaaccaatactcaacagaaactgctctgcactggccccacattagggggttcctatctacggtttctaaatgtgagccccttgacacctgctgtggcagacacaaccatccccatggaggcgctgagaacaatgaagcacagacaggccagggtcacccaaagccgtgatgacagcccgcttttctctggtggttctactcaaccgctccactgaggtgatgggagaggtgaggggcccaggaggaaggtggagctcaaaggtgagacaggaggaggcagaagtttctggcaggagaggaggggtagcaggcattggagagagaccagggtgggccagcatgaggggagggggagaggaggtgggcaggaagggagcacatatcagcctggagagttgccttcctggccttgggaggctcttgccttcctggtgaagggtgtgggctggcccactctgcggcaccccttttttccaggtggggtaagaggcctggtcctgagcccaccccagggtcgaggctc

SEQ ID NO: 22898 - DNA, 1038 bp, Artificial sequence
  DNA replication origin
ggcagggaaaaagaggcgtcaggaagatggccggcagcccatgtgccacagtgggctggagaggaaatcatgctggcctttgccagagcggtttcggtagccgggggctgggggctgttgtgcagtggataggtggctggaaccttgactccaaatcatgatctttcactgctccgcgactacgcaggcacgtttatagggaagaagtcaagagaaggggaagcctgaaagccacaggtgagactgggaaaggccaagagagggtcccagtcactcaaagggagccagaagtccaaggagggtcccccgaccccgacttgtacactggagaagggctgcccctacttcaaggccacagggcagctgcaggtgagtttggctgggagggaggatgggaagaagtcttgcctggtagcttggctttctaggtagggtgggaggcaagggtgggtgctctgctgagagaaagccagagtgagtcgaatacttgaagagagtgggggaggtttaaagaatgaggggagagctgtggaaggattgctgagcagagctgcgatccctactggggccagagaccatgaacttgtcatggtagcagtctgcacgactgggtgagtttctccagcagtgctcagcagcgcagatggggggcagaaaggcgtggaagaggatgagaacagagacacgcagcagggacggggtggagaggacagggagccaggaccacggagcgctggcaagagcctgctcagggtgagatgcccaggagttccctggagaggacatggtgaagtcgagacagcagggagaacagaaggaaatgggtgagggatgttactgggactcagacagggactggggaggaacagagcctgtagtccagagttaagatgtttctcttgaagatatcagagggctcagtcccagttgggggaaggtatgagtatgaggctgaaatgcagcagacatagtcatctgccccgggaagtcaagaagtttttattcattcattcaacaaatatttattgggcagttact

SEQ ID NO: 22899 - DNA, 1196 bp, Artificial sequence
  DNA replication origin
aggcaggcacagagcttccagagggatgggaggcttggaagggattttagcaggggagcagcatgatcagatttgcattttagcacttgggctgcagtatggaaaattgattgaaacggagcaagggagcagacagagagactggtgaaaggctgcagggcggcaggggtggcaaaaagagggcacagtcaggagatatttaggattgaaaatcagcaggacttgatgcttttcctggatgggggaaggagggagaaaagggtcaaggatgcttcccagatgccaccagctgagctgcagaaaacaagaggagaacatgggggttggggggggtaccaggagacaggaggatcacatctggagacagattgcgtttgaggagcctgagaacaaccaggggacatctgtaggcaggtagatatgccagggatgaggtcaggacacccagctacggtgaagaggggaagactgttatttcaatagcttggcagactcttcttagggaggaacacttttgtttgagaagataccttgctatctgctagggttaaaaggggaaagcctagggcatgggtgaccatagggccagggaaagcctagggcatgggtgaccatagggccagtgcagccacaaaaaatggttaagctgccttgtgtgagaaaggagtgaaatctgtttggcccctgagaggaggagagcagagacggaggagccaagaagggaggggagcgcgggggagggcagggaggcaggaggaagtgagtgaagggccagtggaaatttcccctggtggacagcagaggtgcccatggccttgtgtgatctgacgcggtttgagtcgctgtggaataaaccccttctccacccgcccctctgcaaccccacaggccacagtgtccacagcgtccttggtaaagtcgactgtattcacatctgcattctgtgagtgcgggtataggtgggagtggaggagggaacttactttctgggtttacgggcacggtgtggtgtcagcccatttggaagcaaagcctagatatggagggggccagacgaacaggacctgggaatgcacaggaccccctgaagcaggccggggatctgagtgatcttgctgtatctaagctgacattggaacatgaacagtctgaaatcccatgagccccgctgccctgcacctgcgaccctcaggcta

SEQ ID NO: 22900 - DNA, 1258 bp, Artificial sequence
  DNA replication origin
catcatcagcggcagccccaacagagggaggaggcggcgaggggcaaacagacgggagaggcagcggcgctggcgcagaaaggggagttgtttggaaacagggtaataggcggccctctcagcctcggctcacaggaggctcagcttgtcgggagctggaactccaggccgtgtggggcttgcacgtgggcacatgtatgtgcacacacaggagctccgggcacataggcatactctttgggaacggacaccaggctggtgtccgctgcacctcacacagtgcctggcacagaatagacaaaaaaaaaaaaaaaaaaaaatgttgactgactgaggggctaaatgtctgagagaatgttgatgagctgagcacacacagctccacatgctcctagaatctggctctgccgtcttcttgccatctgctcggtggaccctgcatgtacagactgctggcttcgttggttttctgtaccctcatagtctacacaggtcagtgagggtggcctgggaaacctgcaggttcctgctgcttctgcttagatgacacaactacccagagctagtagaatccaccgtctgttagctgagcacctattacatgccaggccttgggctgggcagccctgtgtttcccaagatcaatcagaagtgggtcctgccttcaaggagcttatgggtcagcagggatgaccagacacataggtgtttggctctgatgcaagaaagaatgcgatgcttgccaagaaagaggtactattaaagagttcagaggcaggagagagttggagatgaccatgaaagcatattggaagaagtgatatttgagatgggttttgaaggatgataggagtttgcaatggccataatggcatgggagggaggcaaggcatttcaggtggagggatagtatgaaagaaatgttgatgatgggggaccagggtgaagcatagggaggaatttaatctgtctggttggctggaggtggcagggaataaatagtgagggccaaggctgagaagtaggaagaggtgaggacgtaagtataaaggaaattggatttgccctggggttactggagagcaattaaatggttttgagcaggaggtggcataatcaaggtagtactgggataagataaagacagccaacatttatttagcaagtatgtgctgggcattgtagtaagtgcttcaaaaggagttattaaatcctcacaaccttcttaggtagtatcatcccattttatagatgagga

SEQ ID NO: 22901 - DNA, 1064 bp, Artificial sequence
  DNA replication origin
cccaggctggagtgcagtggcgcaatctcggctcactgcaaaccctgctttccgggttcaagcagttctccctgcctcggcctcctgagtagctgggattacaggcacctaccaccatgcccagctaatttttgtatttttagtagagatggggttttgccatgttggccaactcctgccctcaagtgatccacctgcctccgcctcccaaagtgctttggatgacaggtgtgagccaccatgcccagcctattgtctctttaatgatccctcccttctgaagtcttgactcccccaaatggcatgttgacacacaaattgtaatgtgccatagaaggaaggtggccatctgctgtcccccaaccccctaattggggagaaaaaagaagggttcaacatggtcctggatgtgcagacaaactgctgagacccagacagaggcagcagtatggggagagagccccccagagatgcactggcacaagaaagagagcctgagacaccgagagagccaggaatgagaggtgctggggaacggtgaggaccagagatcactccttcaggattgcagaggcagacacctgcctgacaggcaacctggaacccatggactcctgtagcagatacagagccccatgttcatgaaccagtggacaggcacatttgttgagacccatattcaagttggagagggaaaggtgatgaataggagagggagaagagatggggagtgaagagggggctagattagaaggaggaagtggggaggaggaaagggtgagtcctagaaggatggagaagacagagacttgagtgggaaaagggagaaaagctgagtggaggaggagagaagagattagagagaggaatgagagaaaagagacaggatagcataaggtgggggagaaagggtgaggatagcaggtaagtgtgggagtggggtaagaggagtgtttggactagtaaaaagagaaagcagtggaaaagatgagggttatgggttggcaggtggtggggggacaacgttgagtatggagggtggggaggctgtgttgctgggtccc

SEQ ID NO: 22902 - DNA, 1757 bp, Artificial sequence
  DNA replication origin
gccggcagccggcggcgggtcctggggcgctggaccggtggcgggctcagcgccgagtcgcggaggggctcatggcccggggccggagcccgcggccgccgcggcacgccgcgcagagccctgcagggagcgccccgcccggccccgctcggctccgatctgtccgcccgcccgcgcgcgctggctcgctggctcgctcgcctcggctcggtctgcccgggctcggcgcggtgcgcggtgctctcagccctgggatctgcagggatccatcgtccggccgggaggcggcgggaggggagggggaggggagagggtgcgcgtgcgcgcctacgagtgtctgcgaggctgtctctgggctggtgtgcgcgcggggccccggatccgggagcgggacccagggctccccgcgccgcctcgcccctcctcgcggccgctttcggcggcgctgcctctctccagtcccggagccgtctccctgcctgcgaggccctatggcttgtgtgtatgactctgtgtgtggtgtgtgtgcgcgcgcgcgtgtgtgcgcgcaggagggagggtgtctgcccctagcgtccctctccccgcgctgtctccttcggatcgatgctcctgcctcttgctgctgcttcctctggtggcacacacgcgcgtacacacacacatacacacacacgctccgagtcacacttgactaattcaagcacttagcccatatggagacagacacacataccgaccagagtcacaccacaccattcacaaccacacccccccgcaacagatgtccacgtatcccgggggcctgacccacatggcaagcactcacctgctcttatccctgctcccacctgcatgtgacacatatacacgtgcacatatgtgagccaacacgcagccttgaccactcagatcccatccttgtagctttgggcttgtggggggcatggtcgcaaccccttactgccaaatctccaaagaaggagcagagaaaaggaaggaaaaatagccagaggtcaagggaatttggacagaaggaaggaggcaaagggagtgaaggggacagggtgaggaagggttggaacggggagctatgctcagggatggagcagaagtctcagcacagaacgcaggcctgggggctgctcctgtggctctcacctttctccttccctgcctccctcctcttctctgagaggccttggggaggggggccctccctatccaattaacagagaaggagcaatcaaggggaagttgttaatttgctgatgctcattaggggctcttagcacagaggctgttgaggtctgatggtgtcagatgatgaggaggagggtgcgggggaccagagttctgtctctagtggctccttcgctctacttgcaggctggtgcggctcggggagaaggatggtgagaggtgtattcctaggacatggtgccgggctttaagttagaagaaaacctgtaacgagaaggggatggcacattggaaagaagttggatgagaagttgggagtagtggacatctaggaaaccagagaaggggtctggaggtccctagtgggagagtggacttaagattgtggaggagggaggtcgagatccatttactaggggactggacacggagctgccaaaaggaagggaggatcttccattcaggtcttggggagctgttcagcggtaccaggcagtgctggagggttgctatgcccccgggcagccactgggtggcagccctctcccagatac

SEQ ID NO: 22903 - DNA, 1580 bp, Artificial sequence
  DNA replication origin
gtagcaagcacccggagaggcccagcctgctccttgtctcctcctcctcctctgtgggccaggctgactcacaccccacacgaggggactcaccaccttgaagtcttcagcgctgcagacctccccccggaagtggcaggagagcagcatgtctcgaatgtcgtgcccagctcggtcgtagaactcacgcatgttgaagggtttgggtttgaagctgcggaagttggctttgtcctgcagtatctccagctgcttttcatctgccatctgtgtgtctggtatctcatacctggggtccgggggtgagtgacacacgggtcagtacagtcatcagtgtcctgcacccaacttgggtgatgggggcagcctccagccctggggatcagtcccaggtgtaggcaaggaaggagagctgggcatgcagaggctctaccacatgggtctgaaatgacaggaggaactgtagtggctgcccaggggcagggcatcccatcccagcacatgggtgagaggaagcatggataaggtgggcagagagacaaggcaggggctgtggcttttatactgtagtttctaccctttaaagatgttctgtccccatcccccaactgacgagaaggtcaagacagagtggccagaatgaaggtaaagctcactccagagagggtgacaatgtctcatacctcaggctgggtgggggtcgagctgttctggactatgctgggatcggaggctgggtgcccttaactgggtgctcagcagcaccctaactcctctgctgtgagtggcaggtttgggggtgggggtgggttaaagggcagggttggctgggctctatggtgggtcagggaggcagacatcctgactggaactcaagcaactccaggagcagggctgagggagggtgggagccacccacctgttgttgagcagggccagcagctccccagcatgatacaggtcattcttggagacttggctaaagcggaactcgttgaggttgcacagcgtgacagcagggaaggtaagctgagaggcagccacctcgtcgagcttggtgacatggtggtagtggaagtagtactgcacacgctccgtgcacacacacagcagcacagccagggagcccaggaagcacagggcccacagtgcccgcttcagagacagccgctcgtaggagaagatgtgggccaggccgtgcagtgtggagctgctggcgaaggcctggatgctcaccggctggacgccacccacctcctcctcctcggccttcagttccatccttgttgaggggatcctgggggaggagggagggacagtctatcattgtcctgggatgaaagtacacatggagcccctccacatgtgcccatccagaatcctcatctccagaggtcaccactcctcgggcagaagacttccctgctttgcaagcccagaggtggctgaccaagggacacatccagggttcctccaaatacagaggcacagggggtcaggtcaggccaagagaatgctccccagagaagcttcccaggcccggggagaccccagatatagtcatccgaggttgaggggga

SEQ ID NO: 22904 - DNA, 1048 bp, Artificial sequence
  DNA replication origin
ttctctatggttttccctcccggaccgtgaaggcgggagggcgtggccagcacgccttttccgctagtcgccccgctctatcccatagtctcgctgccctgagcctcccgtgccggccggccggccgggggaacaggcgggcgctcggggggcgctcggggggcggggggagttccggttccggttctttgtgcggctgcatcggcggctccgggaagatggcggcccgggcgggtttccagtctgtggctccaagcggcggcgccggagcctcaggaggggcgggcgcggctgctgccttgggcccgggcggaactccggggcctcctgtgcgaatgggcccggctccgggtcaagggctgtaccgctccccgatgcccggagcggcctatccggtgagtggggcaggaggaggggcgcgcgggccgggggcggggccgagcggggacatgggagtgacaggggtggggggagaagtaggagggactcccttgggaggggttcgggctctgggtgggggttgggggaggcagtgcgcagaaagagagggggaggcagttacacacctgctcctaggggcattgtttccctggggagtcggtagagaacctgggtgggtgaagtgggtccagggatacctgtatgagggccggagtgcaaaggggcttgagcagctccagtgatcagaggaacacagaacgtgtagctgacaaattgaggtcagcttctaaagagatagtagctagcagagtaaatgtggaactggcgatgtccgatgtgtcccatccaaaatagactgagaatttgagtataatctggctctcgcttagcttttggactctgtttttctatggagtcactactggagcaaagggttctcctctcattgtcctccattccatccctaaaccttacttcattcaaagatctcaggcgttccctgcttttctttcttgatggggtttagcaggtgaaaccatgacatctctgggtcctctcccctctgtagagaccaggtatgttgccaggcagccgaatgacacctcag

SEQ ID NO: 22905 - DNA, 1368 bp, Artificial sequence
  DNA replication origin
agcagcaccaagaggaaggtaaaccacaaatcagatcccaggacaataaggttctccatatgataccagtgagggccaaaggtgtgggggcaaacacaaaggaccactgtctttcagtgcagggaacagtgtccctctccttactgctcccaaaaggagctgtgagcaccagttaggcttcctgctgaccagacaacactgttcattcccagcagctcccaccctagatgccaaccattgtggaccttgaactcacatcctccaggagccgtccttctacccgaagctcccaggaagccaccgtcccttccccatcctcggcatctgacttagccggattgaaagtgttagaaatgaaaattcgcagcttccgtttttgctgaggaaggcagaaacaggattgatcgtggggcttcagtggtctgatgttgaagacaacggtctccccaaaccccaaaattactcctaacagactggcttactgtctacccagtcccttgggtgggtggatgaagattccatttagaagaggagtactggccatcagcctaagtacaagtgcatatagtgggatgccaggtggacaaagtcatgcaaggtgccaggttcccaaggtagcagagcagttacagcgaaaacatggacaagggtatatttgtagtgcaagagacatcaagagcccctccccctttgccattctgttcttatcctcctaatgtaattctcagtttgtaggcggaagggagagatgcaatttaaatgccaaggagagttgtgctgtgcctttgatttctcatcctaattctgctgaaggttcctgggtcctctcctttggctctctgcctagtactttcctgtgttaccttgatgggacgtttcaaggcctcttggatatctagccgtttcctcatgatagtctggtccagtttcctttcaaaagccaagagatccatataggcctgggattctggtaccagttcacgaatcttaggaacagaaaaattaattgaaatctaggatgatcatctctatactcaaactcaccacactttccagaagacatatagcctggactcaccctttgaggtagaattttgtcagccatcttctttttctttgcactgttgggaataaatactattatcaggttgggacagaactagtcagaacgtgaaaataagctgtcagcacgtccatttatagtaatgtgaagggactgcaaagcttctctcaaagaactaccaccaccaccaccaccaccaagcattctcaaggatgagttctgtagcaccatctgctgacacagcaccaccacttcttggttcaggtactcccaccacctgtgtcctcccaggctccctccctccc

SEQ ID NO: 22906 - DNA, 698 bp, Artificial sequence
  DNA replication origin
gggcccggaagccggaagttcaaagccggcctccagccagagtgacggcctgcgcggactcccgccttagtgggcggagttgtgccgcgtctgatgcgcagttccctttatagcgcggcaagccgaatcctagaggctaacccggcaggtgggagggagaaagttgctttctgcaccaatagctgaggcgttcagggttgtccagggacgctaccctcacgtgtctggttccgagtgctgcgttcggctgtgctgggaagttgcgtagacagtggcctcgagaccctgcctgcctgaggaggcctcggttggatgcgaaggagctgcagcatccaggtacgctgccggctagggccgagcaggggctgccagtcccactgcctgcgcgcccacctgggccagtctccgcttgccgcgtcctcccatcccctagtctgcaggcctggtgcccttgaattcacccgcttctgttgcgttgcggaccgcgagctgcactgcttcctgcccaagcccaagctcctcgcagcagtaggtcagtcttgctagagctcagcgctaatcctgtcaaacctcgactcctgcctggcgtctcgaccctccacgctccaactctgcctcttccttgctctatagacctctgcgtcctgataagtggctctccggggcacccttcgtgcatatcggctatccagctccac

SEQ ID NO: 22907 - DNA, 1452 bp, Artificial sequence
  DNA replication origin
aagctgagtcctggggatgcagagccctgtgtgttttcctaccagcccttttatcagctgaagttccagggaccgtcatccacagtaagaaaataaagaaagggaggagcctgttgtgttttctatccttagggacagagaaagatatataaatcttaggaactgatggattaagtcacattattaatcacttcaaatatccagagtttcacgaaattaggacagcagtgggactctaatcctatgaatgactgagctcctcaggcacatataggataggacagtaggtagctgattcccatagagcagtgaatgtaaaagtgaaaggagacagggagagagaggagagggagggagggagagagaggagagggagggagagagagaggagggagggagagagaggggagggagggagagagaggagagggaggaagagagagagaggagagggagggagagagaggaggacagggagggagagagagaggagggagggagagaggggagggagggagagagaggagagggaggaagagagagagaggagtgtgtgtgtgtgtgtgtgtgtgtgtgtgtgtgtgtgtgtgtcagggttgggaccagagcaggaacacaagcaagaagggactgagaattgtatcaacagtgcaaaagaagtcaaaggaattacttaggcataaaatgaggactgttcctcagagatgagtcagtcctgagaagccaaccaagccgggtactctgagtctggatccgaccttgctagaaatacggtctgaggcagcagaggtcctatgagagtccacagaaggtcagcacaggctaaggtaaaagcagggcaatagggttcttgtgttctattggcgaaagtagaatagaatagaacagaaaaactgaatgggcaaaatgagaattggcaaaaaggtatcattaggctcatacctaccacaactctacagccctaccacttaccagaatggatagattcctagtcgtgtaaccataaaaacagcactgaagatcacaaaaagggtgtcacagagccgctgatacttggcataattggccagtttggctgcctggagaaaggaagaaagaattgagctggggagaaagtcattcctcacataggaagaaaagaagagaagaagaagatggagaaagagagattgggtttttacctccagcaagaagtctgagacatcatgtagacacatgatcagagttcccactcgaaccatattgttgatgtaggagaaggagataagcccaatggtgaccaagtgatgcacaaacatgatcaggaagtcctaggaaggaatggaaatagaagagggaggtaaaagctgggccctagaaacaccagccaacccaacgtcctgcattattctctaagaatcttaccccaccccatatagaatagtttccattggccgggcgaggtggctcatg

SEQ ID NO: 22908 - DNA, 1203 bp, Artificial sequence
  DNA replication origin
tgggcggtgaagaggcccggccctgccagggaggcgggcggatccgtggcagtgaccagaaggggccggaagggggtggccgccggccgggccccgccctggggccgcctccccgcgggttccgttggctgtggcggcagctgacgcttgtggcggcggtggcttcggggtgggcgtaagatggcgacagcagcgcagggacccctaagcttgctgtggggctggctgtggagcgagcgcttctggctacccgagaacgtgagctgggctgatctggaggggccggccgacggctacggttacccccgcggccggcacatcctctcggtgttcccgctggcggcgggcatcttcttcgtgaggctgctcttcgagcggtgagagcccgggagcgagcggctcgggggccgggcgcgggccgggggcgccccgctgtgggaagggccgagggccggaagcagaactgcaaggaaagcccggaagcaggggctgggggagcttgggccgcggcgggtgatgctaggcgcgtgggcgaggtggtagcctagatggagaaggagtttggggcgtgggcaagagaaagagtgagggtctaggggaatgctgggccccttcaatgttagatccggagttggattgggggggtcatataggcctcctcccaacctccaagggtcctacagatgaggaaacaggttcagtgtgagctctggcagaggccccgaagagagggataggaaggggccaggagaaccagagctagttgtgaccatggaagccgaggggtcaacgcaagggccagacgttccaagggaaaggaatggactcatcagactcttaagatttgttaggacgcttgagtttccgagaattggggggaacaggattagtttggccctaagagttggtttggtatgtcaactcatgcacgtttgttggtaggagggtagaaatctggttgggatagggtgtggtggagccctaggcttccaaagtaatggaaagatgtcagattagttgcagaacaggccttggggcctgaaatggaaggaggagtgtgttcgaagggatggaggagagccacagggctttatcagaggacagctatattgagccagattcttttttcttttcttttttttttttttttttttgagacagagtttcgctcttgttgcccaggctggcgtgcaatggcacgat

SEQ ID NO: 22909 - DNA, 1030 bp, Artificial sequence
  DNA replication origin
cgggtaatttttgtatttttagtagggacggggtttcaccatggccagcctggtctcgaactccttacctcaggtgattcttccgccttggccttccaacgtgctgggattacaggcgtgagccaccacacccggcctgcctttacgtatactttttgagtgcttcccttttcactttgtttttcttccatttccttttccccaagagaagaataaaaggatttttgtaaactttttttatttttattttgggacggagtctttggtctgtcgcccaggctggagtgcaatggcgcgatttcggctcactgcgacctccgcctcccaggttcaagcgattctcctgtcccagctttccgagtagctgggattacaggcacagcgccaccaggcccagctaatttttgtatttttagtagagacggggttttgccatgttggccaggctggtctcgaactcctgacctcaggtgatccgccagcctcggcctctgaaagtgctgggattacaggcgtgagccaccgcgcccggccttttgtaaactgttaagtccattttttctgaggaaaagtgactaatttttaagggataaagcagtgaaagtaggctgaggtcacggggcacgaagggaagaaaaggttgggagcgaaaagaactctagtggcggacagtagtgggcaggaccagctgacatccaagagaagccctgacctgagagatcgatctggcctccgggagtggagacagaggtaccgcctgggtgggagccggaacggattcgattccaacaggctgagaaaggagaatgtccccgtaaaggagctaggcctgaaataaggggtgtggccgtagctggatggaagagtgagggaggagtagaagcgtggcctagaccagcagcaaaagagggcgggcccagggccgcccgaggcgtggtcccagggccgggctgggcgagtcagaggctcgggaaggggcgtggatccccggaggcggtccccgggttgcagtgagggaagtgggccggga

SEQ ID NO: 22910 - DNA, 1051 bp, Artificial sequence
  DNA replication origin
ccatgggaaaacaatgaaagccacaggaaaccacttaatggggtgggagaggagggaaaacggtcgtggagcgccaggccaggttctctacaccctcgtccccctcgccgcacggccgccagagcgcgcggcggggacctgtctcccaagtcgccgcgatccgcagggccccgggcgccctctccccggcccggctcctaccctccgagagctccagctccagctccgccagctgcgcccgcacttcaggcggcagcgccgccaccgcggccggcgacggctccaggcctcgttccgccatcccagctccgccagccacactccggaagacaagagagggggccgaaggagggacggacagacacgggcccacacccggctacaggatccggctccggccgccgagcaccaccagcaccgccgccgccgccgccgccgccatgagcaaaggtcacgtgagcgcgacggcccccgccccccggccaggaggacgcaccgcctctccagcccagtcaggctgaagacgcatatgcttacggcgccctctactgggaagctaccagaacgacgggcccaagcccaccactcgaatttccctgcgcgaaatgggctcatggtatggactgtcggctttaccacagtagtgtggacacatagcatttacctttcactctcgagcaagtttttaggggtcccaggccttactttttccaatactagacttagcaatgtatgtctatcgtgtcctttactccattttccctgattaatacctgcccatttataaaaacctaatcacaggccacctccttcgctgtggctcctggtcctatctgccaggagctctgtttccgtttcagttttagcttttaaaaagacaggcgcggtggctctcgcctgtaatcctagcactttgggaggctgaggctggtggatcacctgaggttaagagtaccaggctagccgaccgggcgcggtggctcacgcctgtaatcccagcactttgggaggccgagacgggtggatcacgaagtcaggagatcgagaccat

SEQ ID NO: 22911 - DNA, 947 bp, Artificial sequence
  DNA replication origin
aagttcccgccccggagagcggcgaggcggcagccacaggtaagtggggggcggggagggacgtgccccgtggcccgggcggggaaggacgcgggaacgtggcgccggcggggacgcagcgcgggtcgcgcgcctggtgggggtcgcgcgcggtggtggcggtgggggaggggcgcagcggcagggggaggggccgcccgcgcttccggcctccgcgcctcggtgcagagctgcgctgcgcccttccagtcgtgcgtctcctcctttccctcgcccccaaataaaagtaaagcccgaaaccgcccgccgcggggtggctttcgcctcagaagccgccctttgcagtcgcaggcgctagctctccgtgggaggtctcgaggttgggcccggagccgggcggagggcggcgcggatatggcctcggcgcggtgtccgccgagcggagcccgggtctggttaaccccgcgacagggtcctcgaagcgcgtcggcgctggcgaccctgagggaagaggcgcgccccttaccctcctggagcttgcagtctagcgggcaaccgacgcacgggcattgcgcacgccccagacagtcctggagagatgcgcctggcagcggagacagagtggggacagtaggcggctttacccctggctaggaatgacacaagggcgtctgtaccctttgggatgggcgacccagccgagggtgactttctctttgatcttgtatgtcaaaaaacgaagcctggcatttctcactttgatcgacgccgtgcagctggcggctgaatcgctttgaaatgattgcaatgtgaaataatgtctggttgtggcgctagtgttttgaagagattgggcaactggtagtctttgagaacctttagggttcagaagctcggcgtggatctggcaggcatctttgtcaaactggcctcacctgtgatgagtt

SEQ ID NO: 22912 - DNA, 991 bp, Artificial sequence
  DNA replication origin
caggcgcggaggctcacacttgtaatgcccagcactttgggagaccgaggcgggaggatcacttgagtccaggagttcgataccagcctgggcaacatagtgagacccggtctctacaaaaaattttaaaattagccaagcaaaggccgggcgcggtggctcacgcctgtactcccagcactttggagggcccaggcgggcgaatcacctgagatcgggagtttgagaccagcctgaccaacatggagaaaccccgtctttactaaaaatacaaaattagccgggcgtggtggcgcatgcctgtaatcccagctactcgggaggctgaggcaagagaatcgcttgaacccgggaggcggaggtgcagtgagccgagatcgcgccattgcactccagccttggaaacaagagcgaaaactccgtctaaaaaaaaaaaaaaattagccaggcatcacggcgcccgcctgtggtcccagctactcgggggctgaggtgggagaatcacttgggcctgggaggtggaggctgcggtgagacaagatcgtgccactgcactccagcctgggtggcagagcaaaaccctgtctcaaaaaaaaaggatagccacctggaaggaacatttcctcgcgcccccagagccacatcatagtatctgctgccccaccaagagcaccccacacctgggaggaaccgagaaacatcagctagtgcagccagtttgaccgccttaggtgtcctcccaagcctccgtagtgaattgttttcctcctcgcccagctgactcgattctccccagacttcatcctacctacccaaaagcaatcccactctatcgccagtttcagcctcacaccgtatcttttgctctgaagatgagactgccaaactggtgaagagggaataaatggcctaacaaattaccgtaattttctgcaatgtcgtttacagccaccaaaaacattagatcctcccgccaccctcactccccgac

SEQ ID NO: 22913 - DNA, 1446 bp, Artificial sequence
  DNA replication origin
gcagagctgccgcctcgggagccggtttgcgcgccggcttcggctttgcagcagttaccgcctacaactcccggcatgctgctgggtgtgggccggcccgtagactccatttcccagccagccccgggtctcggtcaggacgtgccggcgcctataagagccagtgcgctgcggccggatcctattgttagccggagccggggcggttctgggcgtctgctgccgggggcgcccgagttgccggagacgcccggccctctctgcctgccggctgggctgcccaccgccctccctccccgccctgccgccctgggagctccccggccgtcgccgcggggcccgggactcgctcgctcctccctccttcccaccgggctagggcggcggcggcagcgggggcggcagagaccatcacgggaggaggcagctgcggcggggccggtaatgggcctaggggtgcggggcggagggtgccgcctcgtcctttctcgggatcggccctcgggcggccgtggaggagtggtcaagcccagagccgtgcggatggaggggtcagaaatgagaggctcggacgggagcggtcggggggcggggaggtcgggtgccgttgggaaggaaccgagtcgggaagaggcgtgggagcgaggggcaccgaggacgctggcccggactgcgggggcagctcgcgggagaccgatgggcggcttggaagcctgcaggattgcagatgaggattgagttcggaatggagtggagaatgatgtaggatggaggaaagtgaaggaaggggagggggaacagaggaaaatgtgggaggagtggttgggaatttgtgagtagcaggcaggaagggatgcggaaggctgggtaggggctgcagaggattggaatgagcgggaaggttagcaggaatcagagggaagtgggccgagagctgaagggttcggcaggagtgttcattaaaaggaactggtgacttgacatgtcccttcgctccggttcctgatgtctcccatatttctggcgtcgtgtgggaaaatgaaagcatcaattgccctggttgctagcttgatcttttttcataggcccaattacgcagccaactgccacccgtcccttttagtgctgtggtcttgattcatccttttaaaggggttgagagtggcagtgtgacacacaaactgttcttcagaatgaaatgctagaagttatccccacaagacaacactgtccccttgtcctgcagttttcagttcaaggtaaattcatagttcagatttttttcttcactggctttctgtcttgcaaatccacaaagccaggatgttggttgtgccggtgttataaatgactggatatccttgagagttaatgcagcatcatgttccagttcccacaaagatctgtcttccacacgatggtagtttaggcatggaaaattctaac

SEQ ID NO: 22914 - DNA, 1840 bp, Artificial sequence
  DNA replication origin
ccacatttttactgatctcatgcttttctgttcaaatgcattagagaggatgccgaagataaaatgaatatacagggaagtgggacttatgcagggtcttgacctccggagaggtgagtttaaggagacaggagtatgggcaggagcaagcgcacacacgtaaggagcgtttgggaagccgtcaagagtccgccaggggtggagtgggttcataaggctagaagaagggctccttccatggctcagggtgacgacttgatgggtagcgaataccagaactctggtaactacacggatacacgtttaaacccggacacttgcacgccgggtcctccccgtgatcgcccagcccatctcgggggcagagccgtggcgcagcccgcctatcatcgctgccgagactgacgcggtctcttctttataggcgaacgacagcgtgacgtcatgttcgccgggcaggcgaggaaagaggacgccatgattggttggcgctggggcggcggacggtggaagggcctggcgagtctaggttttacgcctgtgctggactttctccttccatgtttccaggccgtggggggctacagagggcgagaagtcggctcagcggaaacctggatttggttctaagccgtggggttgagaaggggtgaccggaagtgatcgtgggactgaccggaagcgaggcctggaggggaaagagagagcgagacctgggagggagggggcctccagcagaaaggggcgggggaaaaggtgcaaaagcagcgtgggagcgccgggctggcttcctgcggctgctgctggtctgactgggaagcagcaagccaccactacgaactctcaagaggagtgggagtgcgggagtccagagctgcctctgggaagtctgcagtagttgagcaaaggggtcctcacgttcctgagagctgggcaggggggattttggaacctggggcagccaagaacgagcagccaagggtacgggagattagttgtgcacagagcagtgctggtcgggcttgggggtggctggtgggcactgcgtgggaaaccttggtttgtagttttcttggtttgcgttactcctgttgggtagaattaccctccgcgcctttgtacaagacacggtgtctcctggggcaaggaaggagccaggatggcctgggctctgaagctgcctctggccgacgaagtgattgaatccgggttggtgcaggactttgatgctagcctgtccgggatcggccaggaactgggtgctggtgcctatagcatgaggtgagtgagattttcccagaccctacaccttctgaataacaaaggcggatagacactaagaaaaggggttgagtgggaaggaggtgtatagagttttaaaaagctgtttacgattggggaaaagggacttgttcttttgtcgctttgagtagttagtgttgtggaagaaatggaaaaagcgattgtaggcgatatgaagcctgtgcagaatcagtggaagaaggaagtggtccctgattagtaaccagatgaatgttgagaggcttttgtgccaatgtgggagacttggggactgatggtgtatgtgtgggtaagtctgacgttgtgtgaagaagggttacatatagcataggaatggtatctaggaagttgggaaattgggagctggtgcttaatgatgaatattggttcgtttcttgttggaaagatatggaagtccttgatgaagaagtccgtacagctctatcttaccactagcttgctttaagactttacttaattctgggatttctgacttttaaaacataagctgtgaaatgaaaaagtgacgaagaaaact

SEQ ID NO: 22915 - DNA, 1339 bp, Artificial sequence
  DNA replication origin
catctcacagcccgggccagggggccggggccggggccggggccacggcggccgccgcccgcagacaaagaagccagtgcggcttggctgggctcggctcggcccgggagctggtcgggacccgccgccgcccccaggcccccagcctgggctgggcagagccgaagggggctccgcaggctaagccgggcggagaggggacggccgggaagcgggaaggggaagccgggtgggggggcggtcaggtatatatttttcttcgttcccccttccacgaccccccccttttccctcccccccttttttccctccttctgctacttggatttttttagctgctgcgtcatgagcataatttatgcaaagagctttgccgcatgctgcaccgcccgcgccagccgccgggggcggcgggctgggagggcggtcagggaagggaggggagcacgggagccaggagcgaggggtgggggtggggaggggaccctctggccctggccgagcgggaggtcccggaggctctctcccgggacagggatggacggtcagtgggtctggttactcagcccctccgaggtgccgcggaggtggtttcatttcggaaggtgccagagtaggagctggagtccggaccctccatgccacatggccttcagctgagggttggggcggtgactcccggccaccgcctttcctctaggtagtcaactgtcctcaatgttgaaagtcaagtttatgtctatccctccctccctagaaaggcgggggaactcagacatcgctcagccaacgtggagaacctctgaacagctgtgccccagcgccaaagcagcgaagggtcccaggtctctcacccggtggcggccgtgggctgtgttgtctaaaagcagatttccggccttcttgtccaagtagacaaggaaatgtgaacagaaagacaaagttcagtggaatggtgaaaaacctctagcagcttcttaaggtagagaggggaccagaaaaggggtggatgtgggtggctgagggaaagcagattggagaagtggtggacaactgaaagaggaaaaagttggaagaccaaagtggaagcgtgggaatggagagaagaactgggaaggaaggaggctctgtaaatccagtgaatgtggatcccaatactgaggccacctgctgtcatcctaggctgttccccctcccaccctctcccgatatttggtggtctgaggatagctagaggtagatgggttagaggcagtgtgagaatgcagttggaggcctcagtcctccccgggactgctccgtaaggcctcgtggtggaagggcattgaatggcccggcc

SEQ ID NO: 22916 - DNA, 927 bp, Artificial sequence
  DNA replication origin
gatagagctagaagaggcagaagagaaggcaaaatgttactttatgacattcctatttgagatctctttaatgagctaattcttaattctccttatgcaggttatactttttgtaagattatacaagttgcctttccactggccttcaatattctcctggatcactttctgctatagctaatgttgggctcacagaacgcaaattcatcttctgcaccttagcctgtgccaaataacacaaaatcatcaaataatgcactttcaactccgacaaaaattgccaaattatatagtgttttagattattcatgttagcatttgtgaagagtaaatatgtgaagtcagatttagctaaggactaaaggaccaccctaagagtattcccagctagttcaaatctggcaaactggaagcacctctgagtaggcaggtggagcatcggtatagggtggagcctgaggaagatgcaaggtctgagggtatactggattcccaggaggctgcacagggtaggttggctgtgttggatattgacctgaaagacaagaaaaaaatgaaggttgcctactacacagagctaccaaaatgaggcaggtcatatcgggtagctaacttagtgggagcaagcagaaggggatttgcaaatagtctgccccagagggcctgattcctggaactaagaaaatatgcattgtctttgcacccttaaaatggaaggtgctggattctaacgagacaagaaaggcactgctcactgctcctactaacataccgaagtaaggggttaagtctacctgggcccaagttccctccggaatgcaggacaggtctggggttctggcctgctgctgttctggcttatcaagggtgcctctgctctaggtagtctccacagcctgtctacaaccagcccagacttcgtgggta

SEQ ID NO: 22917 - DNA, 1476 bp, Artificial sequence
  DNA replication origin
gggcgccggagagccgggtcgcccacattcgccgcagccacctcggccgtggcaggaaccgaaacccggagcggccgaagctcagcgctccgctggggcagagggtcgcggcggctgggaacgccgctccccgacgcaccggccgcccccagcgcagcgcgctccgcggggtgctggtaacgcggggggctcggggcgggggcggggacgggggcggggccgcggggcgaggaccaacccagcccgtcgcgtccaccccgcgttcgcaggggcgtcgaggatctccggggcgcggggcgcgggctggggcccagtgaggcttggcaggctgtgcgcggaccgcgccctggacggcgaaagcaggcccggagggggcggccagtccggcgtcccagcgtccgaggcgagccagaaggcggcccacggccgtcgcctcccggtcccggcccggctactgcgctgcgcccactccgctctggagcctgggcgcgggtcctgaccttcccggccctctcctgacacctggtggatggcgtcaccagaactcctagctgtggaaccctagggtacctgttaccgcgctttggcgaaactgggttcgctgctgatttgcgaacctttgcctgactttctcaggccttgagagatctaagtaaatttggtggcccattgaaaggacctggagagagcgtatgaaggtaacaccccgtcaaactgcatgcggcctcagacctgctcctgtggagagctgttggtacctggagcctgaggagatattcagggaaaccagaagaggacaagagaaaaaggggaagggacttgggagaacctggcaccagaggctttcctgggacttccaggactcaaagccataggggcccacccgctacattcctgtctttgcccctcttcctacagatctgcctcttctccaagaaactcaaccactagtgacaatgaccagcctcctgactactccttctccaagaggtaggtgaaggcctttcctaatcccagtgagaaagaattgttcaacatccccttccccagaccagtcctggaagcctcagcccaggtgggaagactcccacctctctctgcctgcctcacacaggaagggcctgggaggaagcaggaactagagtgtgccccttagtacggttttaatctgaagtcacatggacatggtgacttcacaaatctttgtaacctcggtttatcaaataattttatgtcggtaatcccaggactttgggagactgagacaggaggatctcttgaggctaggtgtttgagacctgcctggggaacatagtgagaccccattgctaattcaaaagaaagaaagaggccgggcgtggtggctcatgcttgtaatgccagcagtttgggaggtcgaggtgggcggatcatctgaggtcaggagtttgagaccagcctggccaacatggtgaaactccatctctactaaaaata

SEQ ID NO: 22918 - DNA, 1473 bp, Artificial sequence
  DNA replication origin
ccccagcccgcgccccgcgccccggagatcctcgacgcccctgcgaacgcggggtggacgcgacgggctgggttggtcctcgccccgcggccccgcccccgtccccgcccccgccccgagccccccgcgttaccagcaccccgcggagcgcgctgcgctgggggcggccggtgcgtcggggagcggcgttcccagccgccgcgaccctctgccccagcggagcgctgagcttcggccgctccgggtttcggttcctgccacggccgaggtggctgcggcgaatgtgggcgacccggctctccggcgcccccgcccttccctcgtgctcacctttccagtcggacgggctgctggtgaagggccggcgccgctccgcgcgtccttttgaactcaacgggggcgggcaccgcggagtcgcggaggccagcagaggccgaacgaggaccccgagcggaggaagccgcgggtggcgcgcggggttggcgcagaggccggagggggtggggggcaggccgacggggtgggacaggaaaagcggagagaaaccgccctctgcaggtccccttggctcccccgggaggaaaggcagcctgcccttctccgattgtcactttactctccatccggagccgcttcctttctcgccgcgaggctcggggttggggggggaccagattggagccgcgggctaactgggatccgtcccatttccctgggcttgacgttctctgaatttttagctaatgtggaaagttacatttatttgcatttgtttatcgcttgctcacataggtctgtgtcctgaagcttggcagatgagcgaacttagccagcacacccccggccgtgaagcagggaggtgaagcggggagagcaacgagccccacccgggtcttgccagctggacgttcttgtggggcagcgttgagcagcggttaggagtgccgtggactttggattcaaacagccccagctcttctgcttgctagctgggtgactttgggcaaattaacatctcgaaaatctgtttcctcattcctaaaatgcgggtctgaaagtgatcatgcctgtaaagccatctcatatccatggttctagaagcatggtgagcacctcaatttgaataatcagtgccatgctttagctacctcttgactcactcgtttgtggcaggaaatgttcccaaattaatcagaagaattcagtgactaagaggatgtaatagtatatagcgcaggcactggaatcagctctgctgtgtgatcttggacaagctgcttctgttccgtttctcttatctggggcaatacctgtctgaatagagtgactgttgggacgaaataggttagtaaatatgtactgtaaggcattagaaccttgcctggcacatagtaagtgctcaataaacgctaggtcttgttaccttggcttcccgtttaggattggaacccttgtgattattctttccctccc

SEQ ID NO: 22919 - DNA, 1169 bp, Artificial sequence
  DNA replication origin
ccttcctgcccaagtccccctccctatagacctcaggccacatgatccacttaccataaaggaccagggttgcgactggaccatatccacttaccataaaggaccagcatgttgccgatggagtagaccactgccttcttgcttggaccaagccctctttatactcctcttagcagcaaagctgactgtcttcttgccaactggcagggctgagggtgcaaggcagggaaaatcacaagtgacatggaaatacaaatgaaaatatttcttttcaagtaaactaatgtatctgttattcaaagacagaacaaggccagggctgaattaatcatctgcttttaattgaaaagcatccaacaaactctttttcagaaataagatggagaaccagggctggtttttctctaagggagcaccccttgtcatccatcactctctcgttgtcctcagtggcaccataaatgcagagacttgccctgtgcactagcagctggaggccagggggatagtggaagaggggggagtggttagcaagggcaaggaagacacagcaactctctctgcccaaagagggagatggcacatgcccccaggatgcaggcataggtgtaaatgcagacacaaaagccaaatagatgcagtggagataattctgggggaggaaagtactgagaaacaggcttgggccctctcagatggagagccaagaaggggctcccagaggagaatatgaggcagggtagaggaggggatccttgggatgtgaagacagtctgagggctatgagggtagatggagggtggagggcagagggagaacgagggtaggagccgaggttcctgcaggagatgaaaggctttgttcatcacagttcgtagaggagagagaagggagttgcggccgggcgcggtggtttacgcctgtaatcccagcactttgggaggctgaggcgggcggatcacaagatcaagagatcgagaccatcctggccaacatggcgaaaccccgtctactaaaaatacaaaaattggccgggcgcggtggctcatgcctgtaatcccagcactttgggagtcggaggcgggcggatcacgaggtcaggagattgagactactctggctaacacagtgaaaccccgtctctactaaaaaaatacaaaaaattagct

SEQ ID NO: 22920 - DNA, 1686 bp, Artificial sequence
  DNA replication origin
gcaggaccccggggcccatggccgccccgccgcgtttccccctccggggcaggcctccgggctccgagcgctccaggctggcgcgcagcacattccggttccatgcacccgccgcccgcggctctgctaatgcctgtcctctttggggtgactaggaccctccaatctttttccgcgctgaaagcctggccgcaaagaccgcacccccggggcgggctgagacgcagagaagccggggcgcccctctgccggtccgccgggagttcccgggcccgcagcaggctgaggacacggcgggacccgctgcacctggccagggaggggcggggcgggcgcgttagtgcagctgggggaggtcccgccccggtcccaccctcccggccgtccggtggggaaacccgggagccaccccgcggcgcggctgcggctttgcctcggcgcgacaggtaagcggcagaaggagcccgcgaccctctccccgggagggcccccctgagctccccgactgctcggacttcccttcggcggatctcgcttctgccgagtcctcgctctcacctcctcctccgccagccttcgcctcttcctcttcctcctcactacccccgacagtaaaatgaaggggctgggccaggctggtccctcctgccttcgctctctgctggtcgcggtggcctgtagctcctccctcggtaggacccccctccaccttggcgcttacgagatgaatgaggagcccagacctctggaacttggaggggtgagagggggacaagccagagccagggctccacaccctcttcccctcacccacccatgccctgcattccttctgtgccccgtctccccagatcgggccaccccatgtgctctggtacggcaactcttgcagagaggtttcctcctgccctgccacgttgcgcctgagcagaaggggacagcaaggagaagcctcgctggtggaggtcggtctgagccctgcttggttgaattccctccagagcctgggggcttttgggggtgggaagggatctgcctcctgctgtggggaaatggaatctgctgggtgttcatgactgtgactgtcaccgacttccctatttcctcagttgttcagattcccaggctgacaaaaaggagaaacagcttttacttgcatccagggccaatcatcgcagacccagacgtctgcagagggtaggatggggctcttctgtgtatgggggtggagggtggtcagtttgcccacaaagcttacagcagaccccttctagcagccgacaacccattgcagcactctcagaaaggatgttaactctgtgctctgagctcgcccccaggcccacacacacaatttacaggcactgggtgaggttcatagttctggacacaccaaagagcctcgaggacttttgcgccttctaccagagatgtgtgtgcaccacacaggccctattctccgctccagacagatgagctgtctcccttcccatcaaaggaaaggttaagaaggatgagacagggaaattcatgtgatgatgaaaaccaggtcaggtgaggggtttgaaatatgctttggttccggccacatgtggtggctcatgcctgtaatcccagcactttgggaggctgaggctggtgcatcacctgagatcaggagttcgagaccagcctggccaacatggc

SEQ ID NO: 22921 - DNA, 958 bp, Artificial sequence
  DNA replication origin
aagcgagatccgccgaagggaagtccgagcagtcggggagctcaggggggccctcccggggagagggtcgcgggctccttctgccgcttacctgtcgcgccgaggcaaagccgcagccgcgccgcggggtggctcccgggtttccccaccggacggccgggagggtgggaccggggcgggacctcccccagctgcactaacgcgcccgccccgcccctccctggccaggtgcagcgggtcccgccgtgtcctcagcctgctgcgggcccgggaactcccggcggaccggcagaggggcgccccggcttctctgcgtctcagcccgccccgggggtgcggtctttgcggccaggctttcagcgcggaaaaagattggagggtcctagtcaccccaaagaggacaggcattagcagagccgcgggcggcgggtgcatggaaccggaatgtgctgcgcgccagcctggagcgctcggagcccggaggcctgccccggagggggaaacgcggcggggcggccatgggccccggggtcctgccccaggtttgcttctcatttgtgctccatccaacaagagctcgtattccgtgtgccatgaactgtgtcaagggctccaagtgccaggtatcaggtgaatcccagccccagcaaactttaaacctactatgattattccgaatgtaccggggaggcagctgctcacacagcagagggtgtttctcaaagtgggatcccccaccagcagcgccagtcagaatcacctgagaacttattagaaattttggccgggcgcggtggttcatgcctgtaatcccagtactttgggaggccgaggcgggcggatcacaaggttaggaattcgagaccagcctggccaacatggtgaaaccccgtctctactaaaaatacaagaaattagctgggcgtagtggcgggcgtctgtaatcccagctactcgg

SEQ ID NO: 22922 - DNA, 1227 bp, Artificial sequence
  DNA replication origin
ttggtgaggatgtagaacaactgaaattcatgtgctgctagtaggaatggaaaggcacaaccactttggaaggcagtttggccctttcttaatatgttaaatatacacctaagacaggactcagttattccattcctagatatttatacccacgagaaacgaaagcatatatatccatacaaagacctgcacacgaaagctcataacagctttgttcgtaacggacaaacattggaaataacctaaatgtcatcaacaggtgactggataaacacattgtggtgtatccccataaagaatactactaagcagtaaaaaagaactcttgataggcaacgactgaataatctcaaaacgattatgccgagtggaagaagccatacaaaaaagagagtttgtactgtatgattccatttatttaaaattccggaaaatgcaaaccaatgtacagtaatagaaagaagatcagtggttgcctggagagggtgtgtgggggcgagcgatgcagggagtgattacaaagaagcacacggagaaatttttggaggtgatgggtgtgttcattaccttggtggtgatggtttcatgagtgcacacataactcaaaattgtacaatctaaacacacgcaaatataccccagtaaagctaattttaaatgtattgtagagggcacattatgtgataagcataccatgtgcctggctgtgttagcaatgtgtgaagtgcatgctccccgttagtacaaacaagaagtttataaggttgctactgtgactgtttccttttacagacgagaacactgaggtttggagaggttgttacaccctttttccctcttgtgattggtggtaggaaaatattaagtagaggagagacacagtaaagtgccaagagctctggcactcattacctagatcctcgcgagggtggagtgagcggtcgaaatgctcatgcctactttacagatggacagactgaggatcggaaagactgaggtggcctgggggctgtcagggaggcagcgcctccccgctcctggcagcaggtccctgtgggctgaaacacgagcctccacctgccgctgattgacttctcgttttttcagtgggcccaagatcctgtaaattgagttccctgcgcttttggatgtcagaaacttcactgagcgcggcactgttggggggcaggagaaaggtaagacttggcactgacgcgggccacagag

SEQ ID NO: 22923 - DNA, 1095 bp, Artificial sequence
  DNA replication origin
ccggacataaaatgtattccctcatgcttcaaaaactgcagtgtaagtgaggaagagggcatagggtggagtagtcggatggaatgcatggtttgaagaatcctatttatcgggctgaaaaatggttcccattccatcccaactcgaagctggggcccctgaaagggtctgacagtcctggctaacccctggaaagttagccaagtctccaccggtggttgttgctggcaatggaggggatggagctgagctctcaggagaaactgcagaggctttgcggtgccccaaggtaccaagtgagaactagagaggagggtccaagcccacggagctgggcaaacagtcctgtaccccaacgctaacaagaagccaagggtgctgctgctgatggtaaggtgggggagggagaggagaggaacaagctctgcatcgggtggcgtgggggtggggggtgggggtgggggtgggatgggggaaggggatattctcaaagtgatgtgcttccaaatgcaggaatcctcgcctgccgaggaaggtcccgggagcccccatcacaactccagagcaccctgttgggagggggacgaacgcatccgagtaaaggacagagggagtcgggagtgctggctgcgggaagaacccaggagcccttggcttctgcagtttttagcagtgtgaagccggctgagggagaaggatgcagtaagacatgggggagggggagggctgaggggctgctgtaggaagatcccgacagcgctgcccttcccagtgcaagccggctaggggccccaactctgcccggcactgagggagggatggagggctgcaccgcggaaggggcaccaaggacgggccgtgtccctcactgtagccgagacggagaaagcagggtgtccggggtggggactggtggtcctcagttctcttaagagacccccggtacacacagtagaaggaagcaagagttccaaacacctgtccaaaacaaggagagcagagccccagctccacggcccctggagccccgccgcgcactctgcggcaaagcccctgactggagatgggcgagccccgctcaagggtcccgaggcg

SEQ ID NO: 22924 - DNA, 1324 bp, Artificial sequence
  DNA replication origin
catcatggcccgttctcaatgagctgttgggtacacctcccagacagggtggtggccgggcagaggggctcctcacttcccagtaggcgcggccgggcagaggcgcccctcacctcccggacggggcagctggccagacggggggctgaacccccccacctccctcctggacggggcggctggccgggcagaggggctcctcacttcccagtaggggcggctgggcagaggcgcccctcacttcccggatggggcggctggccgggcggggggctgacccccccacctccctcccggacagggcggctggccgggcagaggggctcctcacttcccagtaggggcggccgggcagaggcgcccctcacctgccagacggggcggctggccgggcggggggctgatccccccacctccctcccggacggggcggctggccgggtggggggctgacccccccacctccctcccagacgaggtggctgccgggcggagatgctcctcacttcccagacggggtggctgctgggcggaggggctcctcacttctcagacagggcggctgccgggcggagggtctcctcacttctcagacggggcggttgccaggcagagggtctcctcacttctcagacggggtggccgggcagagatgctcctcacttcccagatgtgatggcggccgggaagaggtgctcctcacttcctagatgggatggcggccgggcagagacgctcctcactttccagactgggcagccaggcagaggggcccctcacatcccagacgatgggcggccaggcggagacgctcctcacttcccagacggggtggcggccgggcagaggctgcaatctcggcactttgggaggccaaggcaggctgctgggaggtggaggttgtagcgagccgagatcacgccactgcactccagcctgggcaccattgagcactgagtgaacgagactccgtctgaagtaggtcttaataatacttccaataattgtttttaatatggaccactaactacctgctagacacagttctaatagctttatatataattcttttgatgcttccaacaaccctctgaggtagttattgttcttatcccataccactgatgagaaaactgaggcataaagaggttaagtaactttgctctacgtcccacagtgggattcaaacccaagctgtttggccccaaggtctgtgttcttaacaacttcaccacactacttcttgtgatcagcactctttcccttccctgcatcccttctaagatcccttccagccctatgagatcataacacttaactaatg

SEQ ID NO: 22925 - DNA, 959 bp, Artificial sequence
  DNA replication origin
cctccgcccagcagccaccccgtctgggaagtgaggagcatctccgcccggcagccacctcgtctgggagggaggtgggggggtcagccccccacccggccagccgccccgtccgggagggaggtggggggatcagccccccgcccggccagccgccccgtctggcaggtgaggggcgcctctgcccggccgcccctactgggaagtgaggagcccctctgcccggccagccgccctgtccgggagggaggtgggggggtcagccccccgcccggccagccgccccatccgggaagtgaggggcgcctctgcccagccgcccctactgggaagtgaggagcccctctgcccggccagccgccccgtccaggagggaggtgggggggttcagccccccgtctggccagctgccccgtccgggaggtgaggggcgcctctgcccggccgcgcctactgggaagtgaggagcccctctgcccggccaccaccctgtctgggaggtgtacccaacagctcattgagaacgggccatgatgacaatggcggttttgtagaatagaaaggggggaaaggtggggaaaagattgagaaatcggatggttgccgtgtctgtgtagaaagaggtagacatgggagacttttcattttgttctgtactaagaaaaattctgccttgggatcctgttgatcggtgaccttacccccaaccctgtgctctctgaaacatgtgctgtatccactcagggttgaatggattaagggcggtgcaagatgtgctttgttaaacagatgcttgaaggcagcatgctccttaagagtcatcaccactccctaatctcaagtacccagggacacaaacactgcggaaggcctcagggtcctctgcctaggaaaaccagagacctttgttcacttgtttatctgctgaccttccctccactattgtcctgtgaccctgc

SEQ ID NO: 22926 - DNA, 1232 bp, Artificial sequence
  DNA replication origin
tctttttactttagaatttgcaataaagggttacgtcaatcttgttttcaactctcctcttggactggcctgtcattctgtcattgccctcacactgaagcccaaggtggacaggcaccaccacctcgcaggaccccactctgtcccgtggcggggacagaagtctgcgtaagggctcaccgcggctcagccccttagctgggcaggcagtgccctagccactcccaggtgtgtgggaaaggtttgggactccactcagcatgtcaggaggccttgcctggcggggggcagcaccttggaggcggcgccctgcacgtgggcacacccctctctagtggtgctgcctctgcacactccagcagagccccagagtagccccgagggggagctgcacatcttgttctggtccccatcacgtttttcaagccccttattgcgcacacacctttccttctggagctcaaactttcaggtcagacggccgtaggttcgagaacgtgactatgccactaactagctgtggccgagtttccgcatgtgtgatggagacaataccttcctccttgagttttgaagagtacatcaaataatgtatgtaactagttagcatgaggcctggcacacagtgcgcaataagtggtaactcttcgtggaagaataattgcaagataagaaggaatctgcctggcgcagtggctcacgcctgtaatcccagcactctgggaggcccaggcaggcggatcacttgagcccaggagttggagaccaacttggccaacaaggcgaaaccccgtctctactaaaaacacaaaaattagcggggcgtggctgcgcacacctgtagtcccagctactcgggaggctgaggcaggagaatcgcttgaatccttgaaccccggaggcagaggttgcagtgagcagagatcgcaccactgccctccagcctgggcaacagagcgaggctccttcttaaaaaaaaaaaaaaaagctaagctgacaagaattgggcggtgcacctgccaccctgggagcctggtacctgagcccctcttccaccggcagtcccacgggctttgctgctcctttccaacggattaacaaactctctgctctttcggtatttcttaacgtttataaaccgtccaaagcaccactgccccaagactgtgctcccattttacagctgagggcaagggcactgtgaggtgagggagaatctggcccatctgcag

SEQ ID NO: 22927 - DNA, 2046 bp, Artificial sequence
  DNA replication origin
gatacagaaggggtcaagcacagctgctattcctggagcccatgtctaggtgggaaaagctcagaaattgatcatttaaaaatacaactggataaagctgctggggatgggggaccacatcaaagtagtctttatattcatacacctagtgcaattatctggtacatacaagacattgaatagatgtttcttgaataaatcctctaatttccagatgagtgccctggtggaggatgcacaggttatcttaagaatgccaagaaatggctgggggcgcggtggctcacgtctgtaatcccagcactttgggaggccaaggtggacggatcacttgaggtcaggagtttgagaccagcctggtcaacatggtgaaacctagtctctactaaaaatacaaaaattagctgggcatggtggtgcacacctgtagtccaagctacttgggaggttgaggcacgagaatcacttggacctgggagacagaggttgcagtgagccgagatcatgccgctgcactccaacttgggtgacagagggagattctgatacaaaacaaaacaaaacaaacaaacaatgcccagaaaagatcctgacttgtggtggtcttggtggggtgtcaggaaaacttcctacccaggaggggagggggatagctgggcaaagtatggaggctggaaactgcatcttacgtgctgtgccacgagtcttgttgtgttacaagatagtgagggcaggaattggaggagtgaggctggaggagtcagcggggacctcactatggagggccttccatgccctgctaggagctggggctctatgatgaagcctttgtgggagtttagggggccgaggacaggactgatttgcaagttaagaattcacacaatggccctgccttgtggctcatgcctgtaatccttgcgctttgggaggctgaggcaggaggatcccttgagcccaggagttccgagaccagcctgggcagcagcaggagaccctgtctcttaaaaaaacaaaaaattcacacattgactcaacaaatctttactgaacacttattatgctctagttgccatggggacaatgtatggaccttgcagtctagttggcggagacagtaaaaaggccgagctgcagtgtgctgtggggcagataggaggagtccctaatggggacaccactaaggggtgtgactcggagtcagggagggcttcccaaaggcgcctgacagcaggaggagtgcaggccgcgatcagaaggagagccagagccaagcttccttgggggaaatggaataagtgcaggtaggcagggccccagtgttggggggcaaggatgggggctggaggaccagcaagagaggaggagggtctggacttgcactggagtgggagaatgggatgatggattcatttaataaatactaaactttagtatttggtagacaagaggagaatttaggaattgaggccaggcatggtggctcattcctgtcatcacagcactttgggaggtggtggcagaggcggaggctggagctggagaccagcctgcgcaacacagcaagacccctatctgcacaaaagaaaataaaaaaagagaatgtaggaattgattgaatatcgaagttaatggagagcaaggggtctagggcttttcgtaaaggggaacggttggggagtacatgaattagaagagatgttggtaacttgttcagtttgaggtattagtggctattaggaggcctagggcaggagctacaatgtaaaagcccagaatcctagcctcctggggggctgagaacccccttcctgggtgttgcaagccctcttaccccagttcctgagtttcgtgagaccctccaacaagtgccatgtcggagtccccgtctccgtcgctgggtgttggcagcccccttgtccccagtcccctcctccactaggcttcccgactgttcggagcctcctccctcccacaatccgcgggcgttcggaacccctcccccatcaccggcgcggagcccgtccacgtccccgtccccgcaca

SEQ ID NO: 22928 - DNA, 717 bp, Artificial sequence
  DNA replication origin
gggggatctttcaggggccctggcacccagggcctgtgctggcctaggagtgctgaccagaaggctgctctgttcccccccacccccgttgctttctggccccctctttggagccagccacccacagggctttggtgcctcagaagcagtgggctgccgggtcacagccgcaggctgcaaaagaccctcggagggagcatggagtgaggggttctctctcaggtgtgtatgtattggggggtgggggtgggtggagggtgtcagggaagttggggtgggatcccagccttcccttcaagaggcagggagctctgggaggtggagtccccaccgctttctctactaggctcctcctgttccccaggcttggggagctttgcacaaggagactgcccccagcctagtggcacctacctcatgggctctggggcaggtaggggaagggccagtccagctctggtaatgctggggggaggcataccaaagaatccaggggcagggagtggggagggtgacttccgagctggcctctccccttcctctacccagactggggctgggatcctctcctcccgctgtaaccatttctacctcattttgctgcgtgttgtacatggacgtatttatctcctgtctgacgatgctctgcagttgtggtctgtctacctcagaagagactgtattttaaaagaaagtattacacagtattaaagcgat

SEQ ID NO: 22929 - DNA, 1046 bp, Artificial sequence
  DNA replication origin
ggtgccgctcctggcctgcctggacgggggctgcggcgcgggggctgacggcgtgctggttgtgggcaccacctcgcggcccgcggctctggacgaggcgacccgccggcgcttctctctccgcttctacgtggcgctgcccgacagcccggcccgcgggcagatcctgcagcgggcgctggcccagcagggctgcgcgctcagtgagcgggaactggcggcgctggtgcagggcacgcagggcttctctgggggcgagctggggcagctgtgccagcaggcggcggccggggcgggcctcccggggctgcagcgccccctctcctacaaggacctggaggcggcgctggccaaggtgggccctagggcctctgccaaggaactggactcgttcgtggagtgggacaaaatgtacggctccggacactgacggcgcgcgggggaggccgcgggagccgcagtccctccgtccccgccgcctccgcgtgggagggatgtcactgactaaacccggctggcaggggctggagtggtgaatgtgggatcggggacaggaggggtctgccggtggatattttttttttcgtgggaaggaaaatgcttctgccaggcagatgccatatgcgccgtgtactcaggtttttcctatttattgtggactggaagctcgccatctccgcccggcagaccgggcagatccggcatgggctggcacccggggccttaagaactcctgctctcttgccacaacgcttttgtctcctcgctatctgaatggcaccctccttctccctcactctctccatcccattctctgcattctcttggttttctctcccttttgctttgtcgctgacacccctgcccaccccatgctggccctgtttctctcctgcccctccctccccagctctccatccctcaccctctgtgcttctgtctccatccctggctctccagcgtccctggccttttggtccctgagctttaatgcctttccctgccttctgttcttatttggactgcagtggccctttgcaggagct

SEQ ID NO: 22930 - DNA, 1585 bp, Artificial sequence
  DNA replication origin
gcggccctcgggcccctcgtcggcggccttgcgcttcagcgacagcccggattcggcacccggcgcggccgtggggaagccataggcggtgggcggtgccggcgcgggcaggggcgtgggcgcgggcaggcccggggtcaggtagggggccgggggtgggcctgggggcggcgggagcgcgccatagccgggctgcgctgcgtagccccctgcgggatagttgtacagcggcgctgagggcccgtaccccggaggcggtgggggctgcaggagcgcggccgggggcggcgggggcagcgcggcgcccgtctgcgcgcagtaacccggcgccaggtaccccccgccgtagccggccgcgtactcgggcgccgccgatgggcccccgcacgcattgccggcgtagaggggttcagggaggttcccggctaaaactggggagccccccagggccccggaaccgccgccaccgcccgatttggttcctgggaggccttcgtggagtgaggccaaggggtagggtggctccggccctggccagggctcgggatcccctttggcgccgttgaggaaggaggcgtcgctgtacccgcccagggccggacgctcgtagggagaatccaagaccccagagtacttctctgcatagcgctttaggaggttggaggcagtgagggctgagatgtcgtcgtgtgcccaagcgtagtggcagcgttggcgacccccagggggcaactccaacttgtgggccggcgacggggtggtggaggagacgtccaggtgctgctctggccactggttgaggggctgggcgtgttctggtgtccagtgcatcttcaacagagctgcgggcaagagacaggaggtctggtgaggtctagccaccgaggacccagtgggccactgctagccataggccagtccgcctagactgcggcttggacaggctgggcttccggcatccaccacctaccgccccactctcttggggccctccctccaggcaccaaatacacttcttatgtcccaggattaaagttgtctgaaaatattttcctcagcgcccaaaggggtctggaaatgatgtggttggccctaacttcaccttgtaggcaatggttattatttttgtcctggccactccagccatgtcctttgcaggacacgtgatccttactttctatgaaggatcggacaatgggcgggacatcccagccctcggaatagtcaaactcaagtgaagctcgctcagtaagagatgtttgtcacctaccgtgtgctggccactacagaggcaccagggttatgtaaagagttgtatgaggcctgcccagagtccctggcctagtgacccagaagtttgttattcctaaatgctctgttcacctcagcccttcctgagattctgagattccaaggccccgtgtgggcctgaggtcagagatgctggcgtgtatgggactgccttatccatgggaaacctcagtggctgacccagagcattcatttccttcccacttggttttggcttctgcctgatgaagtcagagcacctggattccagacccagctgcatgtaatggctgta

SEQ ID NO: 22931 - DNA, 1271 bp, Artificial sequence
  DNA replication origin
aggcagggctcctaagggtccagcaatggcagcagtcggagcttggggggagagtcgggggagtcctggcccagataataagcaattgttaatgtgatccatatggatcctgactggcctctctgtttaacagaatgataatggcagggaaagaatgctggtctgtggggaagggaaggggcaaagtcctccccggacttgggggggtggggtagggtcatggggaggagaaggaggcaaataagggaaagggagaggaggagccccacccaggggtctccaccacccaagagcacagagctgtttacctgaaggtggccagattccatgctatgcagactgcctggctaaaggcccttacaaaaccccttttattcagccaaccaatatttatggagcacccacaaggtgtcaagccctgtggcaagcccactgggggcagggccagggagtacatgctccatttcagtcaaagccctgagtggaccccgccacaaaggcggaagggagcacaggtgcaggccacggagggaggagcaagtgacagaagctcggggctggggaggtgatgcggaggaggtgcgcatccgagttgggccctgaagaataaggaggttgtggaaagacagggacaatgaggaaggcatttggctggaggaacagcgggagcaaaggcagagaggcgtgaaattgcgtggagagagccctagatctcagcaataaagctgcggcccaggcagggcagggaggggagtcctgatccataaaaagctgtggccatgggtgagcagaagaaaggcaggaaagggctctgcgacgccacactcagtctgggtggctctccccagccttcgcccaggctggtactggaattgacagttacgggatcctcagcccagccctcagccataccacggccagagaatcgggcagggcctccgaagccaaactcatttctgtgtctctcagccccttctgtttcttcttctggggcgggggtgggggcaacaggaatccccccgaggaatgcgggtcctctaggcctccccaggagcaactcctctgccccacacagcctaattccctttggcccaaaagggcttcgcccagaagatattacagcgaggacacgagggtcgctcccgtctgccttggatgccaatggaatcaagtggaaagaaatgaaatggtgttaaacatgggaaaggggatttacgaggcctgtcacccgtccagcccagccaccccagcaagccccgcccctttcctcg

SEQ ID NO: 22932 - DNA, 955 bp, Artificial sequence
  DNA replication origin
ccgcccgcggcggccgcagcagccgcagcagcagcggctccaggatggtgagcgccactgccccccagcccaggcctgtcgcccccggcccgcgccgccgccccggtccccgggccggacgcgcccccaggccgcgcacactcacctaggacccggccgtgatgccgaggtacggggccgcgggcgggccgggatggggcggggggaggtgaccgttcggtcagggtgtccggagctttgtccgccggcccggggccggagagggccgagagggcgggggctgctagtcgcggggttcagctcggcgggggtcggagggcagggccggcgagagaccctagcgggtacgtgggagccgagggtcacttctcggggggagggggcgggcagagcaggggatagccgcccggccgccgacgggcacccgtctcgcagccccctctggtgcgggggctgcagcgaaagcgagcagccggctcgggggcgtctgctggcctgggggtggggagccaaggtttgcgggttcgggtcccagaaggatccagcgtccggagcccgagggccggcccgcaggcccctcccactccgtcaggtctttgtccagcggcccctgtgtgtgtgtgtgggaggggtgggggctgggttactggcccggagattccccagcatggtgacggggcagtgacaggaggccgaggctacttagggtccccgcgcccctaacacccaccctcttcatgtcttctcctctggcccgggagaacagagcccgcgtctcagagtcagggggttgtaggaggctgtactcaccttcaccctggggctacaggcaacaagggggacccccggagcgcccagctctccagagagggcccctcaaacttccccaccgcaagagccctctcctgttctacacagagattcgcatgctagcaacccccccgccgctgcagag

SEQ ID NO: 22933 - DNA, 1487 bp, Artificial sequence
  DNA replication origin
attagccacagaggggaaaaaagagcaagtgaccctcggtgtggagagtgtccttcgccactctcagacccgtccgccccgcctctcccggccgtcggagcgggaagctggggttggggtgggggtcgggccggcgggtaggggtgggggacggcatggggacggggccgaggccgggactgagcagcccagcccgtcgagcgtgtccgctggatgtgggcggcttcctgggtcgaagggcaaaggggaaggcagccggcctgggcccgccccgtccgcgggccgccccagaccccctttcccaggactgccttggccccctggccccagtctggaggactcttgctcacttcctccgcccccaggtgagctgagaacccactgcgcgcgggactctgctgcgcctgccctcccgggctgcagagggcaggacgcaccgccaggcaaggccgcggctctgcgctgatgccactccgggagcgggtggctgcgggggaggagggcgagcactggacgggggcagcggagtgtagggtgtgagatctaaacagagggctccactggagggcttgcccagaaggcggcagtcacactgggccaagcaggatgactggcaggaagaaaagatgagggatgaatcccagacctctagtccactgagagtgtccaaagacatccgttcaatagatacatactgagtgttaactttgtgccaaacattggactgtgcaccagggatacccaagagagtccaagaggcacagccctgtcttcctggagctcccagtcgaagggtagacagaattctgcccgacacacacacactcaaggcttcatcagggataaaggccaggaaccggctttgccccaggagaaggtaggaggagggctgtgctgatgatggagggtccagagaaccttcctgctgttgagcctccagatgtcccaaggcaatcctgtttccacccaagggcagtgcttaagggtcctctctcctgagagcttgtttcccttttgagtggctgcctagcctgagtgtcagtagggcaagattggccctcacccactagcctgtagaactccaaacactaccccctcccttcttctaatgcagattcccctgcaggctctggggtctgacaggtctggggcactcctttaggtgccactcagggaaacagaaggggagggcctcagtagctcccacttcttttccagcccacatttggaagcaaccggcacccacgcaggttctggaacttgccaaggtcagtgtcttttccacctccagaattatctcttccttgccactccccacccccagggctctgccctggcacaggaggagggacgtgtcaaggctcagagtgctagagtagcccctggcttcagaatcaggcaggatgaagggagccacaaccaccatgctaggagactggaacccttgctggaggaacaatcccaggataccagctggaaggaactcc

SEQ ID NO: 22934 - DNA, 1310 bp, Artificial sequence
  DNA replication origin
cccggccggggaggccgccgcccctcccgcaggagcgagctgccgagccgatcttccggccccaggctacggcgggggagggtccgagcggtaattgctgccatctgctccctcctccctcctcttcccccacagcctgggggaggctccgaggctcgcgcgctggctccgcgcccccgcgtccgaacgtccccctttcacgcgcagccctggccaccgaggggcgggagctccaggtggcccgcgagcccccctggggcgagtgcgggggtgaaccgagagcacccaccagcatctctttgctggagggcgggccctagtcggagccacacagcattgcgcgacagaatcccaccgctggggttctgctcctcgtggagccaggccttgggaagcacgggggtgtccctcggccactcgctcggctggcgtgcacacgggtggatagttcacgcccgcctcgggatacggacgtgtggatctggatttcggacctggacagacgcgtccggggtgtgtgtaggagggaggagcagagccgaggcccgaggctgaagccggtggggaggaggcaggactctgctcttcgggcccggcgggctggagttatcgtcggctggggaacctcgggcagcgctcagagccgtgtcctcatctgttaaatggggacccagtacctgcttcttgggtgcatccagaggatttgattccacagtctgggaagcaacacctgcgggtgggagaatggttaggccaggaagagggagtgtgggctggggatgggaggttggtatcaaggccatttcctggggtctccagcagcatgggcttcagagggtgaagatgtctgatgacagtgctggggggcattggaggagttcgggaatgtttatggatcacccccaggctatcagagtctcaaataatctgtcgcatttttctcataagaacacttttgcctagcaccctgagttctgatgttttgctcctctttttttcttctggatttctgctcactagaatactcacagggtagcagagagcacctgactgccctggtacaggaagccactcaccccggtccgctggtgacacagacagccgtgctgcccaggacccagaaaacctcaccttgtggcacagaaggtgcccgctgcctccctctcttgtagccttgctgactccgacaaacctgtgtttgtctcagaggccagctcctgcaggactgaactacgcctccttcccctaaccgtcactgccaccagtccgatggcctgactcctcagcacagtgagccttggggtgccgag

SEQ ID NO: 22935 - DNA, 1372 bp, Artificial sequence
  DNA replication origin
acttagaatgatgtctggcacagtcagctgattagctgtcagccaagattattgttatagtaagccatgggtctgcccatgtgtgcaaagcatctaggtgggtaccaggtgagtacaggtgtttgtagctggccccacccagagagaagccctctcggaggtgaccagatgaactagcatccagtttggtcccagggactcctttcctggaatgtatggagcatgtactgagtgcttcttggtttgcaccaggcattgtgctagagaacaagaaagacaaggtccccgcgttcatgaagctgacattctggtaagtgaaacagaccacaaaccaagtgaataagaaagataattacagaatgtggtgagttcagtggaagaaatatataaggttaagtgacagactggatcaggcagatggggctgctttattattgtggtcagggatgatgggaaggtgacgttcctgggaaggatctgggcagagcgatccaggaaaagcaccagcaaagccaaggccagaggtgggggaaagcttatcaagttcaatgaacagaaaggcagccagtgtaagcagtgtctgggcagtggggagaaggataggaagagaggtctgtctgtgtaggtaggggctgggggaaaaggtttgggcttcctttgcagggaagctgtgggtggctgttaagcgaggaatcacatgccctggtgttttcctgatttgtatttttaaaggtctctttgcctgcagtgtgaactgattgttggggaccctgggagagcggacaggagtcttttcgattgtgcagggaagtaacaggagcttgggcagttgagtgggggcaggggcaggggctgttttaggaactatgttagagacagaggaacaagattcagggtgagggtgggagaggaattcaagaagaaagaaaggcccagggagcccagatgatccagttgtttctactctgggccaggagagtccccctgtcctctttagccctggccctgacccacaggggccaaccctagccatttgctctcccactgtgtctaccctcagcagccctaaatcaagggcaggccaggctggctcatccgagacctttgtgagaaacggtgccccctgccctccttcagaacgagtcagcacctgccaaggccgagcttggaatcccactcacccacaaccacgcctcccaccttgtataggtcacaacctgcacaaccgtacagctcccctctccctagcctgggccactggctcgacctgaaaatcttcggaactttgaggacctaaaggcccggagctggttgcggccggccctggcctgaaacaactctgggggtgggggcggccggagactcggccttt

SEQ ID NO: 22936 - DNA, 1734 bp, Artificial sequence
  DNA replication origin
gctggagccggggaggggctcgctcggcgcagctggcgcggcagcctcccgggactgggatgggggctggagcaaaaatgtttcttattccagcgtcttcctgcctggcccagctccaccactccctcctaataaaccgtttccttattgcccagctcgccgactggccgccgctcgcccctcgctggggctgcaggaccgggacccacccccgcgccgctcccagcccctcagggcggcctcccctcccagccgcccgcagctcccgggtcgctggcccgcacccgggccgggcctcccacatccgcctccccgagggggcgggccttggactcaggccgtgggggtcctgtgggggtcccataggggtcccgtggggtccggacccacagccgtgggagacagagccgagactgtaggcaacgtctggcggccggagtagtgggtgggggtagagggggatcggctggcagcagcggaggggccgcctggaatcggggcgccgggaaggggccaccgaggaagggacaggcgggggtgggacggggagggacactacctatccttaccccaccctcagcccgggggtcctcggtctaggaggcttgcagcaatgagggcagagtttggggctagcaaaatccagatgcgttttgactccgccctcgggaactcccgacttggcccaaatccttcagtcccctccctcgggccccttcgtcccccatttgtcccctcctgtcttcagcagcctctcccgatccgcactcagcacaggggtatacaggcccagaggacggccttgggttagccctgaggatggtttgagcccttcctggccgttgtgcagctgggtgacaaagacacccccgccccgccagggacagtcaggatggagggacacgctgggagcagccttggaccttccccttccaggcagggcccccaccccagcaaatggagctttagatagaggtggggaatggagcctccctggaactctgctgacacaaggcagctggggagggaagcagaatggcttcataccggcaggggagggggacacagactcttcctgatgctcctgcacaggctgggagcactgacctcactgccctgctttgctccaaccatctaagtacctgcaggactctggtcttagtcctagcctcctggttatccacagagactctgaagtcaaactacctactaggaatgcaggctggttgtgttaccgtaggctagtgacacctctccatgcttcagtcccccatctgctaaataggcatagtaaaccgtgccagcctcatagggtggttgtgagaatagacggaaatgatgcttatctcagctcatagcaaagatgctggctggctgagcctgactcagaggaggccctcaatgaaggcgttcgttaattaaatgaataaatgaaaaggctggggagggggtggcctcagagacacttggaaagacgtgggtattagaagcaggagtagacctctaaggtgtcttactctaatatggggattctacaagatgagccagggacccctcctcctgccccgccccaccttttgacaggaatagaggctgggggagataatggctaaaagctcagacaggcatcaattattgactgacctcacttcctctgctgaaaccctccccatcccccaccccacagctgcttcacaagttgtgagcgttgtgaattcccagaaccctgacaca

SEQ ID NO: 22937 - DNA, 1075 bp, Artificial sequence
  DNA replication origin
tgagtccaaggcccgccccctcggggaggcggatgtgggaggcccggcccgggtgcgggccagcgacccgggagctgcgggcggctgggaggggaggccgccctgaggggctgggagcggcgcgggggtgggtcccggtcctgcagccccagcgaggggcgagcggcggccagtcggcgagctgggcaataaggaaacggtttattaggagggagtggtggagctgggccaggcaggaagacgctggaataagaaacatttttgctccagcccccatcccagtcccgggaggctgccgcgccagctgcgccgagcgagcccctccccggctccagcccggtccggggccgcgcccggaccccagcccgccgtccagcgctggcggtgcaactgcggccgcgcggtggaggggaggtggccccggtccgccgaaggctagcgccccgccacccgcagagcgggcccagaggtgagtcgaggtccgcggacgggaccgggtggcgggcggcctgacccccgcttcagtgggcccttccttcgggcggaccccagagtcaccgcagagtggtcgcgggaggctcagtcccagctcattagaaaggcaagctgctcctggctgaccacgcacagctcccatgaccctacctgagacttggaggggaatggacgagactggactggaaatcagaaacttggttctagtcgggtgacctggggtcagtgacttcacttctctgttctcctaccctcttcataaaatgggcagtgggattcctgtcttgctctactcacatagaagggatcacacgtcctccaggccgctgggtggacctggagtgaatgcctacttccacagctgttgagcctcccagcagagctcacctttcccagatcagtccttccagctgttgcttgaggaatctgacactatcactccaacctaggagtctcaccctaggcgcgcatggtcagtcacctccttgccacgaccttccttcaggatccaggccaaaggggatcccagtctccccccaggctgggaccccagatttttccatggaggccagtgctgtga

SEQ ID NO: 22938 - DNA, 925 bp, Artificial sequence
  DNA replication origin
tcggggctgcgggaacttgcacagggagctctgcagggggcgccccaccgagttcgtcaaccactactgctgcgacagccacctctgcaaccacaacgtgtccctggtgctggagggtacgtccagctgccctagcactccctccccatcttcttggcccctgccctcccttccctcctttcctctcatgctctggccaataaaggggctgggggcgggggagcgggtgggcaggactctgggatctaactggcagagtggtctggcccgaggtggggggagctgacctagtggaagctgagcctcagtgtccccctccctcagccacccaacctccttcggagcagccgggaacagatggccagctggccctgatcctgggccccgtgctggccttgctggccctggtggccctgggtgtcctgggcctgtggcatgtccgacggaggcaggagaagcagcgtggcctgcacagcgagctgggagagtccagtctcatcctgaaagcatctgagcagggcgacagcatgttgggggtatgggcctggggacctgggacacagggtgtaggaggggcagataggaactgcagaatcagaggggtcacccagagattagagccggtggggagctgggcgagtgaggagcttgcagtgacccagcaggtcccaggtcgaggatagagaagggggctgtggctggttgtggcagcctctcagtggcctctccgtacccccaggacctcctggacagtgactgcaccacagggagtggctcagggctccccttcctggtgcagaggacagtggcacggcaggttgccttggtggagtgtgtgggtgagcagtgggtgagcccggtggatgaggaccaagggctctcatgagcctggaggggtgagggagtttttggctactggaatcac

SEQ ID NO: 22939 - DNA, 1935 bp, Artificial sequence
  DNA replication origin
cggcgccggctccgccgggagcgcacgtgcaggcgccgggcggaggagagggaggcgggagccgggccgcgggaggaggggaggcgccgggggcgcgcgcgcgcgcgctgggcgctgctgggctgcggcggcggcggcggcggcggtggttactatggcggagtcggccggagcctcctccttcttcccccttgttgtcctcctgctcgccggcagcggcgggtccgggccccggggggtccagggtgagtcctgggacggggggcgggggccgggatggagagggcccggcaagggcgaggcctcgagccgcggccgctggactacagcgcgccccctccccacgagcacaatatggccgggtggggggcgcagaggagtcggggtgacccccagtcagcttccccgatctccgaggcgcagccgcccggcggcgacggagctcacgccgggcccctggggacccgagccctgttccaggcggaactggattcgggcagttctcaggggtcgcgctcccagcgccctcgtgttccagagaggggagtctgagcctccagctccaagatttggaggtccgtggtttctgcccttcaccgtgtccaggggcggggggctttcttccctccctccaggtgctcctggggggcgtctttctcccgccaagactgtggggttcgggcggtggggtcttagcctctccgagggaacctgatgttgagagtccgcgcacctcagactgtaggggaaggggtctctaacctttccttcaggtcctgcacttggcgtgtttcttcccctccctccactgcctccctaatgttctgggaaagggagtcacatttccccttcactcaatcccttgagttcagtggggcaatcccccctccgccctccggcactcatgccccgtggaggctatttggaggaagtgggacgaacaggcccctaaacctttttggagcctggctttggaatccctaaccctatggaaccgagttccccaagggttgatgtgaatctaggtgtatttgctttcctcctcgcctcccccaccctaccccggggggcccattcagttaatcactttgtggatgcctttcaggtgaaatcctggaacctgtctccaaacccccaagattatttaaagatcccaccactggactgtattcccggcccttggtcagtacttatttaccttcctacacgatgcctcttcccagcccgcccaccctcacacaccccttacctcccaatccccacagtctgcggctcgccttataccacccccccactctcctctctgtagaagcgggtacctttttgcgggacacttcgctggctgtgttgtttttgaggctttgggggctgagaagagcagatgaaaccctaaaatatttcatttaagagagtcttggcgaatgtgttttggccttggggtagcagatgaaggttatatttggcagttatattgaagcgattattgacccacagatggatctgggagagatgatcaggattgtattcgctcctgacgtacaaagcctgatgctttgacttctcagcagcccctaaccttccagcaatgggagataaagtgtgttctgtggctctcttctcttacactaaaaataatgattctcaggtgggttcagtcgtctttaataaaccagacagtcaagaaaagacaccatgccactttggaatctcaaaaacaagttcattatctccggctttgatatttgttcccagtggtggagcctgtgcagcggggtctttgttcacgggctaatgcttctcctaagcacctcgtgtgtgttcttcggcctcactgctctgtggcttaggtatctgtgctgtggggtttgagaaacatggtgaaggtgtatgaacagagcttgacatttgtggtgagataatgatttgcatgaataa

SEQ ID NO: 22940 - DNA, 1534 bp, Artificial sequence
  DNA replication origin
tacagctcggcagggtgatagtcctccagcgccgcgtacagctcgtccgctgggggcccaggggtggcggctgcggcagggggtcccggggtcgggaccggagcggcgggcgcgacttccgagtcgggagtccgggcggcggggtccggggtggccgccgcctcctccttctgctgcagcttcctgagtcggcggagggtcatggctccggcgccggacgcccctcagagacggcgctggctcccctcggcggggctggcggcggctgggggatgccagccgggcgggccgcgggtcgcctccctttataggctccgagagcggggcggggttgggggcgggcggggagctgcctcgggtggcctcgcccccagcacggaggaccctccccgcgaggcgccgccgccctggagccccgcccacggcgctcgacggccggggaaactgcgggagctgggcgctcagtgggggaaaacgagccgcggacgcgaaggggcgggatgaggcccccggggcggggctcggggctcggggctgcgtgatacctggaggggtctgtgaagggacattgcgcaaggtttgaaatttagggacgaatagctctggcgattcatggagtggggcacggtaagaggtcactgtaagaagcctggggagtcggggaggtagggagagtcacggagatccaaggggctgcaggagactccagggcagggagagcggcagcggggctgcgcaggagtaggggtggaggcccgatggaggagggaggagactccctgaactcactgcgcagaagcccccagggagggagagggcccaggattttcccttgacgcagctgccccagaagagctgaaagaggctgccccctgttcgcacgtctaggaagaagggaagaggtggaaaccctgaaagcagtaggcttagttctggcctgtcccctccaaggggcttgagtgatccctgctggcaacacctttcctcagctcctgatgccggggtcagatcccccttcccaggagacagacgcttactgtggacttgactcaggaggttgggatgagcccaggctgagtgggagttcagggctggggggatggccatgctcagccgttctctgaccccatcttagggaccatcccccaggctgttaccatggctgccaggcggtaggagaggcgggaatggcccagccgaagtctctgtcgtcagtggtgcccgaataagaagtgagaggaggaagtggaaggcagcgtctggtgtctaaagagcggctagccaccacagggcgtcagcagcacaggctggggactccatgtcccaacacccatcggccaagaagcagaggcggcaatgcggtgcccttgtctgtcccctccctcctcccccagtcttcccaaatctgttatgccttcacagttaacatttattgagcacttagcatgtgctatgcacactgtttgttctgtgtgtccttttacatacatgcattaactcacttggtcttcataacaaccctacgaaataagca

SEQ ID NO: 22941 - DNA, 979 bp, Artificial sequence
  DNA replication origin
tggccctcgcctgcacaccgcgcccaggctcggtggctcttaactccgcgccccatgcacgccccctctctccctccttgactcctcccagcaccccccttctcctacccgctccatctggctttctgccccccatgccccgcctccccgtggccaggtgtcctgggtccccaggagcccctcgcccgagggacagagacagccccaggcaagttgaaggtccgagagcccccggtgggagaagcgggccggtggctgcgccgcgtgcgttctcactctgaggaagtgcgtggggagccgctgactccggatagcacacccttccgaggggactccccgattcctgggctgggggcctgccgcctggccccacgtctgacgtacggggcgcgagggccactgctccctggacttctgtcggaaccggacgcagtgggaggggtcgcagggcgcccgcggggcaggaaggatgcgggccgcgcccacctctgagtcccctctgccagcctcttcctctggccccaggagacctgaggctcagaacctacacaacaccaggttaagaagaggggcctggtggcctttcctcacccagccgccctccttcgccccggcccccagctagcccccacacaatgaacagcttgttgagaatttgcattttatgaaaatcatgttgaaagacaaaggggtctctctgtgctgcccagtccttcctccctggccgtttgggaactgtccccacccctgaggccaatctggttctgaaccttctcttccttgccttgggcagctttgggggagggttagcaaaggcacagaacagaaaggccctgggctgtgcaggctccaaagaaaagggctgctctgggactggacctcctcccaggaccaaaaagttagggagggtgagagactactttagtttatcaaggaccctgaagagacaggaaccttcatctctcatccttcctccaca

SEQ ID NO: 22942 - DNA, 1851 bp, Artificial sequence
  DNA replication origin
cgctggctgttgcgaataaataaataaatacctccctgcccgcccccgcccctacagctggctctcctcctcctccagggagcggttgagtccggggatgaacttgagcagccgccggcggaagctgcggtacttggttttgcgcaggccggggccgcatagggcctgctcgcgagcctcagtccagagcgcgcccggcgcgcccccgcctccgcccccgccagggcccgcgcaccgcacactggcgctgcggctcagcgcggcccgcggcccagggcccggccccacggcaggggtctcggcggggcccgggccgaaggcgcgggccgggggcggcgggggcggcagcgccggcggctcggagtccccgaagaagcacgtgtggtagacggcgtcgtcggcgtcgcccctggcccgtcgggcgcctccgcggggacgcccgggcacggcgagcagaggcccgaagggcagcgagcccgggagcaggcccgcgccgtagaggcaggagcgcaccgactccagcgtgtcgtagatgctggggtccttcaccaccaggcctgcgcagagacgggagaggtagggggcgggtcaggcctggaccgtggtggcctctgcaaagggtcggagggcatgggcggggcgtccccgctccgtcctgctgaccatctctgtggccctggccaggcacaaacctgagaccctacttccctcacccgcaaatcaggaattatcactcagatccttatgggggccgcttagcacaaacgggcctcggaaataattgacacaaactctttgagccctggtgttcccctctgtaaagtgaagatgacactatctgttacttacctgcagagggctagtgtgagaataaccagaaatgtggctgcggcagtacccaaagtagtagtagctcaacaaaccttgctttactgtggaggtttactagtaaaccgttctttactagaacccgccagttctgagggggaagcgcagatggggtgtctgtagcagaacaagtggcccctcacaccccgggatctactcaccatgcaccagccgctgctcctgcaccattagggacctgtactctccccacttctcatacagggtttgctgcaagagacagtccccaccccactgtcacaagctagcaggaaactagcaggacgtgggtacagacgagggatcagggagtagacaaaagaaatcttcagttacaggagattcagctgtaagtgaccccccacagggcagaggcttgggaagaggagggtggaggctggacgttatctaggttcccctaccttcaggtactgcagacgagcctccagttctgccttccgaattgatgtcccatatagagtttccagtctgaggttggagaatcaaagcctgagtgagccacaggctgaggaaataccaagaggctgagctcaggaattcaggcacctcggctcccagacatacctgagaacattgcctgacgccttaatgatgtccacaatctctcgatgccggatgccttccacattcaggccattgacgctggcgatggtgtcccctgccaggcagacaagggggttagatttgctccatggggcatgctagaataccagcctcctaccttagccagaaaggggagaagggtgggtagtaactccagggaatactcctgaactccctcctccaactcctcatggttctctgtagatctcctctgacatctctcatactcgatccaaacacacagaaccacagccattcttgtgggcctgtagtgactaccaggttgtccacgcccagcaccccagccaaagggtggggacctcacacacccaacaccctcac

SEQ ID NO: 22943 - DNA, 1724 bp, Artificial sequence
  DNA replication origin
gcatctacgacacgctggagtcggtgcgctcctgcctctacggcgcgggcctgctcccgggctcgctgcccttcgggcctctgctcgccgtgcccgggcgtccccgcggaggcgcccgacgggccaggggcgacgccgacgacgccgtctaccacacgtgcttcttcggggactccgagccgccggcgctgccgcccccgccgcccccggcccgcgccttcggcccgggccccgccgagacccctgccgtggggccgggccctgggccgcgggccgcgctgagccgcagcgccagtgtgcggtgcgcgggccctggcgggggcggaggcgggggcgcgccgggcgcgctctggactgaggctcgcgagcaggccctatgcggccccggcctgcgcaaaaccaagtaccgcagcttccgccggcggctgctcaagttcatccccggactcaaccgctccctggaggaggaggagagccagctgtaggggcgggggcgggcagggaggtatttatttatttattcgcaacagccagcgctaaaagagggggaggccgagccaagaggaccccaggagcccagagcagcgggagagggtccttcctagcctcggcccgccgggtcggttcctggctggtgtctgctgagggagtggggggcccagccccttctcttctcccccgccaaaccacagtgggagctggggcagggggagagccaggcaatcgggggccaaagatgggggtgctcgcctacagtctgcatctgtagtgccttgtggggtatccaggaacaccctcccagcaggggatgggaaccctgtcccatgaagccctctcctcagctttacttgctcccccgcccttagccttggggagaaatggcccgtggtgggctgaccccccaccctccacacacacagttccatgacccagcgggcccccaggggcatcaggtgctggtcctcctccctcctggcctcgacccctaagggcttcgcccctcccaggggcctgtaactaagtcgggtcctgccaggcagggggcctgtgttctgtgccccttgggagacaggaactggcgagttcaggtggggtggggacagcacagactgttccaccgttgtgcatattgttgcttctgaaccacaaactgtataaatggatggttttttgcatctgtgtcagtgtggtgactgcctgagggggaggattgggctggggcaagctctgactccaccatcccaacccccgcccaacgcacacacatcttgttttcttgcagcctgaagccagggaaataggctgggagatttaaacttacatgtatgggcctgagctggaggccccacgcttcttcacaacttgagcctccctccccagatacccaagcaggtggtgaccaaggcttgcctcaagtccttagccatccctgtagaaatacgtgtgcttggcatgcctttcttcccagcttctgaggtctcccttgaggggcacaagccagatctgtagggacctgaggcattaccacctggcctgtgaggggcccaatcacggctcactctgttgttctagcagtcttcagcggtttcccaccccaggatgagatttttcttttttgagatggagtctccctctgttgcccaggctggagtgcagtggcccgatctcagttcattgtaacctctgtctcctggattcaagtgattctcccgcctcagcctccc

SEQ ID NO: 22944 - DNA, 1634 bp, Artificial sequence
  DNA replication origin
gttctggcattccacattttagaatatgttttatttgattataaataggagaatatataataaagacaagttatgctaaaagtatttatggaaaggagagacctctgtgggctggaagccttcatggaaaaactggtaactgagccctttttttcccttcctgtctaaataaatgtatttctcccacacaggcaaatattttaaaatgtatttcaaaagttagacttctggaaaaagaaaggaaaagagggggtggggtagctgctcctctaagaagcccatgtgaaagaagctgctggggtaggaaacaggagggcacagggtgagtgaggaaaagtcagtccctttcccccaccccaacgccttgtcatttttgaagcctcagtttctttatctgcaaattgacctaatacttgaacctgggagagaaatgtacaggttcttgggatgtgattttgagagacaaactctgcagaggttcttggaatcattatgaagaatgagagaaagggaattctgagttgcgccaagagtttaggatttgtccagcaaaggatttctgggggtgggcagtggggtggagagaggaatgcagcccctggaatgagggctgagtggaggtgtggggcctcttttggagaattttgagcacagaagagattctttgctgcgtggggcctgggctgggtgctggagattgtatagcatgctcataatttaaggtggctccaaaaaggatcaggggctagtggctggcacagcagagcacatgactggatcctccctaatgggtgttccccaatgaccttgcctgtacgggggtataggagcagagatggtaacccccaaccccacccagccagccccaatcccattgctccaactttggccgggccttcctgaccagcctctcctgagtgggcagctgctgggggagaaggatttgctcaggacaggatggttcttccatttccaaagagggctccagtcacatgggagagagaaaccttccaagtgcctgcacccccaggaaaattcttaccatggaagcctgggcctgaagactctggtcagaggagggtgggcttcccagggcttcctggtcacggtggtgggcctctgagtgcatgaagcactcctttggattggggagagcagggagaactaactcagtatctactgtgtacaaggcacctccacagctgttatcatcctgacagccagatatggtggataatctgatcatatcatgttttagagacgaggaagctgaggctcaggaggtcaagtgactgtcctaagtcacacagtggtatgggagcagccagatcagtgaatccatcacctgggctttgccggggcctgcacccccgcctcgggaagtgccctcttcaggagaaagtcctatttctctgtaagctgccttctcgtgtggaagctgggtgccctgctacctgggttccttgcccttggggtggcatgaatgccaagcgatgcaggcagggcgcccgcagactcaaaggccaggccctgtcctcgccagcagccgaatcgctgtgactttggaccgccaccgagtctctctgggcctcgctctttccacctcttcctggggaagccccggctaagtttct

SEQ ID NO: 22945 - DNA, 704 bp, Artificial sequence
  DNA replication origin
cggctgcaggagcgcgaggaggaggtggcggcggcggcggaactggcgggggtcccctcgcggcgcccgggacccccggcctccaggcatgggcgcccctgcggtgcagagcagctcagggccggctggtgcgcgaccccggaaagcgggggtggagaggcgagcggagcccgcggggccaggtgaggggctgccggggtggcgggaggtgggccccggagaggccgggcaatctcgggtcttcggtggatgcctttgggcgggctcggggccacgccggagtcccgcttggaaactggggagtcgggggggggactggattcccagcggaaccgctggctccgagtcagcccccaagggcgacggccaaggctttctctccccagtccgccaagggtggggtttggcccacgaggggcgctggaggtggccaggccagagaaattccttccatttctccgccggctgcgggaaccggttccaggagcgcgggagctcgtctgccaggagacccagccgggagggaccgatgctgcgtgatgcaaccccttcgagggactgagtcaagaaaccaaggctgggggtctcgtggagtcaggcggagctggggattaggactcggggcttgtgtctcccaggcgtgtttttttgttgttgttttgtttttttgccgcaacatcttccttatactgggtggggtgggg

SEQ ID NO: 22946 - DNA, 670 bp, Artificial sequence
  DNA replication origin
gcggagctggggattaggactcggggcttgtgtctcccaggcgtgtttttttgttgttgttttgtttttttgccgcaacatcttccttatactgggtggggtgggggcgggggtggtctgtatttccagacctcctccatggtggtctggctgtgtggagggcagggcacagttccttgacttggctcattcccccccaacgccccccctttcttttttttttgagatggagtctcgctctgttgcccaggctggagtgcagtagcgtgatctcggctcactgcaatctccgtctcccgggttcaagcgaatctcctgcctcagcctccagagtagctgggactacaggcacccaccaccacgcccggctaatttttgtatttttagtagagacagggtttcaccatattggccaggctggtctggaactcctgaccttgtgatccgcctgcctcggcctcctaaagtgctgggattacaggcgtgagccaccgcgcctggcaggctcattccctttttatgccttcgtttttgatagatgacctggggatgggagaaatgctgcagaggtggtttatttacagtgaattgttaatttggttgtggggctagtattaggggcacattgggaaaacacaggctgggcagaggttggtaggttcacaacagt

SEQ ID NO: 22947 - DNA, 841 bp, Artificial sequence
  DNA replication origin
atggctctgaaatgccccagatgctatcagcagctcctggccacaccctacacccctggaagcagattgcctggggcctcggcccccaggctccaatgcctaacccggggaggtccttgggcgctggcttgtccccctcttgtggcctaggtcctgccactgctcccattcctgcgtgtcctgggcatgctgtctccagggaatgtgcctgctggctggtttctcttcactcacatcgactctccctctgtaggcctccaccatggacagaggccaggccctgcccctcccaggcagcctggctccttctgctgggccctgaaggcagacgggataatgtggttggccaaggcctgttggtccatccagagtggtaagtgctctgctattgtcctttgtacacccctccagcaggtggggttggggggcagaggtgggggtggagctgcccaaagcggatgtggttagggggatggaggggaagccctggggaggtggcagccgaggtgctgttcagtgtgcgggatctgatttctttagaggttggggtagtgtgagtgtggggactggggaagccttattttcttggcaggataggctggagggctctctgggcctaggtgacacgggctggtgggagtaggggatgacagctgctcccaaggcagcatgtgcctgattccaggaagcagatagggtagaatagggtgtctgggggctgggctgggagcatcatggggcagacgtggcagcggggaactggcctgtctcccaggtgtagacacttctccaggtgagtgcatgaagggaaggctgggacctccccttcctcgtggaaagc

SEQ ID NO: 22948 - DNA, 1316 bp, Artificial sequence
  DNA replication origin
aaatctaagcaaaatcttacggaaaagcctaagagaaagaaaagcaaaactttgcctgaaatgaggtagggatcctggatgggtccaattggcatcatcctgcccacacttcacattcaaccagtggccttgaaggaagatggtttggagcaacccagagctctctgcagatgcattcacgttgagactgtatgctgggatggagggttctggcaggttctgaccagatgactgaatgccatcagcattacagtcaccccttggtttatgaagggggttggctccaggaccccaacttgtactgcgaatactcaagtcccactgttggccctgtggaacctgtagatactaaaagtcggccctctgtatatgtgggtttttggatccatgttggattgaaaaaaaatccccaaatccccatatgagtggacctacacagttcaaacgtgttgttcaagggtcaactgtgtatgaagactgctccatctgtggtggacagtgaggctttagaaagaggagacaggcaggctaatggatggtcttcatgggtgtgggaaaggaggagtggtcactgggcgcaggcagttggtctgtgggaccagtgaggcatgggctgtggctggcagtaggaaagcgggagaggctgagtgcagtggctcatgcctataatcccagcactttgggaagccaaggcaagaggcttgagcctgggaggtccaggctgcagtaagccataatcatgccactgcattctaggctgggcaacagaacaagaccttgtctcaaagacaacaaaacaaaacaaaaacggggagaggaaaggacccaagagatgttccaaaaaagaatttcaggaaacagtgaaaagttgcaaatggggcatcaggagccaggagcagagattaggtggcaggcagggggtgcagaaatgacaagttctgtctggaacagatgaaatttgaggtgcttgtgggacctttgagtgggcagaagcgggggctggagacaagggtgtgggaaaactgtgatgggggttgagggtggaaatcgggccggcagagcctccggggcagagaaagtcctatggggtgaccagatgagttgagaactgggtgggtgggtgcaggctcaatggaagcagaaactcatggatattgacttacatgggagaaggggaatggatgggggtcgcagtggggtggcagggctctcttttccttgtttttgtttttttgcccttccctcttctcttacttttccgtgagggctccccaggctcaggagagatcagggtggaagggtgacggccaaaccag

SEQ ID NO: 22949 - DNA, 1131 bp, Artificial sequence
  DNA replication origin
tgacaagttctgtctggaacagatgaaatttgaggtgcttgtgggacctttgagtgggcagaagcgggggctggagacaagggtgtgggaaaactgtgatgggggttgagggtggaaatcgggccggcagagcctccggggcagagaaagtcctatggggtgaccagatgagttgagaactgggtgggtgggtgcaggctcaatggaagcagaaactcatggatattgacttacatgggagaaggggaatggatgggggtcgcagtggggtggcagggctctcttttccttgtttttgtttttttgcccttccctcttctcttacttttccgtgagggctccccaggctcaggagagatcagggtggaagggtgacggccaaaccagggaaggctccaggtggctgaagcctggtctgtgcccagcagggccctggcgggctgttcctcactccaccgggcaggtgataactggtcagagctgcctccccacaggtgctggaggtaggctgggagggccggtgctccctgatgtggacagggggaggggtattgataagaggcgtggagagatccctagagatgcagtctgtggccctgggttccaacccagtgtgccaccacctggctgtgtgaccttcagcaagtgccattatttctctgagcctgtttgtttataaaatgaggaagagttggcacaagtttgaaaagatttctcaggctccacccggttctgaaattcggtaatttcccaactagggtgcactccccctgtaaggggctggggaggggacggtgcgaaaccaagttcagcttgtggagcggagccagagctgttggccgagcttgggcctggccaacgcctgccctcgggaaggtcctgtgtagggagactgcctggagggactaagcgagggctctaactgacgtctcaggggcagcctctcagcctgagaccctgctggggaagccgcgtcctgtgcactagctgcgcctagggctgaggtgagggcgcaggctccccagggtgtgtccgaattgcccgcctcagcccgcggcctgtcctgaccgcccagcagcggcagcagcgacaccctagggctccaggaagggcttgggaaggtgtaaaggc

SEQ ID NO: 22950 - DNA, 1480 bp, Artificial sequence
  DNA replication origin
atcctcatccggggaagccccgcggccgcgtctctacagcgccccttctcgggctctggccctcccgctggttattctggacctgggggcccccagctgggacccgagtccggtgcggggagcctagtgggcctgggagctgctatttttagcgggcgcggcgggcgcgaggagcctatttatagatcaaacaatccgcgctccctgcgtcaatggaaccccgcgtgcgtcacgcgcgcagacattccaggccccccctcctcgccccgccccctcgggctccccgggccgcacctccccctggccgcctcccgccggaaccgcaccgccccccgcgcccttgtatggccaaagctcgacgggcggcctgcgtcagtggcgcccccgcccctccccgtgcgtcacggagcgcttaagaggagggtcgggctcggccggggagtcccagtggcggaggctacgaaacttgggggagtgcacagaagaacttcgggagcgcacgcgggaccagggaccaggctgagactcggggcgccagtccgggcaggggcagcgggagccggccgggtaggttcccttcggggaacgtgcatctgtttttaggagcggtgcatgaaggagatgggtgtacgcgcgggcagagaggatgttgtagggccggcatgcaagagggtaggtgtagtgtgcagctgtagcacaacgggatgagaacccaggtcagactggaaactactgggtgcggggtaggaggtaggggaggttgactacctgcaaagtggaagctgtagggggttggggttggcgccgggagtagggacttgtccagcaggcggctggccttagttcagtctcctagggtgcccaactgggcgcacggtgctctgaacttgggtgggtgtggatgggggtcacagcaccgtgggggaacaggtacacagagctttggcgctgctgggatccgtacgattctaactgggattggatttccaaaaggccctccttcctcccagcctgtcagctccctcccagtgtcccggttgttttcttaacactttagaggctgtggctgagttggcaggggttccccaccctgaactttctgtctgaggtgcgttaggaagcctccggatcattgaaggaagtgactggcttggtggctgacctgtggagggctgcttgctgtgtattgaataaaggaggcttcttggggtcggggcagggtctctgtaagcacagggagaattgatttcgctggggcttggatcacgtgtgtgtgtgtgtgtgtgtgtgtgtgtgtgtgtgtgagagagagagagagagagagagaaagagagacagaggtggaaacccttgtccttggggatcctggatagaagttgccagtgttggagtcttggggcggtgctgcctagaggatacctcccaaccattccagctccagatgctgatcatccctatgccccctcccccagtagtctct

SEQ ID NO: 22951 - DNA, 955 bp, Artificial sequence
  DNA replication origin
tccacctggggccccgctccgggccttggttgaggtcacgggtgtatccagtatccccgagccctcaaggtgtggagaagtgggtgccaaacctgggaaggccgtaggcatggaatagctctctccctcccccagctggtgggtggcctgtgaggggaacaacttcagggggctctgggccaggctggggctggggccggtgggaggactgaaggaaaagaaggctggaggctgtgggggcccagaggctttgggcagctgctctgtccatgcccgcaggccttcgtaagtctggctgggcgagaagtggccgaaggagccatcccagggagagagctggggcggctggaagctgggcgtggagggcgacggggccgagcaggggctgccatagtagtcagagccactggaggacagggcctcatccactgggccgctcagggggccggggtagcagccgtacacctggaagtcctcgaacttgaaggaggcagaggcaggggaggtggctgaggacgaggatgtggaggaggccgaggaggaggctgaggagcatggctggactgttcctggcagctggtagaggaaggtgtcaaactctcctgtgtagccgtccatgaaggtgctgaagctgggcagggcagtgggggcagcgggggctgcctcggggctggccaggtccatggtgggcttgatgaactcaggggtcagggggtcgcttgccaggtggtcacggggtcccggactcggtgctggtgtcccatattgggcttggatacagggcatctctggagagagaggagaccccagggagggaaaggagagtcagtgggacaagcctatagccttgtctcaaagtatttgggccccagagcagcaaggtggcaggaatcccagcctaaagatgagacagaggcaccgggaccagagcacccaggaatcctgacccctggcc

SEQ ID NO: 22952 - DNA, 891 bp, Artificial sequence
  DNA replication origin
gggcccccacagcctccagccttcttttccttcagtcctcccaccggccccagccccagcctggcccagagccccctgaagttgttcccctcacaggccacccaccagctgggggagggagagagctattccatgcctacggccttcccaggtttggcacccacttctccacaccttgagggctcggggatactggatacacccgtgacctcaaccaaggcccggagcggggccccaggtggaagtgaaggccgctgtgctgtgtgtggggacaacgcttcatgccagcattatggtgtccgcacatgtgagggctgcaagggcttcttcaaggtaccgcgcagccccaggtggggccttttgttggaaatggagagaggctggcctcatcccattgggacctgtggtctccccctgggttctcctcctagctaagtcctgtcctgcagggtgggatcagccctgccaggtgggccgccttcctggagacccgtagatgccagggctggaagctttcatttgccgggacactcgggcccatgggattgcacagagctggagggaggggtgagataggggcagataggagctgcaggggtgcctggcgagcctctggttttcctctgctcctctgcctgtcctctcccaactcaaggttctagtgggaaggggtgcccccaggctctcatgttcctggcgtgagatgaaaggatccctgcggagggtttggttcttgagggctgggggtggacttgggaacaggctgtgtgtttgtcccagcgatggtgcctgcttagcttcccgtccccaccccccagccccttggccctctcctgtctgccctagggagaaggcaggtggacaagggcccatgaaaaaatacaggtgtct

SEQ ID NO: 22953 - DNA, 1451 bp, Artificial sequence
  DNA replication origin
ccgcttcgggtaaggggtcgggaccgcagcagccgtcgggcatgctccggaccgctcggagtcaggggctgcctggaggccgcgaccaccgagcgcagccgggcgcctaggagtcgtcgtcgccgtcctctccgctggcactgcccggctcgggctcgcgggacgcgcgctgctcgcgggtcagcagcgctgtcaggccctgggcgcggaggaggaggccgccgcccaggaacaggaccccgcaaagcaccagcagggacagcacgccgagcaccaccgcctgcaccgcgcgcggcccctcggggggctccggcggcgacgccgactggttacagcaggagctcagccaggcggcctgagccgcggcgcccgcctgagagccgttcatgctccagcgccggctgcccagatgtggcgggatcgccagatgtgcaggagcccagactggcgggcgggccggcggctgcgtcggggagggaaccaaggggcggaccccaggcgccctacgcccctaccccttgcgcagagcgctcgggcacttcctagacaaagagctccagccgttgtggctacggccctttctccataggcccggactccgggcctgctgtatttcttctcatccccaaggcccacaggcacccccatgcaagtccagtcagccaaaaccaggagccctgtccccaagagtccctccccttcgcaaagtgggccaagaggtacacctgggcagagccctgagaagatcctcagaccccatcccagctgcaggctggggtgctgcccctctgagcaggacacaagacaaaggtgattgtccccattcttgggctttttatccctagaccaaagttctatgctgctaggtggcccaggtggctgctgagccaggaggcacacgggcagccataagggtgagtgagtcccacccttcctcgtccatcatccccttcagaagcctcctagggctggacaagcaggccaatgcctcctccacactccacagcagggagacattcaggtacagcagagcagagcagagcatggggaatttaaggcccacccccactccttttctcaggccccataggccaaggagagtcacatttacagaccaatgggagagcacagatttgatccaccaggactgcagtcctgaccctggataaattagtcccccacttcagaaaatcgcaatgccataagggaagggaatgttactgtcccatctactagggtagcccattgccagctaggtgtcccacagccaagccagggtgggagagtggagcagagtccagctgcagaaaagcagaaagactggaaaagtggacagagaagcaagaccctcctgccaggtctaccaaaaaattctgtagcaagccttgagtcctcttctaaaaaataaagtcactgccagtcaaccacctgtaccagtcccctcagaaggg

SEQ ID NO: 22954 - DNA, 1820 bp, Artificial sequence
  DNA replication origin
gacgcagccgccggcccgcccgccagtctgggctcctgcacatctggcgatcccgccacatctgggcagccggcgctggagcatgaacggctctcaggcgggcgccgcggctcaggccgcctggctgagctcctgctgtaaccagtcggcgtcgccgccggagccccccgaggggccgcgcgcggtgcaggcggtggtgctcggcgtgctgtccctgctggtgctttgcggggtcctgttcctgggcggcggcctcctcctccgcgcccagggcctgacagcgctgctgacccgcgagcagcgcgcgtcccgcgagcccgagccgggcagtgccagcggagaggacggcgacgacgactcctaggcgcccggctgcgctcggtggtcgcggcctccaggcagcccctgactccgagcggtccggagcatgcccgacggctgctgcggtcccgaccccttacccgaagcggcgcgccccacacaggtgagagggagggtagcaggagtgtgggcgcgggggttcggggggctacagtagcttccttactgaggaggcttcttggggcgcggcaaggcacctgtctttggagaatgagtcgctcttcagcgactcaggttcccagctctgtaagtccacggccggtggggctgcagcccacccaggtgtgcgggatcaggaggaggccgccccgccccggattgtgtctcctgcagctctggccccctcctcccatcttaagtgttccagccttatgttctttttctacgaacagaggctgctgtgtaactgtggggtggttgtggaggcaggaggatgacagaggagagagtctggaggccacagtgtgctttgggggcttcttccctagcccccaccctcacctccatggtctgcatctgccccagcccctataggtcctaggcccaactctgcgggccccagcactgcccactccacggggctgaggagacaggcaggcggctccagcctttggcctcagcttcctgaaggcttttccctgggagggtgcttgagggagattccttgcctggcctccctcttgagacagggaggggagtgtggtcatgtttgagggcagatccaggggcctgggtggccctggggaatggggaggtgtgtggaaggcccttccctggaccctgctcaggtcgtggggagggggtggtgaagggtgggggagtagatgtagcccagagcaaggagctttgtgtggtgtgtgttggggggtgtggatggcagggttccccgcagctggggggcctcgggagcgctgctccgggaagtggggctgaggatttccagctgtgggggctctgtctgggtgtctccctctgtctctccaaggacaggagccatctggagggaagggcctggatggcctgaggacaaggtaactacaggcgaaagccacctgggacagagccacaggggctggagaggccttctctgttccttccctctgttcagctttgtacctaggagccctgggggtttctgtgggtgggagtgtttgtcaggggtgactttggcctctcttgccccccctcccccgattctggagcccctcccctgcttatctggggtagggcagggtcccagtttccatccgagaaaggagtcaggctgagtgcctgtgaggggcagcgggagggtgtgggcaggtgcagctaagcagctgcgaagctaacgacaacgtgtgatccctgcccagcagcccaggatttggcactaatcctgggcagcggcaccacactggccttgctgagccagggacttctcacctcagggccccctcagc

SEQ ID NO: 22955 - DNA, 715 bp, Artificial sequence
  DNA replication origin
tagctggatgtggcggtgcatgcctataatggggagaattgcttgaatccaggaggcagaggttgcagtgagccgcgatcgtgccactacactccagcctgggtgacaaagcaagactccatctcaaaacaacaacaacatcaaccacaaaaaaaaaaacaaacaaaaaaaaacaaacaaaaaccacaaaaaaacaagacagaacccctgcccctgaagagctcacattctagtaaacagtggtgctcacaaaactgaagttaaagtagacaatgaaaagagcccagagtgaaagagccgagagcagagaatgagagctctgctgggattagcaaagcacaactcacagaggaagtggcatcaccactgggcatttacctggcaagaagagggcaagagcatttcaggcagagatttggaggtgtgaagcagcgagcttcggaagcaggggggctggggcagggcggatgagggaggtgtgaccagggtggtgggtagggccagactgggcaggagttggagcttaccccaggagcagtgaggtgtctggaaggtttcatacgggaagtgacatgttaagatctggatcttaaagaacttgggggtaagtctgtggtggggatagcaggctggaagtagagaggaggcaaggaggctgttgtcaaaacccaacaaaaatgatagtcgcctggaccaggggtaagaagagggccag

SEQ ID NO: 22956 - DNA, 1273 bp, Artificial sequence
  DNA replication origin
ttctcgctctgtcgcccaggctggagtgcagtggcgccatctcggcctactgcaagctccgcctcccgggttcacgccattcttccgcctcagcctcccgagtagctgggactacaggcgcccgccgccgcacccggctaatttttttttttttttttttttttttttttttttttttttttttgtatttttagtagagacggggtttcaccgtggtcttgatctcctgacctcgtgatccgccctcctcggccttccaaagtgctgggattacaggcgtgagcctctgcgcccggcctgatgtaggcttcttagttgcttcctcgccctcctgggagagcttcccaaagtctctccctcccgccagggacctgcaccaggtagcccaggccctgggagcggctatactcttagggccacacgggggcgccagcctcaggcggctgcaccacgcccgcctggaacaggagaccccaacaccccagagcgcagtcaaaccgccctgcactggccagttactctggctgataagcccccttcactccttagccccaagtgagtgaggtgcttcctcgcaaatgaaaatctgcggccaaccctgagtcacttcttaagatgcgggctcccatcagctccccaaccccagccccacccctgagtgccgcctcccgagctaggcctggagagtgcagacaggaaggaagcgcagctggacctcacccagagagggggacagattatcagcagggtgggaagtgctacagggagccctcaagggcatcccgcgtgtgcgggtgatgcaggcaggtgcatgggggagggtggggtgctaccaaaccccaagtgagccctgttggaactgagcctggggtgagccggtaaacaaagtgtcgggaggcgcttcaagcttcagggccaagggccccagagcatgaaggtagagacagccaggtggaagtggctggagagggtgcacatgaggacaaacaggaggaggggcagcaggagggtgaggtggtgacaagggcggggaggtaacctggaccaaggagactggactctagcaggagggaaatgacccccagggcgggcttaggcaaagtaaacatgatcacagggcaacatgctcccacaggactttctgcagtaaggaagtgtggctattgagcccttgaaataatgaggctagtaagacgcaggaactaatttttaaacattatttcctttcaattaattttttttttttttgagacggagtcttgctttgtcaccc

SEQ ID NO: 22957 - DNA, 840 bp, Artificial sequence
  DNA replication origin
gtctccccagccagccagtcccagaaacctgagagtcgcatgagatcctttcttcatctccagcccctggcccctccatcactgagcccgaggcaacatctacactttggccacgctgcctgcctctggccactgtgtttttgctagcgtggtgccaggcctgacctcctctcttctcttcccctgggtcatgccctctaatttgggcctgggtgctcagtaagttctagaagcagtgggtggccagggggtctggggcacggaggactctttttttctggtctgggtcctgggttgggtccttgtcccctatgtgtcccacacctgtcagctgggggcgctcctgccccacagaaccccagcatcctggctccaagtgggggtggggagcctctggagcctctcccggcagctgggcctgcttggcctgcccggcaggtctgggtgtgggtggagaaggccaggagaggggttggggaggagcacgtctgtgtgtgggtacaggcctcggggtgtgggggtacaggagctgggtgggtgtgtacatgcagcttagctgtgtgtgtgtgtgtgtgtgtgtgtgtgtgtgtgtgtgtgtgtgtggtgtgggcagagttcatggtgtgggttctgtggagcctggggacctcacggtaggattccttggacataggtgaaaggctgggcctggcctcgtttgccctccagctccttccccagggctccccacctcatcacccactggaggcagatcttcagcaggctcctttggagggcgagctttgaggtgtaatccccactcttcaccttggttcatccctaaaacggttgtagcctcag

SEQ ID NO: 22958 - DNA, 780 bp, Artificial sequence
  DNA replication origin
gcccactacggtgggggcgtggggcccctgctccatgggctgggcttctgacaggacagtggcaggccaaggaaaggacctaccaagcccaccttggcttgaaggctgagggggtgagagagggctgggcgggcctggtgagtctggggcacctgggcctgcctgcgagggtccctgaagcattgtgacagtgactgcagcaggaggacttcaggctgaggctgagggaagagtcccagcagcttcctgggaagcagaggagggtgctgagctcagcttgtgtgtccctgagtggcaggcctgggctttctgggaatgcagcctgggcctgagggcaggcgagggaggccagccaggggtcctgcaccaccgcccccacccactgccggccccagtctggctaggagagtggggggtctccatttcagcctgctgggcctttagagtagggcagggactggggtgctctgggggcggggcaggatcgaggggtgtggggtgagggggaagatgagtcccctgggcgtattggaacccatgccaggggcctgggtttgactccctcccctaaggtgcgcattcccagggcctgggggagaggagtgggcttggggctgtgtgcagtggggccctgagctgggaaggcacggaagtgcctgctctgacccatcccccacctccgcagggcaggcaggctgaggcctgagtctgaatgaccccctacaagtcttgccataaagccactggtgctgggagggcgtctgctgttcttagtgggga

SEQ ID NO: 22959 - DNA, 1122 bp, Artificial sequence
  DNA replication origin
gccaggggtcctgcaccaccgcccccacccactgccggccccagtctggctaggagagtggggggtctccatttcagcctgctgggcctttagagtagggcagggactggggtgctctgggggcggggcaggatcgaggggtgtggggtgagggggaagatgagtcccctgggcgtattggaacccatgccaggggcctgggtttgactccctcccctaaggtgcgcattcccagggcctgggggagaggagtgggcttggggctgtgtgcagtggggccctgagctgggaaggcacggaagtgcctgctctgacccatcccccacctccgcagggcaggcaggctgaggcctgagtctgaatgaccccctacaagtcttgccataaagccactggtgctgggagggcgtctgctgttcttagtggggaacacgtcatgtccccagcccctgtccctctgtgtcagctcccagcctgggcgtgcacagtcgggtgcagcagaggctcctgatggctggacagggggccagtgtgggcgcagtgtgggcagtctgagcacaagtggggtttgtgggcagtgtggatgctggggggcttagcggagggttactggagacgatagaggtgtgcggtgctcctgggctatagaatagggaggaggattagaaagggcctgggaaggcaaggcttggagggctggttaggttttggagcagtggttgggctgacaatggaattttgggcacacagatgatctgagaggggtgagggtcagagctggggtttaggatgggattggtttagggctgggttgtgaggatggagtagggcttgagcacagagaagcaagtagagtttggggcacagttcaaatttggggttagggttgggattagtaccatgtcagatgaagggatggattcagggctgagggtgagggccatttgcagttagcaccgggcacagctcggggttgggtgaggctgggtcagggcgagggcttctggggtaggatcaggtgcgtggggcctgctgagagtgtccgaggatctgctcgttctgccctgtggtgtccctgatgggctttttctccctttttgcagggttgctctcagctatggc

SEQ ID NO: 22960 - DNA, 1576 bp, Artificial sequence
  DNA replication origin
gtatttaagagcttgaacagtttccacaatggggaactcactacctcattatggcaccaaacattgtgggaagctctaattctttgaaaggtctttctggcacggaactgacacctacctcccatcaacctccattctggggaaggacacacagggtctccaccctcttcccaggccagcagcccttcaaacacatgctgagaaccatggtcagctgactcttcctgactttccaaatggaaattgcagagtagaccctgtaggtccaacccgctagggcctttgctttggttcacaatgctttacctgggggcatctgaacaccacatgtaaacttagactatctttttctcctgggctgtaggctgatactaggccctggagggggttagagagaagaggggactgcagggtctcttcagatcaccaccccctctgggtcactgatgtgccttctttgggcctggaccaggattcatgagaaggttctagaagccaggagggccagggcatgggaggcagagggtgtggcttctcccagggcctgggatcagagaaggcctgagagcagagttacagtctgtgaacaactgttagtgagcactcactggatacaaagccccatgaccctgagagaggagagcacattttaaagtgagttagcccaggcccgccctgaaccccagatgcgcgggtctgatgttggccttagaaatgggctcttccaactaattcagggactgagggcccagagagggacatatgctgccttgggccacacagcagtatgtggtggctgggactcgaggtggtgttccttccccagcatctactccccaaggaactgcctgagctccctggcaactcagtagcggggaaggggaggctctggcccagggagcaacagaccgtgcccaaggttctgaagcacagctgccgctggcaaggaggcccagaaagatctgcagaagcccattcccaggaacatggagttaccgacaggcaccaaggggtgtgtgtgtgtgtgcgtgtgcatatacgtgtacatgtgtgggtggcaggggctgtgcagggtatgttgtgggcaggttgatgaaatgtgataaagcaggaagaacagtgttgcccatagtaagtactatgctgttattttgaggggtcttagcctaggtaaggcaaggactggatgggttgcaggtgggggactctggctgagttgtgggcaggaggagtgggcgtcaggggtagcaggacacatgggcttggaggggtgctggagatgctgagtcagaaagagaaggaggctccagctctgcccacctcctgggcaaggggagcccagaaactggaggccgcttctccagcctggctgccagctgtgcagagggcgtggctggtgtggtctgtcgcgtggggtggctcagagccttggcaggtcagagagggtggagggcgaggcctctgcaaggctctggctgtgtctagttccaagactccccgccgcaccttgggcactggcaggaagtgtttgatgagtgactgatgggggtggcgggacgtgagtggctccctaggg

SEQ ID NO: 22961 - DNA, 1634 bp, Artificial sequence
  DNA replication origin
cttgggcactggcaggaagtgtttgatgagtgactgatgggggtggcgggacgtgagtggctccctagggttggcggctgggtggacgccgcgccgccttcacccgtggcctgctcggggcctgcagcagcccgtggcagccggcagggggcggtgcccgaccggctttgggagactcccctcccctaccccaggcggggcgtcccaaaggcggcggggctcagttgtggcggcgcctccagtgtcctgtccggtcccgtcccgttccgtcctgtcccgtccgggcggccccgagcggccttcctgcccggacacgttggcctgcgggcgggcggacaccaggtgtcggcgctgcgggaacagaggcttctgagccccgcccagggacctggcgccccaccctgcccaccccacgccgggcgcctgagggtgggcgcggcgcgggcgtgtggtccgggagggaaccgccgcgggagacaggccccaagtgcctgggtttggggttcagggaccctccgcgggcaggaacccagggcagcgtgagacacacctgccctgtaggtgggtgactggggggccagacccctagtcccagcttcattggcgtcctgcctgtcctggcctgtgctggagtcctggctgggcctcagtttcctcatctgttgagagagtgatacctgcagtcccagttacttggggggctcagacacgaggatcctttgagcccaggagtttcactccagcttgtgcatactgagaccccgtctccgaaaaaacgcaaaatcccaataaaacaaaacaaaaaagagagtgatgatcctacttcgaagcactgtggtgttgatcagtaggtaaggcttatgacgtcaggcacctcccttatcagactggcagccccccagggcaaggctcctcaggaacgggcctcttggggccccagcttcatcccatggctgcccatggctcccaggctaggtgagtgggtggaaggtgggagactgagaaggaaacacaaactttggcctgttctggtactgcctggcctggcctcccctgcctggtgtctctgaggggaagccggggccatgggcagcctggaaggggctggagagtggctcacccctcagcctctgctgaccctgcccttgacccgcagggccaggacagagaggggagtgggaggcacattcctggcatttggagggagagactgaggccatgaagggcaggctctggcagcataggagggtggtggggggaggggagtgcaaacttcatttctgtctgacagatgggtaaactgaggctcaagttcctccagcaagttagcggcagaagcaggacgagaaccagggcccttgactcccagcatagtgctctcttcccctttccctatctccacattttttgggttggtttgaaacggcaaagagagggtgtgtgtctcagaatatgttcagggtccccttcccaagcccaggtctggctgtggccataccagtgacactctcctggccatggtctgggcttcgaagttccagaagagaccttgtctgggcaatgtaaatcccactaaccctaaggctcagccctgggggaaggtccccctcagcctgctccttgacagagggcat

SEQ ID NO: 22962 - DNA, 1671 bp, Artificial sequence
  DNA replication origin
tgggagccgtaccccagagatggctcagtgacctggtactctgggaatttgccctgcctcctgggtggggattgtccagccacacacctgtccagctcagttggtgccactggaaaatgacatggaaatgtggtgtggccttgagccaggtccccctctccagggttttggcccagttttggcctgtggcccatccaagtatcttctctgtgagatgctggggagagaaaagaggggagtgtggcttctgccaaggtggggctgagggagattctgggaagtggagtggggagtgctaccaaggccagccatccccctccttaggagccagaggccagtcaggagtgtgtgtaccctgtggtcagcctgcttccagactcggctgcatccggggcggaagcccggacctgaggccgtggagagaaacctcagattcacagagctcctgggctggaggggacttgagtctccccagtttccttacagagagggaggtgggggccgggggttgggaagggaggatagagcatgtatatgtgtgtgtgtgtgtgtgtgtagggtggatggacccaggtcatgaggtttctgatttttgaggaattccctgagggtgggggaggctggtgtctctcagaccaaggtctgaggtgggagcagcaggggcacctggactctagtgctggggtggtggctgcagagggagagacaggcagagcccaggtggctccctgcaggaagggtaggtgaggaagtagggccaggaagctggaaggggtaggacctaggtgaggagatccttggtggggacaaggaggcacgtgtgtctggctgcgctggagctgaaggcctgagagcatacagtgagatggggagcagataatgcaccctgagggcagaactctgggccatgtggagtcctcttcctgtaatcagaaggcaaagggagcccctggtggtccagtaggaccagatggccccttcacctggggctgctagccaggcctgcccatgctgtgttccagaagctgcagcctgtccagccaggctcaggggagggtctttggatccccaatggtggattttggggtgggtggaggggataatttggggagagacatatccaggaattagctggggaaggagaggttgagggtcaagatacaggagaccttgcggttggggttgactcctggtctgtctgatctctacggacatgctgaaacagagagagagctgaaacagagagagagaggcatctctttggggattatagtccctttacagctggcatttaggtgcatgcctgcagcagcctcaggagtgacagcatttggccacctatctcctgcacagcaaacttcctgtgctttaaaacaagggtgtcctgttcagggtcagcagaaagagatgcaggggagggactggcccctggcgaggaagagagcctcccctcccctcacccattgtcttttggggtgagggggcagcacggggaggctactggggagcatggaagggcctggaaggagggacagagatggtgagtcactagctaaaggccacacgtggaggctggaggaagctcgtgtctgagccccatggggacagctctgttgccggctctccacagcctttccgtcttgtcttgggcttcttgcccaggccctgctg

SEQ ID NO: 22963 - DNA, 821 bp, Artificial sequence
  DNA replication origin
gggcaggaatcttatctgcagcctctcaggttggcagcgctttgggaagccctccagaggatgtttgcgtgtgccacctggcacagagtgggctcttagtgctggcctgtgaatggagaggcaggaggagactggccagggctggaacggcctggaatgcttcagagaggggaggagaggccaaggggtgaatgtcaggcaggccctggaatgcagaaatgttgctcaaagtggcccccacccacaaccccagatgtgagcctgaaaagcccagagaccttttctccttcccattgtcctccccagtcctctctaggtatggaatctggagatttcatcttgggtgaaaaatccatggcccagggaggggcagtgacatgtccagggcctcaaggcaacagcagtgccctgacaaagatttcccagccaggctttaggggagaagtggatgcaggaactcctggtctaggtgggcacagcctccagagcgcagatcctgtagggggctggagatggggacggatgagagggccagaggcagaacttgttagtggaggtatgggagagcaggcgttggtgtgagaggcagtggtaaaaacagagttgaagatgagccctgaggggtgaggaagttggagtgtgtgtgtgtgtaaattaaacaattggtcttttttgcctgcttgggcgttggggaaggagggcagtgagattcctatgaatgcaaatatcacaggaccaggtaatccgtatgctcttcaagctacaaccaggcacaattccaggtcgaatctctctcggtcttatgcacacatacatgctcc

SEQ ID NO: 22964 - DNA, 1515 bp, Artificial sequence
  DNA replication origin
ctctcctcctggcgcacccgctggagggaggggtcggcgtccagccgcagcggggccagcaggctctggttaatggtgacctcgcggatgccggcgcccaccgggcccccataggcagagcgcacggccacgcgcggccgtgaggcgccgaggccgtagaggctgctgctgccaaggccgccggggcgagcggagctcaggcgcacctgggcgccgcggcccgagaaggcggctgagcgcgaggtgaataccggggagctgaagtggatggacatggtggctgggccgggatggacctagcggcgggcgaggaggagcgcgcactcgctgacctcggggacactccgcgccttttatccgcgggagcgggcggctgggcttccacaggtaggggcggggctgccgcgggccacctttctctgctgccaggcccctcctggggccgccctccgccctctgcccgcccgccccgccgaagcccaggctttcagtccaagcagggatggtccggagtaggcaggagcgccatccctagacggccgcagagaacagcgggggaccgcagttccagcccattggaaacggactcagtgagggaaggcttcccggaggaggatgcttggagagggagtgaagaacctagagatccctgaggcccaagcagagagacccagtggcaagagactgggggaaggggtgggctgaaaagttccaacccaggagtcaacgcccagacgtccccatcctccaggctgctgaagccagaaaggcattccttaccgctctccctcacaccgatccagctcctccttgagagatcagctcacttgttcaggggtctgacccctcctggcccagctagtttccctggctgcgttccttcctacttcatttcccatagaaactaggctgagagagacacacgaccgaccgcacctctggctcctcccctccccactccagtaggcatcggaatcccagggaccttgggaatgcttaccctggaccctcacctcccggaccctccactcatattcctgcccatttattttatgcgtccctgtacaggaaggggacacttgtgtgtatttgtgacactttgtggatgtgtggacactttgtggatgtgtgcacacgcctgcaggcctctgggctctgctgtgctcacacccccaggcatatgcacccgcatgtctgagcctgcttacacagatgggggtctgtgcgtgcatcctgggcgagggggcagctgtggctacacaatggcacacattttcatgcctgcctgagtgcgtgtgcttctgttagcactcaactctcctcccgctccctccaccattttcctgtttaaaggccctcagctttcatcatctttctcccgtgaagccaccaccaaacaattcccagcagtttcaaacccagtcaagaggggtaatcctagtgctggaaccgaataccggacaaagcctgagtgttggcctcacttcccggtagggccagccatgcttgccacac

SEQ ID NO: 22965 - DNA, 1317 bp, Artificial sequence
  DNA replication origin
gccctcccttccagcaagctgcccagctgcccctccctttcctcccggagtgcgggcctgagtcctgtagggctgccctcgctggctgcctgttggtcacctggaccagttttgcctcggactaggagttccagaggcctaggccaggagttctctctctgggaccctttccctgagagaggaccgtgtggagtcaggaatggagttggatggcacgcccttcccagagggggagacccaggctctctcagatgctgatgcggatgcagatgctggagattagagcggcagtcggtggggcgggggaggggggggggctcccgcccctcccctcccccacctgcctggtcctccagcctcccttaggtggcaggaggagaggttatacctgcccttgaagacagcccagttgggggcagggagtggcagagagggccctcaaaaaggggtccattttggagatatttttcctggctgttggcctccgccacacatggggccgctggagggggcgagggcagacttgactggtgggtttgggaggagtgctgccaaagccaggaactcagggctggccctgctgggctgttctggccagggcccccttcctcagcttagacgaagtgtactcccacacccgcctccctcacgttctcctttccttcgccattcacccagaccggtcttttagatttcataggggcctccccaagctgctccaggcccaggttcccccatgtgttgagctgcaccgtcttactctctgtggtccccagggcctggggccctgagctgctggttttgcagaggcctctattgcctcccacctccagtcataccggctactccttaagggcctttgtgggctccaggctggggtcattttaccatggattgactgtcctgaggccttgctggagaaaggggaaggagagaaaggatattgaggaaggaagagaagaggtcccagacagaagggagggctgggcctggtcatcctcatgatccattgacaggaagaggtggctgttcagatagggaggtggagaacaccacctgtaatgtgatggggagtgaagtggagaggaggccctggagcacattcgtcgagagtcaaccacggggcacttccgtgcaccaggcagacctgcttcctggatcactctgtaggacacttgatttggagtccaaagggagagggctggaagccccaggcagggaaacagccagggggagcatggctctgctaagtggctaaagatgatgttcctcaatcccgctgtgggtggcacgctctggctcctcttgagtttcctc

SEQ ID NO: 22966 - DNA, 1756 bp, Artificial sequence
  DNA replication origin
ggggcaggagggtggggtgcagtgaagggatggggtccctggtagggagcctcacgctgaagagagccctcctcttttctctcccagctgtgatgaattccactggtggcagtagcagtggcggtggcattgggctgaccctcgggggaaccatgggcagcaatgccctgagcttctccagcagtgcgggtcctgggctcctgaaggcttattccatccggaccgcatccgccagtcgcaggagtgcccgcgactgagccgcctcccaccactccactcctccagccaccacccacaatcacaagaagattcccacccctgcctcccatgcctggtcccaagacagtgagacagtctggaaagtgatgtcagaatagcttccaataaagcagcctcattctgaggcctgagtgatccacgtgcctggtatcctggcttcatgaggctgggcaggggaaaagacgggactagagaaggcagggtctccctggtgactaggaagccttttgtgcaggagactgagaaggcacatggtgggatggggtgctgctctaaggagcaggacgcttacctagggtgagccttggcctccaggtctggggctgatcccaaagattctcctgaggaagcccagaagagccacggggaaatgcaggctctgccagcaattgggccttggagggctgccctgctaagggggtggaaaggctgtttgcctccctccccccatgcccagagctgccagagcacattccttttgtgaggaggccacagacgttcagctgccccagcttccagtttcgggtggcccagccaactttcatgccagccgtcctcagcccttcctggtgctgggtctgccaggctcatggtcagccaggcctggggccctggagaggtcctctgcatcttgaattctgtggaggtagtggttgtgggggggaggtgtgtgtgtgcatgggaggagggtcctagagtctagatccccggtaacaggtctgtgcctaggaccttagtggagggatgggtttgtatctggatccatgggagtggggaaggacatctgtgttaagtcagtgcttgatgggggcttctatgtcagagtccccgacacacaggtctgtgtgtctgtgagtgtggcaggtgttctgtggcagggcctatgcatggggaaatgtgtccctgatgggcagcagcacatatgatgggtactgtggagccacagggaggtctctgtgtctgggaccccaggggtgatggtggtggtgtggatgggggagctatgtgggatgtgttggcttctgggaggaagtctgtatatttgaccctatggtcagggaactttcaaatgctgaggtgggggctggggtggagagtggaaaaagtggaccagcagccacagtgatggggttcccacccaaggtgtcaggagatccaggccctctccctcccgactaagaagaccaagtgggcaagaggaaggagagactctcagggcacaatgcatatgatcaggagctttactggaaatgctgagacaagcacaggggagagggagggagccaggcagccaggcaggagaggtggcctgtcctgcacgtgtattagaagacattggattagaaggcacagcaagtccacaccaaggggctccaggcccatctgtccctcagaagccacaggcatccaggcctccggaccggggtctttacctagggctgcgaggacagtcctttagattcgggggttgggagag

SEQ ID NO: 22967 - DNA, 932 bp, Artificial sequence
  DNA replication origin
tttaaaagcaaaggaagccgagggtgatttgcatgcttctctttaatgctggctgctgagtgcacactcctggtttcctctgccaataattggacacataattaacttcctttataatggattatggccttctagagttggtggccatgaccaagcctcagttgaggggaaggccttggatcaggccgatttctccaagggcccaaagcccagcagcagtctgtgctcctgccgccaacaagaactcaaccctcactcagcccccaaagattcagaccctgggtgagaccattgtggaggagggcttggaggaggggtggcctttcagattccaactctgcccctctatggatccttctatgcatgaccttaaacaagtcactggaccaccctgagctcaccttcccaatcaggtaaatgggcacaataataccaaactcagaaggacgccctgggagctagaggaaataatatggtataaaaaggcctcagcacagtactaggcacattgcgggcactccatgaataaaactcccttcccctcgcccaagcagagtggagaggggtacaggaaggagggacgcttacgagaagaggaggtatgagctgagtcctgagatagaagagaagagaaagtttttgcccaaagggacacaggatgaatgataaattaacaatagaataaatagaacaaataatgaataaataaacatttacacagttcttattaagtgataggtagggccctaaatgctttctggtcattatctcattagatcctggcaacggctctcagtgcttactattattatcgctattttgcctgtgagaaaactgaggctcagaaaggttattcagctgcccaaggtcatgacatgaacctgcgggactgacttcagaggccccacactctcgacacacgcacacactcg

SEQ ID NO: 22968 - DNA, 1987 bp, Artificial sequence
  DNA replication origin
tggagggctacaagaagaagtgagtgcgggcaagagggatgctgggcacaggaatggggtttaggttaaatacactggattagacaataagaactcccaggtagggtgagtggccatgaccactagattgaccgagggtggcggggtcttttcctttgtggaatctttgcccagacacctgtgtaagaggagggctgtgactcccatgacctgtctctgtcccacttcagccttctctccctgaaccacatcacccagcagctctcccctgcgctgggtggggaggaagcctctgcagggtccaggccttctctcctgaccctcagcccctatacttgtagcacctgtcagatgtgagcccagggtctctcatgagtgacaggtcttgggctctgggtgtcccactgccttaggttctaagtcctgagggtctgcgggtccaggaggccccatacctgagctgggattgataccagtgaggggaggctagggctacaggccctgagagtccacgctgtccactcccaggatggggctgggggctgagtcctatttgcctcctgggggacctcagagcccctttgggaacaggactgggaggtcccagatgagcactctccatccccagttcaaagtggatagagaatcccagacacatcccacatccaactagaaagcactaagctaggctgccaggccggggctgtgtggaggtgtttctagtactgtccccatggctgtgatgaagtgtgatgtgatggtggctctgcagagacctgccctgccctgacctcccctctcttccctctgctctgtctcaggtatgaggaggaggtttctctgagagcaacagctgagaacgagtttgtggctctgaagaaggcaagtgacacaggattgagaagcacagatctgtgggatctcagaatgacagattcttcctggggacacacagggggtctcaacctcagcgtggggcacaatgacctttccacagcaggctaggactgcccagatgcaggcctttgtattgagcatccagggccttgacaaagggcaatgacttgggaatatctaccagcacctaccttgggcaaggggatggctgcactgtcctctgtgtgtcctgctctgttccagaggttgtggtctattgctgaggcccctggagccatagcagatacaatgtctctgctgagagacagtgcagtctgtctagcattttggggagtctgaccttgaggcagagacacaatcccagggtctaaggggggatggagaagaaccaggagcagccactgggctcttggagcacttgtgggggacaggaaagggtcagggtgtgagagctggggggtcagtctgggcaggcttcctggagcaggagatgagagaagggagagacaggagggcaaggaggggtgaaaggctggtgaggcatggtcaaggcaaacagggtttgtcatcagagggacagaggatgccagctcatcccaggaagggcagaaggggaggaaaggcatgggaatgggacaccagggactgctttcccctggctacatggaatggatgggcagagagaggagtctgggggctggatcaccagggtccttgagctccaacactccccacctttccaggatgtggactgcgcctacctccgcaagtcagacctggaggccaacgtggaggccctgatccaggagatcgacttcctgaggcggctgtatgaggaggtgcgggctcaggggccagacagaaacctggcagccagcagagaggagagttgggggtgggagtgttggacaggatgtgggtagaggttgcagtccctgaggctgtgtgagggggcagggttggggaccagagaaagcctgaggaggtggagtcaggacatggtgggtggggctgtattctcaactaaagtcactgccctcacctcctgcaggagatcctcattctccagtcgcacatctcagacacctcc

SEQ ID NO: 22969 - DNA, 1364 bp, Artificial sequence
  DNA replication origin
gggggagtggagaagacccattggtcactcagccttcctatggctggaggccagcgatacagctggagggcagctatacagctcctgctcccagaaggacaacactcccagaatgtgagctcattctttgcccttggtttctttcccctagttggtcagttggtctcactcgaagctcctttttttttgtggacagtcaggcccttggccctggggagaggagggtgaaggttggggatgcagagggagcatcttgtttatttgggaaatggggaacacaggtttgggacctagaaactaaagtgaccatatgacgagatttccaccaaactcgagttgttccattggaaagctcagaggcaggggtctgtctggctgggcctggggaatttcataagtgaagaattctgggaggaggagttttccaagtctgaatttggaagttggagaaacacatggagatggcattggaatctgagtggcccactcctccatcacacggggctcttggagtgaactcaggagctttggtatgtgttacctagggaacctgggcatggaatgatttgatggtggccatggcttctcttatctgaagctgatttaaccaatccttggccagtgtgctttcaggggaactccattttcttcccttaggggaagctattgggagggaaatgtggggtgggtagaaatgagtgtctggggtgacagccctgccttgtcattggatatgtcctccttctgggcctcagcctttccatctgccggatgagaggactgtggtgggcagtctctgagcctgttctaaaatcccatttgtttatctaacagttttgtattgagccaggcattgtttttaggtggtgcaggaaggaatagacaaaaatgtctaccctcctgatgcctataatctaatgacaccaatcagactggatttcagaagttaaatctgctcccctcaaatgcacctgcaattcagtcagaaccaacttcgaggtagtggcagctaatagctcttaagggctatgagccaggcactaagcactggacgcttcttatttgattcagtcctcgcaagagatctacgaagtaggttttcctgatgaggaagcctaggctgaggttggcccaagctggggttgcacagctcagaagcagtggagagcgaggcactcacaggccttctgtctccagaccctcacggtgacccgagtctacactggctcctggccgagagcatttcttgccccttcccttgggcaagtgcccagatggagggccacagatgtccccctccacttcagtcacgggggcccggcgccttttccgcggcactgacctctcgccttctctccctgcag

SEQ ID NO: 22970 - DNA, 1075 bp, Artificial sequence
  DNA replication origin
agaggctccaacaatcttgtctagccccttgagctggttgggtggaaggaagatgcatcactgccagaggcatggagtctctgggttcccccaggtggcacgtccatgacctcccgaggctggcagtccttacagtatcctccttaacccctgagaagggagtgttaaaccccagaggagaaatcggagccccttcccaagacgggcagaactgaaaaggcccctgcagagcctctggtccaacccctcacttgacaggtgttcaggacatcttgagccagagtaggggagaaaggtggggggcaatggggaatagggagcagtgagaggcactgagctatcagtcagagctagacatacaggggatgtacattgtgtacattgtgtttaagtctggactttgtcccggggacagtggtgacccactgaaagctcagccttgtgtatgatgaaggtctctggctgctgtgaggtggggcatggaagggagaagagcaggactccaggcaaaatggtgatggctgggtgtgctggcagcagtaaggagagaggaaagagggggatggagagctatttaggaggcagaaaaagaagtccttgggtttagtgaatattgagggcgcaggcatggataaatcataggttctggtttgggcaactgtgttgatgatcttggcaggagagactggaggagactccggttgagagggtgggaagcaatgagttaagctggaaggtatgctgagttcgaagcatctctaaaactgacaagtggaggtgtcttgtaggaactggagctgttgggtctaagccgaggagtgagggtaggaggagaatcatcagggctctgaagcccaggtgggggattttaaccagggaggacattaactttgggtggtagctgaaggcgagaggctgatatgactgcctggggagagtgcagagaggtgggaaaaggccctggggtagttggatgcttgaggcaaggtgcagggtgaggtatgagccagtgagcagaactgcctgggaagagctgagagcctggcctgggagacaaggaggtgaaaggcccgag

SEQ ID NO: 22971 - DNA, 939 bp, Artificial sequence
  DNA replication origin
gaaaaggccctggggtagttggatgcttgaggcaaggtgcagggtgaggtatgagccagtgagcagaactgcctgggaagagctgagagcctggcctgggagacaaggaggtgaaaggcccgagactcaggaattgggaggtgggagggagagaaggcactggggagcccctggacttgggtggaggctaaagggtcctggggagcctggagattccaggggaagcaaaggaagggggtgagtcctccaaggacatcctggtgagatgggtgggaaaggccaggggctgggtgaaggggaggaatgaagagggccagcaaggaaggcagtgcgctaccctggaggtgggctgcagccttgcaaggactgttccaggcctgattcctcgagggtggggttagggacttctcaaagtcttccagagctctccagagctttccaagaggaggacaggagagattgggccaagcagcgggcagaggagcctcttagccttggggttgaagctgtgaggtatctcggatgagggcagtgagtggggcagttgagggagtgagtagaaggtgtcctcatgtcagctgtggagaaggctgccaggtactcaggaggtgtatgcatgggggaagggtgggccaggggcaggtgccaaggctctcatctttccctgtttggtgggcagcatgaggaggatgtggcaatggggtggggtccagactgacacagggcagcccccaagggtggctgctggcacttttggtggttgttgctgtggtacctacgtggaaggatggctggggggcagagtgaagatatgctaggaagagaaagtggggaccgtgtatgcaagaagggggcaaaactcaaacacacacacaagcacgcatacacgtgcacacatataaacatgcgcatgcacatgcactgccttccggctgactt

SEQ ID NO: 22972 - DNA, 881 bp, Artificial sequence
  DNA replication origin
aggttaggaggtgtctgaacagtggagtagatggcagaggatggaaccaagggcctgtgctccctggctgatggcaggcccttttatgtgccaggggcagctggtgttaaaagagggagcaaagagacaatagctgaattttattggcttggcatcaccctggcctcttaagctagaaccctgcttgcctcttcagtgtggctgcatcaacaatccctggccacgggccctgtttcatcttcaaagccctttataagcttcctccttgctcctgcccctcccactggcactgctgtggagcggggagaggggttcctgaaagcattagttgcattctgcggtccaagcgaggggaatgggtgcagtgacctggggtaaagcctgctctctgaaccctgttctgaaaggggcagagctaggctatgggccctggacccatggccaagccctggggtggagtggctggcctgtcccaaggagggggctgcctctgagacaacctcttgctgtaggctttcctgtctttttctcaaaggcgggttcctttcctcattgtcaagattggccgctcctatcctattcctgctcagagcctggtcaaggatgggagtgggggtagagatttggggtgggaggagggcatgttctttgcactttgggtattcctagtgcagggacaccatctgggacatggaagaaactgattcagagagttcaggacagtgccagggctatgcttcagagttccaggtgtcattgctgatgggatcaggagcggggagtgtggaatacctcagagctccagggactcatggaggagagtggggacctgggcttgaggaggattggggtggggtagtacaggattgagagatgaccag

SEQ ID NO: 22973 - DNA, 1171 bp, Artificial sequence
  DNA replication origin
catgtcacggggcagccctgagcagccaataacccccaaacaccctgcccactaccccaaaacggcgggcaggtggcgcccagctcgccctcccgtccctcccggcgcccagcccctaggcccctcaccactggggttagaggctaagggcgggacgcggggcgtctcgggcaggggtgaaggagggcagccggggcccaggcgtggagggcgggcgcgtttgagagaggcgcaggcggcgggatcccggcggacggcagaagactcaggaaccagtccagaggcgccgaggcgcgaaccttgcgtgagccaaggacccaaggcccctgtggatctgatcccgcgggctccagcagggcccgcgccgtgcatctggagatgggcccaggatacccggtggctggacgtgacggtgggcaggcaggcagggcagggcacggggcgacccgtgagcaaagcgagggtgggggtaggaggggtgtggcccctgactctcgtgggtggggagatgggggacaacggtggcctcaacgggagacggggccaaagtggggacctgcagggaggacctgcaggccccttgttacactgtaaactgtccccacccaggtggcctgcggaccaccgaggctgaggaagtcctgctggcctggacggtgactcgccttcccatcccgagtctctcgcatccagagggccagcactgcacgggcgacataacagagaagagcctttgaatggttctcctcggccacgcagttcttctgatgtcttcagactctgtttcagtgaccacaatggccaggcagtgacttgacctgggcggacagaggtctatcttagtagggtggtgcttcccttgtctctgtctcccggaccaaagggtcttgcaggggcctgcccatcacagtccggatcccaccaagtttgagcagcagtaaagccaggttaaaagggtcaccagagtgactctgaggaggaaacggtgtctcagggggcattggctgccctggggcatgggactgtggactggggaagggtctgtgtttccttttgatggtggtggagggtggctatttgtctatgaatgccttgggtattttcttcatttttaatgcgtaagcttatcatgctgtccccgcctcaccccactccctggctgctcccctgc

SEQ ID NO: 22974 - DNA, 1194 bp, Artificial sequence
  DNA replication origin
tcaaacagagcagcagcctaagcactcagaagcagccagcagcctccagtggggctacagccctttgggcctaaagtgaggatgcacaaggccctatcttctcctctcagagaaagaggctgcaggatggggcagcagggggctggcagacacctgcttgatgacggtgacagctaatggggagatggagctgagggcaagaggactggatgtctctacctcctgctgcaccagctgcctgcattcatccagcacatcccaggcctggcatatcttggagccccatcctgggactcagtgggaggtcagagccaggaggagatacttcctgtccttatggaatttccagcttgatccagacacacccgttgacatccctggcccagatccgcagagacaaaaccagagattctcagggttccagacactatatgatgggggcgggggagggctggggggtgtaggggtgagggtggtagctttggggagcagaggagggccctgagcaaaggcaaatgggaggagggatgtgggatggcctatgtgtccacaaggggtatgtaggagagagtgtctctgggctgcctcagagggtagacttgtctccttggggtggagtccatgactgggaggatgagcaccgcatggaggggttggacagggctgaggagtagctggggaaggaggtgacagaggaagcctgcatttggcataagaagcacacacatgtgccaggaagtgacttgagccaggcaggagagggtgagagcagtgagtttgggatggagttttggctgctgggagtacgcagggtgggtcagggagaaagaggtcattagtggggagctgggctgtagtccaggcctgaggggactgagggcgactgagtggaatcagactgtggaagtggacaggaagcagcagagtttctggggggtgactggggaaacactgcatggggctggactgggattggtcatctggagatgaggcaagaagggagtggagaagttgctcacaagaccacacgctcttgcattgcagcggcatttattgaaacacagatcgagacaacccagaaggcaatgcacccatagacagtcacaagaaggagacccaggaagtggcttaactctctgtcccgccagctctgcattggacagtccccacctgcacccagcaagggggcatctg

SEQ ID NO: 22975 - DNA, 1905 bp, Artificial sequence
  DNA replication origin
cggggtggcggccgggcagaggctgcaatctcgacactttgggaggccaaggcaggcggctgggaggtggaggttgtagcgagccgagatcacgccactgcactccagcctgggcaccattgagcactgagtgaacgcgactctgcctgccatcccggcacctcgggaggccaaggctggtggatcactcgcggttaggagctggagaccagcccggccaacacagcgaaaccccgtctccaccaaaaaaatacgaaaaccagtcaggcgtggcggcgcgtgcctgcaatcgcaggcactcggcaggctgaggcaggagaatcaggcagggaggttgcagtgagccgagatggcagcagtacagtccagctttggctcggcatcagggggagaccgtggaaagagagggagagggagaccatgaggagagggagagggagagggagagggagagggagagggagagggaggagggagagggagaggagggagagggagaggagggagagggagaggagggagcctccttccttttaaccttgcccttttcacctttcactctcacttctttttctacttacctttccccactgccaccccacgcacctcctctctctcaacccccctttctcctcctgtcctatatttttcacccttcttcctctcccactctttccatttgacaatctattaatattgcctgctctttctcttctgacctccctttttctatctccctccctcggaacgtctctgttccgtgtcttcagccatggctgacactgaagctccttaagccaggacaccacattctctaccccacagcagaggcccaggatagtgcactcagaggagaggtggctctttctttggtgtttttcctcgctctgaggggacacattgctgagccccagaaggacacaggaggaggctggcgtggaattgggagtgaggtaggcatgggattcttctttgaggccttcaaagggtggtttctgtatttaatttgaagagtcatcaacccccaagacacctgccaaaacgcattccaaaggcaggtagagattgtctactgcactgccaaagtgaagacggagttcactgctccagaagaaaatcacacccttctcaactgcctgctcccttatgccccctagttcctgaacccactttcataaaatgccgccaaactgtctaggtcttgactgagtcctgccctagctcacactcagagggcaaccctggactcggggggctcaggaaacaggtgcctccctcccacaatgaatccaaggaaccgccctgccctctgctcctgagctctggttctggactccaggagcccaacatgctcactgaggccctcctctggcctggacatggcggggagactctgctgtgtccactgctgcagtgacccctgccctccggtgcagctcactgtctccctcaccccctctagtgggaatctgctctctggtggggcctctgagtgtctccatcaacattcacaccatcctgggccccctctgtggactcagtccagggaagagtgtggtcttcttcccctgacaccctgcaattggaccccctcacccaaccttctgcctcccattgtggcctgtggtctcgccttgcacccctcctcctccactactctggggcccacagtcaggactatgaaaaaggggacagggagtgtgaaatgtcacaatgagactgagaatttctgaggctcaggaaacctttgagttccagtctcctaatccacaggttggaaggctgacggacagggacaacagaacatttatgggcagcagattcccaattcctcacctgggcttccctgctgtggagcagcatggcagggtgaagtcaaaaggaacaggatggactcccagctga

SEQ ID NO: 22976 - DNA, 1187 bp, Artificial sequence
  DNA replication origin
acacagacatggcaaccatccgatttctcaatcttttccccacctttcccccctttctattccacaaaaccgccattgtcatcatggaccgttctcaatgagctgttgagtacacctcccagacggggtggtggccgggcagaggggctcctcacttcccagtaggggcggccgggcagaggcgcccctcacctcccggatggggcagctggccgggcagaggggctcctctcttcccagtaggggcggccgggcagaggcgcccctcacctcccggatggggcggctggccgggcggggggctgaccccccccacctccctcccggatggggcggctggccgggcggggggctgacccccccacctccctcccggacggggcggctggccaggcagaggggctcctcacttcccagtaggggcagccgggcagaggcgcccctcacctcccagacggggtggctgccgggcggagacgctcctcacttcccagacggagtggctgccgggcagaggggctcctcacttctcagacggggcggttgccaggcagagggtctcctcacttctcagacggggcggccagacagagacgctcctcacatcccagacggggcggcagggcagaggcgctccccacatctcagacgatgggcggcctggcagagacgctcctcacttcctagatgggatgtcggccgggcagagacgctcctcactttccagactggacagccaggcagagaggctcctcacatcccagacgatgggcggccaggcagagacactcctcacttcccagacggggtggcggccgggcagaggctgcaatctcgacactttgggaggccaaggcaggcggctgggaggtggaggttgtagcgagccgagatcacgccactgcactccagcctgggcaccattgagcactgagtgaacgcgactctgcctgccatcccggcacctcgggaggccaaggctggtggatcactcgcggttaggagctggagaccagcccggccaacacagcgaaaccccgtctccaccaaaaaaatacgaaaaccagtcaggcgtggcggcgcgtgcctgcaatcgcaggcactcggcaggctgaggcaggagaatcaggcagggaggttgcagtgagccgagatggcagcagtacagtccagctttggctcggcat

SEQ ID NO: 22977 - DNA, 915 bp, Artificial sequence
  DNA replication origin
gaagtgaggagaccctctgcctggcaaccgccccgtctgagaagtgaggagcccctctgcccggcagccactccgtctgggaagtgaggagcgtctccgcccggcagccaccccgtctgggaggtgaggggcgcctctgcccggctgcccctactgggaagtgaggagcccctctgcctggccagccgccccgtccgggagggaggtgggggggtcagccccccgcccggccagccgccccatccgggagggaggtggggggggtcagccccccgcccggccagccgccccatccgggaggtgaggggcgcctctgcccggccgcccctactgggaagagaggagcccctctgcccggccagctgccccatccgggaggtgaggggcgcctctgcccggccgcccctactgggaagtgaggagcccctctgcccggccaccaccccgtctgggaggtgtactcaacagctcattgagaacggtccatgatgacaatggcggttttgtggaatagaaaggggggaaaggtggggaaaagattgagaaatcggatggttgccatgtctgtgtagaaagaggtagacatgggagacttttcattttgttctgtactaagaaaaattcttctgccttgggatcctgttgatctgtgaccttacccccaaccctgtgctctctgaaacatgtgctgtgtccactcagggttgaatggattaagggcggtgcaagatgtgctttgttaaacagatgcttgaaggcagcatgctcgttaagagtcatcaccactccctaatctcaagtacccagggacacaaacactgtggaaggccgcagggtcctctgcctaggaaaaccagagacctttgttcacttatctgctgaccttccctccactattgtcctgtgaccctgcca

SEQ ID NO: 22978 - DNA, 1083 bp, Artificial sequence
  DNA replication origin
ttatggctctccctaggcaggagtgagggccactccagatatcccatgggggagtgatgcccatctgtgctgcctcctgtgcaccgagagccacctgcactctctgcagagctgggctgagtccccttctccctccctcctagggtctctccggcaggaaggtgttgctcttctggtctggggaccctgaagtgcccgatggagggcatggcactggctcaccttgtcgatgaaggaggcaaacttgttgttgagggtcttgatctgctcacgctcctcggcccgcacccgctggatggcggggtcaatttgcaggttgaggggagtcaggagactctggttgacagtgacctcttggatgcctccaggggggcacacagggaagccagggcccccaaagccaccagcaaggccggctccaccacccagaccaaagccaatgccggctccaccaccgaaaccaaatccactcccggcgccaccaaagccatagctgcctccggctctgctgccatagccgccactgatggcacagctgccccctccaatggagatcctcttggagccccccaggccatacagactgcggctgccaaagccagctcctccacatgcgccacccaggccaccactgcccctggagcgggacacggagatgctgctgaagccagagcggctgaccccagggagcctggctgagttggcactgaaaccccggcggctgctgctgtggctcctgatggtggtggatgtgctggccatggttccaggagatgagagggcttaggagagtgtgagaggctggaggcgagagggaggagaagcaggacgaggaatcggactccagtagcagcttatatatggagagcatgggctgggcccagtcctggaaggtgagcttgcaggttgggaagggctgggctttacaaatagtgagatcacacctgcattattacaaaagttatgaaataccgagattgcatttttcgcttcctttagtcaggcaaaatgttcctgcctccagctttgacttgagatctcagcacaataagagtattctcaattcatgaagttggaattagt

SEQ ID NO: 22979 - DNA, 1122 bp, Artificial sequence
  DNA replication origin
tctccctagcaggaaggtgttgctcttctggtctggggaccctgaagtgcccgatggagggcatggcactggctcaccttgtcgatgaaggaggcaaacttgttgttgagggtcttgatctgctcacgctcctcggcccgcacccgctggatggcggggtcaatttgcaggttgaggggagtcaggagactctggttgacggtgacctcttggatgcctccaggggggcacacagggaagccagggcccccaaagccaccagcaaggccggctccaccacccagaccaaagccaatgccggctccaccaccgaaaccaaatccactcccggcgccaccaaagccatagctgcctccggctctgctgccatagccgccactgatggcacagctgccccctccaatggagatcctcttggagccccccaggccatacagactgcggctgccaaagccagctcctccacatgcaccacccaggccaccactgcccctggagcgggacacggagatgctgctgaagccagagcggctgaccccagggagcctggctgagttggcactgaaaccccggcggctgctgctgtggctcctgatggtggtggatgtgctggccatggttccaggagatgagagggctgtggcgagcgttggaggctggaggcgagaggcaggagaagcaggacaaggaatcgggctccagcagtagcttatatattatgagagagcatgggctgggcccagtcctggaaggtgagcttgcaggttgggaagggctgggctttacaaatagtgagatcacacctggatcagaaaagttatgaaatgctgagatggcatttttcacttcctttagtcagggaaaatgttcctgcctccagctttgactcgagatttcagcacagtaagagcattctcagttcatgaagttgaagttagtcactgtcttcagcaaaggttctgcatgctaggctgtttatcaacatgctgtgagtgctttcctctttccagcctgactttcttccagcagagatgttggagatcacaagcactgtattgcaaatgccttaacagaaatattaacatttttcctgtaattatttttccttctgtgtgcaatttc

SEQ ID NO: 22980 - DNA, 1193 bp, Artificial sequence
  DNA replication origin
tccctaggcaggagtgagggccactccagagatcccatgggggagtgatgcccatccctgctgcttgctgggcaccagcagccatctgcactctctgcagagctgggctgagtcctcttctccctccctcctaggtctccctggcaggaaggtgttgctcctctggtctggggaccctgaagtgccccatggagggcatggcactggctcaccttgtcgatgaaggaggcaaacttgttgttgagggtcttgatctgttcacgctcctcagcccgcacccgctggatggtgggatcgatttgcaggttgaggggagtcaggagactctggttgacggtgacctcttggatgcctccaggggggcacacagggaagccagggcccccaaagccaccagcaaggccggctccaccacccagaccaaagccaatgccggctccaccaccgaaaccaaatccactcccggcgccaccaaagccatagctgcctccggctctgctgccatagccgccactgatggcacagctgccccctccaatggagatcctcttggagccccccaggccatacagactgcggctgccaaagccagctcctccacatgcaccacccaggccaccactgcccctggagcgggacacggagacgctgctgaagccagagcggctgaccccagggagcctggctgagttggcactgaaaccccggcggctgctgctgtggctcctgatggtggtggatgtgctggccatggttccaggagatgagagagctgaggagagtgtgagaggctggaggagagagggaagagaagcaggactaggaatcaggctcggggcagcagcttatatatggagagcatgggctgggcccagtcctggaaggtgagcttgcaggttgggaagggctgggctttaccaacagtgagatcacacccagtttctagaaaggtatgaaatatgaagattgctttttggcttcctttagtcatagagaaattctcctgccttccagccttgacttgatcctaacacaataagcccgggtatacattcactgaagtcatgagttagtcatgtcctcaaacaaaggagacaaggagctgatctgtgataattgtcccctccttcttcttcatcagacactccctgtgtgcccccttcccacacaggttttctactccacttgcacca

SEQ ID NO: 22981 - DNA, 892 bp, Artificial sequence
  DNA replication origin
ctctttggcatttatttcagacccacagtgattttttacaaaagatcgtagctcaccttgtcgatgaaggaggcaaacttattgttgagggtcttgatctgctcgcgctcctcggtcctcaccctctggatgctggggtcgatttgcaggttgaggggagtcaggagactctggttgacagtgacctcttggatacctccaggagggcagacaggaaagccagggccaccgaagccacctccaaagccagctccgccaccgagcccaaagccaccaccagctccaccgccgaaaccaaatccactaccggcaccacctccaaagccatagccgcctccagcaccagcaccaaaccggttcctgaagctgccaccactagtgctgatggatatcctcttggagccccccaggttgtagaggctccggctgccatagccacccactccacaagcacccgcaaggctgaccctgccgaagccaccaccaccgccacccccggaccgggacacggaggtgaagctggtgcgggagacagacggggtgatggcagaggcggtgctgaagctacgactgcccccgctccggaaggacacacttgactggcgagacatggtggcttgttcctggtggagcaagagaaccaggcactagtgggttgggaggtgctggagagaacagagctcagcaggacgcagaaggtggctctgttacccaggaacggtgatgccccctttttatcccttccagaactgggctgggcgagagagctgtcgagctgtgaatgattaagtgggctgggcatgcctggggggcagctgtgagctcaccggtcacacctgcacagtggtgtggggtgcaaacgctttcttcctggcaggctctgctcagttag

SEQ ID NO: 22982 - DNA, 789 bp, Artificial sequence
  DNA replication origin
ttgtaaaatgggcacaataatgggtcttactccagtgggttgcgatgaggcttaattgggatgtttacgaagtgctcagaacagtgcctggcacatacttccaataaacaggatgtattagcccattttcatgctgctgataaagacatacccgagactgggaaaaaaaaaaagaggtttcattggacttacagttctccatggctggggaggtctcagaatcataacgggaggccaaagtcacgtcttatatggcggcggccagagaaaaatgaggcagaagcaaaaacggaaacccctgataaacgcatcagatctcgtgatacttattcactattaggagaatagcaggagaaagaccggcccctatgattcatttacctcccccctgggtccctcccacaacacgtgggaattctgggagacttaattcaagttgagatttgggtggggacacagccaaaacgtatcaaggaccttcatttctttcttgcatgagacaagactgtgagaagggaggggtcaggatgtccaaggaatgggcactttgagagctcccaatatcagaagaggagatgggacccacattcagggcagggcattaggaacagaggccaagagacgttgcaggacatggtgcttggtgcttgaggagtggggtaagtgtgtagccaggaagatgatagaggaggtgagagaaaagggccagaaaactgaagggtgaggctgaggaggcacttggaaagagtgcatgtaaagttacaggtgtgtgctgagggtggggcatcc

SEQ ID NO: 22983 - DNA, 1416 bp, Artificial sequence
  DNA replication origin
agtctgggaaggtggggctccggggcacaggtcagaagcagcggagggaaggggccccgcgggggtgcgggggagctcagagcggggcgtgccggagggcgaaggggactggggtccgaggacgcccctggcgcggggttcagaatttgtggcgggaccgccagctctaggaggagctttgttctctctggcggcgctgctgccgccgccgccgccaccccggctgacggcgcaggagtcccggagccagagaagccccccgagcaccgcggagctcccgcccaagccccagccgctgcggccccggctaccgccgcgggcccgggctccgactcctcctcccagggcgcagccgccgccagtgctgctgtggccagtctctgcaaagacggtcggggtcagggagcctggcagtgtccgcccggcacgccagcccctcccacagtcccgagccgcaggtcttcccggggtgacgccccgccgagatccggcaaggcgtggggaggacaggcttcaaggaggggaggggaggttggttcctccaaaacagccaccaacagctcttccagcctgcaggcctgatggcctcgcaccagcgctggcacatggcttgagaaactgcattccgaggcctccagccccttcccggagaaagaacccaatactcacctaggatcacggaactctggcacctcccagacaccctgtgaggaaaaccagagagttcgctcagttcctccctctccttaaacggccttccttaggtcaacagcaaggagagccttggtcaccccacccccattccctcctgattgatgtagagagtgagaaataagctggacgggtgctcagaaaatcataaaacacattcttctttctattgggtaaggttaaagtgttactctttccactgacatctcccaaagggatacagaccagaggatacagaacatttctggacccacccatcctctccacctcctcaggatactcttcatttagcaaatgctgtttgaacccacatgggacagagccctatacccatgtgccagtgtacgggaacacactcttcaaaaacttgcagttaaggcattaataaagaaatggtctagaaataacatttatgtctatgacccttcatcttcgcagacatacactgtatagctaaaacataggacgttattccaggtaaggcgctaacgtgttcatatggcataggaagcacagctttcttggtgtgacagcatctcccagccctgaacaagaggctgtgcctgccaatggccaccgccacctcccacagaacgcacagctcccacacctggcagcacgctcaggcaggaaagccccaggcctctggcctcctgggaaccagacggactctcacctgcattcctcgccctccaggagggtccg

SEQ ID NO: 22984 - DNA, 963 bp, Artificial sequence
  DNA replication origin
cccatctccaccaaaggaaaaaaaaattgctggggccgggcgcagtggctcatgcctgtaatcctagcacttcgggaggccgaggcgggcagatcacttgaggtcaggagtttgagattagctcggctgacatggtgaaaccctgtctttaccagaaacacaaaaaattagctgggtgtggtggcacacacctgtaatcccagatactcaggaggctgaggcaggagaatcgcttgaagctgggaggcagaggttgcagtaagccgagatcacgccatggcactccagcctgggtgacagagtgagaccctgagacacacacacacacacacacacacacacgcccgggggtggtggtgcatgcctgtggtcccagctacttgggatcacttgactgggggcgggggttgggggggtatgccaaagtttgcattgagcagagatcgtgccagtgcactccattctgggtgacagagctagaccttggctcgaaacagacaaacaaaaagccaaaaaacaaaacaaaaaaaacaaacccaaaacacacaaaacaaaacaaaacaacctgtcctgaacaaaatcaaacaagccacaggaaacacagcagagagaccgaggccagagaggcaaggctcgccttgattcctgcagcataagaacctgagccagcacagaggggattgaggtgcagctgattaaaggggcaaaatctccaacaccagcttctgccttcatttctagactttgagaatccagtattggcactgggggacagtgctgtgctggggacccaagggacacagagaagcgtgggcagccgtagattatcctctttccctgcagcctgctgtcagcctgcttgaacttctgaagaatgggcaccaagacggctaggattgaccgaagcgggatggatttgtgcaaaccggagagacatcagacatccactaggaggcagcagag

SEQ ID NO: 22985 - DNA, 910 bp, Artificial sequence
  DNA replication origin
tttgagtcagagtttcgctctggttgcccaggctggagcgcgacggcacgatcttggctcactgcaacctctgcctcctgggttcaagcgattctcctgcctcagcctcctgagtagctgggattacaggcacacactgtgcctggttaatttttgtatttttagtagagaaggggtgtcaccatgttggtcaggctggtctcaaattttttttttttttttttttttttgagacagagtcttgctctgttgtctaggctggagtgcagtggcatcgaactcttgacctcaagtgatccacccgcctcggcctcccaaagtgcttggattacaggcatgagccactgtgcccggcgatgtgggacacattatcatctctgtgagagatttttggtctcttttgtcaccgcccttctctcccagctcctagaactgggcctggctcacagtaggtgctgaatgcatactggttgaattgtaaatgctcaggatttgtttaattaaggatgcaggaaaggtgatataccggtgtgcagaagtcaggatgcattccctgtccaaatcacagtgttccactgaggcaaggcccttgggagtgaggtcgggagaggggagggtggtggagggggctcagagactgggtttgttttggggagtctgcacctatttgctgagtgaatgtatgtgtgtgtgcatttgagagcacacctctgtatgattcgggtgtgagtgtgtgtgaggaaacgtgggcaggcgaggagtgtttgggagccaggtgcagctggggtgtgagtgtgtaagcaagcagctatgaggctgggcattgcttctcctcctcttctccagctcccagcctttcttccccgggactcctggggctccaggatgcccccaagatcccctccacaag

SEQ ID NO: 22986 - DNA, 1820 bp, Artificial sequence
  DNA replication origin
gagggccaacaacacctgctgtccgtgtccatgcccggttggccaccccgtttctggggggtgagcggggcttggcagggctgcgcggagggcgcgggggtggggcccggggcggagcggcccggggcggagggcgcgggctccgagccgtccacctgtggctccggcttccgaagcggctccggggcgggggcggggcctcactctgcgatataactcgggtcgcgcggctcgcgcaggccgccaccgtcgtccgcaaagcctgagtcctgtcctttctctctccccggacagcatgagcttcaccactcgctccaccttctccaccaactaccggtccctgggctctgtccaggcgcccagctacggcgcccggccggtcagcagcgcggccagcgtctatgcaggcgctgggggctctggttcccggatctccgtgtcccgctccaccagcttcaggggcggcatggggtccgggggcctggccaccgggatagccgggggtctggcaggaatgggaggcatccagaacgagaaggagaccatgcaaagcctgaacgaccgcctggcctcttacctggacagagtgaggagcctggagaccgagaaccggaggctggagagcaaaatccgggagcacttggagaagaagggaccccaggtcagagactggagccattacttcaagatcatcgaggacctgagggctcaggtaaggggtaggagggacctcaactcccagccttgtctgaccctccaattatacactcctttgcctctttccgtcattccataaccacccaacccctactccaccgggagggggttgggcatacctggatttccatccgcgcacctagccacagggtccctaagagcagcagctaggcatgggagggctctttcccaggagagagggggaaggggacagggttgagagctttacagaggaagtggacagcatggagggaggtaaggaaaggcctgtaaagaggaggagacactggctctggcggaatggggactattggagggttaagcggatgtggctaaggctgagtcatctaggagtaaacaagaggccttcctttgggaggagccaatccagggtgtagggggcccagagtgaccaggtgcactagggaaaaaatgccaggagagggccaggaagaggacttgttagtagcgactcacttctgggcaggcaggccagccagctagccagcctgctgaggcttcccaagaggggcagagtgctgggatctgggaatccaggaaaggagggaatggggtggggctagatgaaaagggataggtgtccagggagagcctctggctattcctgggaccaggaagttttcactaggatacataacactttttacacactcaccccacccatccctggctttctattcatggaacaacctctctctacaatccctccagatcttcgcaaatactgtggacaatgcccgcatcgttctgcagattgacaatgcccgtcttgctgctgatgactttagagtcaagtaagtttgggggctagagagctgggggtccaggggtggagctaagaaggatctgctccccaggctgggtcagttaggggctcacagtgggatcctgttaggtgtgggtggatgagagtcagggtccatcagtgtattcatttaactgttcatttgtataaccccgtttaagaatactgtcctccaagtgccaagaatggtgctcaggggattaccacctaattgctgactcaagttgctggtttgcaatgggcacagaacttctcttagtaggtggcatgagttgag

SEQ ID NO: 22987 - DNA, 858 bp, Artificial sequence
  DNA replication origin
tgggctctgaaacccccctccgagcgtgatccactgatttcctgaagtcggggaattgctggcactggttcctttctgaattgagggctgcggcaggctggcggcgtggccctgttaggttactgcctctggatgtttgggggggaggggaaggacaccttcccctccccctcacactcttttcaccctttctgcgcgagattggaataggcagtaatggtagactctggcttgaattggggaaggaggcgcagaaaggtgtgcgggtggtgcgaggccttttcgtagacgtgaatcaccgtgcccgcgtgaaggcgtggaggaaggaaggaggcggttgctgcgcggacgagtgcacattagactacgtctccaaggcgcgaggctgtagcggaccggagtggggggtaggggagtaagtgtggtgggggggagcagttggaacgcgagcgcgagttggtggaggggcgggggaaggcagcggtgcgcgtgcgcggtaggagacacgagggtagtagagacgggcgcgccttcaatgcgtgcgctagaacccagatgggaagctttttaacgcgcctgtgttgcgcacttatgtccttttaggttgtctcttccctttctagagtgtgggccctgtgcctgtattcttctaagggtgtgtgtgttagccttggaggttggtgctattggcgttagatgggggtggggaatccagttaggtgcgcccacgtgttggagaagcaccggtgtgcacctagatttccttctaggcttttttctcatactcaattggaggcattttttactcagcgcagctatatgccaggatcaggtttcgcttccggcgcttccatgttg

SEQ ID NO: 22988 - DNA, 1438 bp, Artificial sequence
  DNA replication origin
gagatggaagttctttctatggtctgacctcattcccttcttttgcagtgcctggtactggataggaacttcatggaatggagctaatgggccgtagggcaggtttgagtcgtgccaccctggagcagaaggtggagggtagggataaggtaggggacatcttcctagaagttctgaacctgttgccattcctacattcccccaacgtcctttagcagtgagcacttcctgaaactttctccctccttcaccctccctgctggattttccatgatgaaaaggggcggggggaaggaaggttggaattctgagaacccagtgcccagggctcaatgcccagtgcttgcccaaagtagccagtaccactggctctaaggccttctttccctccccgtctcatctcaactgggtcccttgtctttggcaaaggctgagaagtctggttctcatttccagggggtggagcacctgattccaatcttgccacagggaagaagagtctgtgaagaagtgcgtgatgactgtgtgtccccccccacccagaaattggcatttgggaggggtggatatggttgggactggggagccttgatcttactgctcttggttgagttggtgtccaatagacagtttcagaggttagagcagtgggagtcactggggactggggacaggagaggtgggggtgggggaagccaggcgggaatgagtagggaggcactgggaggaggggagaggcaagagttaggggaataccgaggaaagtggcagggattggaggctcctggagaaagggcaaggctgaaggttgtcccatgtattttggccagatttgattatgtaatcgagaatcatgagataattaagtgtgttcatgtctctggagccttcaaccagctcttttaacatcttgctcttcccagcattccttagggtctttggctgggctctgggatggatgccatgggagtacctttacttaagctctaaagttaccaatggagagactgggactcaaagaggaacttgattggaccccagagaggtgaggggtaagggctagaacctcacacatgctggttttgctgctgcctggcaggcccatgggaagaactttagaggttccaaggaattggaaaagggtcacaagatgggtggccaaactcccagctcaggcttgattcctactctcaatgtggggatagtggagaagggggctgcaggaagggctgagaaaagctgagaatgagaagttatacaggaggtagcttggtgggagtgaaacaaaaatgagtggttcatgggccagccaggcatcctgatttccagctcacagcagcaggagcttcagagaggaagaaggagaggaggagaaagccaggttgatgttagtaaaggtcaaacaatttcaggagcacctctgacctccctccacaca

SEQ ID NO: 22989 - DNA, 1872 bp, Artificial sequence
  DNA replication origin
gtggcacggcgtgcggccccgtgcgccccgggtgctggaaggcgtggcggcctgatcgagtagggccgcggccgcgccccgccccctagtcactgtcccggcctcccgctgctcccagctctccgcggccagccagagcccccggccccagccctgggccgcgccccgcgccccgcgccctctcgacctccggcggccccgcgccccctggcgcccgcccctggcactgcccgcgcggccgtgacgcagagaccgccgcccgcccagcgcggcgcggccactcacctgcggggggcgcccggccgggcgggggcgcggcggggcggggcagcagcagggggagccgccgggccagcccatcccgcccgtgcccgcgccgagcggacgcggaggaggaggcggtggcagtggcgggagcgggcggccgggctcggctgggctccctcccgcccccgccgcgccccgcgcccgcgcccgcgcccgtggcagcccgctcctcctcctcctccctcccggctccaatccccacgttccgccagctccccacccctcggcctcctctcctccccaccttctcccgcgaacccacactcacaaagagccgaggggagagagggtgcgcagacggccagccgggccgcgccagggacatactggagacaggaagtggctgagagggggagagagttggagagagacggccgcggaggacacggggacgggaaagtctgagagacggggagagcctgacccggcgggacacaggcagaaagaaacacgcgagccagacagacgcagaagaaacggtgggcgtaggtctagaagggactaggaacaaggggacagggaactgccgcgcagcgtcagcctcttaccctccccacaggagtgtgcctgggcttgggcctgacctgagaggaccacccgtggcttagcctggtggtgctagcgtcccctacccaggcgggcgcctgaatcaggtgaagacacctggtgttacttttggcccaagtcattggacacccttccctggtcctctgccccacaggagacttctcctgggctagtattctcaaaggattcacagctggggacctttccgtcaggctcaagcccccatctccacccgcaagcagctccagccatcccatccactgccctgctttattcattgagacgggagtctgtctctgtcgcccaggctggagtgcagtggcgccatctcggctcactgcaacctctgcctcccaggctcaagcgatcctcccacctcagcctcccgagtagctgggactacaagatgggcgccgccacgcccagctaattttttgtagagatgggttttcgccatgttgcccaggctggtctccaattcttgagctcaagcgatttccccttcttggcctcccaaagtgctgggattacagacgtgagccaccgtgcccggcccattgccctattttaaagagctggaccgtcattcccagttcgcaggagacctctgagaaggtcttccttacatttaacttgagtccagcctttccaaatggagatggaagttctttctatggtctgacctcattcccttcttttgcagtgcctggtactggataggaacttcatggaatggagctaatgggccgtagggcaggtttgagtcgtgccaccctggagcagaaggtggagggtagggataaggtaggggacatcttcctagaagttctgaacctgttgccattcctacattcccccaacgtcctttagcagtgagcacttcctgaaactttctccctccttcaccctccctgctggattttccatgatgaaaaggggcggggggaaggaaggttggaattctgagaacccagtgcc

SEQ ID NO: 22990 - DNA, 1268 bp, Artificial sequence
  DNA replication origin
ccgagcccggccgcccgctcccgccactgccaccgcctcctcctccgcgtccgctcggcgcgggcacgggcgggatgggctggcccggcggctccccctgctgctgccccgccccgccgcgcccccgcccggccgggcgccccccgcaggtgagtggccgcgccgcgctgggcgggcggcggtctctgcgtcacggccgcgcgggcagtgccaggggcgggcgccagggggcgcggggccgccggaggtcgagagggcgcggggcgcggggcgcggcccagggctggggccgggggctctggctggccgcggagagctgggagcagcgggaggccgggacagtgactagggggcggggcgcggccgcggccctactcgatcaggccgccacgccttccagcacccggggcgcacggggccgcacgccgtgccacacacgcaggcccgggacccggcagcagctggcagcggcgctcgggccccggcctggcagggtgcgggcgaacgttttcctttcctgcttcacatgtgggacagaggccgtaagcgggcacagatgaggctgattcgactcgccagccccgctctgcggccccctccagtctgcccccatcctccagacccttctgggaacacccccagagccgccgccctccctcgctccttccctgggccttacccctcctccgcggcggccgggctcccagcctcccttccaaccacagctatttccagaaaggggggtgtgggtggaggggtttctccaaacaaacccaagacttcggagagagagggggcccggctgggggagaggttgacaggctctggaatgttacaggcgggaggagggtgagggtccaagagggtctagtgatgccttcccagccctcctcaagtgagctacttttcccctcgggactggctcatagggatcccatccctgcttcccttccgaggtgcgagtgccacaggatgggagggactcacagccacagtggatcctgaccaccccacccctcaccgagctcactgcttgggcacctccttgctgggtctgggtggggagtgtgagaccagtgaaggtgagaggatgtctggggacctgttccaggtgaggggactttcagcccctatggaggcagcaggagagtgaagcatgtagaggagtcctggtcagggccatgtgccataggagcagaagctgggactggacagaaaaaagccacccccactgcccaccttgtcacactgccccatctcccccaagc

SEQ ID NO: 22991 - DNA, 669 bp, Artificial sequence
  DNA replication origin
gctctgagcttgtggccttccttcattttctctggcccagtagaactttggtgatgaaggtgacaatggcgccagcaggctgatctgggtcaagctctgcaaagaggtgacacacattctcccaggggcttcccggcttcttggccacgaaaccaaagatcctagggggataaagggtggggaaggggcttaacattccttccacaagggaatgtagctggccttggtgagacaaatcaaatgccagcattgagaggacagcagcgccctggtcccttggaaggaagaggctgaattcgtggggaggcttacttggaggtggtcccgtctgggttggtccatctgcagaaggagaagaaggtgaagatgcacaccccaggggacagctgctgaaggggggccggggccggggctggggctggggctgggagctgggacctggtgggaccatggggatttggggcaaagggtttggagggagagtcacctccggtcttgagggtcagtgctggagaaggtgatgctgttcactggataatggcggcgaaagaagagcctgcaaggaggagggtgaggaaggtcacactcagaaacatgagcccccaggggccttaagcatggggttctacagggctgagtatacatacttcctttggttgtccgtcagtg

SEQ ID NO: 22992 - DNA, 1121 bp, Artificial sequence
  DNA replication origin
ccgagggtgcagcaacagaagaagcccagtgaccagagcgcagggccccgcccctggccccagagcccccgcccaggacccccgccttccgcttcaggctccggggagatacgaggcctccgggaccccgcccccgatccccgcctaccggggccgccgcgtcctcctcatccataggcctctcagctccgcacacaagctcttcggccgccgccaccacacacatccgggtccccgcctttccttcactcctagaggcccgccccgtcccccatctaagccaatcagcaacggcctctgacgacgggcacctgcaggagccaatcggaaggcgcaggcagggtgtggggcgcggcccggtgccctgggtacccagctcagggccccggtctggtcaacccggctgttgctggggtgagcgaaggcgacgtggcagcgcggacgctgctgggtgcctgggcgccgctgaggcggacagggggcggctcttgagcggcgccggggagacgggacgggcggagaaggtggccacgctcgcacaaacgttgcgagtattacttgagccctccttccgcgctggactgaaataaaagctttaccggaatgtccatttaatccacggtgcagccttatgaaataaatcttatctcctttttacggatgggccgaaggctggcctcgatagcctgcgcgcttaactgttatgctgtgtaccctcccgagctctgtttcatggcaccgctcgctcattattggcaagaacattccattccaggaggagagaactggggatgcagaaggcacagtggcacgaagcggcattctgtggaggaacacagggctttggtaggctgaaggaaagttagactggggttagaatgtgaagggacgaagacacgaatatttattgaacacctactagggagtgcctacctgccattctggggggttggactcctagatgaggacttccttgctcccttcccatcaccatatctctctcttctggacggaaaagattcctctcctctgtagcacctcatttataatacttttttttttgagacggagtctcactctgtcgcccaggctggagtgcagtggcgcgatctcggctcact

SEQ ID NO: 22993 - DNA, 1352 bp, Artificial sequence
  DNA replication origin
tgcccctccctcctgagacagccctcagcttccgcgcagccctcggctggcgaccccccatcctcctcctccacgcagccccctggacaacccgcctgcaccccttgcccgcagcctgggcaccgcgccaaggcgcctcctgggctggcagcgagcagcagagctagcagcagcagcagcggtggcagcagcctgtggggggtcatggtcagggtttgtgccccgtcctctccttccagagcagtcgcagcgcagctgctgcccgccgccgcccctctgtcttaagtagccgccggccaggggccgggccctttaagagccaggtgaaggggggtgggggagagggcaggggcattccctaaactgggtgggactggagagggcccccccaacctgggtcctccccactcttctttccctctccctttccagtttctgtttacttcccaaattgctctgatttttcttgctttgttcccgggaatctcggcccggaatttgggagctgtacagctggctggagggactggagggtggggaggagcggaagaaggggaggacgggagtgcaatccacttagtgtgtatgtgtaggacgacgaggggcatgcagggacccggtggggagtgagaagacgggggctgaaagggaactgagaagagatggtgtgtgtggatcacaagaggagtgggcaaatgtggagggacagagaaaagatggagagggtggataacggggtcttgggaaattctactgctgatgggagaagtagaacagggcagaggagaggaagggcaaaattgggaaaggagtaagagaaagcacccttgaggtaagactatggagaaaaggggcccgaggggaaccagactggggtaagccaatgggggaagggccgggaggcagggagggatacaacttgaatgaaccgtaggagaccctagcattgtggtgggcgcatgcggagtctggaaggattggagagggctgtgtgcagggtgagaactggctgggaggcagggaaagggggaaattggcaggttgaaactagagagggagagaattaaaggaactcgtattcgggatgctcttggggacagtggccagagagcagaccccacccccctccccatccccgtccttcaggtaagctcgctcctccattcctctcctctcccagaatccgtttccttccctcccagtcatccatggggttttctagattcatcagactgtcttgtgcccaggggactttggggagggactactcagcatctttgcctacctacttgtccgccttcgctccaagggtcgggttccaccgctccccacccgccttccccaggcagtgt

SEQ ID NO: 22994 - DNA, 1608 bp, Artificial sequence
  DNA replication origin
tgcgctgcgactgctctggaaggagaggacggggcacaaaccctgaccatgaccccccacaggctgctgccaccgctgctgctgctgctagctctgctgctcgctgccagcccaggaggcgccttggcgcggtgcccaggctgcgggcaaggggtgcaggcgggttgtccagggggctgcgtggaggaggaggatggggggtcgccagccgagggctgcgcggaagctgagggctgtctcaggagggaggggcaggagtgcggggtctacacccctaactgcgccccaggactgcagtgccatccgcccaaggacgacgaggcgcctttgcgggcgctgctgctcggccgaggccgctgccttccggcccgcgcgcctgctggtgagtccgcgccccgcccctgccccgcccacgtgagacccgcgtcctccaggcagggtcctggggagacgggagtgggtggcccggcaagcctttccgccctggcccttgacgcttccgactttggggggcacatttgtgtgggggagaaggggcaagtgcaggaagctgaggtgcagccaggggacctggtgatacagcagaaggtgtctgcgctctcggccttcttttttgctccatttattttcccttgatggagtgtgcgtgcaggtgggaacttgggggaggcagggggagaaatgggagggttttagggccatcccatgggctccagcaggcccagctcctacaaccctagacggccaagctggggaaaggacccaaatgttgttctcagcttccacttggagaaaaggggaggggaaccccagactctgaaattctgcacacactgagaaatgactcctttcctcctaataccggtgttcgaagcacctaaacaggaggcgtctagaaccgaagaggccccaaatccagggttgtattagacttgagtagggactgagggcaggctagggcgtaggttaggggagaggggagaaagagtaggggaaagagggaatctgccaaatcagggttatgatttaaacctgctcagaatcgttcacccatcctaccccaccctgctccagggaggagagcagaagctgagtcactgggtgggtgggacagaagtgaatcagccgtgaaaacatggggggcagcggggagatggggagggcaggaaatgcaaactgcgcatcccagaggctctgggttccttccacgggaggggatggagaattcacttggagtttctttcagttccaaatgcccgagtgcaggcttctgggcgtcctcctaaaaggtggtctgggtggatgagaggaggcagtttggaactaaatggttgggtgctaaatgtagggaatgaaggagaaggtctggggaggggtgggcatcctgaggaagaaggatcagactcaggattgcaggggaaatgtctcctgggttgtgagtggtagttagctgggagcttgtctttaggcacagaggaagaggatcccttcaggggttctgatatctgattagatgttaggcaaattccaagcagtcagtacatgctcccctttctgccttttcctgtccctgacttatttcctcaccccttcccagtcctgagctct

SEQ ID NO: 22995 - DNA, 1072 bp, Artificial sequence
  DNA replication origin
tttcccctccctcccccggagatccccctcccttcgccacgcgcccctcctcccctcccctcccccttcccgcgcggcaccccacggcttgcgagctactgaagcgctgccgtctgtacggacgacgctgcggtctttggggcttgctcctacctgccaggcgcggcctcccgctggctccctggccgcgcggcgcctcctccaggccccagcacaccctgccaaccccaccgccgcggctgcccccaccgggaccgaggcaagtttacaaacaccaaccccggcccgtttccccggaagcacttccccctccccctcgtcctctccgccgagcggctgcatccacttccgggctcggcagctagactagcgggggcagcctcagagcgggtgagcttggggacgcacggagaggtgcagctgggtgagtgggcggcgccgtgcgccgagggcatggaggagggagcgctgaggccggcgcgtgcgccgtggccggggcgcgccccggccgccatcgagactgagggcaggaccctcggcccttcgatgattgtacgctgggtgctcgatgggaggagggtttgctgggtgagctggttcagactccttgaaaaatcatcgtcactctttcttcctcgcggacgtcctgcccatcgctctgagccggcgccccaagtagagccagagtagttcgtacccagccttttcacgtaactcggccgaggtggttcttctccgaattttttccgtcaggcccagattagcagattttggggtcagctgggagaggcgttaacttttcttcgcacactcttgctttgtgcgctcaaccacagtctgaattctcgcagaggcgttccttgagtagcccttggccacactgctcacctccctgcagaagtcaaagccccagccctcctctgcgaatcccgaggccagcctggttggttaccttctccccttcgccctttactccaggccgtccagcatcaaacactagcctccacacgtggaaaagaccctgactcccacagtagactagtcttatgggagtcctggctcttgggccagg

SEQ ID NO: 22996 - DNA, 1601 bp, Artificial sequence
  DNA replication origin
aaacgggccggggttggtgtttgtaaacttgcctcggtcccggtgggggcagccgcggcggtggggttggcagggtgtgctggggcctggaggaggcgccgcgcggccagggagccagcgggaggccgcgcctggcaggtaggagcaagccccaaagaccgcagcgtcgtccgtacagacggcagcgcttcagtagctcgcaagccgtggggtgccgcgcgggaagggggaggggaggggaggaggggcgcgtggcgaagggagggggatctccgggggagggaggggaaaggccgtgcgcgcacaccgccccctgcccgcgcgtcccgccgcgtccccggcccgggagagggctctcggaggggacgcgggcgcgagcacgcatctcgcgcgcttctcggcactctccggctctgctcccggttggtgcagcgggtgcagaggctggctggccggagcgaggcgggcgacacgccgcgccgggcttcgcctgcctgtcctccacctccgcagcaagtttccctaccttcgggcggacggggagaacgcacacgtgtgggcactgccagtcccgtttctgcccgccaccgaagcacccagcgatggcccttgagctttcctccaccctagtcttgccgcctctgtaaagtgcgagcttttcgggccggcccactgggcacaaaagccccaaagggtctccgcccccttcttccattcctgagatggcaaatccaagcaactttccttttggcagagttcctccataggaggccccaattacttttgctcctgttggcttccactccttgcccaggagaccagttcctcctattgacctagaaagaaaactcttcttgactcatgtcctcgttctgagcttcacagagagcgcccagcaaaaaaaaaattcatatcgcacgttgtaatggcctgaagatgttgcatttagcagcccccctcttcctttctggtttcaggtttctgaaacagatcgtgagcttcatcaagagaattcaactggaaaaccaagactggtagactctctttttcttcagacaataggcaggagccaggcagagtccagggattcttggaacacctatcttttcttcggaggacactaagttctatttgaagacaaagttcaatatggcaacaggactgatgggacacgaaggagtcgctaccgtgatttggtgacagttcttcaaaacgacagtgtctcaaggaaaggtggacctaggaactcctgaacttttgggttgccttaagtgagaaatcagcatggctcaggtaaaaagctctagagtcctcctccaagataactgggaagcctgtttgcagtttcactcttgaatgctgccttagtcaacatattgaccaaccccagtgatccaagctctgtattaagcaccagggggagatctagaggaaggaaaggagacaggccacagcccctgccttcagggagcttccagtcaaatgaaggaggtaggctatactgcatcacaggcactgatgggacatttgcaaagcaacgtgtactcagtttacatttggtacattaagtgctgaggggtgtaagggagtgaatagtacgg

SEQ ID NO: 22997 - DNA, 1399 bp, Artificial sequence
  DNA replication origin
agcctcactctgagtcagcttgtccatccccttgcctccagtaccttgcttctccctgctctctccagccccctaaagaaggctgctgctagtggaggcttacttgtgaattcgaaaaacatgcctcctcctcaagatattttactccaacccaccaggtaattgctaaatatacaaactacagcaactatggtatgaatggcaccccctagaactgtgcactacacaaccataaggggcagtcctgttcccaaacagacctccaggctcagatccccgccccacctcctcacctggcagagtgcagcctgcagaatggcatcgaagccaccttcaggcgagtccagattgccggacacactctggcgccccacctcccgctcgaaggcttgtgcgtcccccgtcagggacagcacatggtgaaagctgaatggtgactggcagcgctccagccgggtggggcaggggtggcgcagtttggagggtactgtgctcacaaagggcagcaccgttttgtccacaaaggaaccaaaacctgggagaggagaggaatgaaggttgtgccagaagtcgcagggcagcaacagaggacccatgagagcgctctatgggaagtggggtggggaggacggtgatgggagagggtgcacctagggggcagggacctggtaactggcaagcaaagcagtgagaccactggctcagggaagtggcaggtagaagacattaagaggaggacacaacttcctgggcaaatgggaacttccagaaggcggaagaaggcccgggtataggatatggtagcagcatgaggcaaaggaaggaaatttgaatagaggagagttggcacagaatgtggagccagggacagtggcatctaggtcttgtccagggagacttgcatcagggcaggttccaggttggtaggcccagggcagctgtccaggcccagagagtgcctgagcacagtctctccagacgctgggtctcaggcctgtaaaacggatagtctcttgagtcctctccagctctgacctagaagatgggtgtctagggagagatgcaggaacgaacctgtggcctggctaggcctgtcaacaactgggagggcaagttggggcccttgtgagtccaggatgttggcagaggctagggcagtggttgaataggcaagggctaacagggcgggaggcagcgctcggctcaccaatgcgcacagaatgggtgacttcctgcagccggaccagcagagcgtgcccgagctggcgcacgcgttccaggtcgtccttcatggagtagctcaggtccataaggtagtacaggtccaccgggtatccctcagcacgaaggaagcggacctggagctgctggggctcccctagggggtgggcggcgggcg

SEQ ID NO: 22998 - DNA, 1104 bp, Artificial sequence
  DNA replication origin
cacacagggacccaggagaaaggcacacagtgaatctgactggacaagaagggtagatactgagtctgcacaaggcagagaggcagaggtgccaggctggagctggggagctggcgctcttgagatggtcaggtctgtgtctggcttctccagtctcctgacacctagggccagctgagaagccgctctaaccatttccttcccctgtggcttcccaaccagtcccagggataccagacatattggtggggaggacgcctcctcttctgttcttatcctttcctttccaaggagctgtgggtcttagtctgaccaccttcccattttggtgtgagcttgctggggaggttggcctaggaggcaaggcccctgtttttttgtggtagtgaagtctctaagatctcaacaggaagtctgtgactctattggggaggagaggggtaggtggctggggcaagggggagttgagataggggaggggtgggggactgctataggaagtggggctctgacaaggaagaaaggaccagagttccaccggtggcggttcatgcctgtaatcccagtactttgggaggctggggcaggaggatttcttggggccaggagttcgaaacaagactgggcaaaaaagcaagaccctgtctttacagtaggaaaaaaaaaaaaggcgtggtggttcacgtctgtaatcccagcactttgggaggctgaggtgggcgcacttgaggtcaaaagtttgagaccagcctgacctatatggggaaatcccgtctctactaaaaatacaaaaaacctgggcgtggtggcacatgcctgtagtcccagctaccgggaggctgaggtacgagaatcacttgaacccgggaggtggaggttgcagtgagcggagatagcaccgcagcactccagcctgggtgacagagtgagactccgtctcaaaaacaaaacaaaacaacaaaaaagaccggagttcaagggtagctgtggcgaggaagaggggagggaatcagggactcaaggagtggactggaggtgggggcattagaggtggccgggtttgcagggtgtttttgggagcggggcccagggcctatgcaggac

SEQ ID NO: 22999 - DNA, 1193 bp, Artificial sequence
  DNA replication origin
ttaggattatgtctgtatccatttgcttgtgtatatatggagagaatttgtgaccatgaattgggagaaagtatgtgcttgtgggaattcatgcttgtgtataggtagagggagctgttgtgtatgtaaacatgggagaaaggtactacccagtgcgggctgccataacaaaataccataagctgggtggtttaagcaacaggaattcatttctcctaatgttggaagctgggaagtccaagatcaaagtgctggctgatttggttcctcagttagggccctcttccttgcttgcagactggctaccttctcgctgtgtcctcacatagtggggatggggttgggggatgggggtgggaactgcctctcttcttgtaagcgcactaattccatcatgagggttccacccttaggccctcatctaagcctaggtacctcccaaaggctccatctccaaataccatcacatggagggttagggcttcaacagaggatggggtgggggtggggaggggtaggggtgcagagttcagtccatagcagcaagtgtgtggttagatttctaagtctgtgttttgggtggaggcattctgttcctgggtgtgtagtagcctatgactggacaggtagaaagggaaggggtggaagcatatgggcttgagggggactggaaaggcttgagctacctaagtggccaagaaggatgctagggagcaggtgtctccctggctcttcaaacaaagctgttgtttgtttatgctttaaagagacagaactcatggagcagcagagcaggaggggtgcccaagctgggatgggggcaggtctgcctctctcagtgtaagatggagggttagatcagtgtgggagcccagataagagatgggggcaaattcacatggaagcagagctacagatgcttagaggacccaggagaaaggcacacagggacccaggagaaaggcacacagtgaatctgactggacaagaagggtagatactgagtctgcacaaggcagagaggcagaggtgccaggctggagctggggagctggcgctcttgagatggtcaggtctgtgtctggcttctccagtctcctgacacctagggccagctgagaagccgctctaaccatttccttcccctgtggcttcccaaccagtcccagggataccagacatattggtgggga

SEQ ID NO: 23000 - DNA, 825 bp, Artificial sequence
  DNA replication origin
ggcggcgggcgctgggggagtgcgcacgccaggtcaccaagcccccgccaacgcgcctcgctccttggcaccaagcagtgctgtttacaagttcggatttttttttttggttccagagcagagctgctcaaatttaacaactgggaagctggaagagggagatggcaaaccaggagaccggacttgactttacttttgggtggggtgggggaagaatttaaaagtgtgtcatttaaagaaccgagaaagcatggaactattgctttgcaccaaatccctgtgaattcttaactttcctctcattgcccaataggatggggagttggggtatgttatatgttgtgggggtgctgagatggaaagaatctttcaggaagggcttctgggggctgggcagagaccctgtcttttttcaggcctatggaagaagccctttgggcttgactggccctaggtttttgagttttaattgggaccaataattttggcctctgggatcctggtggacacacaaagccagcttcaggcctgcccgcacacactttcagagggaagggtgcttggggggtggaggtgggctggatgtgtgtgtgtgtgtgcctgtttggaggctttggtgtcctggtgctgcgttggcaggctggggtgtttgtctggtggtagggctgttcccttgtgtggccaagtgctggctgttgtgtgtcagccttgtgactggtacatctacctccacggtgtagctggagtgagtgtgtctctattctggctgtgtgtctgtgccagaatccagtgagggttctaggatcccattgtaatatgcctgct

SEQ ID NO: 23001 - DNA, 764 bp, Artificial sequence
  DNA replication origin
tgtggtggggggtggcctgaagttgacagcggcagggcgagcaccattactgggtccccaaatatctatcttccccctccgtgaaatgggagatgccaggcctggggccctggaacccctttccagagcagtaataaaaagctggggactgagaggcagtaaaaatgaagtccagatgagaggcggctttgaagcttgggccgcagtgcctggcgggggtggggtgtggggaggggccaggagcgcagcctggaacaccccccaaatttaccctgggctgggatgtgctcgctgcctgggtgcggacggcccggggatgaggggcttgggggcacgctgggaagggtgggaaggggcgggcagcgggcggggcggcgggcgctgggggagtgcgcacgccaggtcaccaagcccccgccaacgcgcctcgctccttggcaccaagcagtgctgtttacaagttcggatttttttttttggttccagagcagagctgctcaaatttaacaactgggaagctggaagagggagatggcaaaccaggagaccggacttgactttacttttgggtggggtgggggaagaatttaaaagtgtgtcatttaaagaaccgagaaagcatggaactattgctttgcaccaaatccctgtgaattcttaactttcctctcattgcccaataggatggggagttggggtatgttatatgttgtgggggtgctgagatggaaagaatctttcaggaagggcttctgggggctggg

SEQ ID NO: 23002 - DNA, 1014 bp, Artificial sequence
  DNA replication origin
gtccttggtgtttccagcacccagtttcccttcaagccgggtcgcgatgtacgactgtatggaaacgtttgccccgggtccgcgacggctgtacggggcggccgggcccggggccggcttgctgcgcagagccaccggcggctcctgtttcgccggacttgaatcttttgcctggccgcaacccgccagcctgcaatgtaggtaccggagtccggggctggggtgtagggtgcaggagagggtgggatttactctttccgtgtgtaaagagtggaactgaggtgcaaggaggagcttctggccctttctatgtaaggtactggccctttaaacgtgggggcctcagcgtctcctttgcgtgtgtgcagtagtgtttggagtgtgtgtggtttttatggtgggtgtttagctcgaacctgtggttgatgccactccagagttcctggggatagggagagaccgaggtgtgtgggtagtttgcgccttcacgtccgtggccctggaaggatatgacactcaggaccgtgggtggcgtttgtaaagcccatgtgggaagctggcagtgttaaaaatatcgtttgcagagcgtgtgaatccctggagtgtgcagcgccttgcctaggtggtgtgggtgtgggagcaagggtctctccaccagtgtcgcctgcgacagctgccaggtccacatggcctgtgaggggatgtttgtggcgtgaggccgggagggcgtgtgcccctgcgtggctgcgggggcggttttggaaagtgctgtgttcgagagtgcatcctgtgtgttctcatgccgggtggaaaaggttgtgcacacaagagggagaaggctgagttttgtacgccacccccatataaaaaaagaaatgtttggaaacgtgtatgcggttatatgcagagattactttttcctatggctccaacacacaacaacttcagcaggaagcgaaaagtttaaagcaaagtctgtgtgtgtggtggggggtggcctgaagttgacagcgg

SEQ ID NO: 23003 - DNA, 807 bp, Artificial sequence
  DNA replication origin
ttcccagccccggcagccccccgcccctcccccgcgcccgccatccctcgcctactctggcaccccttcctgccctttattcttccaacaggcgccccactcctgcagcaccccagtgcgccccccacccggtacaacagattcttagaaaagcgcgccccgccctggcccagccacagccgcctggcgggggaagggccgggccgggcgccgctcccgctccgcggcgctgcccgtgtgagcggcgctgacagagccggctgggcaggcaggccgggcggcccggcggctgagggcggggcgcgggggagggggggatttccgggagtcgccgctgctggcgctgtccggggccagggtccccccattcggccctgccgggccagggcaaacttctgacgtggccagccccccgcccacctcacccccttctccgccgggcgagggcgctcagtgccggaaggggcaacccagggaacagtgttgcggccttggagagctgaggggcactaaccgaagggagggcagttatgcctaggctagagggtatttaaagaccctgagaacagtcagtgaccagaagcgcccctattgccgagggagcccttggcagtgagaaactggaggaggggagttggccatcaggggcagattcatcgaggcgcagttggcacggcaggcacagcttatggggtagttttgtgctctaaaagtgaagttatgttcgaagaaggagcatcgagagagacggtcgaggcgcttagggggcgtcagttgcgggataaggcttcggggactcggagggag

SEQ ID NO: 23004 - DNA, 739 bp, Artificial sequence
  DNA replication origin
aagtgggaaggaaccaccctccccacatgaatgtacttctggcagagaaccctacaactcagcctcttgggacttgattttctcaggttctgggagaggcaagtaaaggagatggagtggagagggagaggagagagaatggtagtggggataatgctagagctagtacccagtccccagtgacgtcccccttgcgcccctgtgccatggacacactgagatcaaggtcagggttcaaagtgagattaaggtagggaagtggtcaggccgggctccatcttcgaaggccatgctgaaggagggggctgaaaggagaaatccaagggaggagccagagccagggcaggtagctggggagggtgcggctagcctggaaggacaggcctgggcagggaagtggcaggaggagggaggaggggaaggcttgggggtgggttgctatgcggctttaatgggggtggggcatgcagcacctagtggtagcagagaggaagacataggggagacgaagagatccaggagtctgggaaaccttccagagtgggagagtagcagaaggatgagagagtgtcctctctcatttctccgacctgctgtccctttttggctgggagcatctagtggagagggtttagaggcttaaatctgatgccaaaggcatactcacattgagtttgtgcatctcatcaccctctcccttattctatggatgacacacacacattctctctcacacata

SEQ ID NO: 23005 - DNA, 804 bp, Artificial sequence
  DNA replication origin
ctctttctccctaggacttttggaggcccagtgggcaggccaggcagggcgggtacggagcctcccaggctggggcagtgggcatgggcaggggctgtggctgaagacctcgcccgcccactgcagaccccaggggactctcacaccgcagctgccatggccaccaataaggagcgactctttgcggctggtgccctggggcctggatctggctacccaggggcaggtttccccttcgccttcccaggggcactcagggggtctccgcctttcgagatgctgagccctagcttccggggcctgggccagcctgacctccccaaggagatggcctctctgtgtgagtctcagggatcttggggaatgaaggcaaatgttaacaagaaggcatcaggagggtggatggtaaaagagttggcaccccagttaggaaggcaggcaggggacaggggtttggcctaatggagtagtagtgaataatggagggtggtagtggtggtgaggaaggagtttggatgtggactcaatggaagtgtttgcaaatgagagttctcctgtcaaataggatagggaggtagcaggcctaaaacttggggggtgggtatctaaaactgcctcctgggtcagtcaactagtagaggggaatacctttgtgtgggcagctgggggtgggtctggtgcagcgtgaatctgctgcttgcttgcagtggggagttggagggagccaaactgggaagcagaggagtctgggaggccagtcacctggctctgtgatcaagaggtgaaattgggttgggtgcagtg

SEQ ID NO: 23006 - DNA, 1012 bp, Artificial sequence
  DNA replication origin
aaactctttagcccagtgtcttcgcaggccctaaaagtctgagctccaagcctccagggtccctctccttttccttctcctattcccctccgaagttctcatccctagttaagccctgatggagccaggagtttgggggcccctgaggcccctgggccacagctcaactggccaggccacattccaggtggattaacccctccaatgacaagggtgagaagctactagaggactcccccatccccatgttccccagacttggcttagactgggaacagggctctctgccttagccctccttgtctttgcttctcacctaccaatgggaaacacaggcaggtagggcagtgggggtccccacagagggatgctcagctcctgatcctcaccaaggaatgatgctgcatgtgagccaatgagagttgtccttggccttcctcttattttgcctcagagaagggacttgggagttgagtgaagagaggaagggggtagagattcctcccatttctgagccttggttctgtcgtggctgggaagagaaggggagggtcttaaacccagggtaggagaatggactaaggaattgaaggcagtgcagagtaaaaggaagtcctaaactgaggccccaggtgccttggttctttgggggactcatggaaagtagagaacattcttcctctactaagatgccatctcaaatggtggggcagcggggatgacagactaggggagaggggctcttacaaagctgcttctcttagagctgaggtggagttgaggggagggcatggatgaagggggctgccggatggaggggggtgtgtttccctgtcgccctgcccgctccagagcctggaacaaagctgctcttgtcggccactctccacccgctgcccccctcccctctgtataaacacgaccacctttttccatgaccccatctccagcctgggcagagaacccaggcatcctctgctctagcctgggcccccagcctgctccccaggag

SEQ ID NO: 23007 - DNA, 1378 bp, Artificial sequence
  DNA replication origin
acgaccacctttttccatgaccccatctccagcctgggcagagaacccaggcatcctctgctctagcctgggcccccagcctgctccccaggaggcagcagtgggccaggcttccttggcattgtgccatccctgggggagtccagacccttgagtctccacctctcatccccaggtgccctccctccaccctactagccccagggaggggcagtgcccaggaggcaggcaggcaatgccagtggaatgtgtgtgggcatcagagggcatggacagggtggggcagaggggggaactggaggtgccagttaggtggctttctgagccaggggtgggggtgtgccggggtgtgggggggcgtgccccatgctgcctactaggctgtaggccacagtgcgtgtgtgtgtgtgtgtgtgtgtgtgtgtgtgtgtgtgtgtgtgtgtatgtctgtctatatgggatacccaagctccaggctccctgcacacactacccccactcccctgtcttctctctacttgcctcaaggatatgagatgctggctatggtccttgaccccaactcagcatctgaccctaagggcagaagcctcagacttgaggattgggattccagctgcccaggaccagagccctaaagcgggacagtcatctcagtttcttgccctgaagacctcctactcaggctcccctgcccccaccaccactaacaaccaagcatcttcttacccgctggccgcctgcagagactggcttctacatactgggtcaggttgagggaactgggccgtagctgctaaagacagagaggcagcgtcagtggaactctgggaccagcactcctgggtccctgtcccggtcttcctgctctttctttgttccatttgggcttccctcaagaatactccagaggtgccccccaccttggctggagggagccaaggctcgcacctgggctgggaacgtgtgggagggaatccagcgcttcaaggaaagttcacagatccctatcctatgcaccagtccttcggaactcctggacgcggagggccaggctcacttgcctctggacgttttccttgccttctgatgtccaagctgtcccattccactggggagggaggaacttggaccagcatggaacatcaaatctacccctcagagcccgggggtaagggggtggtagtctttccccgcgagaggaaaccctgtcttctctcacattcccagcacaaaaatataaggaggaatgccccctggctgaagacttccccaaatgctgtcctctgctatgcaccaaaatgaagggcagatgacccagcccatcctcagcctgttaaaatcttccccattcccttcccacagcaggactggcctg

SEQ ID NO: 23008 - DNA, 1040 bp, Artificial sequence
  DNA replication origin
caccttccattccagaggttgcagaggaagaggttctggaaccagcaggagcacatccagaaactaacttcaaagcagattccccctgccacctctccaggactggggaaagccagctgcctctacctgcttgagggaggggtccagctgatccctctcccactccacccagctcctgcctccttgccagggcagcagtacggaagtgctccaggaaactgacagtctcctggtgggcaacagtccacctaaatgatcagacagcgcccccgagaagtgcgttgttgtcccctgaagcagcagctacagcagccaagggagcctggaggtccccaggcagccccttggccacagctacagctatcactgcagcctaaacgggagctcaaacaggcagctcggctcatggagcaagggtaaactgggcagggtgaggggtggcagcaggtcaagggtggaccggagcatgagacacaggagttatggggacaagtcaagggaggacaggcagggcagcgggggcaagagcaggtgcagggtgggcccgggaggctgggacaagcggggcagggagctgcactagagggacaggcagtgcaggagcatgggggtgggggacagccatggcaggggaaggcacaggcagatgggggacaggacagacaaggagagccagcaggtggaccatgcctggagcaggcaggaggctcttggtgggcaggcttcttattcctaggccccaagcgtaggcccagagagaagtccattcagctgcagttgtggccaggctgggggctgggtgaaggggaggacagggatggagtaggaggggcggacggtggggggcaggattaaacctaagacatgctgagccttgctgatcctgcagggagctcagccctccacatccagccctccttttccagccctccccttccaggccggcaaagctctcctactacccctctcccctgaaaatcctccaacagcaccagatcagaacactttcttcaaatatgacatgtactcccaggcctcca

SEQ ID NO: 23009 - DNA, 1687 bp, Artificial sequence
  DNA replication origin
accttctcggcttcgggcagcggtgctgttccttaggaagctccaacccttggctctaccggactgcgggcatctttcccgagcactgcacggaagaaaagaaaattggcacttatttcagggtggcccctcaggcatccaagagccagaggagcaggtgtcacgggatggcagcgagcgaggccaggccaggagaagcaaccgcagcctcctatggtcgccccttcccgacccaccccaggcgtcaggagttccgcgcccgggtaagggaaggagggcgggcgggcggggcggggcggggttttggcgccgcgcccccgtcacgtgatgaagccatcatggcggcggccagaggcctgcccggctcccggaagcaggctgtgaggggcgggagcgctgctggaacccgagccggagccggagccacagcggggagggtggcctggcggcctggagccggacgtgtccggggcgtccccgcagaccggggcagcaggtgaggcggagtctgggcgaggtgcaagtggatgtggcagggctgggcaggggctagggggcgcagtggggtgccagtgacctggaggagtgggcctctgagatgcacacgcatgaccctgaagcaactcgagaggcctgcgcgggtgggagggatgcccgggacagaggatgagacactgagggcaaaaagaggctccgcagcgaggacgggaggtaatagaaggaagtgtacgggagctgctgtgggaaagggcagtagaatttgcgggagcgggattattgaaagggactccctcttcacaggcaaggatgggttgagtgcccagtcctctcccctgtcttcttacccctccctgccccacagtgtcctaggagacagctttggcgtggccactcctcccacccacccaactggtccctccggtctgagatcttggggagtggagttggcagcggggttgggtggagctgccatctgcttaagacagccccttgaccgtgctgcccgaaggatggatatggctctgactcccacctctcttcccaggtcgtccgggggcccaccatgctggtgactgcctaccttgcttttgtaggcctcctggcctcctgcctggggctggaactgtcaagatgccgggctaaaccccctggaagggcctgcagcaatccctccttccttcggtttcaactggacttctatcaggtctacttcctggccctggcagctgattggcttcaggccccctacctctataaactctaccagcattactacttcctggaaggtcaaattgccatcctctatgtctgtggccttgcctctacagtcctctttggcctagtggcctcctcccttgtggattggctgggtcgcaagaattcttgtgtcctcttctccctgacttactcactatgctgcttaaccaaactctctcaagactactttgtgctgctagtggggcgagcacttggtgggctgtccacagccctgctcttctcagccttcgaggcctggtatatccatgagcacgtggaacggcatgacttccctgctgagtggatcccagctacctttgctcgagctgccttctggaaccatgtgctggctgtagtggcaggtgtggcagctgaggctgtagccagctggatagggctggggcctgtagcgccctttgtggctgccatc

SEQ ID NO: 23010 - DNA, 934 bp, Artificial sequence
  DNA replication origin
taagcgacaggtagctgagaaactgagctctgactggaaaaaagggggaaacccgcacccccaagaggccctaacgcgcagagcagcaagaccctccggggcgccgcgggagcgcgcagcgcggcgggtaaactacaactcccagcgtgccgcgcgcccggcgttgcgccgcgcccgctgattggcagccgcggatatttgaaaggagggtctggcgcggaaaacgaaggttacattttggatcctcgcggagtactggtcaggcggttaagtcctgtacctaggaaagagggcgagctctggggcggtaaggccggaagggactcgtgagcgtgggtacgtgctgaagtgaaggggatccccagcgctgacgcgaggagaggcgtgggtggctcctggagggagtgtcgggaggccttgggactgccccgggccgctgaagggctgggccgaggcctctggggtagcgcggcgagtggtgtggtagtgcggtcggggatctgcccggaggaaggaagagcggaatcgtccttttataacgggagcacggcgtcctggcgtgggttttctccccgatgaaatttctgatgtgattctttgcctccttccacgaccttcagccctcttcccttcctccagttagcttcattaacaatcttctctaattggtctccttttccctagctctccggtgtcatgaggagcttcaaaagagtcaactttgggactctgctaagcagccagaaggaggctgaagagttgctgcccgccttgaaggtgggggtgctgcctggctcgggatacacctggctttccaaactgagctgttttgtgtttgccttttgaagagatggataagtaggcgaccctctctgagtaaccctatttctagttactttctctacctctttcctgcctttgctagccccattca

SEQ ID NO: 23011 - DNA, 883 bp, Artificial sequence
  DNA replication origin
gtccggtgccagctcccgcccgccgcagcctcgcggtcctcccctccccaacccttcggcccctttcatcttccctagactccgcttggggttttgctggtttctgggagataaaaaccgcttcaaatagcggcggcgcgctgccaggacaaacagggccgggcgggccatgtgcgcctggttaccggccccgggtcgggacgccgggctccagcgggcccgggaaggggtagcgggcggagctccgggcacccaggctccggtgacgactcccaaagtagggggccccttttagaagcggcctgcgcgctctctcggttcccgcccaggtcgtagggaggggccggcggagaccgcccgctaagcgctcggagcccatagggcgtgggtcacggtcgctgcgttgcctggccagccgcgccccctggtgaagttactgggtgagcgcgccgggcctggacttgggcctttctagaacccgcaaatggtgaaaagcgttccacaaacgttaaataagcagtatggaggaggggacagtacttgtgccaggccagggcgggggcagcgggcggaacagcactgttccttctctccagttcaccttacagggtaagaagcaggcacctaaccgatcattataacctgatggtgaaaatcgaggtttcatcgaaggatgcaagttgcaggccggagtgatttttcctaggggtatctgggtttggatggtgttacgactaaggtacaaacggaaactatcgtgggtcctcagtgctctccactaatctgtcagtcaccgacttcctctccctcaaacctgcccacttccccttctcagggaggctttcccagccaggttccccaaaccatccccagtgtatacctt

SEQ ID NO: 23012 - DNA, 1411 bp, Artificial sequence
  DNA replication origin
ccagcccactaaagaagtcttcggaactcggatttcttcaaagcgcctttgaagtcgcgcgcccagccggagggcaggagatttcgcacctgggcgggggcgggagtggcgtcagggtggggagggggctcgtaacccgagcccccccaggatcgccggccccctcccacccgtagcagcccctcttgcgacccgtgcggtggacagtccgacgcggggcgcagctgggagtcgggcccaggccggggggagcggcctgtgagccccctcagcccagcggggtaaccttggggggcgggggccgcacaaagccctattgtggctcggggatgctgccacagagtggtttttgttcttcggctaactccgtggcgggcacgactgattgcagacccagggcagggggcgggttacgtgccaggcccagtctgcccgccgggagccgcaccaccgcccgactggggccgcgcaggagtccgcactgcaaccgcggtgcccgcgctcgggtcgcgtcactgccctgaccagggtcagttggtgcagtccagaaagggccagggtagaaaccagtgagtcttcccaactctgcagaaagcactgcacgcccaaaaactgaacaccgctggaggatttgaccgagaaacaattttgttttgtgttttgttttgagacggagtctcgctctgcagcccacgctggagtgcagtggcgcgatctcagctcactgcaacctccacctcccaggttccacgattcttctgcctcagcctcccaagcagctgggattacaggcacctgccatcacgcccggctgatttttgtattttttagtacagacagggtttcatcatgttagcgaggatggtctcgaactcctgacctcaggtgatccgcccttctgggcttcccgaagtgctgggattacatgtgtgagccaccacgcccggccgataaactattttaccgcgagcataggtgagcaaacgtgcacaatagaatattcgcccatgagtagtccccaatttgctaaggaaaaaaaaccattggccctcgcttcacccttcctcttctccttttctcaccaggacaaaatttcaaatccaacttttatttattaaattaaaaaaaaaagactccacaaagggcatgatcccttccattccacaatgttctctccccaagctccagcggctttaaccctttaacttggggccttgagacagcaggggacagaaaaggaggatccaacgttacaggaaaggcacgaagcggctttaaaagtcactggaggtggagatgggagcatccaaagtcccagggtgggggtgcgtggatgcaccaccagatcagcttgggggcctctgtcctcctagctctttaagttctttctcagggcttctaggcaccagat

SEQ ID NO: 23013 - DNA, 991 bp, Artificial sequence
  DNA replication origin
ggatattagggatccccctaatcaagagataccccatcaactgtttagcagagatgtagctaacccaatttgtagagacttcattacaagagaaaccctatcaactgagattctgatgatagacattctattaacaagatcttctccactaacattttgtctatacagagatgcatttgactagaatttccttagcagaaatggatccacttccctccccagctcactctacctgacccgtcatcataacttacataaatagaattattactattcattactcctggtacataggggttaaatatacaggcctgggggcagcctccctgaccctggggtcaccccatctttgggatcagatccccactggtctgcccccctcttggcaccctctggccaggtcactaaccccaatacccctgatgaagaggccaccagggggcaataaattatcattatcattgtgtttgtaaaaaggaaaaaagagttctggagaatggaaagcaatggtgtaagaagttgggaagactgaagcctggaggctgagggacagcaggaaataagcttgagaagcagaaaggggtacatgtcaaggagtgagatggagaaatagtgttgggagcccaaatagaaagtgtgttggtgtggcagggccagagtctaggaagccggagtgcaggtatcaggcacaaggggagggcctgagatgagagtttgtggaaagccagtctcatggtgaagagagaaggtgagctgaggaggcatgcaaggagatacccaagcccagaatggccaggagggagacagagggagagagccccgaaggatggcatgcatggggtaaagagagtgattggcaagcagtggtctagagagccaagagagactgtcagggcagccctggggtgggagaccttccacccggctcagatctccagcaagttgctctgctcagggctgcctccaggggctttctctggggttgctggcg

SEQ ID NO: 23014 - DNA, 757 bp, Artificial sequence
  DNA replication origin
gcagaaaggggtacatgtcaaggagtgagatggagaaatagtgttgggagcccaaatagaaagtgtgttggtgtggcagggccagagtctaggaagccggagtgcaggtatcaggcacaaggggagggcctgagatgagagtttgtggaaagccagtctcatggtgaagagagaaggtgagctgaggaggcatgcaaggagatacccaagcccagaatggccaggagggagacagagggagagagccccgaaggatggcatgcatggggtaaagagagtgattggcaagcagtggtctagagagccaagagagactgtcagggcagccctggggtgggagaccttccacccggctcagatctccagcaagttgctctgctcagggctgcctccaggggctttctctggggttgctggcgaggcagaaggtcggggcgtctgactggcctcctcttcccccgtgctgcggccctcccccagctccttggggccactgggagggggacccgggcctggttctccatgggtgcgctggtgtttgctcaggtggtcgcttcgggtaaagcgcttggagcagagcaggcaggtgaacttcttctcccgggtgtgagtgcgcacatgacgctccagctcatccgaacgagtgaacctcttgccgcagaagagccagttgcagacgaagggcctctcgcctgtgtgccagcgcaagtgggccttcaggtgcgaagccttgccatacaccttgccgcagccaggg

SEQ ID NO: 23015 - DNA, 1007 bp, Artificial sequence
  DNA replication origin
cccagccgctctagctcctggcaattagggcagtcgcaggaggagcgccctgccccactgcccccatatccaccactacccccagtgcttgcaccccgtgggggtttggctccaccactcccttctagctgcccactatttcccactgccttgggtttatagacatcttggggcaagacatgctggggccctggttgcaagaggtggggagctgggtagggggctggattaaggggagcaaagtcagatgggtaggtgggcagctgggggttcagtggaggctgagctggacctgtgggcagtgtcccttgcagcccatcaccctggccctgcccaccacctagccagttgcctccagggtgcatatcccaccatggagtaggagtgttgcctgggcctggtgaaatgcctgcatggatgcctgccttgtaccaggagccataggggtgtgtcatgtccagagaggtgtagacactgggcagacagtcagaagagctgtgccccttgggcactagtagcccagggtcctgggtgcctgtgggcccagggaatgagtgggaaaagggagggtaatcattagcatagcctgaggtgggtgctggaggactgcctgcaggtgaaaggagcccattagtgcttgtaaagggggctggataagcatcccccatggttttggaggctgaaaggtcactgcccacagagtacggcttctttgtgcctgctttgcccagagttgttgagtcccgcagagggctagagccaccaaatttgctgcacgctgccgtcagcatggccaggggactggagccatagtgaacttcctcctgtggaaagagggacgcactgcttagggagaggggaggagaggtacaaaatgaagggcaacactttaggactgagacctagagacatccacaacagaacagaggggtcagggaagagttgaagagggtggagaattacaggtaaaagaggttagccagtgagggctggacctcagggcagac

SEQ ID NO: 23016 - DNA, 794 bp, Artificial sequence
  DNA replication origin
taccccccccaccccccggctcagctctctccatctgcctggctccttgggacccgttccccagcctcaggatggcgtcctccctgcttgaggtaactgtcccctcttccccccaggaaaccagccacaaccttaatggtcctagtccttgcccacccacctcctccaactcacatagatagtagctgtggtgcttgtcaattccaggggtccttctgatgaggagagaggagtggggtccaagaaaggggaagcagagggcaggagaaaagggagggaagaatagggccaggggtcagagggcagtggaaagagggtgagaggggattaggtcagaagaaggcatggacccctacctaaggtcagctaagcacactgactgtgaggagtggaaaagcgatggagaaaggagggggaggggggcgagggggagtgaggagagaggggtgggaaatacataagctggcagaagagatagaaggcagagaggactggctgagtgggcacagagcagcaactgggtatagctctttaggggtcccgtctcctgggactcgtagcccagacaggatcttgcctggttttgtggggagggggctgggcccgtgagctggtgtgtggaggagaggaggtaggctatgagagaaaggaggaggccagcctgtgcctgtgggggagctgaccaggggaactgagcccaggcctgtgagggaaccaaggaggagggacggggtctgaggccgcttgcccggcttacaaatatttagctttcagccaaagacaaactcagctct

SEQ ID NO: 23017 - DNA, 791 bp, Artificial sequence
  DNA replication origin
cccctccccctcctttctccatcgcttttccactcctcacagtcagtgtgcttagctgaccttaggtaggggtccatgccttcttctgacctaatcccctctcaccctctttccactgccctctgacccctggccctattcttccctcccttttctcctgccctctgcttcccctttcttggaccccactcctctctcctcatcagaaggacccctggaattgacaagcaccacagctactatctatgtgagttggaggaggtgggtgggcaaggactaggaccattaaggttgtggctggtttcctggggggaagaggggacagttacctcaagcagggaggacgccatcctgaggctggggaacgggtcccaaggagccaggcagatggagagagctgagccggggggtggggggggtagagagagaaaagggagagggagggagaatgggagaatgggagagaagagatctaaagttagaagggaccggggtggggggctgctctctgtctgtagggatccaccctctaattacagctttcccagcggagaaggctccagatccaatgaggagggcgagagagggaggcagagggtccaaatttcctgctccatttgctgagctccccaaagaagggatcagggagggagaggagaaaaaggggcgcccatggaaggggtgggaagcaggaagaggggagagcagcatgggcaagttgtcagggcttcctcggggggctgctgaggggagaggttaaagggatggtggaccccggtgtcctacacgcg

SEQ ID NO: 23018 - DNA, 794 bp, Artificial sequence
  DNA replication origin
gaaaaaggggcgcccatggaaggggtgggaagcaggaagaggggagagcagcatgggcaagttgtcagggcttcctcggggggctgctgaggggagaggttaaagggatggtggaccccggtgtcctacacgcggcagcagtcccataggcatctgtgggcacccctcccagagctccccagtgtcatgtacctgggggaacctggggctggctgtcccgagtctctcctctctggaggtctggcagggagagtgcaggcaacgggtggcctgagggtgctgggagggatccgctctctcccaggccagctccactcctgttccactcaggctccggtcctacagtcctactctgactccagagtccttgctgctgctcggcggctgctgcttctgctactgctgctgcctaggctgctgccgcccgccgctgctgagggaaggaacaggagggaaaaggaacaaaccccaaaccactaattagagatccaggggggggatggggggttggggacgacactcacacagagagactggaacgcactgacatacacactcatggccaaacacaggggtgatgcatgcacacgtacacacagtaccactcacatgggtacagccactatcatgaatgaacacagacggacacacacaaatgcacacagtgacgcactggaggcacacgcaccacacccgccccagctgaccatggagaggcttgcttccccagtcacccacctgcctctagatcaggagagcagtgtgtatgtgcccctgtgtgtgtgtacgtgccc

SEQ ID NO: 23019 - DNA, 1118 bp, Artificial sequence
  DNA replication origin
atgagagactggcaggctgggggccaacgggatgttggcaccgtcgggacctcgggcactgcaagatccggaggaagaagcttggatgcagcctcgagaaagctacggcggaagaggcaggactccggtcctgggttcgggcggctgagaaaggactgggccgggcagcggggggcgctggctgggcggaggcgaaggggcatccggagttcccccgccgccgccccctcccccgggctggcgctccctctcgggctctaatcggcgcggcggccgcagcgggcagagtcagcgccgccagtctccgggacgcgactcccagcaattgtggtcgggaccgcagatatgcagctgcctcctgcccgggcgcctggcccggccggccccgcccgcgccccgccccctgccgcccgcccctcggccgcgccgggacactgaggcacgggatggaggcgagatccccggcggccctgagcctggcctaggccgcaagagacctcccagcagccccggagctcacgacctgtcctgtccttctgagggtgcctatctcccccacagctgtggctgggggctaagaccccccaaatcctgcctcagcttcaaccgtccttcttgcctcacacgtccacgcgaggtgggggtggatgggggcattgaacagcgctttgaaatccagaggggggcgtcccattgaggctatgtggggaggaggtgttaatgttggtagctgagtcccaaggaccttcattaactgaggcggtggaaagtgggcctaggtaggcttataacttacagcgggttcctatgtaggggaggtgatggaaggtggggagagggagaaatgggtgaaaagggggaaaggaaatagttcaggagggattggggcagagggcagaggcgggggttcttctgggagactgagggccaggtcctcagatactgccctggcccttcactgttggccggatccagcaactgtcaagagccattctcagaactgaatagatacctctaaaatgcctgcatatcctgtgtgcaagtgcacacatcaacacacagatcaagggaagtcatgtgtgactactcacccctcacatctgattggacaccaaatc

SEQ ID NO: 23020 - DNA, 1108 bp, Artificial sequence
  DNA replication origin
gtgtcagcctctgtgtgtcagggcaggggctcctgtggtgtgcctatgtgttgggagggggtgatggtgagagcctggctccctctcctcctcccccatcccttctcccatctggccttgatcagccggtccctagggagggagccgcggtttcggatacaggaaaatgttccaggaagcggccactgtgctgggccctgctctggctcccccagcggaaattgttccaggagggagggaggaagggagtgttgagataggattaagggaggagtgggttggttcttggctcccctttccacaggataaagctggataagttgatgggaagctcaggtcagccaggaacctggatgctgccactgaaatcactgaatgcaggaaaatgggccagcaaaagagggtccccttgcctatctgcttctctttttaatgaagtttcagtattgggacgagggtggcccctgagggtccctcttctggccctgctatcatgtacacaagctggagaccagagcacctgggtcttgtctgaaagtggtgtggcttggtggggaggtagggggcatacgattcagctcccttttctcccaactgagggggctttgaagcttggatccaggactgggagggctgcctaattgggataatggaggttaatggggcgcctggagggggttgccacgctcctagatcaaaggggccagctcttcccagccaccacagctggaggtcacagctggagggggagggggaggggcttcgggccagccagcagggggtgctccggccctggaaagcccgtcctctgagtctctgattctcttcttcgcttggaacggcttttgcttagagagtgcattggggagcggaggataagagaatgggggagctctgagatccctactcctctctgtgtggggtgatggggaagagaaagggcatgagagactggcaggctgggggccaacgggatgttggcaccgtcgggacctcgggcactgcaagatccggaggaagaagcttggatgcagcctcgagaaagctacggcggaagaggcaggactccggtcctgggttcgggcggctgagaaaggactgggccggg

SEQ ID NO: 23021 - DNA, 1711 bp, Artificial sequence
  DNA replication origin
gaccagagggcggaccaggcaggcggttggcccgggcggggccttcgctgctcgggccgcccccgcggctccagcccccggcgggaggagcctcaggcgggcggccgagtagtggggggtaaggcccgtcccccgtggccggggcgggcagggggcgggcgaggccacgctgccccctcccccggggcgggcggcccatccccctcctcctcggaggccccgccactgccccgtctccctcccttccctccgccccgggcgggacctaggccgccgccgccgccgcctcccgcccgcccccgcttcacggcggggatcgcccggtcggccctcgcgcgcgccccctcactcgcctcccacccctaagcttggagtggactcatccttaccgctcatggtggcagctgagggacaagctcaagggggtcctgtccgggggggttggggggggccgggaaaaacgcggacgctgacgaggcaagcgaacccggaccggacagggaggggggggtaaggaggagggagcagcgcgccacaagcccaacctaggccccgccccttctctgctgccccgcccaatgagggagggggaaaggagggacttgcagaagaaagacggtggaattatccaatggcaagactcgcttgctctccaaggcgtgtgagactaagttgcgtgcctggtgtccgcctaaaaagaccgccctctcagtgttaaaagccaatgaaggatgcaggaagtgaagatgggcgggagctggagatgattggcttggaaggaaaccagtcaaccggcaggcgggctccctgagacgtagggataggcaaagctttgataggaatgacagaacaacggccaaccagaatccgggatatgcttgggcaaaatcctagtgggcggagaggtaagaagtaggcaggaataggagaggatgaagctgattaaaaccaatcagaaatcaggcgggcagccaggaacgttatgattggagttagactgaaaagagacaggaaaggacgcatattgacgtgaactaaaagccaattaaacgccgaattaactgagggcggaaacttggagtggcagaggagaattggcggctccctcagttattcaatccaatgaggggacgaagtaggcctggcaccgcctcctagttagccaatgggcgttactggagctgcccatcatgagggagggaagagggctatgccaagaggagaccgtcgccatattggccctcctcaggggacgttgttacagtcattaggtgggacgctttagcggagtcctgcagctcaacaggtgtcagagccaaggcattcggcgcgcagttccgcatcaacactaggacttgtttgcgtcttcatttaactgcccctataaagtacctctcaaatcttacccccctcccgggtggtcggacaggcgggcagatgcctcaatgtcgctgcaagccctgggaatgcaggcgggacgagatctggtgacagcactcaccgaataagttaatactgagctgaccaatatgcagagtctccgtgagactccagaaaacgcgattttattaagttcccccagacaaaggcgctaaccacttaaacgactggttaacttttcaagccttgaggctaaagtgcggataagtcacttccattttttcccccttaatagtaaataccgcctatgcataaagcaagatagctgagc

SEQ ID NO: 23022 - DNA, 929 bp, Artificial sequence
  DNA replication origin
cgccaccgggaaaaggcggggggaggggggaataggccttgcgcgaggcctactaggccgcgccagagccagggcctcgcgtgaatgaccggcctggcacagtgaggtggtaggcgctcacgcgggactacgcgagaccgcggctcgtgactaggacccgagccggctaagaagaagacaaaagtggaaattgtagccatagccgggggcgcaagggaaatttttaggcttacctgcaggcgcgaggcgactgaggggaaaaggggagcgggcgggaaggggaagggcgggaggccgggggcggaacaataggggcgggcgggaaggcgaggggggccccgcgggcgggcggaggaggaagggggggtggaggaggaggaggaggaagggggaaagagaccccggggcgggtggagggcggcggagggcgggcgggcgggcggagggcgggcgggcgggagagggcgcaggctgcggctgctccggctgctgcctctgctggtctgggagggggacggggcggagcggcctgctttcaaccccgcgcacccttcgaccccggaagcgctaaccaccccgggggccggcgaggcgattgcgtcgtccaagccttccccacgcaatgcagacggcctcccaaaagcctagagcggctcctttgacagcgtaggcaccagcgagacaacggctgctagcaagcgacgaattgcgatagagagggagcgtgggggcagaaaggaaaccagtggcccctagtggactggctggaaagttcagatgttagtgcggagagggagcagtcgccatgcatcaagaagtggagaggaggaaaaagggatgggtggaaagagaaaggatgaagatagtaatctacagggatactcaaaaaagaaaaggaaaaaaactaacttgccacgttagaggtgacc

SEQ ID NO: 23023 - DNA, 1281 bp, Artificial sequence
  DNA replication origin
ccgcaaccccgggcttcgcttctggaccacccagaaacaaggcccaagactctgggacgctctcgcctggcaggccaggagggagggatggcgggattggagccctcggggaggagccggggccgtgccctggacagcttggtcaccagcaatggaaggacgaagcccaagtcaggaccgctgaaagtggggaggaaggggttacggccacagcgccccctcccccttcccgacctccttcccggccgtcacgtggcgcgtggctggggcgggggccgcggcggcggaagggggtggtccgggtggggaaagggaagggacacggccggctgggggaagcgctgggcgctgcggcgtaaccatgacgactgggcctgaggcggcgcgtgaagtcaccaggacaagattagccccggatcacgtgagcgcgacgtgggggcggggctgtgcctgggccccgcccctgacctgggccggcccaggtggctggttgccgggatggctgcgaggatcttaggtgcggacccccacccagcggtctgccccatctgtgttcccttccttcccctgcccccgcatgcagagagatcttcggctgaggcgtctggtgttggcaggaggggacttgtggggttggcattgggggtgcagtaccacagggaaggaaagcaggaaatgagagaaagggagacagggcacagaaaaggcgaaaggtacagctaggaaggaggaaggagctgagacatatacagacaccggagcagcgtcaagcggagtcaaccccgagaaggatggcttgaaaagctgtttggaaaagcagaggaccctgagaaaatggagatgaaaggggagtgagaaacacggagaacacccatctccttttctgtctagaagccgagctttgagtaggcacagcacctggctttttaaaggaatttttcagccgtcatctggttgtttgacgactaggtggtttaggcatagaaagggtgacatgctcagagacacttgcagccagccgagcctccctccagttcaccaggcttccccagaggcccttctggtatccagggccagcagctggggagagaaggagagaagccatttcacctgtttgtcttttacggtagtggggatagctgaagaagtaggagatgggaccaagggaaagatctcaggctagttgacggctcttccacattgacctggagtgagggaaagctgctgcccctgggagctatagtaaagtggagattcctctctcccaacacacacacacat

SEQ ID NO: 23024 - DNA, 1303 bp, Artificial sequence
  DNA replication origin
cgatgtagaaaggagtctataagacgggtcatagggggttcctgtggaatcagcctgaggcctgaggtgggacctccataggacaccgccagcagggaggcgcggggcccaggcgggccaggtacgagcctggagcgcgccggatggcagcagcgggctcctttaagaggccggcggctccatcgcagcatcccccgctcagggcgtgtccgtcccggggggccaggggcgggggccctggaaggagcgggagttcaagccgagcagggacggggctaggggtcggggggtgggggcagaaagctgaagctgacacccgtgcatccggacaccgcacgagcatcgcctgtgacagcgccccgggtccggtggagggcagcggggggaggagggaaggaggaggagaaggaggaggaggcgggagcagcatccggagcggagctgcagcagcgccgccttttgtgctgcggccgcggagcccccgaggtgagagcctggccgagttgtgggggggtggggggcagggatgggtctgggtcctgggatccgggcgtggagggagggtcgggatgcagatgtggcctggtgcggggtgatggcgtggggatgctgaggctgtggggatggaggaactggggacctggacccgacgcctgtggggctgggaaggaagggaatggagcggagggatgccgcggcccagcttggagacgaagggcctccagagctggaaaggaccgtattggggtggggtggaggatgattgggggacagacttaaaggacagagggcaagagaacatctcctcccactcatcctcaggaagagagagagggaaggaggagggagagttttggccccctctagggaaggaaaggaagggcaaggactgatatacccaccatctccacacacacacacacacacacacacacacacacacacacacacacacacacacacacacacacacacacacacacacacacacacacacacacacagcaggctggacctgaagattagtcagagagcacctgttcctgcatgcccaggcgttggtccccctccccttcaagctgtgatcctcctaatcccctccagctgtggcattcacctccagctgtggcattcacctccatccagctgttgcatcctcccctcccccattcacgtgtgggtttctccctcctctttctctccatctcctctggctcccctaacccatctcccccagtcaggccctccaaaaacctcctccctttcccacaaacactcctcaaactcattggcttaaaaataa

SEQ ID NO: 23025 - DNA, 1328 bp, Artificial sequence
  DNA replication origin
tgctaaattacccgccatctgctccgctctcagacataaattacctgcgaggaggaaagacgcagaggctgcgcactttccttcctctcccccagacccgcgcaaggcgctgagggggtcctccctccggcaaaggcggagggacggcctgacaggaacagtgtgcacttgcctctgtcctcccccgagggacagtggcctggggtgaccgagaaacctggccctcccaaggtccccgggctgccaaggaggacccttcggccttagggcggagcctcccccgccgctcaggggaggtggagctcgttgtggtgggcggggctttctccaggtgggacccatcgcctaggcaggtttccccggccaccctcttccttctcccccactccctggcgcccaccactctgctggtggggaggtgtccccagctctcgttgactcccctcccagtatcccagaaagaagagaggagagcaggcagagggcaggaggagagagaaaagggtcacacccccttcctttcattctgctctgaactttgtccctcccccgctagattctgaagggtgagcgaggtgtgaaagcagatgtaggagagatgacttgaaatggggcacagtgtagggtgcagccggttagagcgagggagggaatgggaaagctatgcccactgccaggcggggttctttggggagatgggcaggcagcctgggtagggtggaaagtggtcaggctggggaagtgagcagagtgggaggtgggcaggaagagggggtcggagggatggaggcggggcaggatgggaggtgggagaagcgggatgaagactcagaaacgagcaggtagtgagtcgtctgggtgatgagctagaggaggatcagagtcggagagaggggagacagcaagacgtttagaagcagttcaggccctggaaggaatgcagggagcaaaggctatggcagggaaggcaagggtgtttgtgggtccttgcagggtcccaggaaggtgagggtgagagccccagagccacttcttgctctgtggccgaggcctgacttcggaggggagccgaggaggccacctatgcagcagggatgggcgccagccctccttctccaaccccaggcacctgcaggggtgtgcccatcagggtgggagacggagtaagccgagtcccagctctgagcgcagaagctagtggggtttcttcggagcgattgtttagtattcatggggcgacgcaatctctcccacatctgcttagcacagcaagtcctgtcatataactgtctcccgcactgtctgtccataaagaatgtctcggaatt

SEQ ID NO: 23026 - DNA, 938 bp, Artificial sequence
  DNA replication origin
tttaacactctatacctttgcctgaagttttaagttctggttttggaaagtggatagtggagacaaggggccgagattgaacagagggcaatttctcttcttcctctttgggtttcagcctacaaccctgtattcctagggtcactcagagttttaaaatcagggtctggtgacattcctggagaaaatggatctggagcagaccaggcattgtgcttctgggcttcttggaagttgcacctgagcgcagtccgtcagtgtcggcagggagatggattggcaggagccaggaggcaggaggcaggcatgatggagggagatggcatatttgacagatgctgacagggctcgttatttgctagctttggaatcccctcccacccaccaggctgcccttggccctcccctccctgcactcaatgctcattagtgattgcctgtctttgggggagaaacccagtgggccaagctccgtgggggtgggcaagggagggagaggaagaggaagaggaaggggcagggacacaaggcagatgctggataagtcgtggttggaatgactgggatttggagctgagatttgatgattactgggatgcttggcaggtgtagctggggatattgtccaggggccagatactgagttactgggggtggtgggtcgggaggcatattaaaaggaattgagttccactgatttaggcactgatttggggagaactgataaaataggagctgaccattttactggggacttactatgtacagggtaggtctacaggtgctatgaggggataaaagacgcactccacctatttcctgctccccttcctgtgttttgagacctgccacatctccctgcacttgttgctccatgtgtgtctgaggggtgcaaggtgctgccgggctggggatgtggagacaactctcccaagcag

SEQ ID NO: 23027 - DNA, 845 bp, Artificial sequence
  DNA replication origin
gtgtctgaggggtgcaaggtgctgccgggctggggatgtggagacaactctcccaagcagtttgtgaccttcccacacccccttccagtaaagctcctccagtcggcttcccacctctcctcattccttttctcttagaatgtacaagacatgtagatatctgggtgggagagggggcccttgggtgccctcccagaatttccagtggctcccagtggaggaactgggttgggggcagtggtaagccatactatcccgagaggccaggggagcaggcagggaggggatctccatttggagtgtggagaatgttcgatgaggaggagaatgctgcagtcagagaccgcgctgcatcctaatcagcgctgcggaggctgcaccgcgggccgtcaatcttccacacaaagggccgcccgccctcttccctctccaagccctccgcgccagcgcccccccaactccatccccaacactgcggggcaggaaaagaggcagagaaggggggagatgacggacacacagacagggacagaaagacccagtaaattgaagccaagatggacagagtgggacccataaggcagagtgggtcccagcactctggagatgaagagagacggacagagggaacagagacactgccgagtggaaagggaaagacagaggagagacagacctagagacaggacagagccaagacagaggagcatccagagagcagacagaaagatcgaagactcacacaaggccagagccacccagaaaccagccatagcagagcagtcacggacacagaggcatgagaaggtcccaggcccagggagaaactgaaagccatgtacccc

SEQ ID NO: 23028 - DNA, 1138 bp, Artificial sequence
  DNA replication origin
gatgacggacacacagacagggacagaaagacccagtaaattgaagccaagatggacagagtgggacccataaggcagagtgggtcccagcactctggagatgaagagagacggacagagggaacagagacactgccgagtggaaagggaaagacagaggagagacagacctagagacaggacagagccaagacagaggagcatccagagagcagacagaaagatcgaagactcacacaaggccagagccacccagaaaccagccatagcagagcagtcacggacacagaggcatgagaaggtcccaggcccagggagaaactgaaagccatgtaccccgagccaaaggcacactgacccagggccaggaccagggccagggccagggccgataatataccagaatgtatcagtagactgagagaagcagagaaggggagggagaagatgggtttccaaggagaaaggaaatgagagtgatggtggggaggcagtaagaagggtcaggtagaggttgcagggggtgagatggggattctgggttgagggctctgctggccttccagggcctgggactcaggtgggcggggaggcctatatgtgtgagtgtgtatgggtgtgtgtgtgttgtgtgtgtgtgtgagcaggaacctggcaattccaagctcttcaaaatgccagagttgtctggtgctgaaccagacagccacacaccctccctctgcatggacagcttggagcagttatggtggggtgtaggggagagaacagaagaaagatggaagttagagaaagactgagaaagaaaaagaatggcagagccccagcagagatcaaggggagagaaaatgatattgaaaaagggagtagagaaattggcagaggacagtcagagaaagacagaggtggagaaagaaatatgatggaggcaagaagtgtgtgtgtgtgtgtgtatatatatatataaaagacagggagcagagagtgcctctaactgcaggagggcgagaggggcacggagagagagggggctgttgagagggaggcagactaaggggaaatggggagggaaggcaggcagggcacctatctacctggagatgctgggctggaatcaacccagcatcatgtttacctg

SEQ ID NO: 23029 - DNA, 1657 bp, Artificial sequence
  DNA replication origin
ggaaccggcccgctgccctcgccccgggacgcccccgctccgcaccctgcaggcccggatcgcacccgcacgcacccccgaccccactcccggcccagccagtgctcggcgctggcatgaaattggctgcagccgtaatgagtccgcgccgcgcggaggaggctgagggcccaccagggagtcctgcgcgcctcgtttagcttgtttattgttcaggcctaattaaaacgttccaccgcgctgcgtttacatccgccccccactaatgaattcgcggccgccgggcgatttcggaaactgccgcggccggaaggggggtgggaggcgacagggctggggaaagagtgaaggagaggacacccacgcacaccccttcccactgccaaaggagccattagatctctggcgattggctccgaggtccgagtgagcgccccgagccccagcgcccccaacccctgcaggcgttgggaggtgcggaaggccgggccgcagggctcagaggaggggcggcgggagggaggccaggagagagtgtgtgtgtgtgtcctgtgcgtgcggaggcctgtgggccaggagggtattgcgcgtgggcacacctgctccgtgaagcgtgtccgcggagcagcctgtgtgcgcaggagtgagtgtgtgcgtgtgtgtgtgtgtgagtgtccgtccctttggctgctcatgtgcctttctcctccacagggacagtctgcgcggggcttacaatgttcttgtttctcccgccgtagctgtttgccgttttgctgtttgcctccttgtcacgacctcagcgacggcagatggagccagtggagggagagagacagacggcaatgcttgggtagccagggctccctgccggccccactcctcctgcagacacgagcacgcacacacacacgcgcgcaaaacacacacgctgcccttcgccacacgtagccaagtaaaatacacaaaaagcaactgagataccattcgcacatgaccacatggaaacacacaaatgaacaaacgcattcaggcatagccacatgccagtcacacagatggatagacaagagcctggggtacaaagccacatggcacaaagccacctggatgtatatgcccctacacacgcacacagaaaaaaacatgcaaacttaagtacacacctatccagacaagtgtgagtgcacacacacacacactcacacactctacctgacacgttagtgcatccccattgggccccagtttctctcagcaaattcagatcacccagcctgacttcaaaacctgcccccttccattccccttcatgctggttcctgaatccagctcgttgctccaggctagcaaagctgtccacagcctcatttgtggtttgctcacctgcctcagcaccatcagccagaggtactcctgctcttctcctaatctattgcatgccctgttgggtttctctttgcacacctctctaactcccccactcctagcagccttccctgatgaactaactggcttggattctgaatttgccctagtcatttgcacttgttgatctttgctgtggtgaatgtcaacggggtaactttgcacctataaacataatgttggcagggaggatgactgtaagatccccaaggccagcaccactgtgccc

SEQ ID NO: 23030 - DNA, 1472 bp, Artificial sequence
  DNA replication origin
cacacacacacacacacacacacacacacacacacccctatgcattccttccccatctgcctccaaggttcacattagccatcccttaccccaagataatgcacttcactgagagctctaacttgctagttctcttctttcagttttgctgctccctgctaactaaatgaataccattctccctatcctctaggaaccctcctagacttccttcagatcttcctccaccctttcttgtttggtcattcctggtctccccagtgccagagtcacaggacttgttccagctgctcctgaccaactcaactgataagcctttgttgagggcatgcccagagctccatgcctcttggttggtcttgacgaccagcctcatcttaccatgagcctaggagttccagcagggcaggatttgtgctcctccctctggatctcccctcagtgcccaatacaatgggcagcacacacaggggaaggtgtgcgactcgctgattctgcttcttaggagtcaggagggaactagggaaagaaactgaagcagagacagaattccaggcccacactttgtaattttcctttaaaaatctcaaaggacacgtgtgtctctctctgtgtgtgtgtgtgtgtgtgtgtgtgtgtgtgtgtgtgatgtatagatgggagagaagtatgatggtatgaggttctaggagtctggttcctgccttggtgcaggagtcttgggggagctggactcctagatccactgcagcccccaagaggacacagtcccatgactctgcagccctaagagggcagccatactgctgaggcaggactaatgcgggttgacgtgtcccttaggttttaatttgctcagtccagtgtgccagtccacatggtttcctttgttctgcagttcagtccaatcccggtcctcccttcttgtacacactcagcagcacttcttgcaatcagagcctagtgcatttgttaggttgaaccatttacaatttctgatattcaattttggggggcctataaagtctgtgaccttggtttttctctcctcaaaaccctttaagaaagctccaggctagggagaggagcagattgaggaaaggcagaagggaagagctaatagactaagtcccatgtgccaagcatgttacattcgttatcacagcgctaattcccacaacatgaagcacctaaaattatttcctacattttacagctgagcaagcccaggttaagactcacatggtgaggcccagggctgggattcaaacttagccacagacccaccgccacctagaaccagggaagtcccggcagagccggagggccagcaagcagtgtctgcagcttcgcaaaaaagggagagaaggacacgagccaaattcgacttcgctggttggatcggtccagaagagccccaattagtagggtgcgggagcaatgcccaacctgaaacccgagggtagacggcc

SEQ ID NO: 23031 - DNA, 716 bp, Artificial sequence
  DNA replication origin
ggacacagtcctagaaaaactcagaccaaaaaatatgtggagtcaaggagatagacagaatggccgacagacagacagacagacctgcctgacagaggtgagggtgacggaggcaaagaaggaacaaagaaaacagggttgcagtgaaaaggggggagggagtgagacaaagagagagaaggaggcaagtgtggagcaggaggagggagtgaggccagggagggggatatatattttctttatgatcctcttcaatctcactcagctcgctgctgagccgcttcccctctcaggtgctgctcagtggcggatgtgctcagaaagctgatatgctgaggctctctcccagagccaacctggggggctcgcagagacccctacatggacatgacaacccaacctgcctccctgtccccaaaaatgctgcagtccagagaggactgaagcccagctcttaatttttcagagctaacgcagcctggcacaaccagtagaaggggaagtggggcagaggaggaggagaaatagaggaaggcaggcaagggaggcatgttctggggagggtgctggggacagtctttggtcaggggtcaaggggagaggagtaaagagaggtaaggactgaggagagatctgcatttgagaataaaattagcagcatgcaaaggataagggagataagacaccagtgacgcccaattactttggggtcaaca

SEQ ID NO: 23032 - DNA, 1289 bp, Artificial sequence
  DNA replication origin
gagaaaaacctaaacatcacattgactttgcgatagtgcttctctattagacatggaccaagggcattaactgagcacctcctttgagcctggcactacgctgggtagtggatgagtggccccagtcaagactatagagccaggatgcctagaggcaaaggagacaggcaggaattggaaggatggctctaatgacagaacagtaggggaggggcatctgggtgcttgatttatgtctgctccaacagtcctaagctgtcttcccctgcctcaagctgggattttcccagatgtgcatctgcttgagggaaagaagggcggcacagggggagggtctccatgtccttgcctctggtcccaagagcaatcccttctcctttctccctatgctgttcactgcctgctgggtagagggtgggaggctgggggaaatgccagggcccccagataatcaccaggtaatgaaaagaactggcccagggctggggggaatgcagaagatgccgagttggggctgtaaatcgccctgggagaagggggtacagaatgggggaccctgacagttggagcccatccaggtgatttcgcatgaagtatctgaaccttgaggggtgggagtggggaggatgagaggcaggcagaggtgtgagccagagagaggagaagacgctgaaagagacagggagaagagaagcaaaaaggagagatgaaagggagggcaagagatgggaagagagatgcgaagagcgatggggagacagccaaacgagacagatgggaggggaggtggatggagagactaaaaggcacacacagtgaaactcataaagacatgatggtatgagagaccctcccagactgagggagggaagcggggagggagagagaaaggctgacggcggacacagtcctagaaaaactcagaccaaaaaatatgtggagtcaaggagatagacagaatggccgacagacagacagacagacctgcctgacagaggtgagggtgacggaggcaaagaaggaacaaagaaaacagggttgcagtgaaaaggggggagggagtgagacaaagagagagaaggaggcaagtgtggagcaggaggagggagtgaggccagggagggggatatatattttctttatgatcctcttcaatctcactcagctcgctgctgagccgcttcccctctcaggtgctgctcagtggcggatgtgctcagaaagctgatatgctgaggctctctcccagagccaacctggggggctcgcagagacccctacatggacat

SEQ ID NO: 23033 - DNA, 1443 bp, Artificial sequence
  DNA replication origin
gaagctggggtagaaggcgaactccttggccctagaggacaggtcgtcaccgggcagggcgcccgacggctccgggtatttatcgcccgggtggtaggcgcaaggcttctgctgcaggttcacgttgtgcgacaggcggcagccgtagtagctgcccccgaaggggtagccgtagcccagggtggcgctggacgaggtggggggtgcgggcggcggggcacactggcgcgccgcctccggggccgggatgtccgtatagacggcgccctgaggggcgcccaggggagccggcgggcggcccagcacggggtgcggaagcaggtcgcggcagtggctggccgggcagctgctgcccagaccatccatgctcggggctttgccggggctcgctccgctgcagccaccccccgctccgcccgtgccgccgcctcctcctccgccgccgccgccgatgccgctctccgccgcgctgtcctcatagacgtacataaggctctccggccagcgtggatgcaggagcagcgaagtcgtcatgacatgatctgctggagctttttaaaaactccacttgccagaggcagcgagctagggagacacctcgctcctgtttcccctccccccatccctcccctcttttctctccacccctcccctcctcctagtgcttccacctccctccctacattccctctacgcatgcggagacacttcattaagaaatccgccggctcccgctctccacctctcagcacccctcccgcgcccacgtgacccgctctgcgcacgtgatgccccggccaggtctcctggggttccctcccctcgaggtggggcggggcgaaagggaaaaagtctgtgctgattggatctcaggtaggccaaaggaggcgggagctgggagatttaaagggacagggagacgcccccggcaggccccagggagggagagggaggggggggaggctgaatttggccgacgcaaaggggtgtagggaggagagcgctgtaactgggcgcctccgcctaggcataggatgtgcaccggagagacagaccccctaccgccaagccgatcactgtgactgctgaagtctctggattggggcttgaagctaagggtggggaagaaaccaggttttaaaaaataataaatgaagataatagaaaacagtcaggagcgctctggccctggcagctcgcctccgctcgcggctggaaagaacccgatgctgcgtagcgagcctttgatgccgggattgtgtttccatttcctaccttcagccacattccccaaaactctagatgtctgaaaaggacactctgctttacctcgctggatttttctcaagcggagaggggtgtgacaacccccaaatacagaattcatcacctggggcaggggatcgagaggcaatggaatatactcggcaataaatggagaaa

SEQ ID NO: 23034 - DNA, 1150 bp, Artificial sequence
  DNA replication origin
accatgtactaaaattgcaccatccttaattctggcaatcagaagtcagggtgcctagtgtaggtcataccctggtattgagttgtgttatactaagtaatttcataatattcacaagaatgttatttgctacactctctaatatcactcagtatttttttttaaaccacctacctcttcttccaattccgtatgcagaggaatttcaggcccacccttaggaggtctttgggtctatgctttccaaggaaaacatccctgagcttggcacgtggagctggtcggggagctgggcactgtcgggagacatctgtggctgccctgggccccccacccccaaagacctctgtaggtatcagaagggagaacgctctcccactgagctctgcttacagggagaacagactcaaatgctggactccctagaccggaatcctgatttctcagcacaaggcaggatccaaagctcttggtgtggttttgggaaacctgggactggtcttgtccgcaaggagagcggtgggatttacaggagcctttctctcttcaactggagacggaacaagaggggaatgaattctcccttcccatccttagccagacaagaccaaggggtccccagcctgggtctggactccagaagcccctgaacaggtcttgaacaggtcttcctctcccatttctcatccccacgcccttctttctgtgtctggggcaccaataactaactctctttctcgaccacatatgggggagttggcagtggaaatgtctataggtttgagctcaatataccaaagaggcaaggaaaactttacaatgctggggagggattctagcctcctctccactccctctccagagattttggatcttctgttccctcaacaatcaggaaattcgtggccagatttttaaaataagtcaggaaaggaaaaaaataaatctcacatttctgtagaccccagcaaattagtcccctatttaaaaaatactgtctagtgcctgaacgatcctgcgaattctgtcaaagaaagtgggggttcttattctccgccctccccagttattcggtgggttgggggttttgtcctggattccaaggcactataggcccaccccgcccccatcccttgccggaagcaggttt

SEQ ID NO: 23035 - DNA, 833 bp, Artificial sequence
  DNA replication origin
tcgccacacattctgtcaccctgggcgtccctagctcagtcctgttctgcccgccctggtaagaggtcgggtttgaatccgccgcttgagtggccggggtccttaccgctggccgagagcccgccgccggggttcaacggcgataccaagctgccggggtcgcctgcgccggcgcccttgttgccctcgttgagcagggacgaactggagtcggattccagcgactggcaggagggcgggtcgtgcggaggtcctgcgccgccgccgccgtcgccaccgccgccgcccgccgcgtagtcgtacttgaagccgagcgcaggcggccccgacggctccagcgggagcagcgctgccccgggcccggctcccgggtcgcgcccgcgctcctcacgcttcaggcccccgccgccaccctcggcgcacggctcgcggtagtaacccttgccgtcctccacgcgcgccagctcgcacgtgcggccgaagggagggttgagagacactgggctgccgaggtagggctgcgggtagccattgcacggctccgccgacggccaggacagggagcacacgttgtcgcggcgtgggtaggacagcgaaggcagcccgggaagctgcgccccggacgcgcggaagttggggaagtagaaggtgtctcccgtgtggatgtttaccagcggccccacaaacccgggattcaggagattatgctcgcccatttccgcggggcccgaccggcagcttctactttattgctatctgacattaaacatagttaaatctgcaccagtcacccattggccgccccactcacgtgggcacggccgccaggggga

SEQ ID NO: 23036 - DNA, 1634 bp, Artificial sequence
  DNA replication origin
tcggcggagccgtgcaatggctacccgcagccctacctcggcagcccagtgtctctcaaccctcccttcggccgcacgtgcgagctggcgcgcgtggaggacggcaagggttactaccgcgagccgtgcgccgagggtggcggcgggggcctgaagcgtgaggagcgcgggcgcgacccgggagccgggcccggggcagcgctgctcccgctggagccgtcggggccgcctgcgctcggcttcaagtacgactacgcggcgggcggcggcggtggcgacggcggcggcggcgcaggacctccgcacgacccgccctcctgccagtcgctggaatccgactccagttcgtccctgctcaacgagggcaacaagggcgccggcgcaggcgaccccggcagcttggtatcgccgttgaaccccggcggcgggctctcggccagcggtaaggaccccggccactcaagcggcggattcaaacccgacctcttaccagggcgggcagaacaggactgagctagggacgcccagggtgacagaatgtgtggcgaggaagagcttcttataaaatgaagtgcgggtggggggagcctataaacatgtaaacatccccacaaaagaaatggagagtgttcctttttcgtctgcctgcggctggaggcggcagggattccggagttgggggatcctgacggggactccccaggcctgggggtgaggaggtggggacagaaagcccggccctagttctcccaggcgcctctccctccaccttcccacagaccccattacttacatttcgaaagaaatgccagtggatgcgtttactctgccattcgcccatatctgttgtaactgatccgggatccagtcctgaaggatgtgagaggaagggaccaggaaatagggaagaagaaaattggggagaggtttgggaaaaaaggaggggatagggacttagaagggtcatgaatagtgcagcaggaggtagggttgaggaggtaagagcaaagaatgaaaggaaaaaaaagagtaaagaaagtgggggagttggtggggatgtgggtctgggtagaaaagacgattcagatgactggcggcaaggagaagggagagaaagggcctggagtccagctgtgaggcgaaggtgaaagggtctggggaagggccaagggcactggactggtcaccctttgatcctttggccaacccctgccattcatctccacccaggcgcgccctggtacccgatcaacagccgctctcggaagaagcgcaagccctattcgaagttgcaactggcagagctggagggcgagtttctggtcaacgagttcatcacacgccagcgccggagggaactctcagaccgcttgaatcttagtgaccagcaggtcaagatctggtttcagaaccggagaatgaaaaagaaaagacttctgttgagggagcaagctctctccttcttttaaggtgcaggacacgggcgccagccccagactgagcctgtccctggcagagagcaaaagagggcgccgcctagaacacagtccccacttagaacgccaggcgtctctggcaggccctccctggatatcctcttgtctgttttgttcgtggttccctcccatacacac

SEQ ID NO: 23037 - DNA, 2148 bp, Artificial sequence
  DNA replication origin
ttcacctgagctggagaaaataaagtggagaacagctaagaggctgggactcccattattttggggtagaacttttgttttcaaaaaatcacataatcataattcatgttttaattattattattatcaatattaatatgatgaagcaactctgtacaaggactatataaagggaaaacgtgctaaagacagacgttggaataggagaattacactacagagagctggggaggcagctaggggaagggcaactatccacagggactacactaggtaccagcgacagacacagagaacaagacacagattgacagagaacctcacagaagtcaagtttaaagcaaatggaaagagaatattgcatatctttgtcccctcactccttttagagtgttctggtccctcttcattattagattgggaatcaggttagtctggagtggtagagctcaaatccagcaccctagagcccagaggtcacaggaagggctgcataaagggggtacagtgggtgaccagtcaaggtggggagtgcttcatgcccaggggaagaccacaggagactgcagacagctggaatggtggtaatttgggggaacttgtacatgggtgaagcaagtatgtgtggatggggaattgtcaggtgtcagatacccagcgggggatggaggcatgtgattttatctccattctgctgggccatgtggggattatgaggctgcctgcttgcgagtgcactagggagagtggggtgggcccagtgctgtgctgggctcagctgtgtgtatgtgtttgcctttgcctctgcctgtacagaagctgtgtgctggtgggagagtaaaaagctcggtggattgcctttggagagtttgttaggggagactctccccatatgggaaacactccaagccagcaggccagtttcacactgtccaggctgcagttaactcccatcagtgccctgcttctcacccctcttgctcctggaaagggccggacagcagatgggaggctgggggactcttggggagaaggataaaaatgaagtacagaaaggttgatggttctctcactgctcctctcttccaagccagcccagcgtctactgggctggggctggggtctgaaggagtctggatgaaagtccttcccactcagagaagccattctcagacctccaatgggttctagggctgtgcccctccctctgctctggtccatgtgctaggctgtggaggtttgcaggccaggaggcggaggcagcccttctgaagacaaagggcaatgttggggggcgggcgaggaagagagaagggagttgggtggggggctggagcgcccccctccttcattctcacgggcctgggaaactggggctgagtgggacctcaatggctggtagcccctttaagggtgaattctcctcccgcctcgtaaattacgctggtccaccctctggccggcccgtgaggcagtgaccgtgaacgccagcggggaagggagaatcagaggcctcggctgtggctgtcagaaattctcccggccaatcagtgtggtgctccgtagccccatctacagcctcttgcactttctttctggagagccagctggggacctctggggtggctactgaacctgaggctgtgtcccctgggctctcaggtccctgcttgctgcatcaggcctgcagccaccgcaggcaacggaggagtggatggcagcacacctatgaacagacattcgcccggtgcgggcagcgggatcaggagagggctggggaccaggacactgttctggtcctagagggaacatgaggctgatagtccttgtccacagcccggccagccaaatgcccaagcttctgcccactgggtgtcctgggggacccagacccaagcagactctggttcttgctaatcattttctcacaaaccacacttcctccttggttccccacttcctccagccctaccagagacacctgactccctcagctctctccgctgaccctccaccctcctctctcttcccagcctcttctaaccccaggaactgtgaggttgaggtgccttggttccactggccctgctctttgctcctgacggcaaagagaattaagaccatggaagggaagtagaggaaggggac

SEQ ID NO: 23038 - DNA, 1670 bp, Artificial sequence
  DNA replication origin
cgctccggctatagcgctctcctccgccgggcgcagccaagggctccgcgtacgagttcggagttacattgcgagggcatgtcattttcagagagaggggtttttaaggagcaatactacagcggaggagctgacatctttttttttccccatccgggagggggggcgcggttggaggggagggaggaaaaagaaggggagggggggaaatatcagctccgtaattatccgcgcattcggttctcaccatgtgacggctagaccaatgggatttgaaaatggccttgatgattcagacggccgtgacgtcagcggggtcaagttgtcggcaggcggagcgcgcagagtggagtaacagcgccatctagcagctgcctcggggtaggggcaccggagcccttccccgcgaacaaaggaagcgccccccgggcggcaggggaggtagaggggtggaggggggtgggggtgggggtgggggttctaggaagagtggggtttgtttatccagtaaccagcctgtaactcctggggagaagggggcggagaggggggaaatgcgggagagagggagagagcgaggcaacccggggctcaaaacagtcaaattcaaattaaaaggtcgagacacgaatcaggtacttctccccactcttcatctcccctttccatatccccggacccgactcccacttcttaccttggggatgggagtggggtgaggtttgtgggggggggggtttggggggatctgatgagcagagaaaggggaaaaaaagttaaggaataccaaacaggactaaagtttctgctctcccgcctcctcttttccccgggcttggccctcggggctggaagcttgggggccgcggcgctggagttgcaagtttcctgtgggggttgactgggaatctccagcctctagggtgggccagggagggggtcacggtcacttcatggctgctcggaaaaggaggttccgaatggacgcggggtaggggaaagaggaagccagagaccagaggcacccgatccccgacccgagagctgtggcctgggcctggcagggtgggcggctcctgggtcaccatctcaggggcccacaaggctttggccttggagccggttctgctgctttacttcaggccctggcggtcctcgctttccgcttgaccttgcccccgctaaaacagggaatattccgggaaagaaagagggaacctgcggagcctcggtcagtttggaggagtcacgtatcacacgggaaaccagcacacaagacgcaacaaaacccgacccagagaagcgtcctttacagagcgcacgggctgggagcatgtttgaaagaagacagaccagtctatttttgtggttgtttttaaataaaaggaagaaataaggggaaccgtatgtttcaaacagttatttccgtttctccatcgccttcttccaaagcgaactaaactctccaccccttcctcaggaaacggaatctggagaacaacttgtctttcctgtcgccccacatttttccttggacagagcctagggttcagactttccgaagggctggagtttggcggggaaaggactggagcccagcgccctggagtggaggagtgaggaggctagaccgtttctaaggaggcccaagcccgctgcggctagaagac

SEQ ID NO: 23039 - DNA, 1289 bp, Artificial sequence
  DNA replication origin
gcgtcagggcgggggcgccggcgggaatgcaggcccggcaggccgtggctttgagagagccacgttcacaggccctggggatttcactcctgctgggcctcgggacctgactcctggtgtgtagggatcccagatacccaccttgggtgggggcaggacgcgggtttcctcgcggcaggccaagagaactcagtttctgcttccagcgcaggccttagctaggaggagttgtgtgtgggtgtgtttttcccaacaaagagggatcaggagagagaaggggggaaagtagaggggaaccagggagggggcggggaggggaagagggcagtggagaggtgaaatgagcccatttcagggggagaaggaaaatgaaagcaaatggagtacggccttctccgcgcagggcgggtgctgacgagccgggagcgggctccctgcctgcggcagccgggatggcccgctggggacaccggagaaagcctgttttaaatttaatccgaacttgacggtgtggattgaaccggagggaatttaaatcactaaaaggaaggcgcggggcagggggaggggacgactctaacctgtctatctttctgtctgtccttcccacggtgctagtttggttgtggccgcagctgcccaggtttcaggtgatggagtaagggtgcccctccccctcaggggtctctcctgtgcccagtgaagtcttttgggggtgggagggaactctaagaaccagagtgaatgcacagctgcgagctaaagctggggtttccccctccccaacaagaactcccagtggcctccagtccctgggtttgccccagcggtgctgaggaaaattgaagggagtatgtgggtgaggggaagtctggagtatggcagaagattcagaaggagtaactgaaccccaggaagacagaccttccttcttggtgcccctatatcctttgtgccccgccccccgcacctacaaacctggatttgagggaaatctgcaggtccgcttcaaagccctggtctgccacccacacccctccaaatgtggagaatgggggctacaggccacatgcagttgtggacctgcggaacctccgcccagtggactccggaactcccagcctcttctagcccccctccccaaggccgcctctctccgaagggcgcagggaaaatgaggcattggctgggaaggggctgtgggcgaggcctgcttcctgatccacagccgtgcctgcctctgagtgggaagagttcggaggtcatagtcccagaaaataaaataaaat

SEQ ID NO: 23040 - DNA, 1911 bp, Artificial sequence
  DNA replication origin
aaggggagcgttcttctgccactggccaactctgccccccaaatctggggtaggggaagcctggggaaggtggtccctgggtgggaggggtagaacctcaggatctcatacacctttatcagcagcctcagaagtcttctctttgctttggcacagatatacaggcgcctttattttaaatttattgtctatatctatttatctttctttgccagcttgaagaagtgtaggagagatctacacaacttaagtggggcgtccccatcccatcttcctgcgcaccctcctttgcccccaactccatctctgcgacacttccccacccccactccccccaaaaagtcgctcccgggctctgtctgcagagagccagggtgagagcgggcaaggcaaaagagcgacctcggtcgtgggcaagtagcttgtttttacgtccctcaataaaatttttatgaggatcatttgattgttcataaatgtatctttcattaaataaaattgtaggctgtttttggaacgggaaaaaagcaacggaggaacaggagaaagcaatttctttggggtcggatgcaggaattccagagggggcagtgtgattgcagaggaatatcagacaacttggattcctccccccaataagttggttgctaccctcctccttcaattgagggtttgtgcccagccctctgctttgcatcagactgtcccatggtggtgtagtaaaggggggctttagtcaagtaggaaattatcagggtgggtgaagaagagggggcatggaggttggctggggggtggggagaaagggacaggtgaaacccccagaaatatggtgcacttaggcagggtagagtgaatttaaaggaggggtgcaatttcagggtcagaaaggaagagtcccagtctgtggccagggaaaatagacaggagctgaggttgagatgcaggctctggaggcagcagggtaggagtcttcccagacccggccacgcctgcccttctttccctctcctgtccccaggaggggaccaaacgccaggggtaggggcgggggctagttttctcctgcgtctctatggatctttctcctctggggtggagaggggctggggagagtgtgtatagtatgtgtgttccggggggaggaaagttagggggagacagctgcagctggcagcaccgaccccagctccataggccccctcccaagtctctgctcctccccctctctggctctttccttttcctttttggtctaagggggcggcttaacggggctgggatttcaactcatgggggaggatgagggatgtgtttggttggggagaggcgacttgggggttcagctccttggcgccactgtcttcccctcccttgagctggactgagctgggaagcccaacttacaacaagaaacagaatatctctttggccttgatggagttgggttagctgtcaatcaaaaaatctccctcactagttcaaggaaaagacaggaggttccagtccccctgccgaggctttctccaaatccccagtacagccagcacctcccccagcccagggcggctgaggaccgggcccggcacttgggcggctgctggcagcgatgagcagagacgtttagccctcagcggggcccggggccagactgagaccaagaggacatcaggggacagagcctgagagagactgaacccgagacagcctgggacagaccaactgaaacatggagtcaggcccaagagaggaaagaaggaagcggagcattagaataaagggaaaaaagggggagaattaaaagaaggaaggcaagatgaaaagagataggagagccgggaaaggcaggcgtgcagagagggaggcggaggaagggcggccgtaggcaggcaggacggggcaggggcgagc

SEQ ID NO: 23041 - DNA, 1003 bp, Artificial sequence
  DNA replication origin
tcgccccctcgcccctctcccgcgctccctgcacggttcgggagggctgtaattcggctgcccccgcccgtcctcccctcccctcccgcgccggttgtaaaggaaaattgctcccaacttactggggtccaggtcggccttctcctctttgtgcttgctgccggcgagcgcgtccgcctcgggcgagggcagtgtctgcggggcgcggtcgcgcagctccccgggcgagccgtacatgtagtccgggtagctgcggccctcccctgggccgcagtccgcgcggcgcccggggtaggcgtccggcttgagggcgtagtgacggcccccggccgggaagctggggaaggagacggcgccggacagcggctcgagccaagtccgcatgtagcgcgtgtcggcgccgaggtggggctgggggccgtacgggtgatataccacggacgactgagagggcacgggcgcccacgacgtgctgaacactgccggcttgggcgcgaagctacaggacggaaaatcgctacagtccggcaccaaaccgctgggtctggcggcggcgggatgagccccggtggccggaaacctggacgctaggaggtcttcattgtcgtgagagatgagcgagtccacgtaatagttactgatgggccccgtcgccgacatcgtaacggggttttacatacataagattattgtatgaactgtatatgtactttttatctgctcacagaacaatcaagtcaggtaattatttttccagccttttccccacagctcattggctccccggcccccacgtgatcgtatttacccaaaaatacggcgcggatcaatgcgcaggggcttttttttccttgccttcttttccccctctcccacccccttctctctgctgctccccgcgacctgcgatttcctgggggtccggaactctggacccaaggcaccggtcaccccctcaggacggctcctagctcatctgagaagcccctgtgcccatgtccac

SEQ ID NO: 23042 - DNA, 2338 bp, Artificial sequence
  DNA replication origin
catcccgccgccgccagacccagcggtttggtgccggactgtagcgattttccgtcctgtagcttcgcgcccaagccggcagtgttcagcacgtcgtgggcgcccgtgccctctcagtcgtccgtggtatatcacccgtacggcccccagccccacctcggcgccgacacgcgctacatgcggacttggctcgagccgctgtccggcgccgtctccttccccagcttcccggccgggggccgtcactacgccctcaagccggacgcctaccccgggcgccgcgcggactgcggcccaggggagggccgcagctacccggactacatgtacggctcgcccggggagctgcgcgaccgcgccccgcagacactgccctcgcccgaggcggacgcgctcgccggcagcaagcacaaagaggagaaggccgacctggaccccagtaagttgggagcaattttcctttacaaccggcgcgggaggggaggggaggacgggcgggggcagccgaattacagccctcccgaaccgtgcagggagcgcgggagaggggcgagggggcgaggactcaataaaagcgaattaccttggggagctttcaggggcaggaggtctgagaatggggcccagggagacaggttgggagagggccgaggggagctcctctctcaggagctggctttgatgagagacccctgccccctcctcccagcccaggctttttggctcagtcaccactttcgaagaaaggcggacagggccaggggatggggctgggggcgaagttcagtttatgatttgagatgggacagggaagaggtgaggaggacactgggggcacagaggagatacccccagcgagaatgacccctgcttcccagtcagcgtggaggtcctcaccccactagagattcacaaaacagaaggtccatggacttctcccccaggagcactgggtgaggggtctgaggtatttcgaagcctgagaacttggagagatcaggactttcaaagagaagtggggataaaagtggggtctgagcctccttaaacttgagaaccctcttctgagggtcttggaggggaaggattgagaatggggatcagggatgaggagtgggcatctccccagattagagaattctacacacacacacacacacacacacactcactctcactcactcactccaatcagggagacaggcgccttctgaggattgcacaggagggctagggtggggggcaggtgggagctgcagggccagaaaaaggggaaagaaggagaaacagcaggggagggggtgcagacccctgggtgtgaggaagtgtctgggggagtcccaggagggggctgcaggaaatcttttcctccagccccataaggggccagggcctaattatactcctctgaaggcttccctccctgccctcagctactcccataaacctgaaattggaggcttggctcctgcagagcctgtcctggggctggcaggaggggggcactggaggccaaacaggaaaactaagatataggggagcctgtccccaaggccagcggctctctggggagaggagaaagacttttcccgtctcagcatcaccctgagaattcgcctcagcagggttgaactccaagcgggaggatggtgctgcagagggtggtgaggggtttagggattctcagggtcaggaagcagaactgctaaaatttcaggacttggtcgtgggctgggaggatgggagggggcagaggaggagggaggtggggaggagagagaccttgctataaaaataaaaaacaagagagagaagcgtttatgggcctatgaaacggttgggaatttggactttttatgaggatattctcaaattactactcttgaagctgaggaccagactagaggggctttgatagctttggatttcctacagttttaggtgctggaaactgaaaagggggaagctggggaggggacagaatgcaaaacgaggaaggaggaaaattcctaaagcaaaatgtgtccaaattcaggttcagttattgcatttggggagcctggctaagtctaggggtagagtagcagaagtcctgggctggaaaggggctccactgacccctgcttgtgtttggccctccaggcaaccccgtggccaactggattcacgcccgctccacgaggaagaagcgctgcccctacaccaagtaccagacgctggaactggagaaggagtttctcttcaatatgtatttaaccagggaccgtcggtatgaggtggcccgggttctcaatctcaccgagcggcaggtcaaaatctggtttcagaatcgaaggat

SEQ ID NO: 23043 - DNA, 1106 bp, Artificial sequence
  DNA replication origin
aaaaagacacacacacatacatgataatgattcccagcccaggagctgaggggtgagggctggggaccatgccgcgggctaggtcgggcccgtgcaggccggcgccttgggctgtacatagtgttccctctcatccccagggttcgtccccagcgtccgtcctgtaacgtgcttctgtttgttatggtagaacagccctgtgttaatatattgaagtcacttaaccagaaacccaactgtatccagttctcgttatttctcctccctgtggttcccagtctgctgttgtggaggaggcaagtgctcaggtcatctagcggaggctggagccagagaatgggctccttctaccttggaagggcaaacgtctgcttctgcagctgcttctctccagtcagggaggggtggggggtctctgggggtggggtggaggctgctgaggcccaggcccagcttgtgctttccccggctggctgcctacaagtttcctggtggctagatggagtgcgcgggagaggcacggcatgaatggctttccttggctgtaattaattgtaataatttatgagtacatgagattggagggaagagataggtgaagatgaaagttgggtgctgggtgagggcccaggctggattcttgcctggcggcattggtgctttggtgcttccagggatggctgggaaagaaggctgggagggggcgtgtgactaggaggaaggccaggcaggcctcagggagcaggacaggcactggggactgcagtggaagaaaaagaagaaaaacacagtgagagagaagagatgggacatggaaggagagaggaaagaaaagaaggaagaaaggaaaggaaggagggaaggagaaagatggcaaagccaatacaatcagaattagatgtagtttctacttctcaatgcagtctcagctcctcgatccccttctcctagttcttttcttcccaatctctgtctcccctactctggtgtttagtttgaatgtttgtctgggggtgactgggtcacgctgtgcagctgcagcatttctgggggatggtgtgcccaaggcccaaggaagctggccagagattagccaggagtggggt

SEQ ID NO: 23044 - DNA, 1669 bp, Artificial sequence
  DNA replication origin
acccgcggccccctcccctctggctcacgagtaccccgcccagtacccccgaaactcccctccccccgggaccgaaccccaggccagctggctccccgggactgggctgggctggtgggctgggggctgggcaggttggggggcgcctcggtgctgagctcggccggatcagcagagctcccggggctggggcgcgggcggcggcggcggcgggcggcgagcgggcggcggcggcggcggcggcgctcctcactgtcggtaggtagagctcgcgctctctcacttagctctttcctctaacagcccaggcgaattcctcagactcccggcggtggcggcgcttacacgcgattcgcgttcatcaatccacgacatgaagacaggcgagagagagagagagagagagagagagagagagagagagagagagagagagagagagatggcgggggttgaggggtacagggctggggggacctggaggaaggggaggggaggagagggggagggatgggggtgtgtggtgtgtgtaggggggtggtgagccagccccagctaatggctggggccagttttccagggtacgaatttagatgtgaaggtgcctctcgcccccagcctcgcttctcttttccttcttctcagagagagagagatacctgagccagcaggtcaacccaggttacctcaacaggtataagacctccaaggggatgaatacctgcaagccagagcagggcccctaacccaaaagatgggcttcctagggggtccctaagtctggagactttgaggaggaacaagcacaccatactcccaaatacttcaggcatcagaccctccatcccctggcccctccccagggtccgaagctgttctgtcttcttccttagatccaggagactctcttgctacctgctatgggtagaggagagggtcagaggaggtggggctggggaaaactccatatacccagtcagggccacactgccccttcagacacgagcccctgcatggagcaggaaacccaggcaatggccacaagcttggctaggggctctgagagcaaagctgcttatggagactaaaaggaaagggcagctgtgtgtccctggtttctagctgggctgattcaggacatttcttcttaggagactatttgcatctgagttggaggggactggagcaggcctcttacttgtccccacatacccccatgccataggaaatgccagctcagcctggtggggcccctggcttcactgcagctccctcttccccaggcaggctgcccaggccaggatgtggatgggaactatcaacagacactctttaaatatttatccacactttctctggagggttcccccatccccaagactgaatacgttcaagttaattctaatggattaaagaaccttagtccatcagcacccttctctggccataagtgtgtacagtgatttgggcttaacacagacagagagaaaaagggagaaggtgagaatacatgcatgctgtgtgcatatgaatgaaaaagatgagtaagaattatttttccagtcctctccctcaccagggtgtgaggctgttacacccaggaaatcctagagcacactcaggacacacacacactgtacgtgctacttttcaccctgagacacatcaa

SEQ ID NO: 23045 - DNA, 1366 bp, Artificial sequence
  DNA replication origin
caccacccccctacacacaccacacacccccatccctccccctctcctcccctccccttcctccaggtccccccagccctgtacccctcaacccccgccatctctctctctctctctctctctctctctctctctctctctctctctctctctctctcgcctgtcttcatgtcgtggattgatgaacgcgaatcgcgtgtaagcgccgccaccgccgggagtctgaggaattcgcctgggctgttagaggaaagagctaagtgagagagcgcgagctctacctaccgacagtgaggagcgccgccgccgccgccgccgcccgctcgccgcccgccgccgccgccgcccgcgccccagccccgggagctctgctgatccggccgagctcagcaccgaggcgccccccaacctgcccagcccccagcccaccagcccagcccagtcccggggagccagctggcctggggttcggtcccggggggaggggagtttcgggggtactgggcggggtactcgtgagccagaggggagggggccgcgggttttcatgtacccagcatgagctcctacttcgtcaaccccctgttctccaaatacaaagccggcgagtccctggaaccggcctattacgactgccggttccctcagagcgtgggcaggagccatgcgctggtgtacgggcccggcggctcggcgcccggcttccagcacgcttcgcaccacgttcaagacttcttccaccacggcacctccggcatctccaactcaggctaccagcagaacccgtgctcgcttagctgccacggagacgcctccaaattctatggctacgaggcgctccccagacagtccctttatggggctcagcaagaggcgagcgtggtgcaatatcccgactgtaaatcctccgccaacactaacagtagcgaaggacaaggccacttaaatcaaaactcgtctcccagcctcatgtttccatggatgagaccccacggtgagaagccttttctctttcccccttggtctcccgcgctccagggtttccccccctccctcgcctcctttttgtctgccctcgctttttctcctggctttggggtctctcccgccccacccccgtgcctgtgcctgggtggttttctcgaagttgggaaggctccgctggggcggggcagggagggggtgcctagaacatttaggggattggggtgaaggtgagagaaagctggtgtgtggccgcaaagggttaaaaatcgttttctccatctctgtctgtctgtctctctctgactctcccactccccatctctaaagtcaaagttggggaggtggctgggaatggtaccctgagtaccctgagactgtc

SEQ ID NO: 23046 - DNA, 907 bp, Artificial sequence
  DNA replication origin
catgtggattccatccatgaacgtgaactttttattgtggtttgtccgttccgagcgctccgcagaacagtcctccctgtaagagcctaaccattgccagggaaacctgccctgggcgctcccttcattagcagtattttttttaaattaatctgattaataattatttttcccccatttaattttttttcctcccaggtggagttgccgaagctgggggcagctggggagggtggggatgggaggggagagacagaagttgagggcatctctctcttccttcccgaccctctggcccccaaggggcaggaggaatgcaggagcaggagttgagcttgggagctgcagatgcctccgcccctcctctctcccaggctcttcctcctgcccccttcttgcaactctccttaattttgtttggcttttggatgattataattatttttatttttgaatttatataaagtatatgtgtgtgtgtgtggagctgagacaggctcggcagcggcacagaatgagggaagacgagaaagagagtgggagagagagaggcagagagggagagagggagagtgacagcagcgctcggtaagtgtttccttattggttcaaatatgtaactaatggtccgtggcggtttcaagaataggacagcagcggcttctcttggttagggagaagagggggctggcgagagggtgggcgcgtagttaattatggggaggaaaattggcggggggagagaaacggggttaaactggaataccggtaactggtagtggggcgattgtgttgtcctgatgtcactgtgtgccaagttgggggtggggaggcaagggaacagcacctgtggggctcaagccggcggtctagggcgccagctctctgctgcccactgtgtcagtac

SEQ ID NO: 23047 - DNA, 614 bp, Artificial sequence
  DNA replication origin
aggcggccggcggggcctgttaattggcaattaggggggaggctggtggctggtgcgcgtcagccgagaggagagcgtctgcccaccccctgctcccgcccccactcgggcggatggaagggtgggaggtgccctgcgttgggtggagggtggaggttgtagggtgggggtgggggatgctgtactcaaaagccatcttgtgctcagagaaaagaggcctaccggctttcccttccggggtccggcgcccctcacccccagccgcggccatcccagccgggatgcccactggaccgggatgcccgctcgccacgcatggctgctctgggctaggacctgcctcgcctcggggggaggtggaaatggggaaggccctaggctgggcggggacaggcccagtcctcctggtagagtctcctaggtgctgtggaggcagtgaggattccgggggctgctggcttatggggtagaggcgtcagcctggggcggcgggagggtcctgggcactcgggatctctctaataattggtgctaatggcctgttgtatagtcttaacccgacgcatatggtttcataacacagtggcttaatttcttccaaatgtacgtggccc

SEQ ID NO: 23048 - DNA, 1504 bp, Artificial sequence
  DNA replication origin
ggggagggaaaaaaaaaaaaaggttcttggaattgggggtagccgggacaacaagcccacagcgacacctggtgcctatgtgggggaattgcatcctggagcgccagcttgctttccggtggctggatttcctacactgtgaaggagaagctggttgttggggcaacccctgagctagccttttaaattctatttaaaattgggaaaagacgaggccccacttataacgcacagagtgctttttgtaatgaaagtcccgttctcccaacctccagggtcttccaatcttcaaaaatggctgaggaaaggggattaagttaggtaaggtggcctatgcccaggctggagaaccaatggggtttaacttaggttccctaaaccaaaggtagaagtcccttgcctctcaggccctaaggctccactactgctgaagaggtgcctatcagcaagagaaagtagaattagcttctgaagaggtagacaggacgcccaggaggagggatcctgagtggtcagaacaagataggggggtcatgaagctgagggtgttgcaggctgtttgggatggatctggaggtgaggagccaggtggagttggctagacctcaccatgctagggtccccagagtggcaacaaggcaattttcaagtgtgtgtgtggacacggacagagccagacaatggtctagaggactgctctgtttccctgtgtgcgatccttatgtggtacctatgccagaggttttagacagaaaatagatgttaattgaggacatggagaagcaagattgaagcctccacaaatattacgtgagcatggcagaggaaaaggcccgttatgtgccctttggggaaaaggtctctgggctaggctttccagggacctgaatccataaggttcacaagagagcaatttctgagctaccaagaggaatggggcggacctggggggtgggcagggcaggcgcctgggtagccttcgcagggtatctgcagccattcggccccatcctcttcccccgtagccccaagtctcatacttccctgcctgcttcttcccaggaaatctccgccccgccaggagaaggccccctcctcactggtggaggcactggaggcgagggtgggggcgctggagggaatctgaagggcccggaaaactctggcggattttttccctccggagaccctcctcaacacctctccctgtaggcccactcaggtttctctggccaggcttggagagagaaggccagggttgataaatggttagggtccggctgcgctcctcacccgcctcttcacccgtttgaggagagaaaagtaaggaaccagcccggctggagctgtaatgaagaaggaattttgtcccggccacgtcaggagtaccagagcaggcgagagctcagtttccaggctttctctctcgagatgtccttgaatcgctcaatccctgccgacagggctccagtcccgcggtcttctctttccctccgctctccgc

SEQ ID NO: 23049 - DNA, 1762 bp, Artificial sequence
  DNA replication origin
ctctcgcgctgactggcgtaaagttgtggccgaattcgcatctcttctggtgcttctcgcccgccagcgcagggcccaggtgtttgaggcgaaggggctctagctccccgcaagcctggagccaggcgtcgcgcttcctccgggcttaatccagacctttcaacacacacctcattcgggggaggagaaaagcacaggaccgcggagagcccagctttgaggccaggcctgaagggataacccacacagggaacgttttcctatcagagaataatggagcacaaaataattcagaaagcgaatgggcaggaccacagcctgagagtcccgcgccgcggggccgctgcagagccggtctcccgagcaccgcggcaggaccatttcgttggaatgtagggcgaggccgaagcccgccccggacccaggccgcgaggtgcgcgccggccgccgaggggccgcctgtaaattacagcccgccgggaggactcggaaatacacaaaaggagccgaaagatttaaacagtcggaggcagaggcgtcccgaggcggccaaagcggaaatcaatcacgtaattaaaacagggaggggacgaagcccaaggctgggggtcccgggttcggaggaggcggccaaggtgcaggccgaggctggcgagcggcttagggacgtggctcgcccgccaggaccagagcgcgcggaggggcttcggggaagtttataacacatcgctattgattcccgcttggctaggaagagcagactctggtgccctctcccaggccagaccctgaagcctccgatggccccttctccgactttcccgtttttgtggggttgagacgcgcagttgcagttgaaggccgctccccagatcccactggtgccacgattttgccaaggcaagtttgcgaacccaaatggcatcaagatgctgcctttgggtttgaggggatggagggaggtgacaccccagtttcaggcactaagaaatctctctcggccttgattcctccaacccaggattcaaagcatgcccggaaagactctgatctatgggccgaggcttggaaggggtgtgcgaggcagacggggttattaaagggagagcttggggctgagcaaactggacccctttgggctggaaaggagaaagaacagctcctggaagagaaaaaaaggcacaccgggagctgtgttttgtgaggggaagatcttattattgaggttaatcatggtaatgatctggtatggctgggtcagcccaggagaccgcgctctccaaagttctttctcacagaggtttctctgggggagtcaagggttccccaacttcactatggttggggaaaataaaataaagacctccaatcctctcctctgccttttcctctccctcccttaaaaactccagaaaaagggaaaccttataaaatctccatcaccccacttatttttccttggctctctccagtttactaaaatgcacggtctttgggaattgagtttttctggagcacccttcttgtgaagcaacagaggtgacccgaccaagtcctcatgaattctgatgctgaccctggagaggacccaggattcccttgcctactgtagaattctctctctatccttagtttttcccagtctctgccttctttggtcttgggtgcataatctcatgggtctctggcagttcagaggccaagaacagattaaggcactttgagataccctcataaactcttaaaagtgtttccagcttcc

SEQ ID NO: 23050 - DNA, 847 bp, Artificial sequence
  DNA replication origin
ataaacgaccaggatggagcgggctggcagtagagaaaatgagccccccgccctttgcgggaacagccaaggggcctcctcagctcgcagctcaggcggccgtgcggcgggccggtccggggccgggggccggggccggggccggggccggggccggggccgggctgggggaggggaggcgggggcgggaggggaggcggaggcgggccctcccctggcgctgtgaactttagctgggccgccgcctgtcagccccagaaagcgttaaaggtgcagcagctcgcgccagcctccgcagccgcctttgtacgcgtgatttatgacttcaatcttggttcaccgagagttcacacggctttcgctgctgttgaaggttaaaagatggtcttcgcttgacaagtgggactattgaaaattccttcttctttttttttattttattttagaagcgaagagcagaggctcaggagagaaaaaaattggggggggggggcgggagacaggggttgcaggtgggccaaaatggtaggtcaggaaggtttgtcttcctatatttgggattttttgttgctaggatttgtgtgcgtgttggggagagggtagagaataagagggagctaggcaagagatgtaaagatctctcatatttagaggccaaaggagtgggaaaaaaaaaaaacaactcgtgcttccaccgttaattatctgggtaacttgggtcacaccccctaactgatcctcctctagagaccggaaatgggccaggtaagggagagagtttgggtaaagggtaaggtttgtgtgcttctcactgggtgtacttgatcatccaccttacttgggtaac

SEQ ID NO: 23051 - DNA, 725 bp, Artificial sequence
  DNA replication origin
gtctattttatggatggctcagagaggttaagtaatttgcccaagtttgtacaactagcaagtgtcagatcagggacttgaatcacaaacccatgcttttaaccactgtggtacactgcctctcagtttctcaaggccagaagggaagggcttcaggtccaccatatgaagtgcctacggaatgtcttggggagggaaagaagagagaagcaaggagaagtatagggaagcagacaggggctacacatgcatagggcatggagggcagaatggtggctgggaaagactgaagagggtttgtggggctaagaggaggtacctgaaggagggcgtggtaagccgacacgtgcatgggaagggggcagtggctatggagatagctggggagtgggggaacggggtccaggagtgggcgccagcagttggaacatccagaacagtgagcagtgcccatcgtggactgggtggttggggagtgggagggacctcgtgtcagaggaggggtctttgtgagcgtgcagcagtgaggaatgctccgccatgaatactaagggcaagaagagaaagggccagagggggctgggtgatgtttagctgctggggtgattaatgggggtgaacggagggtgaaactcaagcccttccaaagaagatggtggggaatggttgtccaagaacaacagtccactgtttcatggagaaagccaatgtccaggggaggggtg

SEQ ID NO: 23052 - DNA, 956 bp, Artificial sequence
  DNA replication origin
aggccattatacagaagggagaactgagactccaggaaatgggtggcttgttcagaatcacagaagcagcgtggatccaagaagggatctgttcccaaacagaaaccagtgtcttgggagagagagagcagaggaagcccgcacctctgccctaacctgaggctttgagcctcccgcaaagcggagtgagttgagagcgcccggaaggcagacgctgcggagggagggactcccgggctcgccaaacagcggggcctcgggcaagagcgtcgccagcgcgtcctcattctgcgattactgtcaggggaccatccatcagcgccgcccgggacgctgggccagactgcccgccgcccgcccgggtctctccagatcgcattagcgtggggcgagggcgcagtgcggcaccggctgctgagggagaggcgtggcggggaggggggcggggcggggggacgaggacatcgcggtggggccactgcaggggcaggggagaggctgctttaggaccctcctccttttcttccaatctcccgcctctgggatctaaggtggatgaaaggggcactagaatgggcggcttttggggggcagggggcgcagaacactgaaggcatcagggaagggtagtgatgggggcagttaccagaagcagagaggaagaaatacctgtaaaggggaaagccagagaaattgtctggggaggggagagactgaaaattgcactggggaggggtgcagagattgggggttagtggaagaaaaagactcaaagggaaaggaaaagagaagctgtagagggaaagagaattggaaaggaattgaggagagagcagggaaataggaaaccacagatcgtcaggggccgacaaaaccttagagacaatctactgcagcccctcattctacaaatgaagaaatggaggcccagagaggggaatcccttctccaaagac

SEQ ID NO: 23053 - DNA, 857 bp, Artificial sequence
  DNA replication origin
gcgtcggcggggccttggtgggcctagagcgctagggactggcacgcaccagcactgacggacaaagcgggcgcagttaggccctccaccccgcgtcggcacgcggtcttaaatattaccccggagttttcaattatctctccttaatggatttgcaggggctctttcatcaagcgcggggtggctgggtgtgggggtgcggagagagcgcggcgagggctggagctgggaaaatggcccatatttcaatattaaagccctttacgatcgtcagcagcatgaaagatgctgcaaataaaacggagccgtccgcgccagcctctccatctcgcaagttttaattaacgctgagtgggaggcggctgacgggcgggtcggagccgggccaggggcggatctgggagcctgcggatcccagattccgaactggagcggcagggatctcgcgggccaggccaggcggaggcggagggtggtgggctccgagtcccgggcgagggcgcggaagatgctcgtggagatgggcaaggctgaggggtgggggacagggtggaaggtctctgagcatctgaccgggaaacaaaactctgcaactgaatgcagaaagctttgttcttaaaggtgagggggcttgtggccaaatcatcgagctcttcatccccaggctccttcagcgcgcgtccttctgcctctcttctttcgaccaacaattcccccaaacgctcccccgcgttgattcccggtcccctcccacctcgtcctgtggccccttgtttcgggaggcaggcgtgcttctgtgaccccacggctcctgttctgggacgtctgctttctccatcactccctggcttcccggg

SEQ ID NO: 23054 - DNA, 881 bp, Artificial sequence
  DNA replication origin
tgaacttggggcccaggacaagggggaagggcgggcccaggccggtgtagaagctgcggggtggcctggggaagtggacaagggcagaggccgctgcaggtgttggggggtaccctggagcccggggtgttcctgggcggggaggtccagccaagcggcaagggtctgcgctgtgcctttagtttttaggttgggcccctcctggggagcacccagctggaggagccaggcaagtggcagaggacaccttccgactccttggaaagggccaggaagcgatctggatcctaggagagaaaattcctacgtggaacatgtggtgttctggcccttcctgggtagacacctgcagaggccacttggccctgccgggtcagaagccacaaatctgcccaggcctttgttttcactattcctgaagtttttctgctgtggcccagcacctgccctggcacctgctcggcatctgctcattggcaagccccggacggagttggactggcctagctgagaggtttaggagggcttccgctggcactgccaacagggagtttggcttggtctcccaaaaaaagggcctttgagaaggacatgtccaggggcagacacgaaatccactgatacgcaaaacgaatgtaaacccttttctttcctcacatcttgtggcccttcacacctctgcagttcagaggatttggaatggaaggcctcatccatccccagtcccaaagcaaacgtgggagccagcttgggcgtcttcttgcaggctgctggggctttgtgtgctctgagagaagatgtctggtcctctgcctaccccactccccctttgatgaatgtggtcctttttgctcctgcctctccaatactacccctcgccc

SEQ ID NO: 23055 - DNA, 1256 bp, Artificial sequence
  DNA replication origin
tggatgcagagaaaggtgctttgagctgggccgtggcccacagtctatcctaggcttggacccctggaaggaaaatgcagagagccctgctcaagtttatcccacccccttcccagagctgtgcccatgccagcaatattctgctcccccttcccagccaacccccaggctctggggaccaagccctgctcaaattgggggtggggctcccagtggcaggggcagagagggtgggagcctctcttccaagtggctccgagctggagcacagcaattacgcgggaggatttatgtccctttgcctttaatcggaaactccatgtcaagaagaaaaatctgcactgtcctccggcccggcttcctgctttatcattattattggaggaaggttgatttggaaacttaaagaaaagtggggttgggggtgggagccactggggaaggagaggtgtggggcacaaggatggccttcctgctgtttggtttgtcacaagaaggggacaaagggtagggcaggggccgggtcctggagggcaggtgagaagagaccagaggaacgctagggggaggttgggggctgcagggtcacgaaaggaaggggcacccaggagctgggggatgcttggagggagggaatgagtgggcagacagagggaacagctgggggttgaagggacctggggagagaagagaaccagcagccaaggtggagggaaggagtagccaggtactggagggactatgggtgggcgaaggggtgtggaacagccagaggagcagccaggctctcgggggatactgttggggagggagaatggggggtaagcagaggggatgtggggtgggggaagaagagggtggggcctcatggagtgaagaggcatcagggactggcagagggagagggagggtaaccagatgggagagtcagggactggagctggtggggggttggaccaggaactctgggactatctcagtctaaatagcctgctcccacaaaggcctctcctcacctggcccacctgtatctcctagtgtcctgattggagggctctggcctcccacaaagccccaggtttttgccttccaccttgggagctgtttcctccggtgatcaggtgtagtgactgggaacaggctgaggggaaccacttgactctcttagacagacaggtctgcactctggggaggcgagaccagggacagaaggcctccttcagccatcttcctgccctgtttggaagtccccccag

SEQ ID NO: 23056 - DNA, 1936 bp, Artificial sequence
  DNA replication origin
gacttcctaaaagggcagtgtggaaaatattagagaaggcctgctaagacgttaaacaacccctttcataatgtcctgaggaggagtcccatggcaggaagacacgcaacatgaccttccttagtctgtgtggtctgagaaaaaggcttttgatgttatgagatagcagtgactggcaggaggcggctagggtacaacccttgccatcagctatcctaggctcccacctgcacagcctctcaggtggctggggattgggccctgagggaaaaagcgtgtggaggaagtgctatctatctccgcacctccaccctgtttctctgtcacttccccaagctgaggaccaccccgccctcgccccccgataatccatgagagatggctgctggggacggagtgatgtatgtaatgcagataaaatgtcagcaattctaaatgggtccggagatgcagccgtgggttggggggagggagagagggcggagcaggggggagagaggaagggaaaatgagatgtggtccttaccagggatggcagcagggacagacaccctcctccccccagcaaaggccagaggaggggtgggcccaggagacaggagcccagatgagattttgaagagggagctggagggtgggggttagaggggaggaggacgcgggcgggggcagtggggccggagctgctgatgtatagcggtttcataacttcctcagtattaaaggcaggttcatggggagggcagcgccattaatcaccaggctgaatggggctgggatttgctgagaggcgcgcttgctgtctgctgcgcctgctcagctcagggtgggagggggcaagcagggatgtccctcctgaactaaggggtgagaccccaggacgctattctgggtgttgggcaagtgggtccttgcctgtagagcaggggagccaggggctggggactggcagaaagaaagagaaggatgaggaaggttgtggcaggggctaggagaggagggtcaggggctgtggggaatgatgggggcagaggctgagaggattctaggggaggaaaactggggagggaggattgtgcatttgaacatgaaattgatcacatgtaaatataatgcaaatgacatgcaaataagcataggatttctctgggtccacagctcaagcattctctttcttggattgagcactggggccaatttgcattcagttctaggcctagtgcctcgtttctttattattcatattttcagagggagaactcaaatcttgttaagggagtggtggggccaacgtgggctggtcctctggacttcttggaaaagggtgaaacatcaggaaaatcaacatgcttgagtgacagtgagtgacagtgagggagcagagtggtaggactcctgggctacatgcctgaattaatgggggtcaaagaggcagaggctcaacagtaaggtagaaaggtggagagaacagacatatccccacagcttatctgatagactcagagcagataagacaaggatgcatcatgtgtcccgtgaagtaggcattgtcatcctctcttccaggtgaagaacgaaatgattagcccaaggttcacagaggtcatgagcttcctaaggtcacactgctggcaagtggcagactcccagctccaaatgtccttgaaagttcagtgctcttttcaacctgctatcagaacatccttgagctggacatggtggctcatgcctgtaatttcagcactttgggaagctgaggtggaaggatcacttgagctccggagtttgagaccagcctgggcaatatagtgagacccccatctccacagaaaaatttaaaaattagcagggtgtggtggtgcacatctgtagtcccagctacttgggaggctgaggtgggaggattgcttgagtctgggaggtgaaggttgcagtg

SEQ ID NO: 23057 - DNA, 1568 bp, Artificial sequence
  DNA replication origin
agagacagctgaacagtgtttccctgttccacagaccatttaggggccagttgagaaggtattccagtatatctgtaaatggcacagtctcagttcttcagtcttggatacatgagatcttaatgaacctttgaaagactcaagtctccttattttgaagactgtgacactgaggtccagagagggcaaggactgactcaaggtcactatttatgtggggccagagcctagagctcagatccccagtctctgccccccgtttcttcctgtgccttgagtctcgctggcgtgggtttcccaccagacacacaaaagcctggattcttttctttgtctgagactgagtctagacccatctgcgtggaatctcgaaacacattacaggagcggcttagcctcgggcttagactccttttccgggtcgttggcgccgccttgtggagttgtggcaaattctcaacagctgcagctgcagtcccagacttggactagaaatgatcccccaggccaagtttacacgagctggacgagagtgggcgtgggtgggatggggagcctctgctcactctgcacaagcctcatattttgcctcccccacccccgatttccgtttccctcctccttctcgctccctttcctctttctgtgccggtcccatacagatacatttaacgacagaattgctcccaaaacagcgggcaaagacagagtctgagtctaggggcggagggcagaacaaattcagactttattgtcagggagaggaaaaaggggaggaccgtgggtggggggcctgggttgctacattgtcaagcagaaagagttgatgggaaggggaagaccagtgtaggccagacccctcccgggtcggcggctgaagggttgacgatacggaaaccacggagtcgggggtgggggagaggtgtcacacccccgcccgagttgtgcagtggaggtgactggtgggaggggacagccatgaggtctaggaacttggatcggggaggctacagactcggcgaatcctgcgaaggggaagggcgggggcgaggcttctattgctttttgctcacagttttgcggaaggcgaggcgggggtgggcttggactggacaccccttgcccccctcggtaccccttgggcgatgggtgctggtgaaaagaatggaacccggactagggaggaagaaggcgagggaaaggtctatggtggcatctccttggtcccacccaagtgccggagatgcccccaagtgctgccccctgcaatgggcccggctagacctggggctagggcatggtgcggggcgggcacagtgaggttgcaggcggtaaaaccaaagtgcttatgagggacccaggatcccgcctgctcccctccccctacggaggacgggggtgttcacggaagcgcttcagtttggggtagggagccggagtcccagagtccgcttattgccaagaaaatccatttctgtcccccccggaccccgaccatggcttgtgaaccccgttttgtgctaggtttggggggaagggctggatggacatggcttttgggagggggg

SEQ ID NO: 23058 - DNA, 716 bp, Artificial sequence
  DNA replication origin
ctaggtttggggggaagggctggatggacatggcttttgggagggggggtgtctccaagggggctcgggggtgagacggcccccccttttctaggggagagggaaaggcagggggcggggttccctgagatctggggtgttcccccccttctgaagcccccctcccccgctacccctcccctttcctggaaccccgtatctcggggtggggggggggaaggagagatcatttagggagtgccgggaggaggggcgggctgggagcccggacgcctgggtcccggctggaggtggggagttgaatgggaggggttcagggttgaggtcagtacggggagaagaggatgggtccgtgcgcagttcggatgggtccgggggccgggtgaagcagagggtgagtgatcggcggtccctggagaagaggtgcggctggagccgggcgcagggacagcggcgagcctgctgccgctgccatcactgcagccaccgccagggggctggggagcaggccgcccgccagggacttgggcagctccttggagaaagtcagcgtgccctgaagcgggcgaaaggcggaggaagagaagtcacccggcggtcctgcaaaccccacctctccctgggcaaagcccgcgtccctctctcctccccgcccgcgccctcccactgctgaattcccagcatccaggcctcaccgccagctccccggcgcccct

SEQ ID NO: 23059 - DNA, 1402 bp, Artificial sequence
  DNA replication origin
cggctggaggtggggagttgaatgggaggggttcagggttgaggtcagtacggggagaagaggatgggtccgtgcgcagttcggatgggtccgggggccgggtgaagcagagggtgagtgatcggcggtccctggagaagaggtgcggctggagccgggcgcagggacagcggcgagcctgctgccgctgccatcactgcagccaccgccagggggctggggagcaggccgcccgccagggacttgggcagctccttggagaaagtcagcgtgccctgaagcgggcgaaaggcggaggaagagaagtcacccggcggtcctgcaaaccccacctctccctgggcaaagcccgcgtccctctctcctccccgcccgcgccctcccactgctgaattcccagcatccaggcctcaccgccagctccccggcgcccctagacttcttgtgacggctcagtagtgggttgggcttcccggccacgccgtctcggtgccgccggctggagatgtgctgcgggggccagtggatagggggctgtgagctcccggaaaggggcaacagcgagggagtataatcaagctccaagcaccggccccctcccatctggccccctggggaaaactctgaagaagggcctttactcaagctccttgctccccttccccacttagcgggtggagcgtcccagaattcctgggaagggccttagacccacctgtttcagttggacctccgagttgaccttgacattgcagatctcacagtggaaagttcggtcctgggcaggagcctctggttcccccggggtgggaggccccagccgagggtaagctttgatgggcccgagcccacttcgggcctccagaattgtcttgtgcttagtacctggagcccagagagggcaggaggtaaggggtggaagaaaaattatccaggcctactgggcctcagaatgcacattcccaggtacaatatgagggggaagagggtgggcacagtgtgggttctttctaactaagctccttgggaccctcccaaagaggtggatcaggagagagtcataggtaaaggagtaagatggagggaggagctgaggaagtaaagggctaaggaacaggggagatggctggagaaggagacaggcagataggctgataggtcttagatggtctagggatgttggaagccaggggcattaggatgtagaggcaggggtggcctgaggacaggagagtctgggtgggggcaggggagtccatacctttgttatgtgcctcaagctgggacagggagttcacagccaccttgcacagagcacagtagagcagccgcttggctttctcctcctcttccttgctacccccaggcaaggaagccggggctggagtccccccttcaccct

SEQ ID NO: 23060 - DNA, 1161 bp, Artificial sequence
  DNA replication origin
gggaattcaaacagaaactcaagttgggccaggaaacccaagttggatgaaaacagtagggagagaggagtgggatggaagggggaagcagagtctcctagttctgcctatgctctgccccatcatgccagcctgctctccagaggggctgaggacacagtaccccgaggatgacttgtggactggccaccccaacatccataccatgagaatggttcctgccctacctgggtccttcctccagggtgagaaccttagcttttgcacaaccccctcccctggtttaagtccataaacaccaactaggagtgggagtggggagtggggaagagggcagcagtggagtcaggtgggtgcttcccaccctcctccaggaactaaggagacaccaggatgaaagtgaggactcctgggcccaatccctgtgcaggtggaatgtgagccactgaagtgctgctccaggccaaggtcaggaggccccggtgacctagatgagggctccctggggaggggtgaaagccagcacctcccagagcccatctcactccagagcttcttccctgggatgctggcttggacacggcctcgaaaggtccataaaacagtcccctcccacctgccctccaacagtagacatgaaggggaaccgctccctgacgctggggcaaaatgaatcaggaagggcaagggagagggaaggtggaaaccagatcaggaacaggaggggtgctatgattatatttccttccattgccctttatctgatggaactgctgccccttgtgtgagcatcccacttccccacccaccaaaattaagacgaaaagggaaaggtggtggaatctcagggatgggaagacctgaggaaggactgagataggaaagagagggagctagggggtatctagagagcaggtgcaagctggtgggggagggatgctgggaaggggctggggctggagaggagggatctgatcagtgtggtcattggagggcaggtgtaggacctgacaggaagtctgaagatttgggggactccaagaatgtgggaagcagaggtcagggtatccagtgtggtggcagtagtctgggggcatgagctgggatcccgagattggttagggccgcgccgatgtgggggatgggccggacagcccgagg

SEQ ID NO: 23061 - DNA, 831 bp, Artificial sequence
  DNA replication origin
gatcagtgtggtcattggagggcaggtgtaggacctgacaggaagtctgaagatttgggggactccaagaatgtgggaagcagaggtcagggtatccagtgtggtggcagtagtctgggggcatgagctgggatcccgagattggttagggccgcgccgatgtgggggatgggccggacagcccgaggactaggcagagggagcggtagccagccccgcaggggcgggcggggacggggtgggggtgcgctgcggcagccgcgggagtcagggagagaggaggggccgggtggcttaccctgcgagaccctgggggccgcggctccatggcccggggtggcggacccgggctggggggccgcgcctggccgggccgggcaggccagggacgcggcgctcgttgcccgggcggctcggggctgtgcggcccggccggcggggagaaggggaggcggcgctggcccgggccggagcccgccccggaggcggggccgaggacgggggcggggacagggacagggacagggacagggagctgaagaggaatgaaagggggctagggcggaaagagggagatgtccattatccagacactcctaggaaagagcttgttctgaagagaaggagccgcttggccccgcggcaggggcattgaccagatgacctcgttgcctccactggggctccttcttgggtccagggtccccaccaactcagacatttctcctttctttcaccccttttgccccaccttccctagatcccctgctgacagtctgtcttcagagtccccagacgacccttccccagcttcctctgcaaacggcggcc

SEQ ID NO: 23062 - DNA, 942 bp, Artificial sequence
  DNA replication origin
accccctgacagcaacaggggttcccaggaacaaaggcaaaccgaggaggctgcgtgcttggcccgtcctcccttgactttactagagcagaaggtctccaggatcccttcctgttccctccagacaccaccccctttcatacctttagtttctgatgcctgctgcccccaggcagtggcctggccctggccccccaggggcctgggcctgacagcgtccccttcccttggttctgccctctgccccctcccttgccagccccctccccctcagcccagtcagtagaatcagccaatcagaatcctggaaaagtggggcagaggggagggcaggggagcagggattaggggaatctgaggcgacagggagggggtggggagggctcaggcacagctgggggctgggagctggtccagaaaggtctggaggggtctgtctctttcaccccatgccaggatgggtggtcagggtgactgagacagagcagggggtcaaggctactgggagtttgggcttcagaattctcagggctaaaggagagggtaagatccttggctttgacccttaagtagctgggggtctgtatgctttgtgtctattccctcctctgtcaccttcaaggttgggatggggtggagagaggacacacacacacacacacacacacacacacacacacagagagacggacagatgaaagtgagtgagaggatgggagagtggtagcagcaggaataggtgactgaggaatcggacagtgacactgagagagaaaaggatagagaacaatggagagatgtcagagagcgaaatcagacatacaaacagagagacactgccgaaaagctggacacagaactagagactagggcagacagaccgagagacagagaacagagacagcgagaaagataaaagagaagagagagggacagatagat

SEQ ID NO: 23063 - DNA, 1184 bp, Artificial sequence
  DNA replication origin
gtgacccacagagaggaacccaggagccgggagcctggagtcgcagagaccactcaccgaggatcatgctggggacccaggcgcccggggttccgcgtcgctctgtcccgggggccgttctggccgggctgggggtacggggggaggagccggggaggagcagaggccggccgaggcggagcgggggcggggccctcagcaggtgaagacgggaggaggggacccgggcactcagggctccgcgagggggcgtcctggcccctcccgcttcctcccgcccttcttcttgctgcctgctggcctcctgggtttacggtgtcactgcggccagggctgggggaacaggacgtctagaagacggtgtgaggtgatggacgaagctggaaactaggatgcctgggttcccgggaagggctgagtctgagggcgggaagtctggtgctgggctgatatggggtgggcaggggagtgggggggggaggggggcgggggtgcctaagtactctgggaggcgatgggccttgggttgggtaggatacctaggttccctccagagtaatggactgagcagggggcaggggaagtgcagcagaaattgtatgggtcctagtttgttgttctggctttggagcaggatgcctgggggctgggcctctgaggtgaaatgggatgttgaagatggatcccaggttgagttctggctggggtctgaatgcctgggtccttagggaaggtctcagcgaggagattgcaatcaatggacctgaggagatggaaatagaagcttgtaaccgagatcattagggcaactggaagatgacagaaaattcagaactgaggcaccttgtagagatgacctggattagggtggggtggcatcagggagcatctatccagggctaaatcagcggcattccccactaaggcgagcttcggtcgaggaggactggtgggggggcatttcgtgaggtggaggggaagatggagggtaggacaaaatgtatgagcaggggagaatgtcaggagggagaggaagtacaggccacttggaggtattcttttcttcttttttcttttttcttcttttttgagacccaagtcttgctctgtcgccaggctggagtgcagtggcacgatctcagctcactgcaacctctgcctcccgggttcaagcattctcctgc

SEQ ID NO: 23064 - DNA, 1011 bp, Artificial sequence
  DNA replication origin
ggagctggagaagtctgggcaggggtctccgggccaagggagaggagagcgcgtgaatggagagctgagggtctctggctgaagtctgtgggctgctgggacctggggcgggtgggggcgcagagggggcgcagaggccgggaagggcttttgggggctccaggagacctcgggatccgtaggggccattgtgcggcgagagaacgggtagaagccgaatgagctacgtgtagtaggaggaaagtcaaagactgagggggtcggaaggttaaatgggggccagcctcatcctcccctcccccctcaactcagaccggggaaagacccgagagaggacggcggctccctctcctttctcctctgtctcctactcctccctccgcccccaatctctgttcaggcgaggggatccgagaactgggggcgagtgcggggaccctggcactggggccctggggctgggggcgaactcagccaagggcgggtgctgggatgtgtcgggaggggtgtgtgcgcgcgtgaaggggggtgggcggtttccctcttcctctggctcttgggaggaagagaaaagctggtttcctgtagctggtcggctggagctgtgctgagaccgggacttctggggctggggtcggaagctggggagacgggggctccgtggggccaagaacgtcagaatgaaggactcaggaccctggaaatctcaaaggaggatccttattcccaactcagcacagtgataagcagacccggaccccgagtgcctagaaaatggggtactgacaggcttgggaaacaggagttagagtggaagcaacattagaaccaagggtgtctgtttaaatgtgggatggcggggagattgggaagcaagagaggtaggtggttgctcctgggctaggccatagatgccagattcctggtcctccacaatgactggtgtaatcctttttcttctacatctctgagctgggagcttcctactgctcacccccaccccaaccccag

SEQ ID NO: 23065 - DNA, 1041 bp, Artificial sequence
  DNA replication origin
cccccccacgccccttaggggtgggggacgcgggctcagagttccagggacccaggaatgcccccccgccagccccctcggcaggcggggggagggctcagccgggagtttggcaaactcctccccgcgttgagtcattcgcctctgggaggtttaggaagcggctccgggtcggtggccccaggacagggaagagcgggcgctatggggagccggacgccagagtcccctctccacgccgtgcagctgcgctggggcccccggcgccgacccccgctgctgccgctgctgttgctgctgctgccgccgccacccagggtcgggggcttcaacttagacgcggaggccccagcagtactctcggggcccccgggctccttcttcggattctcagtggagttttaccggccgggaacagacgggtgagtgaggagggctggagacgggatgggggtgggggagccgcctggagactgggggcgcggctggggtctggaggggaccagggcttaagtttgagggtggagtttgtaaggaatagagctgcagttgggggccctggctagagttgggggcccgcgctggagtagggagggcaccgtggcgggtgaggaggggccctggcgtttgagatcagtggggagacatgtgtccggtggggagaggacacggagctggagaagtctgggcaggggtctccgggccaagggagaggagagcgcgtgaatggagagctgagggtctctggctgaagtctgtgggctgctgggacctggggcgggtgggggcgcagagggggcgcagaggccgggaagggcttttgggggctccaggagacctcgggatccgtaggggccattgtgcggcgagagaacgggtagaagccgaatgagctacgtgtagtaggaggaaagtcaaagactgagggggtcggaaggttaaatgggggccagcctcatcctcccctcccccctcaactcagaccggggaaagacccgagagaggacggcggctccctctcctttctcctctgtctcctac

SEQ ID NO: 23066 - DNA, 878 bp, Artificial sequence
  DNA replication origin
cgccccgtctgagaagtgaggagtccctccgccccgcagccaccccgttgggaagtgaggagcgtctccgcccggcagccacccgtccgggagggaggtgggggtcaacccccgccaggccagccgccccgtccgggagggaggtgggggggtcagcccccggcccggccagccgccccgtccgggaggtgaggggcgcctctgcccggccgcccctactgggaagtgaggagcccgtctgcgcggccagccgccccgtccgggagggaggtggggggctcagccccctgcccggccagccgccccatccgggagggaggtgggggggtcagcgccccgcccggccagccgccctgtccgagagggaggtggggggggtcagccccccgcccggccagccgccccgtccgggaggtgaggggcgcctctgcccggccgcccctactggcaagtgaggagcccctctgcccggccaccaccccatctgggaggtgtacccaacagctcattgagaacgggccaggatgacaatggccgttttgtggaatagaaaggggggaaaggtggggaaaagattgagaaatcggatggttgccatgtctgtatagaaagaagtagacatgggagacttttcattttgttctgtactaagaaaaattcttctgccttggcatcctgttgatctgtgaccttacccccaacaccgtgctctctgaaacatgtgctgtgtccactcagggttaaatggattaagggcagtgcaagatgtgctttgttaaacagatgcttgaaggcagcatgctcgttaagagtcatcaccactccctaatctcaagtacccagggacacaaacactgcggaaggccgcagggtcctct

SEQ ID NO: 23067 - DNA, 1261 bp, Artificial sequence
  DNA replication origin
atgagctgttgggtacacctcccagatggggtggtggccgggcagaggggctcctcacttgccagtaggggcggccgggcagaggcgcccctcacctcccggacggggcggctggccgggcggggggctgaccccccccacctccctctcggacagggcggctggccgggcggggcgctgacccccccacctccctcccggatggggcggctggccgggcagggggctgagccccccacctccctcccggacggggcggctggccgcgcagacgggctcctcacttcccagtaggggcggccgggcagaggcgcccctcacctcccggacggggcggctggccgggccgggggctgacccccccacctccctcccggacggggcggctggcctggcgggggttgacccccacctccctcccggacgggtggctgccgggcggagacgctcctcacttcccaacggggtggctgcggggcggagggactcctcacttctcagacggggcggctgccgggcagaggggcccctcacttctcagacggggcggttgccaggcagaaggtctcctcacttctcagatggggcggccgggcagagacgctcctcacctccctgacggggtcgcggccgggcagaggcgctcctcacatcccagacggggcggtggggcagaggcgctgcccacatctcagacgatgggcggccgggcagagacgctcctcacttcctagatgggatggcggccgggcagagaggctcctcactttccagactgggcagccaggcagaggggctcctcacatcccagacgatgggcggccaggcagagacgctcctcacttcccagacggggtggcggcccggcagaggctgcaatctcagcactttgggaggccaaggcaggcggctgggaggtggaggttgtagctagccgagatcacgccactgcactccagcctgggcaccattgagcactgagtgaacgagactcggtctgcaatcccggcacctcgagaggccgaggctggcggatcactcgcggttaggagctggagaccagcccggccaacacagcgaaaccccgtctccaccaaaaaaatacgaaaaccagtcaggcgtggcggcgcgcgcccgcaattgcaggcactcggcaggctgaggcaggagaatcaggcagggaggttgcagtgagccgagatggcagcagtacagtccagcttctgctcggcatcagagggagaccgtggaaagagaggga

SEQ ID NO: 23068 - DNA, 835 bp, Artificial sequence
  DNA replication origin
ccggaggactgcggggggacagctccatgctcagccacggtctacggaacagaaggaggagacagcacctcggctcagcttcagccccagccgagagaccctcaccccccatcccaggcccttcccacctgcggctggcgtggaccagccaggccggtgtctctaggctcggcccaagctggcagagctgcagctcctgcggctcctcctctcccgctgcccagccgagctttgggctcccagtccaagctctccgcaccgccgctgctgctgccgctaccgccgccgccgccgcgcgctgccagagccgcctcctcgcctctctcctcctcccccggccgggttcccccctccctctgctctccctcccttctcctcagcctgcccgccagtctctcactcctcacagccactcctccccctcccaaaggaacgattggaagccgggggcacacacagacagaagcgcccaagggcgagcgcacgcacacaggcgccggggacgagtggctgcgtgtgccctgtactggcggatgtgagtgcgtgtttacagagtgcagcggaggcggcgggctggacttcggtgtgggtggttgtgtgggttctctccgtgtgttttgagtttctgtgtatgtggttgtggttccatgtatccacgtgtgcctagctgcctgcgtgtcccatgtctgagtgcggggtaggggatgagcacacatctttccctgctagatctggactcggaacccagtcggaccagaccccacctgtgctcctgtcttggaaaagttcagggtgtgccctgagctgtgatggcatcccacacttggcctcgggt

SEQ ID NO: 23069 - DNA, 2338 bp, Artificial sequence
  DNA replication origin
aaactcaaaacacacggagagaacccacacaaccacccacaccgaagtccagcccgccgcctccgctgcactctgtaaacacgcactcacatccgccagtacagggcacacgcagccactcgtccccggcgcctgtgtgcgtgcgctcgcccttgggcgcttctgtctgtgtgtgcccccggcttccaatcgttcctttgggagggggaggagtggctgtgaggagtgagagactggcgggcaggctgaggagaagggagggagagcagagggaggggggaacccggccgggggaggaggagagaggcgaggaggcggctctggcagcgcgcggcggcggcggcggtagcggcagcagcagcggcggtgcggagagcttggactgggagcccaaagctcggctgggcagcgggagaggaggagccgcaggagctgcagctctgccagcttgggccgagcctagagacaccggcctggctggtccacgccagccgcaggtgggaagggcctgggatggggggtgagggtctctcggctggggctgaagctgagccgaggtgctgtctcctccttctgttccgtagaccgtggctgagcatggagctgtccccccgcagtcctccggagatgctggaggagtcggattgcccgtcacccctggagctgaagtcagcccccagcaagaagatgtggattaagcttcggtctctgtaagtccccggcccgggaatggggggaagggaccttagggagcctgagcgggaggaggaggggggataactggagcagggctgtgggctggtagattctctttggcacagatgttggcaggtgcgaggaagcacggccctgacacgcgtggccaggccacatgtgcaaggcatgtgcggagcaagctggccagttggagcgggcttaggagttgcaaaggtaacgatgtgcctgtgcctgtggaccccaggctgacacacgcagcgcctagaggcagcacagtatatgcagtgtggcagggctgcaggagggcagtagaggtgccaggctgactcacacatatccatgtgcagagttgtgcagatgtgagccacatgacatgtgtgtgcatgagtgagcgtgggtcacagaggtatgtggagtgattgcacacagctgtagatctactgcatgggaatacttgtgccaacctgtgggtcatatgtatctcagttgggattggtagtttctgcctcatgcacaggaagtggggtgggggttaccccatgcctgagctgctcatctcttggggcctggaaactcactctatgtattaatgatgaggggacccacgtggaatctggagggggggttggagcccccacctggaagctgaaggaggtgatgatggtgaagaaatattgattgacaaaggcaaggtaactggcttaatcagaggctttttgtttatatagggtcttccaggatctccaagcacatttgggcatcttttcctattgttgcagtaccagggcatgtggggaggaataaatgggggaaggaagaactcaggtatctgatactccagtcccaggggaggaaaggaacttttcccctgctccttagaaaaaaaagaggattgggtcaaagacaagccatgcaccatgtttatctcccagtcagctgctgccattgggaaatctccgcagtctgttgattcttaatcagggaacaagagaagatgtccctctctccgagatgaatccatggccccaggaaagaggaaacagataggagactatggatgtttagagaggaaacacagtaaacatagccctgaacccagttcctcctcaatgttctccatagtgagcaccgaagctttctatttctgggttctgggagagggagagatgggggtaggggatggatagatgcttatgttgtattgttctttaaatacttcacctatggtgataagatgacacctttttatggcagatgggtctgatttatacactagctacttggagaggcgttagggagaactgaggcatagtgggcaacaaggcttggaatccaaatgtacttctcagtcctcctccttggctgcctctggccaatccaatttgctgggctctatgaagcacagccttggaatgagttctgggatgaagaaatggaaaaccagattgaactgatttttgttgggaggagcactgtgtgattcttgatagaaaatgacgctgcgttaatggtaaatgagctggggaaaggggcagataaggaagtagttgaaaggtaaagaagggccccaggtccataaatgggagaattcaggatggctcccctaacactagtggctcat

SEQ ID NO: 23070 - DNA, 686 bp, Artificial sequence
  DNA replication origin
cctgcatcccccacccagtcaacccccactagagtttctgagcttggtggtggcgctgaagggaatcagcagcagtgcgggaggggcctggggaggggtcggtaatggagagggagcctggaagggtgggagttggaagaggagaaacagctctccctgtcccctcctaactgggggccaccttgctgggctccgaaagtgataacaggaagggactgaggaccactgagagggctggggctccagggagaggggagaggggtggtcgagttgtaggctgaggctcccttcttcaagtctccgcacatggcccttattcccaactcctgccctttggagtggggagtccaggtgggactgagccagcagcactgggaggccagaggtggagtctttccaggggctggggtccaagctgaacaatatgcaagggagaagcactgtgacagccttggctcaaggggtgggagtccagggccctggcccagcctcctagcctggtctatttttagctcagagcagcctggcagagggggcagtgtatgagagtgtgtgagcaagtgtatgcctcggtgagagtgagcgtatgtgtggagagggtggccacccgtggtccttactactccttgtttgccaaatatttgcttatttgcctattgctccatctctttgtaatctctgtccat

SEQ ID NO: 23071 - DNA, 1202 bp, Artificial sequence
  DNA replication origin
cgtggctgcaccggcggctgcgggggtcaccgccccgcgggccgccgagtccgggcgtggcccgggagccgtcgtagtggacagctcaggcagatacctcagtgtcctcggagttttgggcagggcgttggggtggggagtggctaggaagaacttctcctagccggagcaggttgttggggctaggaaagtagaggggcgctgcaggagaggagactaaacgcgagaggaagattgcatttatgattttaaagggggttgtattatagagaaaagatggaaaggggatttaggcatgcagcaggagggattaaggttagacttcgagagggactttcctttgcaaggaaaacactaggcggaggtaaaaacttggagggaaatacgaagtctgcacacccgtcctgtgttccctcagtgccagggagaggaaactgaagacttcagagggtctccggagggcgcgtttctctcgaagtgcctgtgggagtgggtggagggcttggggagagaggaccatctgggactcgacaaaaggaataacgatggtggggagccaatcctgcttgtgaaatcgagttctctttctgcttgctaaattaggggatggtaaagtaggtgaaaggcctgcaaggggaaaatgcctggggagggagagagaaactcctttggtggggtggcttgtttacagatagggttggtttctaatttcactattggcaggatactgaaaacgagctgctgtaactgaaggaatggaggttagactatgggaagaactgactagtttggtggaagactaagatgccagtcaatacgagccagtgagggagacaggatattcacaggagctggtgtgctcggtctaaggactggggatcactagatgggggaggggatgtgctgggcactggggaggggtagggctggatgcatcttttcgggaggagaaggtggagagaagaactggggatggggaggagggcacagggagtcctggaagaggggaaggggtctgtctctttagccttaaaccaagcaactggcaagtgccatacagattcatgcctggttcttggagaaccatatggtcatcttctcctctaaggtgtcagcctcaactctcagttgcctcctctcctgggcagccctttccagaccttgatttcacaaggccccttcccctctaacctcacaaaata

SEQ ID NO: 23072 - DNA, 880 bp, Artificial sequence
  DNA replication origin
ccttctcaccattgtatctcagagcacagaacagggctctgtcagtttcagaaaggattataagatgaaggagaaggaggaggaggaggaggagaagaagaagaggaagaagaggaggaggaaaggaggagtgggagaaggagagggaggggaaggagagaagaagaaggaggaggcggcggaggaggaggaagagaagaagaaggcagcgactgaggaggaggaggggaggaggagtgtgagaaggagggggaggggaagagggggaggagagaagaagaagaaggaggcagcagctgaggaggaggaggggaggaggagtggcagaaggagggggaggggaggaaggggaggagagaagaagaagaagagggaggagaagaaaaagaagagaggagaaggagggggagaggaggagaagaagaagaaattttaaaataaaaagaaagaattaagaaaaattatttaaaacttggaaataagacaggaagactactgtgcaccctttcaaagtcgtactagtgttagagtaggtagctagacagtaattagcagagtggagagcccccctaccaagaaatgtcaggcgaccatcaggtgatggtcaggtagttgttaaactgtctctctaaaataattgttggtcacagctggcaccaggaaaagacagcctcccaatagatagaaaacacctgaagctagtgatcagcagctgtgggctcaagtatgctcactgagaagcaaaatggcagcgtttaactggtatctgaccttccttgaggaacgcttgttaaggaaaaaatgcttcaagtgagcatgtgcataacttcagtagacacactgggcatgtggcctctcccaagtgctggcaggccaccat

SEQ ID NO: 23073 - DNA, 965 bp, Artificial sequence
  DNA replication origin
gcagcggcaagtaattgcaactcttctgtattattgtacaccttgaagacaaggttaattaagacctgtgtggggtttaagggccaaaatctaatttttggagctttatttaatgttgggaatgaattgcgtaataaaatgcatattgagaataagacagccttctgacctttcagggtctagggctgtgaagcgtctcagagttgctgccaaataagtcatgaactggggtgggtttttacatttgatgaaaaagagcctaaacactaactgatttgggagaggtcggataaagaaaaaggagcattaaccttgactatgcctttagctccagccaccgatttaagaggaaattgctgggcaggtggcgggggctagtcggggaaagaaactgtaagtcggactgggtgtgagaaggggaggtgatagaaggattatagggtgggggagcagagcctgaggaagaattggagcctgattcagcctggtggggagcgacctgaggaggagcagtctggggatgaggggagaggtcagatgggtctgtagaaaaggaatattgaaaagactcagtgatgcttggggttaggactgaggggaagggtggaagggaaagaaggaggatttgggatgagtcacattgggaaaagagactagagagggacccatgtgtaaaagaatgcatggacctcaggcacctcagaccgtttgcccattgtacgacaagaattatctagatcttgtaggatggaaaaattgaaagtgcctttttctggctatttggaaccattgttgagtttgtattggggttaagcagcattgcagaagaaaataaggcatttaggtttcaggtcaggtgtgagttgaagaggttttaagttcttgagaacacaggctaagggagaagaaggaggaatggagggtggaaggttgcctatagtgaaggaggcaagcccagagaaaag

SEQ ID NO: 23074 - DNA, 1042 bp, Artificial sequence
  DNA replication origin
cgtttgacagccaatgtctggggtttacccggcaagtgcacagactgcatatagaaggcagcagggacctgggctacaacaggtgaggaggtggtagccccaccctttaccacatgtgctgtcccctgcacaggagcaagggtcatcccaggggccaatgtgggagggcactcctgcagtgcaccaggagcctgggatgaaggtggcgaggaggccaaatgggcctgaccagactgcactgtacctggcatcccccgggaagtaggtacagcagctgccagctgtgccaaccccaaagcctgtgcctgggctgtacctggctgtcgagtgcctacaacttgcacagggatatggggtggtggttgctgggcagctgacatcttagcggcccctaactgaggcggcttgataggtgctacaggtggtttggattggatgggaattggtggcttaggggctgcatcaggtggaagagacaagggtgaagactgaagcatgggctgaacgaccagggtttgggcttgctgctgggactgggaaggtgggacctgctgagtaggtgggacctgtggtggctgaggggcagtgagggtggtggcttgcggctgctgctgttgctgctgttgctgttgttgctgctgctgctgctgcgccaactggaggtgtgtagctgtgtgaaggagctgggactgccagtgctggaactgctgctggtggtggatggcaatctgctgctggatcaccacctgtttctgctggaggtggatctgttgctgttgctgaatcagtgaatggggctggatctgtgtgtaggtggctgagctaataagtgtctggctgggcgcaggtgtggctgtccgtgtcaggttcatgcccacattctgctggccactcccatctgcttctgccttcttggctgctgcactttctgcctctgtctggctgccctggctcacagtcactgtttgggctgcaggcaagggctgcaccactcctgtacccttcctgggacagctcccaccacccattcctgaggaaggca

SEQ ID NO: 23075 - DNA, 1037 bp, Artificial sequence
  DNA replication origin
tgctggtggtggatggcaatctgctgctggatcaccacctgtttctgctggaggtggatctgttgctgttgctgaatcagtgaatggggctggatctgtgtgtaggtggctgagctaataagtgtctggctgggcgcaggtgtggctgtccgtgtcaggttcatgcccacattctgctggccactcccatctgcttctgccttcttggctgctgcactttctgcctctgtctggctgccctggctcacagtcactgtttgggctgcaggcaagggctgcaccactcctgtacccttcctgggacagctcccaccacccattcctgaggaaggcaactgacccaaaccaccatgtgcctgcccacctccacctggacccatggaccctgggatgctattcccactgcctccaccagcttgactaaggttgagggactggtttgtggccccagaggaagcctgtgccaccgctagggcctggctagaggcctgggagaggctagagacaggggaggctcctggaggaatggccttctgagtggagccttgcatctgaggtccttgagctgaggcctgttgattccttactgccaagttctgaacctgatctgcatctgcatgaactccaggagactgagcagatggcacctcctgctggactgcagccactgccccattaggcatcaggatgagttgggaggctagaggcacattccgacccagggttcggtttacctgcaataggtttcccagctgtggccgtagatacatctgggcctgagactggttgaggggtggggaggtggtgttccccagtagcacagattgggtcaaggtggtagcactgggagagctcacactctgggatcggctgatgagctgggcggccgatgtggtggccagattgatcgaggcctgggtggtggtagtctgctgctgtgtagtgctggtgtttggggagctggcctgccgactggcagcaattgtggcctgtagtgcctgtcccctccctctcgggccagctggctgctgacctct

SEQ ID NO: 23076 - DNA, 856 bp, Artificial sequence
  DNA replication origin
gccccatctgggatgcgaggagcgcctctgcccggccgcgaccccgtctgggaggtgaggagcgtctctgcccggccgccctgtctgagaagtgaggagaccctccgcccggcagccaccccgtctgggaagtgagaagcatctctgcccagcagccgccccgtccgggagggaggtggtggggtcagccccccgcccggccagccaccctgtccgggagggaggtgggggcatcagccccccacccggccagccgcccgccgggccagctgccctgtccgggagggaggtgggggcattagccccccgcccggccagccgccccatctggaagggaggtgggggggtcagccccccgcccggccagccgccccgtccgggaggtgaggggcgcctctgcccggccgcccctactgggaagtgaggagcccctctgcccggccaccaccccgtctgggaggtgtgcccagcagctcattgagaacgggccatgatgacaatggcggttttgtggaatagaaaggggggaaaggtggggaaaagattgagaaatcggatggttgccgtgtctgtgtagaaagaagtagacatgggagacttttcattttgttctgtactaagaaaaattcttctgccttgggatcctgttgatctgtgaccttacccccaaccctgtgctctctgaaacatgggctgtgtccactcagggtcaaatggattaagggtggggcaagatgtgctttgttaaacagatgcttgaaggcagcatgctcgttaagagtcatcaccactccctaatctcaagtacccagggacacaaacactgcggaaggccgcagggtcctctgcctaggaa

SEQ ID NO: 23077 - DNA, 1154 bp, Artificial sequence
  DNA replication origin
catcatggcccgttctcaatgagctgctgggcacacctcccagacggggtggtggccgggcagaggggctcctcacttcccagtaggggcggccgggcagaggcgcccctcacctcccggacggggcggctggccgggcggggggctgacccccccacctcccttccagatggggcggctggccgggcggggggctaatgcccccacctccctcccggacagggcagctggcccggcgggcggctggccgggtggggggctgatgcccccacctccctcccggacagggtggctggccgggcggggggctgaccccaccacctccctcccggacggggcggctgctgggcagagatgcttctcacttcccagacggggtggctgccgggcggagggtctcctcacttctcagacagggcggccgggcagagacgctcctcacctcccagacggggtcgcggccgggcagaggcgctcctcgcatcccagatggggcggcggggcagaggcgctccccatatctcagatgatgggcagccgggcagagatgctcctcacttcctagatgtgatggcggccgggaagaggcgctcctcacttcctagatgggatggcggccccgcagagacgctcctcactttccagactgggcagccaggcagaggggctcctcacatcccagacgatgggcggccaggcagagatgctcctcacttcccagacggggtgacggccaggcagaggctgcaatctcggcactttgggaggccaaggcaggcggctgggaggtgtaggctgtagtgagccgagatcacgccactgcactccagcctgggcaccattgagcactgagtgaacaagactccgtctgcaatcccggcacctcaggaggctgaggctggcggatcactcgcggttaggagctggagaccagccaggccaacacagcgaaaccccgtctccaccaaaaaaataccagtcaggcgtggcagcgcgtgcctgcaatcgcacgcactgggcaggctgaggcaggagaatcaggcagggagattgcagtgagccgagatggcagcagtacagtccagcttgggctcagcatcagagggagaccatggaaagagagggagagggagaccgtggggagagggagagag

SEQ ID NO: 23078 - DNA, 1001 bp, Artificial sequence
  DNA replication origin
ttcttagtacagaacaaaatggagtctcctatgtctacttctttctacacagacacagtaacaatctgatctctctttcttttccccacatttcccccttttctattcgacaaaaccgccatcgtcatcatggcccattctcaatgagctgttgggtacacctcccagacggggtggcggcagggcagaggcacaccccacctcccagacggggcggcggctgggcgggggctgccccccacctccccgacggggcggctgccgggcggagacgctcctcacttcccagactgggcggctgccgggcggaggggctcctcacttctcagagggggtggccggtcagagacgctcctcacctcccagacggggtggcggtggggcagagacactcctcagttcccagacggggtcgaggcctggcagaggtgctcttcacatctcagatggggcggcggggcagaggcgctgcccacatcccagacaatgggcggccgggcagagacgctcctcacttcctagacgggatgacggccgggaagaggcgctcctcacttcccagactgggtggcccggcagaggggctcctcacatcccagacgatgggcggccaggcagagacgctcctcacttcctagatggggtggcggccgggcagaggctgcaatctcggcactttgggaggccaaggcaggcagctgggaggtggaggttgtagcgagccgagatcacgccactgcactccagcctgggcaacgttgagcactgagtgagcgagactctgtctgcaatcccggctcctcgggaggccgaggctggcagatcattcgtggtcaggagctggagaccagcccggccaacacggtgaaatcccgtctccaccaaaaaatacgaaaaccagtcaggcgtggcggcgcgcgcctgcaatcccaggcactcagcaggctgaggcaggagaatcaggcagggaggttgcagtgagtcgagatggcggcagtaca

SEQ ID NO: 23079 - DNA, 737 bp, Artificial sequence
  DNA replication origin
cctactcaggaacaggtgctgggaacaggcagttctttcaaaccagcactgttggcctggctgcttgggttggcgtgtatgtgtgtgtgtgtgtgtgtgtgtgtatctactgtgtatgttgatcccttatccagatagtatgtacatgcaacgtgatgactgcatgaccaagcatattaatttgtccttgccagggtttgagaaaactgacatttgccccttctctttagtccttgaacactctctttagtactgaggggttgggcctgggcagctctaatgagattgggtcattctgacctctaactcctgtccctgtccctgcccctgccccatcttgcaggctgctggtgggtgctccccaggccctggctcttcctgggcagcaggcgaatcgcactggaggcctcttcgcttgcccgttgagcctggaggagactgactgctacagagtggacatcgaccagggaggtgtggccctgcatgaacagagtgggggaagcgtgtgagcggggaggagaggacttgggctcctcttccctcccctaattcccagtgtcctgcctctagctgatatgcaaaaggaaagcaaggagaaccagtggttgggagtcagtgttcggagccaggggcctgggggcaagattgttgtgagtattgcttctcatgactgaatgcacggatggggtgtgtgtgtgtgtgtgtttatggtgtgtgcatacgcataggtgtgctta

SEQ ID NO: 23080 - DNA, 675 bp, Artificial sequence
  DNA replication origin
cacagatgcctgtctgtaatactgcctaacatggttttgggccttgccccccaggaagggagatggaggagaagagtgtgggagagaggcgttgaggtttgtcccactgccacttctgagtctctccttctgcaaagagaggacccatggagccagctgggtgtcagtcatcttacctcacccccgccttcactctggcttgggggttcagccccaggggacccaggcagcctccattcccagcactgtgctcccctggggaagacggcttggctgtgatcatggaaaattgtcctgccaagaaagttgtagctgggaaagaggctgagggggaggcaggagagaagactgggtgggggtggaagggaaggagaaatcatggacatggggagaaggaaggatggggaaggggattcaggatgtcgggaagagaatggggtagcattggaggcagaaggagaaacttgtccctacctccatgccagccagagtgactgatggaatcctgggctggcacagcttctgggaggtggggtctttgctgggtccctgatgagggggcagtgggtccgtatctagcctcttgcctggcctctgaagctggtccctgagccacactctgatgccagtctggggccctgttacttttgctcccagcattcttggcatttctgg

SEQ ID NO: 23081 - DNA, 1073 bp, Artificial sequence
  DNA replication origin
ccatgggacgatccctgcgcgagctcccagcgaatgcaagggaaatctcgcacgccccaagccccaggtccccccaggcgcgtctctggtctccaaagtctcgttggtctttcagacgtctcccagacgttcgccccgccagccctcccgcccgcccgccgctccgccaccccgccgccccagcaccggctaggacaactacagcagccgcagctccggcgcccactccggctcccgcctcctctcccggggacgccactcaggccccgcctccggccccgcccctcgctcccgcggcaggtggagacccaagcccgtctccaaggggatgcccaggctggtggctgggatggaaactagccttgctgaccccccaccaccacgccccccaagcccagcaccgtctccggctccgcccctgcgcggcgctctcctccccttctcccccaaccccatccccaccccgggagtggtggaggcggcgccttggaatgcggagggagagaagtacagatagaaagagaggggctgaaacagaggaaggagggtaagagatgagaagttgggaagacgctaaaagacaacctgggaagagagatgtgcagatagagaggaaatgaaaggggagccgtcctgggcctgggtgcagcgtggcatcttagtgctccctgttcccccatggtcacatagagcactctttctgctgttgggatcagaccgctgccctcccccatcctatcccatcccccgcccccagcccggcaatgaccacagcagtgctagccacatcgtcaggattcaagggaacagagaaaaagaggcaagaagagagagagaaactcgggagatacggggagcaaatggagaaatggaaaaaggaaaggaatagagaggaagaaagaagggcaagagattaattgacaagggatggaatgaagggagaaaagaaaacgactggggatgattacaggaagaggaaattaagcagtggggaggggagtgggtgtcaaagaaggcaaagatgaaagagactggacccaagaggcagagggatgtaaagggtgtccccagct

SEQ ID NO: 23082 - DNA, 2027 bp, Artificial sequence
  DNA replication origin
aactttgcttcgaagttccctgggcccgggcagggtgtggcgggggtgctggctgcactttttttttttttggtgggcggggaggtcagagcccaggggaaaggggctggggcgggggtcggggttgggctgaagaccgtttctccaggctgggtgttgggtggggaaagggtgtttgacgcccggagactggcgggccgagggtcggcgtcaggctcaagcccctgccggcgcccttggatctgtcctgggccccagaggcggcggggcggggtccgggcttcgcggccgtcgcccccacccctctcctgcgggtaaagagggggctgggagacgtggatccgaccgcgggtttccgggtgggaggggccgggaatcggggccgtgaagggaagccctcgagggccggccgggagcccggaaaccgaggtcccccttcggccagttttaatccccccgccctcccctctgccccaggcccggcagccatggcggtggaaggaggaatgaaatgtgtgaagttcttgctctacgtcctcctgctggccttttgcgtgagtggcgaggggtcctggggggcgcgccggcagggtgcggggagacctggctccacagtggtgagggctgagggaatgagaattaaggcagctggagaccagatgtggaaagaaagccagggaaagacagcgcagccactccctcctccagttttcctggacacctgaggcttgtttccaccgagaatggccatcctgggtgtgcagcaacccctacccccatccctcctggcccttcctgtctggtgacccaaccacttgtgatatggggcagtggggcaaccagccaaccgcctgatgctatcgccatggggcttcccttcgctctcccttctcccctctctccctccccaaccctctcatccctgtccagcccctctccccctttccctcctcccagcgcttgggggtgaggaagggctctgcccacttcaatttgctcctgccctgggctcctggcttgagaggctactgtttgtctagggagggacacatcactcttgctcccttttcctcttcccttctcctggcctaactggccagaggaaccttagtcacagctgatgcgcgcgtgggatgtgcactggaggatagtgagggggcagttctgggagagaattgagctgggagccctggaggcctgtagaaagcattattctaggtcagaaatacgtgtcttgaggtcaaggctttctgggaggtttttgaatttggtcatgtccctgattaaagagccgggaggggatcaggggaggtaggggcaggcaaggatgggtcatccccctaccccacagccaaagaaattccctagaggtgtgagaatctctcttccggatggggtcaagtctgtgtcctaggtgtaccccctgccctccaccatggagggccactgtgttgtggatatggcctaatcctcacctgattttctcttaggcctgtgcagtgggactgattgccgtgggtgtcggggcacagcttgtcctgagtcagaccataatccagggggctacccctggctctctgttgccagtggtcatcatcgcagtgggtgtcttcctcttcctggtggcttttgtgggctgctgcggggcctgcaaggagaactattgtcttatgatcacggtgagttgggggcgggaccaacatgggcggtctgggactgccagagcagcttggttcgggctcaggaaggtgggtgaggtgggtgggtgaggaagacctttgtgagtgtccagggaccggctgtgccaaaacgggcccctgtaatgcatagactccaaacttgacttctgtcctttgctcctgcagtttgccatctttctgtctcttatcatgttggtggaggtggccgcagccattgctggctatgtgtttagagataaggtaagcagggaataatgggaagggcctgcctcagccgggtctgggaccctggtgcttgaattctgactgcaacagtgctcctccgta

SEQ ID NO: 23083 - DNA, 1213 bp, Artificial sequence
  DNA replication origin
gcaaagttgctccagggcggctggagagcgccggacgagtctccgcgggcctggggcgagccctggaggaagggactgcgggtggtctctcccagcccgcgccgaagtccgccgggtccccgcggcctcacctgggcttcccaaggctggctgcgcgttcctctcccgccgcggctccggggctctctagctgcgccccccggctcccgccccgcctgccgcgcggccccgccccgggctccagccacggtcccctcccccgccgagtggccgccggcctccctcatgtgacgcggtaacagctgcggcctgagtcactgggcccggcgcggggtgggccgagccccccgcccggccagggccacgtggcccctacccggaagaaggcgcccacccccgcaaagggaaagccgcaagggcaagacctcggggcgcctggggcccccctctggcgctatacctccgtgccaactcggggtaggagagcggggcggagcgcagcctgggtcactctggttcagagaagcggacgaggtgggtgagagttaccctctgagcgccggggcggagagctgaggccgggtgacaatgtggtctgtgaggtttccccatcctaccgtaggggatgagccagctctctcctctggctccaactctgtgcaagccccctccccatccgactgtgcagacagctggggactgcctggggtcgggtggggccagaacaaacacttccagaaagtccctggctcacatcctgggtgtctcccaacattctacagcattctagagtggggatttctggcccccctctattagcacagcttctccattttccagggatcctagtctgagaaaaggggaggaagcccttccccgaagccacgctacccagtcaatcaagacacgtccgcgtcgggtcccgccctctgggggaggattgacaaggtctgtgcttccagcctcccagacagctcctgcatccgtctgtgatagcgagggcttgggggaagacacgaaggcaggagaggcttacatcctctggatttccccgtcttatcccagaagacaaagccaggtgagggctggaagcgggctagggggatcaagctgcctccctcccttgtgtgccaggggtggtccccagaaggagctgatctgaacaggccggagagtaggaccggccgtcacacccccacacctccagcctcgg

SEQ ID NO: 23084 - DNA, 1254 bp, Artificial sequence
  DNA replication origin
gaatgagggagcaagggccagagagagatgaagagacagagatatgagggggcgggggggcggatatagagggaaagtcagagccagagagaccaaggagaatcagagagataagggggaagagacagagataggaaaaggaggaggagagagggagagacaaaggaggaaaagaagagtcagggggaagacgcagaggtgagagacttagctagagagggaaattgtgtgtctgtgggagacacagaaccaagaaggaggaagactgggacaactagtgggagagttagagtggagacaaaaatggggagaagaggggtaccactagatagggggagacagaggtctacagagccagaccagaagagatcgggggtcatggagatgggaacagcggcagaggaacagaggacagaagagtgccctgggaaaggggtgggggggggggtgggggggagagaaatcaggatgggggaggagagagaggggcacagacagggagacaacaagggagcccctgaggaggcaggtgcaggggattgggggtgggggagaggaaaggcagaaactcctgagagaaggagccacaagagtcagccttggtgggagcacagagagcccaggggacagaggtggagaacttgagaccagaggagctctagccaccagaggtagcccaaagaagatgctcaaggaagccatggaaggaagcaccaggctaggctcatcagagggattaaggggactaggagaggaagaggtcagggacaacctaagaaggtggagaggtgatgggaagaactgaaacagagggaagacatagagctgggaagactgtgagcttgaaactggggcttaacagggctaatgtagtcagccggctggaaaaggcaggagctagaggccactgggggaagggtgagaggagatggctggaggctgttatacttggggagaaatctagatctctggatttctagctatatctttggatctgcagggtcttagaagtctgagaaggggctggaggttgcaagggtgagcatgggaaagaagtctgcgctcagatgcacgagatgaaatacagatgtgggaccagccctagtcttcaggtgtgatcctgggcagtcagagagcagagtaaaacagtactaaggtgaaaaaatgttttgaatgtgcttaacttctgacttcaggttttccaggcttatttctggatctgaaagccctggagcaatagtcaaatggaaaatg

SEQ ID NO: 23085 - DNA, 968 bp, Artificial sequence
  DNA replication origin
gcggctgtgctgccgccaaacgcacacggggcagccgtccggctcgggcgccacggacggggctggccggctggagcgctcccccccgacccccgccgctgccgccgccgccgccgccgccgccgccgccgcggggccctcggccgcctccccccggggccgcagctccagggcgaggagcaggaagcccagcagcagcggggccgcgagcaccatgctggaggggaggggagggaggactggggggcggggacgccggagtcccgcggggagggggcggagggaggagggagggaggaggagggggtccgggcggcgcgggattgggggctgcccggccgaggggggacccggggggccgggggcggcgggcgcgcgggcggggcgggcgggcggccggggcgggcggctgggggggcccgagcccgggccaggccctttatagccccggcccccgtgtcgtcagcggccgcgattggctgcggagccaacaaaagaggcagcgctgtcatccgaggcgagagagggagccggagagagccgaggaatagagagagggagggaatgagggagcaagggccagagagagatgaagagacagagatatgagggggcgggggggcggatatagagggaaagtcagagccagagagaccaaggagaatcagagagataagggggaagagacagagataggaaaaggaggaggagagagggagagacaaaggaggaaaagaagagtcagggggaagacgcagaggtgagagacttagctagagagggaaattgtgtgtctgtgggagacacagaaccaagaaggaggaagactgggacaactagtgggagagttagagtggagacaaaaatggggagaagaggggtaccactagatagggggagacagaggtctacagagccagaccagaagagatcgggggtcatggagatgggaacagcggcagaggaac

SEQ ID NO: 23086 - DNA, 1321 bp, Artificial sequence
  DNA replication origin
ggggggaggcggccgagggccccgcggcggcggcggcggcggcggcggcggcggcagcggcgggggtcgggggggagcgctccagccggccagccccgtccgtggcgcccgagccggacggctgccccgtgtgcgtttggcggcagcacagccgcgagctgcgcctagagagcatcaagtcgcagatcttgagcaaactgcggctcaaggaggcgcccaacatcagccgcgaggtggtgaagcagctgctgcccaaggcgccgccgctgcagcagatcctggacctacacgacttccagggcgacgcgctgcagcccgaggacttcctggaggaggacgagtaccacgccaccaccgagaccgtcattagcatggcccaggagagtaagtgggctgcggggcgcgagcagtggggtgctggctctggccccgcgaagggcgccttctgctccaagcggggcgctccctgctgccccggcccggaagctttttctgcgaaaacttgacgaattagggagcgggggctacttcatagaagttttccgagcggtggagatgggctgcaaagttgtatgcacgcctagttcccggaggttggggcgggggaaatggggcgggtttcgagatagtgccttccacccccagtatgctaaaaagatccttgttggagtccggggaagctggggctgggcagtgactctgtcctgaaaagccgtggtggggaggctggagaacagaatcgggaggctgcaggacccccgcagccccagctggactgcagtgctctctgcttcccagtggccctggcggtaactccccactccgtgctccgttcgcaacgtgcccaacgggttgcagagaactgtgtgctttctcccaagaatagggtcccagagccctgtacacctcctggcagcccagctggcaccctttccatcctgacccctgtctcagaccgggtatcccaaggggtcggaaaagctgtgccttcttgatactgaccgagctcggagagctcaactccattgcgctgggggctaaggacactcattggctactcaaaccttagtgttccatcccttattcgcccacccctaccgcaggtggacttgagagagacgaagacctaggaaaaaagagaaagtagtagatgggggagcaggaacccaggcatccgagcccctgaccaaacggaagatgaacatataatagacatgagctgctttgaaattttatggcctggaaaatccaggcgaatactacacccccccttttccagctctccttagggtcaggtgactccttctcctcccccactgag

SEQ ID NO: 23087 - DNA, 1078 bp, Artificial sequence
  DNA replication origin
acttaagggagaaaaagaagcataggcagccaggggtgatggctcacacctgtaatcccaacactttcagaggccaaggcaggaggattgcttgagtacaggagtttaagaccagcctgggcaacatagcaaaacttcatctctacaaaaattagccaggtgtggtagtgtttgcctgtagtctctacctgggaggctgaggcgggaggatcacttgagcctgggaggttgaggctgcagtgagccatgattgtgtcactgtactccagtctgggcaacagagtgagactgtcaagcaagcaagagagaggaaggaaagaagggagggagggagggagggagagaaggaaggaagggagggagggagggagagagagaaggagagaaggaagggagggagggagagaaggaagggagggagggaaggagagagaaggagagaaggaagggagggagggaggaagtttcaaacaggaggctccatgtagatgaccaactgcgcccgtgctcccgttaggaggtaattagagagcgtatggtgcaggtgggataaagagcagcccaaacatcaaggttctagagtcactggttcaaggagacagaggtaatctcagaggtctatgaggtgggaactgagaactgttgcctaccaggcccatcaaaagtattggaacagtacgagctttggcggccatggaaggagaggcggatgtcagccgcaccagcctgcacctcttggaaggtcaagggagccacattgctccagtcctggaaggcttgacgcagggctgcccgggctgtgtggggtggaagggtggagggcaggttcaagatgcggaaagtcaggtgcttctttctccagcggcctagttaatgaccagaaaacagattagaaatacagatccttctgccaaccccagagagctcctctgggtttaggcactcaacccccaagacaggtgacaaccaggtaatcaccaggtgattatctattcaacactgagctggtccagactgtcctaatgccacccacacgccagaaccacatcaccccctcctctccctctcttttccaggc

SEQ ID NO: 23088 - DNA, 876 bp, Artificial sequence
  DNA replication origin
tgacctagcggagtggaaggaagttcccaggagccgagacactagcactcggctccatcgtcccaggactgggaaacactagatctgttggcagcagaagttggattatagtcattgaaaagtgccagatgggtagagtcctttctctaggatgtcagtatcccagaaccctcttctgaggaagagactctgtgggtacccagagtctcttcccctgcctcttccctaccccgcgcctagttccccacccttccctagtggagctccgcggaacgcagtccaggcggggccggggctagggaccttgccagagctggttctgtgtcgcgcgtcagaagcgctagaggtcgttgcgtggcgtgggtggctcggggagtgggtggctgagcggagctggggtccctggccagaggcggaacaaaatggggtcatggccaggaagacgcgctaacgcagtaagagtcactcagagggccggaactgccggaactgccgaagacccgagatgggagagagctcaggatggggagagtctgcagagattgacgatggtggaagaaagcgcagaaacagacaagggacacacccacagaaacatatatagactgagaaagccgggtgcgggtgggaaggtgagggtggtcagatgaatcaagataggttgggggagagggagaaggatccagaaatggagagacagagatgagtcagagaaacagagacagaggacagacactgtcagggaaggtagaggcatagggaagagggacacagggaaaggaagatgtttagggagggactaggagagaaggaaagaacaaaaaataatagtgggagtagagacagaatggaacagacagaagaaaagacacccag

SEQ ID NO: 23089 - DNA, 1324 bp, Artificial sequence
  DNA replication origin
cccattttcccccagcagtctcccgggcttggggacgctcggtgttcggccacgccgcctgtcgcctggtagtgggaccggaagttgttagggggagggggacggctgtgatggggggggatatttgggggggcaagtcccttctcaggtgaagctgctgatggagatggagccgccgccaccgccgcctctgagcgcccgggtcctggctccggcccggcgactgccgccgcctcagtgaccccactccccccgcactgggccgcccgggccagagtgggggacccccgccccctcgcctccctctcccccaacactgtcccctctccccaacccctcacagcctgcgcgcgcgcggagacacctcaggtgagtgaggggcggggcttggtgggggtaaagcgggggcggggcctcggtagccgggggcggggcctgaggggctctggcgtgaaggaggggggagacgtgggcgggggaaggggccaggctgagagagggtcgcgggttgggctggggccggagggttggaagatggccgggggagtttggcccgaggccccagtattaagagcgaggtagcagggactcgggggtcctaaaaaggcgggagacagatcaaggcaaggggccgaggacaggcaggagctgccaggcgcggggctcctccgtggggatgtggcttgggtatacagcagaaggacagcgaggagaaaggagcagcaaagagggtatctgaacaaaaaaagcgagggacccgggtgttgggtcgaggaatgctgaagacaggaatctggggataaagacgtaggcctaggtgagatctgggaggcaatgagcatattgggagaaacatgtagagaagaaacttaggatggagtgagaagtgcacagtgtagggtgagaggtgtagggaacttgggaagcaaggctgggaaagaagagattcactgcttgagagccctaagaaagaaatgcaacagaggaatccccagggcagacatccagacgggagctgcaaacttgggaagcaggctgcctgctcctgtgtaccaaaacagccctccctgtacctcctcacacaaaccccatcccgttattttcttacctcatggctgctagagttgtaggttctcactttttaaattttctatattatttctgtgcctttaaaaaaaattatgactagtcctttctgggaacagtggagtgtttaatggaacgtggacctttcgatatgcttatgaaatattgtaccccaatccccatccaaggtcaagaagttacgaactctgcttccaggaaatttttttttttttttttt

SEQ ID NO: 23090 - DNA, 941 bp, Artificial sequence
  DNA replication origin
tctgggatatgaggagcgcctctgcccggcagcgaccccgtctgggaggtgaagagcgtctctgctcggccgccccgtctgagaagtgaggagaccctctgcctggcaaccaccccgtctgagaagtgaggagcccctccgtccggcagctgccccgtctgagaagtgaggagcctctccgcccggcagccaccccatctgggaagtgaggagagtctccgcccggcagccaccccatccgggagggagatgggggggtcagcccctcgcccgatcagccgccccgtccaggagggaggtgggggggtcagccccccgcccggccagccgccccgtcggggagggaggttggggggtcagccccccgcccggccagccgccccgtccgggagggaggtgggggggtcagccccccgcccggccagccgccccgtctgggaggtgaggggcacctctgcccggccaccaccccgtctgggaggtgtacccaacagctcattgagaacgggccaggatgacaatggcggctttgtggaatagaaaggcgggaaaggtggggaaaagattgagaaatcggatggttgccgtgtctgtgtagaaagaagtagacatgggagacttttcattttgttctgcactaagaaaaattcttctgccttgggatcctgttgatctgtgaccttacccccaaccctgtgctctctgaaacatgtgctgtgtccactcagggttaaatggattaagggcggtgcaagatgtgctttgttaaacagatgcttgaaggcagcatgctcattaagagtcatcaccactccccaatctcaagtaatcagggacacaaacactgcggaaggccgcagggtcctctgcctaggaaaaccagagacctttgttcacttgtttatctgctgaccttccctccactattgtcccatgaccct

SEQ ID NO: 23091 - DNA, 1318 bp, Artificial sequence
  DNA replication origin
tgagtggacacagcacatgtttcagagagcacagggttgggggtaaggtcacagatcaacaggatcccaaggcagaagaatttttcttagtgcagaacaaaatgaaaagtctcccatgtctacttctttctacacagacacggcaaccatccgatttctcaatcttttccccacctttcccgcctttctattccacaaagccgccattgtcatcctggcccgttctcaatgagctgttgggtacacctcccagacggggtggtggccgggcagaggtgcccctcacctcccagacggggcggctggccgggcggggggctgacccccccacctccctcccggacggggcggctggccgggcggggggctgaccccccaacctccctccccgacggggcggctggccgggcggggggctgacccccccacctccctcctggacggggcggctgatcgggcgaggggctgacccccccatctccctcccggatggggtggctgccgggcggagactctcctcacttcccagatggggtggctgccgggcggagaggctcctcacttctcagacggggcagctgccggacggaggggctcctcacttctcagacggggtggttgccaggcagagggtctcctcacttctcagacggggcggccgagcagagacgctcttcacctcccagacggggtcgctgccgggcagaggcgctcctcatatcccagatggggcggcggggcagaggcgctccccacatctcagacaatgggcggccgggcagagacgctcctcacttcctagatgtgatggcggccgggaagaggcgctcctcacttcctagatgggatggcggcagggcggagacgctcctcactttccagactgggcagccaggcagaggggctcctcacatcccagacgatgggcggccaggcagagacactcctcacttcccagacggggtggcggccgggcagaggctgcaatctcagcactttgggaggccaaggcaggcggctgggaggtgtaggttgtagtgagccgagatcacgccactgcactccagcctgggcaccattgagcactgagtgaacgagactccgtctgcaatcccggcacctcgggaggccgaggctggcggatcactcgcggttaggggctggagaccggcccggccaacacagcgaaaccccgtctccaccaaaaccagtcaggcgtggcggcgcgtgcctgcaatcgcaggcactcggcaggctgaggcaggagaatcaggcagggaggttgcagtgagccgagatggcagcagtacagtccagc

SEQ ID NO: 23092 - DNA, 1425 bp, Artificial sequence
  DNA replication origin
tgggcggccaggcagagacactcctcacttcccagacggggtggcggccgggcagaggctgcaatctcagcactttgggaggccaaggcaggcggctgggaggtgtaggttgtagtgagccgagatcacgccactgcactccagcctgggcaccattgagcactgagtgaacgagactccgtctgcaatcccggcacctcgggaggccgaggctggcggatcactcgcggttaggggctggagaccggcccggccaacacagcgaaaccccgtctccaccaaaaccagtcaggcgtggcggcgcgtgcctgcaatcgcaggcactcggcaggctgaggcaggagaatcaggcagggaggttgcagtgagccgagatggcagcagtacagtccagcttcggctccgcatgagagggagaccgtggaaagagagggagaccgtggggagagggagagggggagggggagggggagggggagggaccaatcaacagtcttataagtagatacaacagtgtataaacaaggaaaccaaggaagatttttctccttcagaactcggaccctgaataccaggttgagctggagctgagtgagtaataaaatgaaaggccctttaatgtgggggagggtaggtaggagtggagacccttaagtagtatcagcactgttgtctgatgggagtgtgaatctgaacacatgaagctccagtctcagtagaacagtaagaaatcctaagtaaggccaggcatggttcacatctgaaatcctaacaatttgggtaaactgaggtggaaggattgcagaggccaggagttcaagaccagcttgggcaacatagccagacccccacccccacccccgcatctccatatcatacaaaaataataaagaaatcctaggtaaggccagatggtaaggccaggtgtggtggctcatgcctgtaatcccagcactttgggaggccgaggtgggtggattgcccaaggtcaggagttcaagaccagcttggtcaacacagtgaaaccccgtctctactaaaaatacaaaaattagctaggtgttgtggcaggcacctgtaatctcaactactcaggaggctgaggcaggagaatagcttgaacccaagaggcagaggttgcagtgagccaagatcgagccattgcactccagcctgggcaccaaaagcgaaactcaggagaatgccttgaacccaggaggcagaggttgcagtgagctgagatcacgccattgcactccagcctgggtgacagagcgagactccatctcaaaaacaaacaaacaaataaacaaagtagccagacattttggtgcccacctgtagactcagttactagggaggctgaagtgggagaatcacctgagcctgggaagttgaggctgctgtgagccatgattgcaccac

SEQ ID NO: 23093 - DNA, 1232 bp, Artificial sequence
  DNA replication origin
ccatcttatacttggtcacgaccaggtcctcagcgatagtttgctcctgttgctcgtcctcgcccgacatcttcctactaccaccactgcagcctcgtttcccctgagccgccgccgcctctgtctcccttcccagccacaggctgtggtcagagtcccctcgatcctcgaggagagggcgagcgaaagcgcgagcaagcaagggagcgggcaggcaggcgagagcgagaagctgcgagcgcgcgggctgaggcgcagggcacgctgggacaactagtcctctcggccgccagactctagccgctctcgagggccttcgaactacaattcccagcctgcctctcgcgctcctaagccaggccctggggccttgccctccaagggcctcgcacgccggaatcgccgggcactctgggaagggtcaggctccggcgggaaggcggagccgttggggagcttgaggggaagcgtggtctctcccggaaaaaccacttccaccgagaacgctgagcgagagccagtaacagagaggggcgggctgaggggagaggggcggagctacggcggggaaataggtttaaagtcgagcgggcaggggtggagtagagtggagccgcagcgggtgggcagtgtctacacctaggtcggggaggctgggtgcgcccttcttcggatccctgggtcggctggcgaaacccgcccagccggtccagtcgtcctccgaagctgggagaacagggaggggcagacaggtggaagaagaccaagggtgctggtaacgggggctaactgggcagccagacaccggagggatcatccatttaaaggcctcgcaatctagaggccggactcctaatgaagtaacatgactttattgttccaataacaggcacctggatggagcacctaagggaagtgttcagaaagacatgtttgttgagagttcttaccgtgaaaaaataaaaagatttgatgacttttctaagataatgaattcagaagcatctggaggtttcagtgtttggcctctgaaggagggcttatagggctttttataagtcctaaagcacgtaggttctttttgttattcccaattggttgccttgtagattcctactaaaacccttaatgaaaaggactatgcgctatggttgttctaaagaaatagaagtaatagtaggactagagaaagctgcatgggacagagtagcactgtcagaacacagaaaggt

SEQ ID NO: 23094 - DNA, 1629 bp, Artificial sequence
  DNA replication origin
gggcccgagccggagaagatggcggtgcggaagaaggacggcggccccaacgtgaagtactacgaggccgcggacaccgtgacccagttcgacaacgtgcggctgtggctcggcaagaactacaagaaggtacgcgggccgggccgggccgcgcggggaccgggggcgggacaaagggaccgcggccctgcagccccgggatcctgcctaccctccaggcgccccagcccctcccccgcggcctcccaagcagccccccgcgcgccctcctgcgctcccgcgcccctcccccagcctccctctccccgcacccccagcctctgagcccagcccccgcccccactgctgcgccctctgccccttgtttttctctactgcccggcgggccccggtgccattagcccaccttcccctcagccatcgccctcctggcttttctgggagaggcggccggccgggtgtggaccgggtgcccaatgggctcccccgcaacccggagcgtgcccgccagagctccccacggagccaggtaccagcggggctgaggcctctccggtgctttgtgtatgttcagagagagagaatggaaagcaggagggtaaacagtcacagagcaagccgttggctgctcatcagcctgaaaaaggtctccacccagggatcacctgtctccgccgctcatcccccaccttcatctaaggggcaacagaatctctcagggagccggggtataggagttcctgggtagcggccccttccgaaacctttcctcgattttacaatgaagtcaccttgcaacctagctttgcagtaccctgggtttggggtcgagaggttagggtgagcttcctatctctagcccctcacacccaaaccccataactggagatcataaggtggtgaacaaaaggttcaagaatccttacctgtcttttctaccaaacctcttcctggtgtcgtctttgtctctaggcctggttttctctggaaatggtctgcctctctttttctcactaccctcagagagggattctctttatggctttctttcagctccccagttcttcctgccggctttgcagctcgtcagaagtgtgcttagtggcttaggagaacttcctactgatgctggttgtgagcctggccctgcccttggggtctctctgggtgtgagaatcctgacaaatagctgctatttctatggcatgtctctacgcctgtgagaggctcttattcccaggcttctacctttgaccttttgcagggagatcaggctaggggcttagcctccggccttgggggaattgacagttgtgacctggttcagcttccatgctcttagctctttgtcatttacctttcccttcacagatctatctcttttcacctctcactgagaggcactgtcttctttgtgatgagtggggagaaaacgggtcaaaaagtaaaaagaaagtctcctggctcaggttcaaattagaatggaaggctaggatgctactaggtagcagagtgtggaaacatagaagtagggccagggttacttgtctcagatacagtttcctcggacagggtagatgttgtcttgctcttctccatcaggctgggtagtggatggcccttcctgtc

SEQ ID NO: 23095 - DNA, 935 bp, Artificial sequence
  DNA replication origin
gccaggtatggtgacgcatgcctgtggtcccagctactcgggaagctaaggcaggagaattgcttgaacccgggaagcggaggttgcggtgagccgagatcgcgccactgcactccagcctgagcaacagagcgagactcccttttaataataagaagaagaaagaaaaaaaaaaaaaacccgtcacgaacaggattcgaacctgtgcggggaaaccccattggatttcgagtccaacgccttaaccactcggccaccgtgacttccaaaaccgcgctttatcgcgcgcttacagaaggggtccgcactgcaatccgggaatgcgtgcgggaaccggaagcagggtaccggccccgacacacacacacctgaggactccccacccctcggttccttacctcctatctacgccacccaaagaaaaagagtcggatggactgggtgacccagggagggagggtctcctgcctagcgaagagtcggggtctcgagtaggagctcacacctacttaggaggcgacagcgaggcctgcggaggaagcagttgagggaaggcactgggccgccagggtggcgactaggggacatttgggttaacaagtgaggggagtgctgggtggacaaggcgcgaggagtgagggagactctgaaaagtttaaatggggagctgctgtgaatggatggaaggaaggaacttcttggggaaaggggtttggggttttgggggacgaggggcttcgtcgggttaggaatgcgcaaggtgaggaccactcgggtctacgggttggggctgctccagcgactggcggccgcctggagtgggatagcgaggtgacactcccgagctgaggcaaaaagagggaaagggcttcgcgtctggtaagagcgatctcaggagaatggcgccccctccaggaagcgtccttctccccgga

SEQ ID NO: 23096 - DNA, 944 bp, Artificial sequence
  DNA replication origin
aaagcgaagcgtggccggccaggcccacacgtttttgccgggaagaacatagagttctccctcctaaatggctacatagtcctggctgggaccatatagactctagactagacttcctgtctagagtggaggcctggccagccttcgtccctcctcgtaggcagctcctggctgctggtgtaggggctgagttaaacaaagaggcggggtttggtgacgagcttccgccgggttgcgtagcagcggtgggcggggcaaaggatccgtctgaggcggcgacgagtggtaggagtcttctttcccctccttcccctttcccttcccttcccgggagaggctgggacccggcaccagggcagtactgtggccgctgcggcctcagctccgactgggtcaggttgcggagactccaggccgcttccagggcggtgcgtactgcgcctgcgcgatcttccacctaaaagagggtgtgggaggggaggaggtgatgtcccaggggtattggggcggggggttgaaataactggggttcaggaggagggatggtggtagagataaaaatgtgagaagggagcagcactggcgaggagtcgggaggtgagaagggggctctggagaacgggttgttggggaaggtccattggaataggggagctttgagaagtgcgggagggggccggggctagctggaggaccggcacctgcagaactgggggaacagcgtggtgtttaaatgggcaatgattgacgggccagaaggggaggaagggagcattccgggggccagcctgggcaggggcggtggaacctaaacccccgccctcgaagcgccatagcttggctcctctcccatgccttgtcgttggcagccttgtcctctcattccttccccgctcctcaccccctcccagccctccatgaaggaatctcacattcttcacatc

SEQ ID NO: 23097 - DNA, 1454 bp, Artificial sequence
  DNA replication origin
ccctggtggctggagccagggaagtgatgaactgaggaggaggtccccctttccctgtcttcagggctgatgggaataggataaaggacccaactgatgaaatatgtttggcccctgtgctgtcaactttcaagctgcttgagggccaaggatgcaacagattactatacccatcctccatcacaaggaaaagaaatctcagtgcccagagggggatcagactcaaggtggccccccagggagggatgagtcactcaggcctggcagcagggcccccgcagtctgccagcccagtgttaagctcttcctgagtcacatcagctggcagcactcaacccccttactggccagttctaggggtaggaggaaggggccaagatttgatctcctcactacctggggtagaacagcttgtagggctgaggactgaggctccttaacccttaacccccacctttaagcaacttatcctttttgaaagggtaatagaaggtgggggtgcatacctcgtttcgggaggcagcagcacgatgaagaggggtcagccacagtgtgtccttagcattgacattagcacctgtggggatataatttcctattttgatggaaggtggggaggaggtatgaaggaagccagtaatcaggccaggaaatctgaatggagctggagcctcgcctggaccaagccggggagagcaatccttgaatatcaaaaaagactcctcccctcccttcgctccctatgtgccacaccttccagctccccactttcacctgacatcagtagcaactggaggatggggacatcgcctacgtaggcagcagcatgcaatggagttcgcctctcttggtcctgggaaggcaaaaaagagcagggagtatgggcgcggggtaagggggctatcaaggaccccagcccaagtctcagagctccaggcccttccccacaacctcttcccatagtttctgcagcgtcctaagtcccggtattgggagtcaaaggcaagcacctagggagggtggagtcagggccaatgggctgagaagccggctcctttttccaggaggggtgggggcgctgcagactccggaggttgagaagagaacaacgttcctgggcattcccagcccaagtgatctgggcttcaagcctgacctgctctccatccccaaatgcagagtaggctttcactccaggatggaaagaactgcggcctcatctgagcagaggagacacggagccgccccaccggtggggaggggtccagaacacgggagccaggattccggtctcgccatcctccctgctcccaactcaccagcacattgatgttctccttctgcgagagtagggaacgcacttcctccacatctcggctaaagatggcctggaccaggggcggctgcagagagaaccggcattctgagagcgggctggagccggagcggaaccg

SEQ ID NO: 23098 - DNA, 1083 bp, Artificial sequence
  DNA replication origin
aggtccccaaggacaccggctcggttgaggggagcgcggcatggggcggggcgggagctgcgggagccccgggctcaggcccagcctaggccgcacatccccgggctcgcgtgacggcagcgccgagccctggaaggaggaagcgggaaagggcaggagggctgacctggtccgtgatgctgaggatccccatggctcggcccgggctccgtccgcatcgagctcccggcggcggcggcggcggctccaccggggacacggagcggcccaggcggcggctgcggtggcggctgcagggagagcgcggccccgcctaccggggggcgggcgagttggaggccgcagcgctccctggcggccgtcctggtcccggcgctccccgcgcaaacggaccccggccgcagcgccctccgccccaccctggcggccccagcagcccctgcacccccgaactcgcgcgccggctccccggctcacgcagctggccgcgctgtgctctccgctccagtctggcggcccaaggggttccccacaagaccctagcggaaacctgggccttagtcccgcggtgcttcccaaactgaggaccgaacggctggccagatcttacccagcccacaatgctcccgcccgagctaactcctcccgtcagcgattccacaccccgaaatcccccacagactaggaggaactggcgggtggagaactgggaattatgtatggcaatagccccagagggagggaaagcgtgtatctccactggcggaggcgtgagttcggtagagaagaaatagcaaaagtgctcaaactgcagagaaaccccaaggaggattctactgcagaaaacacccacaaagaggccatgacaactggcagctggaaaaggccgccaagaccaacagaaggggcattttccaactccttactgattccattgcaaggttaaagtggaaaacactcaacaatttctccccagaacagcctgtggcgcttcccctcctccaatggagaggccagagagccgtcaattagagaagaaatgaatggaggtcatctcaacccagaaacggaaaaaggaggaag

SEQ ID NO: 23099 - DNA, 770 bp, Artificial sequence
  DNA replication origin
aatatctatgtaaaacatctaagtcaagctgctagcatgtagcaagtgctcgataatttagctattatgctcaaaatatactaaaaaggttacgctgctaatttacacatactaggtacccataaaaattatttttaaatggtcaccagaaaaatacaccctgttttttgttttgttttttgagacagtcttgctctgtcgcccaggctggagtgcagtggggcaatctcagctcactgcaacctctgcctcccaggttccagcgattatcctgcctcagcctcccaaatagctgggattaaaggcgcccgccaccgtgccaggctgattcttgtgtgtgtgtttttttttagtggagacagggtttcaccatgttggccaggctggtctcgaactcctgacctaaaacgatcggcccgcctcagcctcccaaagtcctgggattacaggcgtgagccaccgcacccagctacgccctgttgtcttaaagtatagtccaaccctagtctcatttcacttaagcacatgcacagcaaccaagaagggagaaattaaggtcggaagagtggcaggggaggactgaggatcagtattgtagctggggagggggatggctagggatgaatcttgcccaccgatgataccctgacattcttgcctggacagggttatttggagggaaaagggaggtgcaaggatgcaaggcagagaatgcttaccccatgattctacgctccgagtaagcctttcgcttgttggtgaagggagca

SEQ ID NO: 23100 - DNA, 801 bp, Artificial sequence
  DNA replication origin
agacgaaccggcggcggcgcccagcccggggtcctcaaggaggccccgcccactggccggaacccgagcccgcccctctcaagggactctccccgggcccggccattggtccggtatggaagcggggcgggaccttagcccttgacagcagttgtgacggggaggattggaccgcccggattagggctaattaagggtggatgggtggcgggcggggaagtgcgggtggctaaataggtgcctgataactcagttaacttccctcttggcttttccctttgaccttaacacttttggggttatctctgaggcgaatgctaaaggagacgctccaggactcgacctctgaaggtccttggagccaattccgtaatatgatcatggaaactgatcattgcctgatccttctaccgccttggcgcgctttcttgaggaatgtctttggttaatggcttcacggccatggaggtgacatcatgtggacaacaggctaggatgccagagttagctgctcggtggagatcatttgaggtcagcagaggccacgatattatagatactaacagaccccgatatggggagaaaagcaaaagcaggagcctgaatatccagtgctttgtgagctgtcagttctgtgtgtaatggcaggaaatccaagtcttaactgcgcccttactatgaaggctttccgagccagccacagcttctgggtcatgggcattagtctcactgccactctggtcacgtaaccccacacagcagctcaccccactttagccacagattaggagccgcagacta

SEQ ID NO: 23101 - DNA, 815 bp, Artificial sequence
  DNA replication origin
ctgggaagtgagcgtctctgcccagctgccccgtctgggaagtggggagtgcctctgcccggccgccctgtctgggaagtggggagcgcctctgcccggccgccccgtctgggaagtgaggagcatctctgcctggtcgccccatctgggaagtgaggagcacctctgcccagccgccaccctgtctaggaattgaggagcgcctctgcccggctgccccatctgggaagtgaggagcacctctgcctggccacccgctctgggaagtgaggagcgcctctgcccggccgccccctctgggaagtgaggagcgcctctgcccggccgccccctctgggaagtgaggagcacctctgcccagccaccccgtctgggaagtggggagcgactctgcccagccgccccgtctgggaggtgtacccaacagctctgaagagacagcgaccatcgagaacgggccatgatgacgatggcggttttgtcgaaaagaaaagggagaaatgtggggaaaagaaagatcagattgttactgtgtctgtagaaagaagtagacataggagactccattttgttctgtactaagaaaaattcttctgccttgggatgctgttaatctataaccttacccgaaccccgtgctctctgaaacatgtgctgtgtcaactcagggttaaatggattaagggcggtgcaagatgtgctttgttaaacagatgcttgaaggcagcatgcacattaagagtcatcaccactccctaatctcaagtacccagggacacaaacactgtggaaggctgcagggacctctgcctagg

SEQ ID NO: 23102 - DNA, 1032 bp, Artificial sequence
  DNA replication origin
aaccccggaccccagaccccctccccagcgggcgtctccacccgttctggcgcccggagcgcggccatgtgaaccgcttgtaccccggggagagacgagccccgagcccggctggacgccgctgcctcaggtttgtggggtctgtggccaggggcctgagggggagggagccccgctttcatccgaggcttccctcggggaacagaagctccagagccggcttgagccttgccggggcgggaagccgacgggagcttatttcctgcgaggatccaacccgaggcgagggtctccttgctctggggtctgggaggagaacagggctggtggggctgctgaggaccccggacggggccgcgggggcaggaggagctgtaggggctcccggcgacagtgaggaggcggagaagccgcctggctggtggagatgactcctgtgggggacttggggtggaatccccgggaggggctccacctcctcgggtgggggtggggattgcctgagcgcgaggggtgggtgagggggttcccttggcgggttaaaacgctccgtttgcggggagctgggcgttttgactgtggtgagtggagggcggaaggggtttccaggggtctgagggtgtctccctcggggagcgcacccattctcttgagcgtgaagatcaggagagggccttccttgctgagggtggtgctgcgcttggcttggggccctcgcgtcccgggagaatcgcgcactccggggatggaggttgatagggcttccgctgaggctttccaatttgagctgggctgaggggcagaagggaagaataaagaggaattcctttttccaaggagattcctcactgaggggatccccgcttccgtggcagaaagatgataccgcatcatccctttctttcccggtgttcccagttttcaggagaaggcaatgtcaatagcagttgtcctttgtagggttaattggagtgagagatttgtctgctttgggggacgacggaggggatagctttccacctctatctgtac

SEQ ID NO: 23103 - DNA, 962 bp, Artificial sequence
  DNA replication origin
ctggtttcgaactcctgacctcaagtgatctgcccaccttggcctcccaaagtactgggattacaggcgagcacactccacccggcccccttctcccctttaagtcgacaggtggctcctcagattcacacagacttgtttccaaacttcccaatgggattctctatggtggtcctggaagttagagaaagcccctatttcctagggagtcggggggcttcctttgcatctgaacagagaagactggacttctcttgccttccccatcgccccaactcccttagagatttagccccagctccccacgcactctctcccaactgtccctgaggccctgaagcacaagattccggcagcgccctggcccccagctcccaggttctgggggaggggccttcctaggctgcaccgaccaaccctaggcccaggaggagagtccttcccacctgggctcagtaggcggtgctgaggttggaccccaagctcccggagatgtagggtggggtgaggactacagaaaaggtttagatgggacttagctgaacttaaagggctgagcggagcagggacagatagtgctgtcgatgttgctcccccgccccccttactacggggaaggagaggagttggggtgggtatcccccctcccattggggttaggaaggcgtgggaaagcgctagttcagaggggaggaggcgaaacccagaccgcgggagatttttctggcgaagaaggcgcgggggagggggagatcctgggcccagaataggaaaggtactcgggagacgatggcggagaggcgtgagaagcctccggattccggtcgcggaggacagggggaaaatgggcgagtagatagttcaggggagagaggaagggcagctccctcagggggagagtcagatcccgaatcccggggcagcagggatcccggggcaggataccgcaggaacggcccgcc

SEQ ID NO: 23104 - DNA, 1634 bp, Artificial sequence
  DNA replication origin
gaggagttggggtgggtatcccccctcccattggggttaggaaggcgtgggaaagcgctagttcagaggggaggaggcgaaacccagaccgcgggagatttttctggcgaagaaggcgcgggggagggggagatcctgggcccagaataggaaaggtactcgggagacgatggcggagaggcgtgagaagcctccggattccggtcgcggaggacagggggaaaatgggcgagtagatagttcaggggagagaggaagggcagctccctcagggggagagtcagatcccgaatcccggggcagcagggatcccggggcaggataccgcaggaacggcccgccaagggactccggagctggaggtgggtgccgggcctcacctggagcagggccgggccgcaggcggcggcggcggcggcagaggcgcaggtggccgagccgggcggcggctgcgcctcctcccccagccctgggccggcggcggcggaggggaggaggtggtgcttaaaggggcaggaactaccgaggtgaggacaaccgctcaggagagcagtcgcgaaggatccactgggggagaggatagcgggtggcgtctcctaggggccagaaccaggaaggatcccagatgggaggaagagaacggatcccagaaagagacagaaacttctgcggtgaagtgggggatggtggtaggtccgaaaggaaggacttgggagagctctgcccgcgctcccagggcaccagcaaagaccgcttcacaaaagaggccggggaaggcagaaagagctacatgggctcctaggaggcctaggggtgcaggagagggaactcaaggccgagcctgctgggggtcacgcgcagcgccctactaggtgaactggttccccgtgtttcagctcctcagggctccatccctacggctgtggggcctttggaatcaggaagccacgaaggcaaaaacctcctatcctctcaacctcaatcctgcgtcccactcagtgccctcagtgactgtagtgtgggggccatcaatagcagccctggtgaggctgatgtgggaccatgagaatcgactttggttcagttttcccccaaccaccaccacccttgcttcagtctctggggcaacaggaagcagctgctcagtgcagcccccacctgaaggtgggtcaaggtgggggaggagagaagacagacttaaaaggccttagaaaaatgagagggaggggaggcattttaaagaccttccagcactgccaaaagccggctttacttttgtgggggctagcagtgagtactgtcaaaatttccttgaatctcaacagcttaaatggggaggagcaggggcaatcctccacggggcggcggggagggggctgggaaagccctggcctaagatgcgtctcaggctcttccttagaactggggcttgcccatactcaggatcccgtggtcggcagcctcgctagctgagccctgtgccccccgtcccccagagtcctgtttcctctccttcagcccccaaatgagcaaaggttaggccccacccctgctgagtcagccagggagggagtaggcatccctcaggccttccccggggctggtccccatactcacccatgtcaggctggcac

SEQ ID NO: 23105 - DNA, 1052 bp, Artificial sequence
  DNA replication origin
gggaggagcaggggcaatcctccacggggcggcggggagggggctgggaaagccctggcctaagatgcgtctcaggctcttccttagaactggggcttgcccatactcaggatcccgtggtcggcagcctcgctagctgagccctgtgccccccgtcccccagagtcctgtttcctctccttcagcccccaaatgagcaaaggttaggccccacccctgctgagtcagccagggagggagtaggcatccctcaggccttccccggggctggtccccatactcacccatgtcaggctggcacagctccaggctgggaccacccagctcctcactgtccttgggcctccacttcacgtaaaggttggtgttggatcctcccaaactgtgagctgggaactagcaagaatcaaaaagccagtgtatgcttcctgcgaaccacacagcctgaactgctgtagggtgatgtccctgtgtgacagactggggtggggagggaggagggaagggcggggctttctctgggtggagagagggaggaggcgaggacagggcagaccaggagaaatatggaggaaggttagagagctgtgttgacactccagtggcatggtagaagaggccggcaaagggggaaggaaacaaatagttgcagctactgagagggagaaggttctcgataaacgctgaaggacgtgaacatgttgggggaaggggtggagggatgcaaaagacctttaggatttcagttcccaggtctgtatcgggtgacgtgagaaaacaaagcagaaagggctgacctgtaccctagggctttttctaccagcttcttacccactccagagtcaggacctagaggaagtgtccacacccccataactcagcatttccccaaatcccagcttttctgggagcaaactaccagcacaagcagctcaggggctccaccttctgtccagatcatgacacaggagagactgcgggagaggctgctgccaaggacgtcacaggcagatggaaggaagcttagaggcccctactccacccctggcccc

SEQ ID NO: 23106 - DNA, 906 bp, Artificial sequence
  DNA replication origin
cccggctaatttttttgtattttttttagtagagacagggtttcactgtgttagccaggatggtctcgatctcctgacctcgtgatccgcccatgtcggcctcccaaagtgctgggattacaggcgtgagccacggcggccggcctttcctacgtatttcttgattgagacccagattgtccaagtgatattttatataaagtacaagtcggggtggctggccgggcgggggctgccccccacctccctcccggacggggcggctggctgggcgggggctgccccccacctccctcccagacggggcggctgccaggtggagacgctcctcatttcccagacggggcagctgccgggcggaggggctcctcacttcttagacggggcggccgggcagagacgctcctcacctcccagacggggtggcggtcaggcagagacactcctcagttcccagacggggtcgtggccgggcggaggcgctcctcacatcccagacggggcggcggggcagaggcgctccccacatctcagacgatgggcggccaggcagagacgctcgtcacttcccagatgggatggcggccgggaagaggcgctcctcacttcccaggctgggcggcagggcagaggggctcctcgcatcccagatgatgggcggccaggcagagacgctcctcgcttcccagatggggtggcagccgggcagaggctgcaatctcggcactttgggaggccagggcaggaggctgggaggtggaggctgtagcgagcccagatcatgccactgcactccagcaaagaccagtcaggcgtggcggcacgcgcctgcagtcccgggcgatcggcaggctgaggcaggagagtcgggcagggaggttgcagtgagccgagatggcggcagtg

SEQ ID NO: 23107 - DNA, 1148 bp, Artificial sequence
  DNA replication origin
ttgttccctgaaaatcgcagccatcctgttccttttggatgtccagatttcatattgttcaaacacacatgctctacaaacaatctgtgcagataatgcaattatcacaggatcctgaggcaacatacatcctcagcttatgaagatgacgggattaagagattaaagacaggcataggaaattataagagtattgattggggaagtgataaatgtacatgaaatcttcacaatttctgttcagagattgcagtaaaaacaggcgtaagaaattataaaagtattaatttggggaactaataaatgtccatgaaatcttcacaatttatgttctgctgtggcttcagccggtccctccgtttggggtccctgacttcccgcaacaatagggtttccatttttatgagaatctaatgccatcactgatctgacaggaggcagaattcaggtggtaacgtgagcagtggggagaagctgtaaatacagatgaagctttggtcactcgaccacaactctcctcctgctgtgtggcctggttcctaacaggccatggacgggtactggtctgtggcccaggcactggggaaccctgcattatatgtatatgaaacagaaagtgagtggaatgtatgcaaaaagttttttcaatggtcatttttgggaaggacagtggaagttttggaagtaatggtgaaagaactcatcctgtacacctagaatatgttcatatgttacttgtgtaataaatagtgcttccaaattgtgacctaagaaaggaatattggatttctgaaagagaatatttcaacttgggaatggctgtggaagtaggctgcttatgtgaaatgggaatgtgaaaaactaattggaattgaagtggttgaggatctctgaagccagggcattgaatgggttcttttcgtggaatttgaaataatccgggatgattgtcaagaaatgtagtagagaccaaaaaaacacattccaccaattaccagagtactggaaggatgtgggggtatgaccaatgtggatagcagtaatgaaaggatttggtggaaaatgtaattttcacttcaagatgaattttaaattacagagcacagtcatttggaattaacttcagataagaaaccagattgggtggg

SEQ ID NO: 23108 - DNA, 4099 bp, Artificial sequence
  DNA replication origin
aaatacaaatagttcaattctccaataattttaccaaatctcaggcccagggacaaggttagttagtgatgtggtagggattagagcaaatgaaaaggtctggcaggtcttggttttcaatgtcagatcaattaggtaaaatagatggcatggcaggctcagggtagtccgggccacattacacaaaaatgatacacaatgtactatgtatctatctgaagtaatgaaaaccaagatttggtttcatattcctagaacttttgcatttaaaattatcattctatgttctacatccaaacccaagcagattcactggagaaagcggcgcatcacagggttagtattggtgggtagcgcccaagaggggtgtggacgacagacacaccatgcacacggcaaaccaaggcaaatacccttgttgttcttcgtaacaggttgcttggcagagggggttgggacagggattccagcagatttaggggtgggcatgttgacgaggaccgactggaaaggcactcccccagagattggttccgggggaatcagaggcagcagctcatcctcatcagcaggggcaaggggtttagagggtgattccaacaccagcccaggagaggacggcagaaattgctgtttaggaggcagagtgggaactggggagggagcaagaggcagagagactggtggggagggtgctgcagagacagatgctgattcaggtttaggaaggaccttctcaaaggcagctgctgttagaggggtggacgccttagactcaggaggagccaaggggccctttggggaatgagaagcatctttgccttttgctgtctttgaagagtctttctgaacagggagtagaggggctggagccactgtggaaaggggtcctttagaaccattcttagctgagggatctgggcatataggaggtgaagtagcagaactctttttggtctgtggacctttccgagtgggagctgtgatgattggcgtgctttctggagctggggcaacaagtacttctttcagagctgtggggcctttctttgctggaagccctttagatgcttgaggaacagtggcccccattttacatgtgacagaagctggggaagtaggggagtctttgagggaggaaggagtcacaggtggggaagtgggagtccctttgggggctggagttgctgggcccttttcgggggatggaggagtcacagctggaggagtaggtgcctctttgggggaaggagaagtcacagctggtggaatgaggagctctttgggggatggggcccctttgtaagtggaaggagtcactgctgggggactggaggcctctttggaggatggggtagctggggcttctttgggggttggaattgctggggtctttttaggggagggaacagtcatagctgggggaatgagggcctctttgggggctagagttgctggggtctttttagagagaagagtcgctgttggggcaatggggtcccttctggaggatggggtagctgggacctctttgggggaagaaggaatcacagctggcagagtgggggcccccatgggggctggagttgctggggcctttttgggagaggaagaagtggcaacttgtttgggggctgggggctccttgggggaaggaggagtcactgctgggagggtgggatcccctttggaggatggggtagctgggcctcctttgggggctgaagttgctggggcctttttgagggagacaggagtcactgctgggggagtgagatctcctttggatggggtggctgcgccttctctggtgactggagttgctggagcctttttgggggagagaggaatcactgctggggaagtggggtcccctttgggagatgggatagctggtcctcttttgggggagggaggagtcatagcgggacctcctttgtgggagggggttgcagctgggggagtggggccctctttggaggatggagtagttgggcctcctttagaggagggagttgtagctgggagagtaggggtccctttaggggagggaggagttacagctgggggagtgggggcccctttggggggtggggtacctgggcttccttttggggagggaggagttgcagctggaggagtgggggcccctttggggggtgaggtagctgggcctccttttggagagggaggagttacaactgcgggattgggggcccctttgtggggtggggtagctagacctccttttagggagggaggagttgcagctgggggagtgggggcccctttggggggtggggtagctgggcctccttttggggagggaggagttgcagctggggttgtgggggcccctttgggggatggggtagccagacctccttttggggagggaggagttgcagctggggttgtgggggcccctttgggggatggggtagctagacctccttttggggagggaggagttgcagctggggttgtgggggcccctttgggggatggggtagctagacctccttttggggaaggaggagttgcagctggggttgtgggggccccttttgggggtggggtagctagacctccttttggggaaggaggagttgcagctggggttgtgggggccccttttgggggtggggtagctagacctccttttggggagggaggagttgcagctggggttgtgggtgcccctttgtggggtggggtagctagacctccttttggggagggaggagttgcagctgggggcatgggggcccctttgggggatggggtagctgggcctccttttggggagggaggagtcgcagctgggggagtgggggcccccttgagggatggggtagctggacctccttttggggagggaagagttgcagctggggttgtgggggcccctttggggagtggggtagctgctggacttcctttgggggagggaggagttgcagctgggggtgtggatgcccctttggggaatggggtagctgctggacttcctttgggggagggaggagtcacagctgggggtgtgggggcccctttgggggatggagtagctggacctcctttgggggagggaggagttgcagctgggggtgtgggggcccctttgggggatggagtagctggacctccttttggggagggaggagttgcagctgggggtgtgggggcccatttcggggatggggtagctgggcctcctttaggggagggaggagttgcagctgggggtgtgggggcccctttgggggatggggaagctgggattcctttaggggctggagttgctcgggcctttttgggggaggaagaagtcatggatagagcaggagcctgtttgggtgctggagtagctggaccctctttggggaagggcagattcaccactgaaggagtgggggtctctttggggggtagtgttactcctttgggagacagaggagtcacagctgagggagtaggggcccctttgggggatggaggagtgggagaatgcgtcgtggctggtgagtctttagagccttggaaagaaagactattctctggaagaaatgaagcttcaactggagaaacaggggatgagagatttccaataggagtatcagggccagcagaacccttcttggttggaggtcttttagtctgaggagacacactaacccctaaaggagatggggaatcagctaggtaagtcagagttcctttggaagatgcagtagcagaagcaccagagtcctcagttgggcactctttgggagaggaagcaacaggtgccaatgctgaagtatgagaaataccatcaaccttttttgtacctggaggagtcccagctgggggaagagagggtgagggcacagactttgggatttcaggggccagcactaaggtagccagaggagcacaggtattctggggggatggagccacagggcaattttctgaagctgtaggaaccaagggtaaagtagtaagagtaccttccttaactgggtggtttttaggagctaaagagacagttccttctagaaaagggctggctgtagttgtataagttgaggtacctttggcagttgtgggagcc

SEQ ID NO: 23109 - DNA, 1164 bp, Artificial sequence
  DNA replication origin
cccggccagccgctccgtccgggagggaggtgggggggtcagcccccgcccggccagccgtcctgtccgggagggaggtggggggggttcagccccccgcccggccggccgccccatccgggagggaggtggggggctcagctccccgcccggccagctgccccatccgggaggtgaggggcacctctgcccggccgcccctactgggaagtgaggagcccctctgcccggccagccgccccgtccgggagggaggtggggggctcagccccctgcccggccagccgccccgtccgggagggaggtggggggctcagccccccgcctggccagccgccccgtccgggagggaggtgggggggtcagccccccgcccggccaccccgtccgggaggtgaggggcgcctctgcccggccgcccctactgggaagtgaggagcccctctgcccggccaccaccccgtctgggaggtgtacccaacagctcattgagaacgggccatgatgacgatggcggttttgtggaatagaaaagggggcaaggtggggaaaagattgagaaatcggatggttgccgtgtctgtgtagaaagaagtagacatgggagacttttcattttgttctgtactaagaaaaattcttctgccttgggatcctgttgatctgtgaccttaaccccaaccctgtgctctctgaaacatgtgctgtgtccactcagggttaaatggattaagggcggtgcaagatgtgctttgttaaacagatgcttgaaggcagcatgctcgttaagagtcatcaccactccctaatctcaagtacccagggacacaaacactctgcctaggaaaaccagagacctttgttcacttgtttgtctgctgaccttccccccactagtgtcctatgaccctgccaaatccccctctgcgagaaacacccaagaatgatcaataaaaaaaaaaaaaaaaaaaattagctgggcatggcagcgtgcacccatagtcccagctaccagggaagttgaggtggaaggatcgtttgagcccaggaggttgaggctgcaatgaaccatgatgatcacacaattgcactccagcttgagcaacagagtgagaccctgtctcaaaaataaaaaataaatattgagaattgaagtgtgacata

SEQ ID NO: 23110 - DNA, 1319 bp, Artificial sequence
  DNA replication origin
ggctgagccccccacctccctcccggacggggcggctggccgggcagaggggctcctcacttcccagtaggggcggccgggcagaggtgcccctcacctcccggatggggcagctggccgggcggggagctgagccccccacctccctcccggatggggcggccggccgggcggggggctgaaccccccccacctccctcccggacaggacggctggccgggcgggggctgacccccccacctccctcccggacggagcggctggccgggtggggggctgaccccccccacctccctctcggacgggacggctggccgggcggggggctgacccccctcacctccctcccggacgggacggctggccgggcagaggggctcctcacttcccagtaggggcggccgggcagaggcacccctcacctcccggacggggcggctggccgggcgggggctgacccccacctccctcccggagggggtggctgccgggcggagacgctcctcacttcccagacggggtggcagccaggtggaggggctcctcacttctcaaacggggcggttgccaggcggagggtctcctcacttctcagacggggcagccgggcagagatgctcctcacctcccagacggggtcgcggctgggccgaggcgctcctcacatcccagacggggtggcggggcagaggcgctccccacatctcagacgatgggcagccgggcagagacgctcctcacttcctagatgggatggcggccgggaagaggtgctcctcacttcctagatgggatggcggctgggcagagacgctcctcactttccagactgggcagccaggcagaggggctcctcacatcccagatgatgggtggccaggcagagacgctcctcacttcccagacggggtggcagccgggcagaggctgcaatctcggcattttgggaggccaaggcaggcggctgggaggtggaggttgtagcgagccgagatcacgccactgcactccagcctgggcaccattgagcactgagtgaacgagactccgtctgcaatcccggcaccttgggaggccaaggctggcggatcactcgcggttaggagctggagaccggcccggccaacacagtgaaaccccgtctccaccaaaaaaatacgaaaaccagtcaggcatggtggtgcatgcctgcaatcgcaggcacttggcaggctgaggcaggagaatcaggcagggaggttgcagtgagccgagatggcagcagtacagtccagcttccgctcggcatcagagggagaccatggaaagagagggagag

SEQ ID NO: 23111 - DNA, 1250 bp, Artificial sequence
  DNA replication origin
gctgggaggtggaggttgtagcgagccgagatcacgccactgcactccagcctgggcaccattgagcactgagtgaacgagactccgtctgcaatcccggcaccttgggaggccaaggctggcggatcactcgcggttaggagctggagaccggcccggccaacacagtgaaaccccgtctccaccaaaaaaatacgaaaaccagtcaggcatggtggtgcatgcctgcaatcgcaggcacttggcaggctgaggcaggagaatcaggcagggaggttgcagtgagccgagatggcagcagtacagtccagcttccgctcggcatcagagggagaccatggaaagagagggagagggagaccgtggggagagggagacgagggagagggagagggagagggagatttctttattctttaaaatattcagtaaaggtattttataatcttttttgttttgcttttccttcctgaaagcattgaaatggtggtggtctttaatcataacttgtggggttttatttcaggcgtgagattcaacattttggggtgaaaatcagcatagttgaacctggctacttcagaacgggaatgacaaacatgacacagtccttagagcgaatgaagcaaagttggaaagaagcccccaagcatattaaggagacctatggacagcagtattttgatgcccgtaagcttttttcttttgatagggataatgggtaccctgtattagtccattctcatgctgctatgaagaaataactgagactgggtaatttataaagaaaagaggtttaattgactcacagttctgcatggctggggagtcctcaggaaacttataatcatggcagaaggcacctcttcacaggatggcaggagagggaatgagtgcaagcagaggaaagccccttatgaaaccatcagatcttgtgagaactcactactaaaagaacagcatatgggaaccacccccatgattcagtacctcccaccaggtccctcccacgacatgtggagattatgggactataattcaagatgagttgggtggggacacaaagccaaaccatatcagtacccttgcatgagaaggggaaaagagggttggtggacaatgattggcagatcctctcaggacaaagctccttaaataaagcattcccagaacagaaggaagtcaggaaggtcccagtggtctcatggttggcttggtctgatgactatcatggttgaggagggggacat

SEQ ID NO: 23112 - DNA, 1055 bp, Artificial sequence
  DNA replication origin
ccccgtccgggagggaggtgggggggtcagccccccgcccggccagccgtcctgtccgggagggaggtggggggggttcagccccccgcccggctggccgccccatccgggagggaggtggggggctcagctccccgcccggccagctgccccatccgggaggtgaggggcacctctgcccagccgcccctactgggaagtgaggagcccctctgcccggccagccgccccgtccgggagggaggtggggggctcagccccctgcccggccagccgccccgtccgggagggaggtggggggctcaggcccccgcctggccagccgccccgtccaggagggaggtgggggggtcagccccccgcccggccgccccgtccgggaggtgaggggcgcctctgcccggccgcccctactgggaagtgaggagcccctctgcccggccaccaccccgtctgggaggtgtacccaacagctcattgagaacgggccatgatgacgatggcggttttgtggaatagaaaagggggaaaggtggggaaaagattgagaaatcggatggttgccgtgtctgtgtagaaagaagtagacatgggagacttttcattttgttctgtactaagaaaaattcttctgccttgggatcctgttgatctatgaccttacccccaaccctgtgctctctgaaacatgtgctgtgtccactcagggttaaatggattaagggcggtgcaagatgtgctttgttaaacagatgcttgaaggcagcatgctcgttaagagtcatcaccactccctaatctcaagtacccagggacacaaacactgcagaaggccgcagggtcctctgcctaggaaaaccagagacctttgttcacttgtttatctgctgaccttccctccactattgtcctatgaccctgccaaatccccatctgcgagaaacacccaagaatgatcaattagaaaaaaaaaaaaaaaagaaagcagtgagagggaaatctccagggacaggagggttggggggttgaaatagactgaataagtctataatcta

SEQ ID NO: 23113 - DNA, 1546 bp, Artificial sequence
  DNA replication origin
ggggagctgagccccccacctccctcccggatggggcggccagccgggcggggggctgaaccccccccacctccctcccggacaggacggctggccgggcggggggctgacccccccacctccctcccggacggggcggctggacgggcggggggctgagccctcctcctccctcccggacggggcggctggccgggcgggggggggctgaccccccccacctccctcccggacgggacggctggccgggcggggggctgacccccctcacctccctcccggaggggacggctggccgggcagaggggctcctcacttcccagtaggggcggccgggcagaggcacccctcacctcccggacggggcggctggccgggcggaggcgccccccccacctccctcccggacggggcggcaggccgggcgggggctgaccccccacctccctcctggatggggtggctgccgggcggagatgctcctcacttcccagacggggtggctgctgggcggaggggctcctcacttctcagacggggcggctgccgggcggaggggctcctcacttctcagacggggcggccgggcagagacgctcctcacctcccagacagggtcgccgccgggcagaggtgctcctcacatcccagacggggtggcggggcagaggtgctccccacatctcggacgatgggcggcagggcagagacgctcctcacttcctagatgggatggcggccgggaagaggcgcacctcactttccagactgggcagccaggcagaggggctcctcacatcccagacgatgggcggccaggcagagacgctcctcacttcccagacggggtggcggccaggcagaggctgcaatctcggcactttgggaggccaaggcaggcggctgggaggtggaggttgcagcgagccgagatcacgccactgcactccagcctgggcatcattgagcactgagtgaacgagactccgtctgcaatcccggcaccttgggaggccgaggctggcggatcactcgcggttaggacctggagaccagcccggccaacacagcgaaaccccatctccaccaaaaaaatatgaaaagcaatcaggcgtggcggcgcccgcctgcaatcgcaggcacttggcaggctgaggcaggagaatcaggcagggaggttgcagtgagccaagatggcagcagtacagtccagcttcagcttggcatcagagggagaccatggaaagagagggagagggagactgtgggaagggagagggagagggagagggagagggagaggtctcactgctttctcctcctgtttctgtgtgggctggctgttctctggttctgctactcaattatttttctaggacttccctacatctctttcctgctgtctgaaatcctgcttcctggagcatatggcctcttggttttctcctttattttaacagaactcattcttactagctaagtctttgcatgtttaaaaaggtctctgttggccgggcgcggtggctcacagctgtaatcccagcac

SEQ ID NO: 23114 - DNA, 1204 bp, Artificial sequence
  DNA replication origin
agttgacacagcacatgcttcagagagcacagggttgggggtaaggttatagattaacagcatcccaaggcagaagaactgttcttagtacagaacaaaatggagtctcctatgtctacttctttctacacagacacagtaacaatctgatctctctttcttttccccacatttcccccttttctattcaacaaaactgccatcgttatcatggcccattctcaatgagctgttgggtacacctcccagatggggtggcggctgggcagaggggctcctcacttcccagatgtggcagccaggcagaggggcctcccacctcccagacggggtggctgtggggcgggggcgcccccccaacctcccagacggggcagctgccggaccgcggtgccccccacctcccagatggggcggccgggcggagatgctcctcacttcccagatggggcggctgctgggtggaggggctcttcatttctcagatggggtggccgggcagaggcactcctgagttcccagacagggtcgcagccgggcagaggcgctcctcacctcccagacagggtggtggctgggtagagatgctcctcacctcccagacggggcggccgggcagaggcgctccccacatcccagacgatgggcggccaggcagagaccctcctcacttcctagacgggatgatggccgggaagaggcgctcctcacttcccagactgggcagccgggcagaggggctcctcacatcccagacaatgggtggccaggcagagatgctcctcacttcctagacggggtggcagctgggcagaggctgcaatctcagcactttgggaggccaaggcaggcagctgggaggtggaggttgcagcgagctgagatcacgccactgcactccagcctgggcaacattgagcactgagtgagcaagactccgtctgcaatccctgcacctcgggaggctgaggtgggcagatcactcgaggtcaggagctggagaccagcccggccaacacggcgaaaccccctctccaccaaaaaatacaaaaaccagtcaggcatggcggcgcgcgcctggaatcacaggcactcggcaggctgagacaggagaatcaggcagggaggttgcagtgagccgagattgtggcagtacagtccagcctcagcaacagagggagaccgtggaaagcaggagacgggg

SEQ ID NO: 23115 - DNA, 1335 bp, Artificial sequence
  DNA replication origin
ttctacacagacatggcaaccatccgatttctcaatcttttccccacctttccccactttccattccacaaaaccgccattgtcatcatggcccgttcccaatgagctgttgggtacacctcccagacggggtggtggccgggcagaggggctcctcacttcccagtaggggcggccaggcagaggcacccctcacctcccagatggggcggctggccgggcggggggctgacccccccacctccctcccagacggggcggctggctgggcggggggctgacccccccacctccctcccggacggggcggctggccgggcggggggctgacccccccacctccctcctggacggggcggctggcctggcgggggctgacccccacctccctcccggtcggggtggctgccaggcggagacgctcctcacttcccagacagggtggctgccaggcggaggggctcctcacttctcagacagggtggctgccaggcggaggggctcctcacttctcagacggggcggttgccaggcggagggtctcctcacttctcagacggggcggccgggcagagacgctcctcacctcccagacggggttgcggccgggtagaggcgctcctcacatcccagacggggcggcagggcagaggcgctccccacatctcagacgatgggcggccgggcagagacgctcctcacttcctagatgggatggcggccgggaagaggggctcctcacttcctagatgggatggcggctgggcagagacgctcctcactttccagactgggcagccaggcagaggggctcctcacgtcccagactatgggcggccaggcagagacgctcctcacttcccagatggggtggtggccgggcagaggctgcaatctcagcactttgggaggccaaggcaggcggctgggaggtggaggttgtagcgagccgagatcacgccactgcactccagcctgggcaccattgagcactgagtgaactagactccgtctgcaatcccggcaccttgggaggccgaggctggcggatcactcgcggttaggagctggagaccagcccggccaacacagtgaaaccccgtctccaccaaaaaaatacaaaaaccagtcaggcgtggcggcgcgcgcctgcaatcgcaggcactgggcaggctgaggcaggagaatcaggcagggaggttgcagtgagccgagatggcagcagtacagtccagcttccgctcggcatcagagggagacagtggaaagagagggagagggagaccgtggggagagggagacggagagggagagggagagggagagctggccatt

SEQ ID NO: 23116 - DNA, 899 bp, Artificial sequence
  DNA replication origin
ccatcgtctgagatgtggggagcgcctctgccctgccgccccgtctgggatgtgaggagcgcctctacccggccgcaaccccgtctgggaggtgaggagcgtctctgcccggccgccccgtctgagaagtgaggagaccctccgcctggcaaccgccccgtctgagaagtgaggagcccctccgcctggcagccaccctgtctgagaagtgaggagcccctccgcctggcagccaccctgtctgggaagtgaggagcgtctccgcctggcagccaccccgaccgggagggaggtgggggtcagcccccgccaggccagccgccccgtccaggagggaggtgggggggtcagccccccgcccggccagccgccccgtccgggagggaggtgggggggtcagccccccgcccagccagccgccccgtctgggagggaggtgggggggtcagccccccgcccggccagccgccccatctgggaggtgaggggtgcctctgcctggccgcccctactgggaagtgaggagcccctctgcccggccaccaccccgtctgggaggtgtacccaacagctcattgggaacgggccatgatgacaatggcggttttgtggaatggaaagtggggaaaggtggggaaaagattgagaaatcggatggttgccatgtctgtgtagaaagaggtagacatgggagacttttcattttgttctgtactaagaaaaattcttatcctgttgatctgtgaccttacccccaaccctgtgctctctgaaacatgtgctgtgtccactcagggttaaatggattaagggccgtgcaagatgtgctttgttaaacagatgcttgaaggcagcatgcaaatcaaaaccactatgagatatcatctcacaccagttag

SEQ ID NO: 23117 - DNA, 1140 bp, Artificial sequence
  DNA replication origin
aggcccttgcaagcccagcagccctctgtctccagagtcatgctggaggtctggacctgctggctgtgtgatattccactttagggagactcagtcaccttgcacaactgtgagagctgggcctgccactgaaacattgtgtcaacctctaagtgaccctttcactagatggtaaagtgagatgcctcatccccaaactataagaacagttctatggctgtttttgtatctcctggctaacaaatgttacatgtttggcagcatttggtatagtgcttgctttcagtatagtctgccaccagttaatgaggttgtggaaaggaggacacacaatctcccaaattcatcaagagaatggacaattgctgaatggccaaactggcttagatctgttggcaacattcagtgtgtcccttcctttccacttatccatcaaggaattactgaatcctaccatgcgcctgtcctgggagtttgtccttggctgcaagctattttcaggcagtgactgggatgggatgggagagaggatgaaactgaagggtcttggagcctaagagcttcctctgtactgagggagggagggcgacatgacgaagacttctaatgtctttggtggtggtgggtggggcaggcagtgtaggtggttttcgtttgatgacaattcttgggcagaagcatttgaaaagatgatttgggagaagggtggggaggaagagtgatcgagttctacacagagttggggagggcaggcttcaggaagcaggcctggggtgccaaagtacagtgagatccggtgactttcttcatttggccacctagatggaaggagggacagcagtggattatcagaagggtccagtagtagcggtctagccctcaagtgctccttcattcattcaagcaggcttaatgtattaagcacttattgtgccaggaagtgtggtaagggtcagtgtggacctgcggccgtgtgcaaagccacagatccctgccttcaggaagcccacagcctagtggaggagatatatagtaatcaaacaatcttacaacattttgtaaaatgcccatagtagatgttctgaggagaagcttttggaactgtgagcgtagaacaggggaggtgaagagagtttggat

SEQ ID NO: 23118 - DNA, 868 bp, Artificial sequence
  DNA replication origin
tttcactctcacacacgggttcgcacccggacccccgctggctcccctaggggagtgggcaggccccttctgcggaatttctcttccctcgtccctctctggccgagcaccccctctcccaggacccgggagcggagagctcaaaatcggctcctccctccccctctttcccggatcaggaccgggacccgggcgccccgcgcccagtaggttgccgctcacttgctcacgccctactccgcctcctccttgggcgggcgtctccctccagatcctaaggctcagcgccgccccaagggggccggggtgggagggaggggggcgcctcgagcagaggctgcgtgggcggaggatgtgcgtcacggggagcgtgggctgggggagggagggggcacgtggaaacccggggccagcggctggcagcccgggatccaaaataacctgaggtggggggggaggggtcgcccacaccccgtacggggtcgggagcgtccccaggggagcccgtctagccgcaccctccagttgcggggcgggggactgggagacgggactctgctcgttcccaccacccccactgtgtttggcgcttaataggttggagaagaggacctgagcaactgaaatcctcccaccaacaacgcgctccttctccccggaccccacaaggcggaaaggtctcctcgctaggccacattgtaaaaccagccccggtccacggcctccacgccccgccatgccccaccccagcccctcagaagtgcggacagagaggcggggcggggctgagattccggactaggggaaacctcacctgtggccagtccgctcgctttccccggcccccaccccccctcctttccctggg

SEQ ID NO: 23119 - DNA, 810 bp, Artificial sequence
  DNA replication origin
acgccggatgcacagccggccctcttggcgcccacgtacccacgtgagcgccccgccggcgacattccttctctcccccacccctccgagctgagagaggagtttcacaaccacgcacaagtacacaaagacacagaagcgcacggacgtgcacacgcgcctaaacaactacggggacgcccgttgcccatactcaggccttgtggtgctggacgtgtgaatgttagcagtgagccgggaaaagttagcgaaggctgggctgtgcggcttctcctgtgcgtgcatctgactcccgtatagtgtgcacttaaggcgggcctgagagcgtggggctctgcagggatctcctagatatccccgcgcccctcctcagccccaatggaataatctgagggggtcgctctcagaaacccaggcctccatgctagcctggaaagtttgggaaacaggaatgggagggttatgctgcacgccaccacttaggtgcgcgtgttgattagacgcgtcggcttttgtcagcgcgtaggtcaggcagggattcctccacttgtcctctgtttgctgaggatgaggccctgcctgggaattttgtgtgacaaagacgatacccttcctggggccgtctattagggacctcgcccgagagtctagtggaagatgagtaagaggtcgggagcctacgacgtgacttcctgcggcggagctggaaggaggagcgccttgaaggagcttagcccccgcctctgcaacccaccaccgtctccccctttggtttctcctagccccatctggttcgcattgcactcccgc

SEQ ID NO: 23120 - DNA, 859 bp, Artificial sequence
  DNA replication origin
ggtgcccggcgctcggcgcctgctgcgtgctgccctcttccccgcgcacgatgccgtgtccaccgctgtccaggctctgtccctccctccacgtcttctctctccgagcctccgcgcctctgtctgtgcctctgcccccccaccctccccggctgcgcttgccgcctctccgcgcctccgcccccgcaggacgcacagggagcgaggcccggagctgcgctggctgccgggctggcgggcggagggcgtgggcagagccgggggcgggggtgggggcgggggccggggaggcgggcgctggggcctctcggccgcggagacgccgcggcttagagactgggagaggcggagacggggggggagggggtgtggagcaggaggcgggggcggggattcagagccggggcgccgaattggggaccgaggtgaccgaggcccggctgtgcagggcgggcttggggacccagcgggcggggcgaggtcgttctgtgccgcccacgccggatgcacagccggccctcttggcgcccacgtacccacgtgagcgccccgccggcgacattccttctctcccccacccctccgagctgagagaggagtttcacaaccacgcacaagtacacaaagacacagaagcgcacggacgtgcacacgcgcctaaacaactacggggacgcccgttgcccatactcaggccttgtggtgctggacgtgtgaatgttagcagtgagccgggaaaagttagcgaaggctgggctgtgcggcttctcctgtgcgtgcatctgactcccgtatagtgtgcacttaaggcgggcctgagagcgtggggctctgcagggatctcctagatatccccgcg

SEQ ID NO: 23121 - DNA, 1649 bp, Artificial sequence
  DNA replication origin
ctctcagctcggaggggtgggggagagaaggaatgtcgccggcggggcgctcacgtgggtacgtgggcgccaagagggccggctgtgcatccggcgtgggcggcacagaacgacctcgccccgcccgctgggtccccaagcccgccctgcacagccgggcctcggtcacctcggtccccaattcggcgccccggctctgaatccccgcccccgcctcctgctccacaccccctccccccccgtctccgcctctcccagtctctaagccgcggcgtctccgcggccgagaggccccagcgcccgcctccccggcccccgcccccacccccgcccccggctctgcccacgccctccgcccgccagcccggcagccagcgcagctccgggcctcgctccctgtgcgtcctgcgggggcggaggcgcggagaggcggcaagcgcagccggggagggtgggggggcagaggcacagacagaggcgcggaggctcggagagagaagacgtggagggagggacagagcctggacagcggtggacacggcatcgtgcgcggggaagagggcagcacgcagcaggcgccgagcgccgggcaccgagaagggcagcccgggtgatctccggccgtccatgcacagagcgccttcccccacagccgagcagccgccgggcggaggggacagcgcccgccggaccctgcagcccagactcaagttagtgggcaaagggaggcagcggggagtggagatgggtggagctggacttgggaatggggtccagagggcggaggtcgaggggaggacgtggggaagcaggacgggggtggggggtggagactgatggaaaagggggtgcgtcttcgaattagggggccctgggagcaggcaagcatctgatgaagctggatatgaaagagtagtacccaaatctccattcctggtttactctgtgggctccatctggcctaagagccccctgcaaagaatgtgggagcctccaagcaccaggggatgccctggagctcgagctggcatcagtgcggaaggtggggggacgctcagttgcctcagtccctcgttggcacggagcgcgcgggcccccggtgcctttgagttaaaggagcatcagcgggggaaagggggggtgacgagggaggcagggaggccttaggcgttccttcccatatctgtccctttattcacagagcggggaggggagtttcagtgtgcagccccttcatcaagaggccttgagccgctcccccactccacttgaagatgcgggtggaaaatatgggagaggagagtaggcgggagcccctgggcggttttcgcctacagacgctaccactgtgggagtgtgtgtgggcggaacggccccggagcagaacaattgcgcccctccccctgccacggcccctgagctgaaggaaaaggctgaccgaggaagtggggagtgtcactgctaggagaggggccactgaggagcactgggcagcctggaagggtggagaggttctgaggggagagaggaagcgtgcgttaagaatgcttaaccaggccgggcgggcccggtggctcaggcctgtaatcccagcactttgggaggctgaggcgggtggatcacgaggtcaggaattcgagcccagcctg

SEQ ID NO: 23122 - DNA, 963 bp, Artificial sequence
  DNA replication origin
gaggggagagaggaagcgtgcgttaagaatgcttaaccaggccgggcgggcccggtggctcaggcctgtaatcccagcactttgggaggctgaggcgggtggatcacgaggtcaggaattcgagcccagcctgaccaacatggtgaaaccccgtttctactaaaaatacaaaaattagccgggcatggtggcgggcgcctgtaatctcagctactcaggaggctgaggcaggagaatcgcttgaacccgggaggcggaggttgcagtgacagcgccactgcactccagcctgggtgacagagcgagactccgtctcaaataaataaataaataaataaataaataaatgcttaacccctgggaaaagctgagcggagaagagtaaggcaccacctggctcactgagtgggaaagccagggaaggtgccacaccctcccttttagccacctggggctgtggccccttcacagggaatgaagctggccagcagcgtccactgtgggggagactgggctcctacattcactttagtatgggtgacttcacttcagtgttgagactgctgagtgtttagaggggaaggtgaggattgtgttttgggggagagggaggtccagccatcccaggtcggtgctggtcagcctcagcgctcaagttcttcttgccccagaccaaaaagataaaagctgaagataaggttgtaagacgcttcgactcctacagacacaggccactgacttttggggcttcgggccagtctaggacggcactggcttgtccatgcctctgagcagtgcctgattctgagagtctgtactcagacctgggcactgggcaggatagcatccaaatgagggaggggaagaaaagcaggcaggaaagagggaacaattgttagtgtgggttggtacccagtagggggacttgcaccgactgcctctctcttgtgcccctccttctca

SEQ ID NO: 23123 - DNA, 1341 bp, Artificial sequence
  DNA replication origin
actatgagaccttcatccagcagggaggggacgacgtgcagcagctgtgtgaggcgggtgaggaggagtttctggagatcatggcacttgtgggcatggccaccaagcccctccatgtccggcgcctgcagaaggcactgagagagtgggccaccaatccagggctcttcagtcaaccagtgcctgctgttcccgtctccagcatcccgctcttcaagatctctgagactgcgggtacccggaaagggagcatgagcaatgggcatggcagcccaggggaaaaggcaggcagtgcccgcagttttagccccaagagcccccttgaacttggagagaagctatcaccactgcctgggggacctggggcaggggacccccggatctggccaggccggagcactccagagtcggacgttggggcaggaggagaagaggaggctggctcgccccccttctccccccctgcagggggaggagtccctgaggggactggggctggggggctggcagcaggtgggactgggggtggtccagaccgactggagccagagatggtacgcatggtggtggaaagtgtggagaggatcttccggagcttcccaaggggggatgctggggaggtcacatccctgctaaagctgaataagaagctggcacggagcgttgggcacatctttgagatggatgataatgacagccagaaggaagaggagatccgcaaatacagcatcatctatggccgtttcgactctaagcggcgggagggcaagcagctcagcctgcacgaggtgagaacccccaggcctcctaggattgcccttgacttccaggtctccagccgcttacctctgcgagtttctacagtctccgactatctttcattatctcttgaccaggaccccaggccctgatcccctccccaacaggcccctaccccagcggccgcagtgcttccatcctcagctgagggggaagcagagatacaggcagcaccgagctgttcagctccttgtcactcaggaccccacaggagaggaggaggccccgggcattcctaggaagctgtgggtgctgacctctgtcttcccacctcagaaagctcccatgtagtgtcaaaaccaaagcaagcgtctgatggatgggcctcatttgtccaatggtgaaggggtgtgaggaggtctggtgaggcagcggggaagttcgaattctgactctcctggctgccctccctccacagctcaccatcaacgaggctgctgcccagttctgcatgagggacaacacgctcttattacggagagtggagctcttctctttgtcccgccaagtagcccgagagag

SEQ ID NO: 23124 - DNA, 836 bp, Artificial sequence
  DNA replication origin
gtgtgcctcagaacacttttctcttcattgagggtgggggagtaggggagggggttgggggaggagtgagccaggaggcagtgcctgaaacagggttgggagacctggctggagggggggcagaagggcctgtgggctggctatgtggttgagggtgggggttccattggctgcagccccttacctgaccagtgcccatgcccacagctgtggggtcatgtccaaggctgacgccgccccctgctgacctgcctctggcattgccagcccatgggctatggagccgacacatcctgcagcagacactgatggacgaggggctgcggctcgcccgcctcgtctcccacgaccgcgtgggccgcctcagcccctgtgtgcctgcgaagccacctctcgcaggtgaggcagccagcagtgctgtccccaagcaccccggccactcaggccccacacagcaattctggtgtcctggggccaggtgggaggaagagggatatagtcgtcagagagggcagtaggatggctgggctccagccagccaggccttggggtgcagagaggcagaccctgccgagctgctcccaccatggaaagtctggtcctagtgtagatctgtgaaaggggaactggggaatggggggacagagaaaagaggatgaaggagcaggaaggaggagcatcaataagggaagctcagatggcacttccaccaacccaggagtggggagcaggctaggagttgtgggtatggggatggggatgcccagcttggaagcagaggagcccaaagcagtgatgctttgtgtgtggaagggggaagagggagtgggcaggcg

SEQ ID NO: 23125 - DNA, 825 bp, Artificial sequence
  DNA replication origin
ccatggaaagtctggtcctagtgtagatctgtgaaaggggaactggggaatggggggacagagaaaagaggatgaaggagcaggaaggaggagcatcaataagggaagctcagatggcacttccaccaacccaggagtggggagcaggctaggagttgtgggtatggggatggggatgcccagcttggaagcagaggagcccaaagcagtgatgctttgtgtgtggaagggggaagagggagtgggcaggcggagggccgggcagccgctgggctgagagtgacgcagcagacaaagccaccaaccctggcttggtatttttaaactgtgcgtgggtgggaagtgggggcggggactggaaggggggctcttcttgagggaggagctcggaggctggcttcctgttctccctctgatttggctaccaaaaaacttggggggccatggtagagtggcctgggaggggcctgggagggggccagggatgagtgggggtggcagagcttgggaaggggggaggggagaggtcagagccaaaccacccccgcagctcctgacagaaccagaaattccagcgcaaccgaggaggcgggagagaaagagagagagacagacagagacagagctacgcacagccagggaggggagggggctcacacacatgggaatggaaccccccatacacatgcagtgggcaggaggcagtaattcaataaacctaaactgagcccatcttcacagctttctttgcccctgcttctgttcccaaccacctctgtctgcagccagtcaccctgcagtctcctaactgcccccttttccctg

SEQ ID NO: 23126 - DNA, 823 bp, Artificial sequence
  DNA replication origin
atccaaacccttcaccccacccccccgcttcactcctcgctgctctttccccctccccgggcgaagctcacagccccatctcggagccgcctccggctgcaaaaatgcacaattgggaggaggcggggagggggggtggggggcgtggaccgggtaggggagcctttggagggggcttgatggagctctgggggctccccttgtttccgcctcctcagtgcatgggcctggagctcgcaccgctgttccccggactgaagtgccgaggggggggctgatgggggagagggaggggacgggttgaggagggagggagggaaggggcggggaaagaaaaaaggttggtgggtggggggagaaagagctacgcggcaatccagtgagtgcgcatgcgccgatttgacgcgctgcccgggggagggcgacgcggacccgcgacagggttcggagttctggaaagcggtccaagagtgagggtcccggggactcgctggctagtttggggcctggggcgccctctcccctggctgggccctcctccctggtgctccagagagcagaaggggtcgagggtgggattgggcagtgggcggagagctgagcggctcccctttgaaactcagtgtcatactctaggatttcaggctccctccgggggcgtccgggactcagtggtctgggccgaggctcgattttctaggggaaccctgaaggtgcctcctctgcccggggtggggacagggaccgccagtccgcggggaaggtgcagggaaaggctgagctttgatttggagactttggaagaccggactgggattggggc

SEQ ID NO: 23127 - DNA, 1103 bp, Artificial sequence
  DNA replication origin
cccagtccagctgacacagcagcggcccgactgggggcggggatggggtccgatttgggggatgggggccctgggcaaatgatgcttccggggccccccagcacaaacaaagaccagaggcctgggtagagagaagagggctccccatttttctgatcctggggaggagaggccttcttttcctatctctgttcggggagggcctccgcctcccctacatcctcacaaccccccaccccccatctgaattgtgaaggaatccggatttgcaatgttcggctgcaaaagggggtgggggtggggggggtggcttttgcactggcctctgtagctcgaaaggggagccaggccaggggtaccctgccgggcagagggcaggcaggcccgggaaggctgtgggtggggagagggagggccccctgcttgggcgtggaatcgaccccagagccccggctggaggcctgggtgctgaagtaggctcttccccctctcagggcctctgtcagtagcctggggtagggctgtgttggggggcagagagggggagctcgccatactatgtgactttgaattttccttcttaattcctgggagctttgagatgaaaaaacgtcagatgtcatcactggggaaggggactggagaatggcctggaatgctggggtaggagggtgggggaggctgccttcttcctgacttctggcttcatcacagtttggattggaaggagagttggaggttggatggggattatggctgtgcccccacactcctttagtaaatctgtttattccctgcacccctccaagcccaaaaccccatacacacacactttgtatattgcagagttaggcttaggctagaactgcatccttttggggaaatggggtgcctctcttccctttttttgtcagctgtttttttctcctacttgtgagtcactggttcaagtcttgcccaagctttaagcattaagctggggtcatggggttgggctgggctaggtccctgatttgagaaggggtgggatctcatcccctcctgtcatcttagccctctcatccaaagacaaaactgggctggataccatcatacaccccctc

SEQ ID NO: 23128 - DNA, 946 bp, Artificial sequence
  DNA replication origin
aaccggcatcggcgtccagcttaaagacatcaaagtcttcaaccgggaccggcagaaaggtgaggctggggctctgggctggggtggagaggtgagggggactctggcctgggagagtgctccccagggaacccagtgtgagagggctgggagacaagttagacccatggggcaacttccgatggcccgagagacccagggatggggaggaaaggctgaggtgctctgggacagatcttggcattggactctgggccctggagggtcattcaagctgggaataccgaggcagagggcagagctttcgccaaagcctggatgacaaaggcaccagtgagcctttcccaaggcaggccctgccctctgtaccctcccctcccccaggcaccaacgtgtgcgcggtggccaatggcgggtgccagcagctgtgcctgtaccggggccgtgggcagcgggcctgcgcctgtgcccacgggatgctggctgaagacggagcatcgtgccgcgagtatgccggctacctgctctactcagagcgcaccattctcaagagtatccacctgtcggatgagcgcaacctcaatgcgcccgtgcagcccttcgaggaccctgagcacatgaagaacgtcatcgccctggcctttgactaccgggcaggcacctctccgggcacccccaatcgcatcttcttcagcgacatccactttgggaacatccaacagatcaacgacgatggctccaggaggatcaccattgtggaaagtgagcccagaccctaagtcttcccaggaagtgggacatggggcggggagcagcacagactcttagaccccagccaggcactctaccctaggtctgaatcccagcagctacaactcagctgaatccaactgcacccccgcagttacatgactcctgatttggagtcagcgtcagcccccgactt

SEQ ID NO: 23129 - DNA, 1425 bp, Artificial sequence
  DNA replication origin
cccctcggcatgagcagttgacatggccctggtgagtgagcagacacaggtcctggcagccaccgttgttgattcggcatggagagagttcacctgagcagggacagggtgggcgcagggctggagagtgttctctgctgtgcatgcacccagagtgcacccacccattcactgacttcatggagctcccaagcctctgctcagtcacggcaggcacagcggcttgcagccagtggggagggcatggggatggctgctgtgggagggccaggtgcatggggttttcggcaggtgtgccgttgaggatgtgtgtgcttttaggcagggcaccgtgggctttgaggagtgtttctgagagattcgagtctgagggccctgagatcacgggtgcagtagtgagccccagggcgcatgggagacacctgggaaagctgcaggtctgtggtggggggcgctggggcatgtactcgtgcccactgagggcacgtgcacccaggctctcggctgtctgtgtggctccaagtgaggagagtgaccagggtgagggtaggggcaccgagggcatggatgagccctgaggggcgggtgtgacatgaatgtgtgtgtgcaacgtggaggagatgccaggcgtgtgcagagtccatctgtgtgcgtagatgccttggtgggaaggggtacaggagcactgggggttttgcggttccaaaggtgtgtacagctgtgtgtgtctgtgtaatggaggcccagggagagcaggaccaggcaagtgtgtgtggggtgtggtgtgtggggtgtggggtgtttatagtatgtctgtgagatgtgtgtgtgtgtgtgtggcatgtttgtggtacgtgtggtgtgtggtgtgtgtgtgtgctgtgtggtgtgtgtgtgatgtgtgttgtgggtggtaggtgtgtggcatgtgtatgtgtgtcctatgtgtggtgtgtatgtgtcatgtgtggtgtgtgtatgtggtgtgtgtatgtggtgtgtgtgtggtatgtgtagtgtgtgtggtggtgtgtgtatgtggtatgtgtggggtgtgtgtggtatgtgtggtgtgtatgtggtgtgtggtgtgtgtgtggtatgtgtgtggtgtggtatatgtggggtgtgcatgtgatatgtgtggtgtgtgtatgtggggtgtgtatgtgtgtgtatgtgttgggggtgtatgtgtatgtggtgtgtggggggtgtgtatggtgtggtgtgtatgtgttgagtgtgtgggaggggtgtggtgtgtgtatgtggtgtggtgtgtgtagtgtagtatgtgtgggatgtgtgtgtgtggtatgtgtagggtgcgtgtggtatgtgcgatgtgtgtgtggggtgtgtgtttgtatgtccatgcacgacaggcaggagggtgaggcagctggcggcagccccactcac

SEQ ID NO: 23130 - DNA, 881 bp, Artificial sequence
  DNA replication origin
cacttgaaagccccaaatcctggggcagggaagatgctggggaaggagggagggtgggcgggcagcgccttaccacagttggcctcgtcactgttgtcctggcagtcattgtcgccatcgcagatgaaggcagggtttgtgcagatacctgtggagcactggaactgtccgggccggcacttgaactcagctgccagagagggaggctcagagtcagagcggctggggtggacacggccaggtccacttgcagggcaccacagccccagcctctccagtggccattcaaagcctcaggagtcaggcctccgacacagctgggggccctcctgtcacccccagcaggcactcacggcagtccgggggctcgtctgagtggtccccgcagtcgtcctcggtgtcacacttccaccagaaggggatgcacttgtcgttcttgcatacaaactggagggcaggtgggggcaagaggggttggtgggggtctgggggactcagaagtctttcttttgaggggcttggatgtttcaaagaagttgaggcaggggtcagggtgttatggggcaggttgggctatggtgagttcggaaaggccaggtatggggctgcgtgggatagggtggggaaggcagcactgaagcatggcaaggagggtcaaggttagggtgtggaggtgtctgtgtgaggtgacgggggtaaaagtattgctgtggggagacaagaggtaggcaagaaatgtgggggtgttagtgtgggaaaaccagatgcatgaggacattaggacagagcaggtgttggggtccaaggaggatttgggggttggggagcgggcactggtgatggggtctgggggacagcctcacctggctagccgtgcagtt

SEQ ID NO: 23131 - DNA, 974 bp, Artificial sequence
  DNA replication origin
ggctgctcctatggaacagctgggcacaggcgggctcgcacttaccccatgggacagacaccagagaggacacaggtccctggccttgccctcagaacagactgtgtttggggaggggagcgggggcaagaccactgagacaagcaccagggtttggggagaggtcaatcaaggatgatgggtagaggcacagcacagggatggggggctctgggacagaggtgggggtatggtgggagcacgggcacatcagagacacctacctctgcaaccccgagaggacagtgtgaaaatggagagaaacatgagatgaggtgaaatggcacaaactcaaatacacgacatggagtgggatgggtgaggagggcggctcctgcccccaccctgggaggtggccaccagctctggcgcggcctgtggcaggagggccgcgagacaagggccaggcctgggaggggctcatgcggggctgggtgggtggggacgtactgcagctctcttcatcggagttgtcaccgcaatcgttgtcgtagtcgcactgccagcggccgggcacgcagcggttgttcttgcagcggaactggtatggctcacaggtgcgttcatctggaggaggcaagtgtcagggcagtcagggaaagggctggggcagacattagggtccaagcaggcatggtcaggctggcctggcagggagggtgggcatcccagcttgggaagggtcagccgcggggagcccaggcggtgttttgagacgtggggtctataaggaggtttggggacaggagacatggttgggggtgtgtgtgtgggcagctgccttgggaaggagatgaacagatcccatagggtgggcagggaaaactccacacaggtatgtgtggatgaggcgtgggcaggggcagggatagggaaactgggagacatggggcacgggtggatgtggggaagtgagctccagccaggcctccttc

SEQ ID NO: 23132 - DNA, 935 bp, Artificial sequence
  DNA replication origin
caatagacacggccagccttgacatggacatccatagcatcaatgcggacactctcgtcaccctggaatgcctgctcgtaagccgaatgggggtggccggggaacaggctgcggatctcattgtcatcagcgatgtacaggacctggtactcagagcctggagaagcaagaggccagggctggggctgtgggatgcaggtgtgcaccccacccagctcagctcctttcacatgaacactgtcccatctcctggtaggaccatctgctccggccagaagctgctgcttaccctccctgctcagggttgcaggctccaacctcagcctctggacctcctcctctcctcccctgagctgatccactgtgacccgctcctttcagtcagaaagctgtccctgcccctccagacccagagacttccacctcctcacggctgctggatggcatcaccacgctctctgctacaaactgcctggcacatgctcgggggtgcataggcacatggggtgtgtgtgcttggcatggagcacgagggtgtgcatgggagtgcatggtgggggtgtgtgtgccaggggtgtgtgtgaatgtctgtgtacaggcatgtggaaggcaaggtgggcatcaaagcatgtggggaatgtgcaggtgaggcccccatgactgtgagtgtgcaatgcgtgtctgagtgtactctcgtcctggcagtggtgggtgaggaggtgtgtgtgcaattcagagcactgccacaccccagactccttcagtcagccagccccaggacctgcccccactgctgggccagcactgtgctcaggcagctgcaactatgagtctggggcttcttgtctgggcaagatgtccgcaggaagacattccattccaagtcggccccgtttgatatcctggtcgccctgccccacccagcctttctgccc

SEQ ID NO: 23133 - DNA, 1316 bp, Artificial sequence
  DNA replication origin
gttctcacagtagccagagcactgccctgtggttggggagggagagaagtgcctcaagccccaccctcatgagggctctccataggttgaacagagcttttctgtttgcataatcttggtgcagggggtgcactgcctcaggggaagtgtgccagcacctttgtggggaagcgccagcagcttgggcctggctcagctgcataaggccttctttcctgaacttgcccctgtgggtcccaggcacaggttgaacatcaccccatgctctggggtcccccgtcaccctcccgcatgccctggggcccagggatggctcactcacggtactggcagcggtcgcccaggaagccgggtaggcatcggcactggggctggttgccctggttgacagtgcaggtgctgttgttggcacagtagcccgcacacacctgctgggtgcatttggggcccgtgaagcccgtggggcaccggcacgtgggcatgcctggtgggagaggatgtgtgagcgcgactgtggccctcgagaccacctggccctatagcagaggaatgggctggggggacctgggcgagaagcagagactggagtgactggatgctgggttgtggaaaggaggctggaggcgaggcaggggctgggcatttgcctgaggtggggtggtgggtggcggggctggggcccaggggcaaggagcaggcgtggcgggatgagggggcataccagagggggaggcagcacaggtgcccccattgcgacagtgctcccagcactggtccagttcacacttgtcacccgtgtagcggggttggcagcggcacttgggctgcctccgtgcattgaggaaacagctgccaccgttgaagcactgcaggttacaggttccaggccggggagctgcaggaagggcccgtcaaggggcagagccaggggaataggaggagagggacaggcaacaaggtcaggggaagtcaggagccacaggaaggagatggtcctgaggcatggctgggactgggagggcataagcataccatctggggggggcgttggagagggcacaggcacgcatgtgccgttgtccagccgcttcccattgggacaggtgcagacaggcccactggggctcagcaggcagagccactcgcatttcttgcggtcacatgggttggtcactgcaggtatgggtggggtggggaggatgctgagcaggacccttctctgagccctgtgagcccagggtgaccccctctccaccaggtcccagggccacagcttggagactcaatgcccacaggcctcccttccccagcccagg

SEQ ID NO: 23134 - DNA, 1458 bp, Artificial sequence
  DNA replication origin
cccacgttccaggcacgggggctgcttcagtagtaggtgggaacagtgggcacacctaggcgtaggctgtccaggacagaagcccattaccagggtcctggtcttctgggggccgaacccactgcatctctcctcctttagctacagtctcaggccacctgttctctctccagttacacacacacatgtgtgcgcgctcgcacaaacacaagtgcaaacacacacatgcacactactcgccctgtctctgggtctttgcctctgtccccctgtctctccgcctctgggtttctgcctctcattcggtatcagcttctgtccctggttctcagcctctgtccctggttcttcccatctctcaggccaaggtgagggcttcccacctgcctcccgggtgggtagtttgagaaactgcctcctggtggaccttctcctagcaggtcctgacaggcggagtgggggatgctgactggaggggtatgccttccaagctgcagcgggggtcccttgtcgctctgcccaggatcttgaggtgacaggcagagatcagtggctcccggggggcaccagatgcaccgatggcagaggggcagggttggggctggtggtggtgggagcaggcaggcgctggggcagggaggggagctggctggcagagggtggaggggtgtggcaaaatagccggagagaaggaagcgagagactgggctggggtcccccgcaggtgcataatgagtgctgaggcgggggctgtgtggggcttcaggataggcggtgctccaggcgtacagacaccacctggtggccagattgggacacagacctcctactcggcaaccacggattctgtttccccgcagttgcccatccagggcccttttgaaggcaggggaggatctcagagttggcttggaggatgaggttggagagagcttctgaaggctaagaagggaaggggagggctcctctttccacaggtgcctagacttgtagcttccccaaggcagaaggaagcctgggaggaatctcctggagttgaaccagtgagggaggaggaatgaaaggcagcacttcctggttgggagttgggtaagggatcttcagacatttgcagccacccttcctgagctcatatttgctgtactgggactcaaaccctctctagtcctgggcagtgtaaactgtgcaactttctgcaagaagtttccccctctaggcaggggttgaaatggacctggacacttttgattgacagttttttcctgttaccccctggaatgactgaaatgattggtgagctggagctgctgggggcctagagggcctggcaaactggtcttcccagctctcctttaccgcaggagacacctggctctggaatgcagcattttacttcgcatttgattcattagtctccacaaagtgagacgtcagtgcttcaagagcagactcaggcag

SEQ ID NO: 23135 - DNA, 1956 bp, Artificial sequence
  DNA replication origin
atgggcaactgcggggaaacagaatccgtggttgccgagtaggaggtctgtgtcccaatctggccaccaggtggtgtctgtacgcctggagcaccgcctatcctgaagccccacacagcccccgcctcagcactcattatgcacctgcgggggaccccagcccagtctctcgcttccttctctccggctattttgccacacccctccaccctctgccagccagctcccctccctgccccagcgcctgcctgctcccaccaccaccagccccaaccctgcccctctgccatcggtgcatctggtgccccccgggagccactgatctctgcctgtcacctcaagatcctgggcagagcgacaagggacccccgctgcagcttggaaggcatacccctccagtcagcatcccccactccgcctgtcaggacctgctaggagaaggtccaccaggaggcagtttctcaaactacccacccgggaggcaggtgggaagccctcaccttggcctgagagatgggaagaaccagggacagaggctgagaaccagggacagaagctgataccgaatgagaggcagaaacccagaggcggagagacagggggacagaggcaaagacccagagacagggcgagtagtgtgcatgtgtgtgtttgcacttgtgtttgtgcgagcgcgcacacatgtgtgtgtgtaactggagagagaacaggtggcctgagactgtagctaaaggaggagagatgcagtgggttcggcccccagaagaccaggaccctggtaatgggcttctgtcctggacagcctacgcctaggtgtgcccactgttcccacctactactgaagcagcccccgtgcctggaacgtgggctcagggttctggctcaaggccttttggccttgagcctgaacatttctgccccttcctgcctctctcctctccacccccaccccggcacccaggttcctgcctcctggcttctgcctgtctccctgggtgtctctgaatctgcctcgtcctctcagcaccggtccttttcctgactcgtgtgtgtggctgtcacgtcccatatctatctgtccatttctttgtatgtgcccccacttgtcttctgggctgccagtgacagcatacacctgtgtatgtctcagtgtgtgtgtccacctctgtgggtgtttgctctctgccaagacaaagagagggtgagcgcactgagcaactgtctgggtgtgctcgtctgggtgcaggtgtgctcacctctgttgctgtgctcctctgtgtgttggggtgccgctaggtgtgcgcctgtctctgtatttcgctctgtgtgccctgtccccgtgaaggcatctgcgtgcatccctggggtgggctctcaagggatgtgtctgtctctcagtctctttgcttgtccctatctctgtctaggtgttggtcataccacaacctcagccacagcctcagtgcatagcaacagctgacagctgaaaccacccgggcaggagagagagaggcagtggggaggagggaaccgaggaagaaacagagaagaggatgggggcagagagctggggctggggacagagacaaggacagagatagggaatggggacaaggatctagaagagctggtggtgaaagatgggacggcgggaggggaggaacagagactgcaccaagaggccaggcaggcggcgctgagagggatttcctgcccagcccccatgcagaggcgcactgggcctcgtgggggtcagtggtgggggccaggggcaaaggtgaacagccggtctagccgaggggtcctgagaccgcagaggtgcggtgaggcggggacggggcggagggcgccgtttgtcagccctattgacagacgtgatggggtttccgtccgtgatcaatgattctcatctccgggccgaatgagccgcggggcgcccatccatccccgtcagca

SEQ ID NO: 23136 - DNA, 1466 bp, Artificial sequence
  DNA replication origin
cactcagatagatcccattgctcatatcctcacgctcactctcactcaagtctccaccagatgtttcattccccctcagggggcaaaggaaattaaaccagatctgtccacaggggagtttatttgcctgggagagtggagatgaggtgggaggaagtggaaaggaggggcaagagaatgccatacctaccacctcttgaccccaggccttcacacatgggtgggtgggtggtagggcacagaccccccccactcctccagttcactaaggacagagttgggcagcaagtccctaagaagctcctgctagtggaagcagttttcatggaggggctcctctgcctaccgtgcagcccctcaaggtcaccaggtggggctgggagggccagggagctctaatgctagcttcactggggcagcccctgccctgctggggtttgccaaatgtgatttggctgagcaggcagaggtccaagtgttgggggaagaaatacaccccttctagactctacaggggctgagggtacagagaatgagggtttggggaatgacctgcctgcccccaaactaggtaggtcacagttgggggtcagaaaacagggaagccataggcaggggaggctggtagaaggaaaatgggggactggggcctgggcccccattgcgggcacacaccaggggcataggcagatggctgcactgtgaggcaggcactgacactcactcatgcaaagccaacaccacacaccacaccagtatacacatgtaccctcggccccagtactggaccaagcctggcttccctggacacatgcacacaggtgcacacggtgacccacgccctccacccagcacatatgagcacagcatgttcgcaggttgaagcctccaagtcaggaaggaggcagatcaagtctgagctcccttagcctctggctcttcgcccgagagcctcagggaaagaggccttggagtggggttggaggcagggagggcatgggaggagagactccccttccagacagcctcccccttcagtggggcacgagaggggggtgtgtctgtgaggtcgtgcaggggagatggtgtctccgtgggaaatgtgatgggaggctggctgtagccaagttcagccgtgtctgcctgagtccgtgtgtgcgtgtgtgctcgggccatggatgctcccgacacagagcccacctggcatggtgacaagtgcagagaagagaaatgggaaggcgggggtggaggggtggaaggacagacagacagtgaggcaggcgagcgagactggcgcggaaagacggcaaggctgacaccctgctggcttgtctgtctgtctcgcactcccgctctgtctggcgcactcgcgggtcgggcttcgtcccctcccccgccgcgcctgaagtcggctgcaagggggacctccgcccggcaccctctccaagcctcagccaacttgcgct

SEQ ID NO: 23137 - DNA, 719 bp, Artificial sequence
  DNA replication origin
tgccagctctatcccgcctcaggaaaggattaggtctgattctcttagagctggctggccgaagcccctcagccagctaccccctcctgcctccacaccctcctctagccccccagctaatctctgcctgggccacttaggcacgcacagcctgggctagggcccagagctgctgccggggatttgggggtaatcaggggccgcagctgggccagggggacaggggagggcctgctgtgacagctcccttgggccagagcctgcagtggaagcctcacattcctaataggaggggcatgcgtcagaaaggagaatttagagtgtcagggttgggatgggtagaggagctggagacccaggagcggggtgactggcgaagaggtgaggtaataaggacagaagcaaggcaaagaggggtcagggacgaggtaattggagagagacaacacaaacgtctaaagaaaacaggtaagtggggggacctcacaggggtcagagatggagtaattggcaaggagatggggaactttggacctagccctgcaactcaagatgtgtgggatccgtgagggacagggcaacagagagggggcagggtcataggagagggtcccagggctcaggcgcaggaggagtcgcagggcgtggggtgggaagcagctgcccagtggggatggggagcagggagcgctgccttgagcgctggaaattggcgcggc

SEQ ID NO: 23138 - DNA, 1278 bp, Artificial sequence
  DNA replication origin
cttgtcgcccacctccatggctgagggtgggagcaggatgttgtccgaggaggggtcccccttgctccagagctggcttaattaagctaattgggcgcggtgacatttgcggaggggagaggctagcgctgctgtcggcgcgggggcggggcggaggtgcgcggcagctggggggttcagcaggctccttcaggcccattcggggagcggggagagctgcaccaggagggctttacccccgaggcagcgggcccacgcacctgcagggagttgaggtggcctcctgctgctgggggcaacaaactccacttcggggagtggctctttggggatgacactgctgggattgggggaggatcaggctgtcagccccccagccgcattgcagggtgcacctcccctgggcctccaggctggcccgttgcttttcccctaccacctgggtcaggcagggtgctcccaggatctggccggaggaagggacagtccaggcctgggctggggaaggggagaaaagagcatcctgagcccctgcacctagaaagaggcaggggtgctgcaataggggccggtggagtctggctgggaacgagggatagagatgtgggtgaggagagaggtggggtggacaggacagcctggggtgaggactgagacagagagggagggggactgggattggggactggcaggcacagatatagagtacagggatgaggatacaatgaggataggcctggggacagggatgagaagcagaatagaaatggtggccaggcgtggggcagagacagagatgtggatggggtaaggaccagagaaatgaagatgggctacagaacagtccaggaagcagcatggggacaggaatggtggatgagggataagcacaggggacaggcagggatggggtcagggtggggcaaaacagagatgggggatggggatggttactgggcagaaacagtgatggatgcagagacccaggagatggggatggaagactcaaagggagactggaatgggaaatgggggacaagggaagacacaggagacggggacagagacaggggctgaggacaggtatgggagaggagccagagggcaaggcaaagaccaggcaggatcaggctgtgggagggggccaggcaggttgaagcgaagacacctctttccagaccctaccactgcatgagggggcggggaccgctggtggggtggggtaggctctgcccttgggctggacgccccctccctctacccctgcctgcctgactt

SEQ ID NO: 23139 - DNA, 1000 bp, Artificial sequence
  DNA replication origin
aaaagaaaagaaaagaaaaaaggaaaggaaaagaaaaagaaaaagaaagaggctccaggacctcagagaccagagcccccacctgggcctcagccccaactggcctgcaaggagtgagtgctgggaaccagttgagcagaggaggaaagcctgggtatccctcccagtcgccagtgctccactctggtggaggccgcctggccgttcttttcctgggctccaagggggctaaggagccccctcctgctcccacccgttctatgtgtctcaggtggccaccgatcttggagacagcatgggctcgaggacaagatggatcgagaggcaggagcggccgggccaggcccgggccatcaattatctggggtaggggtgagtgggggtggccaggagtgaaggagacaggaagcaagaggaagaaatatggagatgccgctccagcgaggggagcaggcaagagaggagctgcatgtcagagtgtgtcagtcagcctgagctagccaccaccgccgcgtgctgtggccctgactgtgcacaggtcccatggggggaggcagtaccatgtgtgtcagcctggggttctggtgtctctgttagccccaaatggttgtgtgtgtgtggccggtacatgtgtgtgtggctgtggtggctgtgtgggtgtgtatctggatgcccatggttatgagtctgaggagcctgtgtgtgtgtggctgcttgtcgtggctgcatgtctgttgtgtaaatcggtgactgtgtgtatgtgcctggattggctgggtgtgtgtgtcaatttgtggagtggtgtctgtgtgactggtgtggttacgtgtctgggttggctatatggctgtgtatagcggtctgagggtagctatatgtggttgtctggaggtgtcacctttcctgtgtgagcccctgtcatcctctgcccaagtgtcaagctctttctaaagggggtgtatccgtagtcatagaacaagtgtggtcttgctgtgttccg

SEQ ID NO: 23140 - DNA, 1134 bp, Artificial sequence
  DNA replication origin
gcgtagactgcagagggtgggggacaggcccgggcagccagactcctccgaactcgacacgcttggagggcggcacgatgctgacactgaggttgcccaggctggacgagttgtggcggaaatacacactgaaggtaccgttcacatggtccacgatcttgccggtcaccagcagcgaaaacttgagggtatgcacccgaaagtagaagtccccccagccgaagatctttttggcgcgcgccgccttgatggacggcttcctcttggtgcgctgcgcgggcaacgccccggctgcccctgcccgggccagcgcccccgtgtggttggtcggccaggcccagctccaggcgcggcccacgcctaggccgtccgaagaccttggctctgggagctgctggccgggggcacccgctccggccgcggcggggcgcagccccaggtactgcggccttccggactctggtatctgggcactgacggcctgtgcacgaagaaagaggagagagagacgctggggttgtcccccgccatcctgccagagccctatcgacgccagtccctttccacagccgctaggagaccaaatggaatcacgcagtcccgcagcgggcagggagcgtgccttggaggagaactgcagccctttcaagctatgtagtcttggcccagtcacttcatggatctgggcctcagtttgtacatctgtgaaatgacgtcaagaatcctgatgtggcccacagagctccaatgagggccaaaaacccaaagccagtgtgaaggtgagtagggagtggagctctggatcctggctcatctttcctggcccggcacctggttggttccagtaatgagccagggagggactggactctgagcaaactgagccagggaggctgtgaccacattaacatccagcatcaagaaagaggctcccgcccggcacacgcggtgactcacgcctgtaatcccagcactttggggggctgaggtgggcagattgcctgaggtcaggagttcagttcgagaccagcctggccaacatggagaaacctaatctctactaaaattaggcgggcgttctggggtgcgcctgtagtcccagctattggggaggctgaggtggaagaatcactt

SEQ ID NO: 23141 - DNA, 717 bp, Artificial sequence
  DNA replication origin
tctgtgggccacatcaggattcttgacgtcatttcacagatgtacaaactgaggcccagatccatgaagtgactgggccaagactacatagcttgaaagggctgcagttctcctccaaggcacgctccctgcccgctgcgggactgcgtgattccatttggtctcctagcggctgtggaaagggactggcgtcgatagggctctggcaggatggcgggggacaaccccagcgtctctctctcctctttcttcgtgcacaggccgtcagtgcccagataccagagtccggaaggccgcagtacctggggctgcgccccgccgcggccggagcgggtgcccccggccagcagctcccagagccaaggtcttcggacggcctaggcgtgggccgcgcctggagctgggcctggccgaccaaccacacgggggcgctggcccgggcaggggcagccggggcgttgcccgcgcagcgcaccaagaggaagccgtccatcaaggcggcgcgcgccaaaaagatcttcggctggggggacttctactttcgggtgcataccctcaagttttcgctgctggtgaccggcaagatcgtggaccatgtgaacggtaccttcagtgtgtatttccgccacaactcgtccagcctgggcaacctcagtgtcagcatcgtgccgccctccaagcgtgtcgagttcggaggagtctggctgcccgggcctg

SEQ ID NO: 23142 - DNA, 1298 bp, Artificial sequence
  DNA replication origin
cactgtccctgtccatcccattcaaggtcttacacctccttccccaaatcgtccgctggtgatccccactcaggtctcatttccatcccacttgctgcagcttcccttcgcccacctcagggaggagaatcccaacctcaggcggggctcctaccccgagggtaaccctcagctctctttgatctggtctttggtgacttccaaggtgctagctctgtcagtctttgtcttggtttccccaagagccgctgagggagaaggccttggccaggtctctaccacatagaagccccacgccacctccccattccctacaaaggtctcacacaggcgtgtattggatttcactttattttgttccctttcccgtctgttttggcgtagaaaaaatatcaccgagaggaagcagcaggagagggcaggtggagctcgactgcctggactggaggggggcgggcaggggcaggggccgggggcagggccagggcctcagcccaggggttctgcttccggtaccctaatagggtttggaggaaaaggggacaggcatatggcaggcagaatggtgggaggacaggccgaggtttttaggcctttacagtcttaggcggggtagggtgaagcaggacaagcgctgggggatgggaaagtcagggtggggtgagggtgccaggccaggagttattaaagctgcggggaaagggagtgcgcagcctagcgccaagggtgaaaaggggacccactgtggacccaggggacattgggaccgcctccaagccccgcctattctggggctgcactcttatccctttcactttggggtgtactggagggggctaccccagccttgcgggcactccgcataaggaaaagggcacccacgctagctgagggtcccgagaagccattcccctccgcccccagagtggaaggagtgggcgacatggccacaggagcggcagaacactgggaagggggtcccacctagtgaggctgggatttggcgggaggctcaggactggctggggaggggcgctatccgaagtaggggtgctcactctggaagttatagtctgggcacaccttctgcaccagtttgtagtcaaagctgaggaaagagacgaagatacagatgactttgaagggcttggcacagagccaggcggcctggctctgcgtgtgctcggtgaagcacacctgcgacgggtcgtacaggcacggtcggtgcttgcgcgcgcggtttgtcttctcatactccacgtggcaattgaaagcgcgtgactctttggccccaggca

SEQ ID NO: 23143 - DNA, 1036 bp, Artificial sequence
  DNA replication origin
cagtacaccccaaagtgaaagggataagagtgcagccccagaataggcggggcttggaggcggtcccaatgtcccctgggtccacagtgggtccccttttcacccttggcgctaggctgcgcactccctttccccgcagctttaataactcctggcctggcaccctcaccccaccctgactttcccatcccccagcgcttgtcctgcttcaccctaccccgcctaagactgtaaaggcctaaaaacctcggcctgtcctcccaccattctgcctgccatatgcctgtccccttttcctccaaaccctattagggtaccggaagcagaacccctgggctgaggccctggccctgcccccggcccctgcccctgcccgcccccctccagtccaggcagtcgagctccacctgccctctcctgctgcttcctctcggtgatattttttctacgccaaaacagacgggaaagggaacaaaataaagtgaaatccaatacacgcctgtgtgagacctttgtagggaatggggaggtggcgtggggcttctatgtggtagagacctggccaaggccttctccctcagcggctcttggggaaaccaagacaaagactgacagagctagcaccttggaagtcaccaaagaccagatcaaagagagctgagggttaccctcggggtaggagccccgcctgaggttgggattctcctccctgaggtgggcgaagggaagctgcagcaagtgggatggaaatgagacctgagtggggatcaccagcggacgatttggggaaggaggtgtaagaccttgaatgggatggacagggacagtgtaggcagagcgctgacaacctgctaagctccacggggccggcgggaggtggcaggttgggagggagggggaacggtgttcgcggcatctggagtcatcgatcttccttttccttcctaatttcgtgggcgctgagtttgcagacggaggaggtggggagggagctttgggatgagggggtgggggaagggaccagcgcgggtttgga

SEQ ID NO: 23144 - DNA, 970 bp, Artificial sequence
  DNA replication origin
ttctgattttcccctccccccttttctccctttccgggtttggttccccccttttcttcccctctcccccctccttcccaagcccctttcccctcccccgtcccagtcccccctgcttcccagccctcggccccggggaagccccggccgagaaaagcccgcccccagaagcgcgccgccgccggccgtcggggccgagccgcagccgagcggccgtgggcccgggcggcgggcggagacgtgggcgccctccccgccaaggcccgtgcgaggtgaggccacctcccggccgagggggcgggcggcccggacggcctgtggggagggggcgtggcggccgcacgggcgggcgcgaggaggccccgcggcctgggttcctcgcgcccggcagccggtcccggggacgatgggtcagggtcggatggccgcgggaaggactgctccaagtgtgcgctgctggagagaagctgggggcgcggggcggagggcggcggtgcgggggcaggggggtggcgccacctgtggcctttgcggggtgacctaaaaactattgcgcccttccagtgcttcggggtggctagctccgtgtgtttcttgggtggcggttttccttcgagcgtggagcatggaaaaataggacggagaggtgtagaagtgtttaaaatcatgctggtgtccaggtttcttacagggacggggatttgagttggcacatacagggagatgtttctatagcttaaaacttgggcctacactaagctcataactactcgagcccctgaaaacgcttcgattcgttttcccgtagagctaacatttttcaacatttgtggccattaagtctcggaactaccaggaatactgacttagagtgaattgtcattggataatgatgagaaatgaccgaataacaatcccagaactgcgttaaaacggaagaaagaaaagtggaaaagtttgaattcagatc

SEQ ID NO: 23145 - DNA, 938 bp, Artificial sequence
  DNA replication origin
agggggaggatcctgggggtcctgggggtgcaataagcccggcaccccttctcttgcttccagctaccccgcctcatcctccagaacggcaagagggagggaaatagaagggaggtgaggggcgagcgggaagagcggcggcgcgccagcggctggagagagaaaaagtttttgcaaaagggaaaaaaaaagtttgcgcttctcgcgggtggtccgggcttgcggcccggcgggctgggccggcgggagggctgggggccaggttgggggggtgggggtggcatcgaggctgcgctgccgtggccctctccgccccccctccccaccgcacaccccccagcccagactccagccctggaccgcgcatcccgagcccagcgcccagacagaggtgagaagggggggcaggcgggggaccacctgggagcagtgggggagggggcctgaggggatgctcagcttcttagggactcatcccagacccgggacatagaggcaaaataggggtgggagagcctggggtgagacattagaaactccagatttttcacttgtgtctttctctgtatcttctttttcttccctttttttcttctgtcagtctgtgtatctctgtctcagggaaccgtgggtctttgtctccgcctctcccatatattagaaatatcttactttcatgcggttaagtttaagaggctggagggatggctagctggaggtctgcgttgtagagaggtaaccccaggtgtgtgtctgcgcgtggggtaggaagatgtcagtgtttctgaaaggtggggactgcaaaggagggagctccaggtggggtggggacgggtgtgtgggaggcaacagagccactaggggccagccaggcttgaacctttgacctgtcttgtgacagatgtgccagtggatgcttgtgctttaggggaaaggag

SEQ ID NO: 23146 - DNA, 1314 bp, Artificial sequence
  DNA replication origin
aggcactagagttgaggaattctgtttccccaggtagggatctcagtaagacactcatgttgcccacagccatgttggggggcccagagggaggtggggtatgtccagagctgccccgctgatcatgggaaggaggaggactcagcccctggggctcatccagaatagccacaaagtccagctgagtgttgtcaagatcaagagagtccagggggttacatacctgtccttcgggaggagggtacaaggcaggaccccctcctagcctgcccacctcaggatgaccacagctggggtttgtgcctcccactttgagaggcccatagcaagtgggcaatgggggcagaagtcgaggtggtgctgctgccctatgtgaagccctatttgcccccactacaaaattttcatggcatggtgaaggggtgggataggaacctgacttgtgattgggcaagttgggtccaaagccaggtccatatgtgttcactggagctttagcacggcttgggctaacctgggaaccccccagaaacttgggactctggtaggaaggttcctgggcgggggcatcttccctgcccccaccctcccacagtagctcctgttgagattgaacataattacacacaagctgagccttgagctgccctgtggaatgggtgggggaatcaaagtccaggcaaggcctgggttctgaaggaagataatcagggggtggctgggtataggggcctgactggagatattggggaggagagggctgggggtaatgggaaaagagaggctgtggatgtgggggcccctcactggggtgggcattgaggcagggtgccagtcctgtggagtcagaccccactgggcacccctgttctggcttgacttgcacttgtccataatgttcaagtcgaggacactggctgtaggttccacctagagccttggggcctgggtacagcccagagtgggaagggaactcaccccatgtttcttgggtggggtcaggatatgaggcctgctggggacaggggttggggccatagttggtgggtggaccaggcccaagaggcagagagcctggacccctcgctccataaggctcagctgctgccccttcaggtcccccatatcccagagtatcagtaggtgggaagtccatataggggttcagaccactgcccaccatggaggtcccaacttctggctcttcctgtagccctctagcatccatggcagcattctcagtgatgctggggggctgtggtgagtagacagaggttgggaggtaaggatcaaagttctgtcctccccctgcca

SEQ ID NO: 23147 - DNA, 1427 bp, Artificial sequence
  DNA replication origin
tcacaaaaaagcaactggagtaggcacctgagttgaacattattttccatctctaaagtcagaatgggaaagaagagtataagggaacctctattctattatttaccacccgtgtcccccacatcaagggttctttccaaagctccaacccttaccaagggcagcacggaaatggggcagcagcagtggtggcaccagaggctggggcagctcccggagaaaaagcttcagggctccggtgaccacatgaatgtcatcccactcagtactgtccaaatctaaccgaccttctggagggagaaggaggtataggggctcatgaagggccagaaagatttagagactgagagattagaagttctggagaaatccagtcaaagcagactataggaatgcctagagggtctgcagtggggcaaggtagctaaggtggggatgaggacaaccctcccaggaatagtacatgggggtttccacgggaagcaaagaggatatgtggaagttttagggatctgaagggtcttccatgtaagtaccttgtcctggctgttctgggaacacatacctcccatcggaggtgaccgcacgctctgcaacatgaatgaggagagatcaggagctaagacatacacttccagcctgacggcctctctattctgccagcttcctcatgtaggaccgcccatggttctcaggcaagacattcttagtacaaccactggcccacaagccttctcacctctgtccaccagaaagcgaagcttctggaccactgccaagttcccgctcacccgataaatgccatccacatctagacctgggagatgaggaaggagtagataaggactgctgcttgaaagtgtgtgtggtgagggatataagggtggagagaaaaagggcagtaggaagactaggtagaatgggggaggcagaaaattctaggccttagcctgttggaagaggattctggggtctctgagaaaatgacctcttttatccacagcagcaatgcagagccgcaaaaagctgggcaccgtgtctccttcccgctggcagagtgattccaactggcagccgaacacctggtctggggaagtagagtgaggcgggaagccagtgccagcgtcactcacaggagctcttctcagcataggtctttatccttaagtgaggctggtcctcctggctgcctgtgccaggcctgggcaaggaaatacactccacctcccttcccctgcttcaaacaatctggcaaaggggtacaggtcaccccagcttctcccctaaacaatctggggtagtgggaaagcagcagtcacagaaggttgtggtctagttctgggaagctctactctgagcctcgctggagttttcttatccatgaacctggcccagccccctcacctcggagcagaccccgctcctgc

SEQ ID NO: 23148 - DNA, 1151 bp, Artificial sequence
  DNA replication origin
acccagcctgaggagggcgctgtcggcggtggctctcggtagaacaccaggctgttacccgttaacaccacccaagacgggccccagttcttcctgcggggacagagaggggaggtagtggtagcgaacaggtcattctagaatgacacgaggagggtgctcttccaacaccctgctctaccctatggagttgacagcccaggccctagctgtattctgggttctcacctgagcttgcgccccccttgggcaatcttggtcatgttgagcagacccgacttttccacctcctgggaagtggagggaatgggatctgtaagtcaccctcgccctccatagtggccacggctttccctagggggtctcccaggagtgaagtcccttaaagttgctgggggagggctgggtaggaggatattcagaaagaggaagatgtttatgtggagcaggaaaaggggggagggggggcagggaggatcttggccttcacaaagaaatgggagattcacatgggggtcgtccaggagctgcggcagaggtcgaggggcctgcaaggctggagggtcaagctgcgaggtgcgttggctgaggctgagtgaaccctaggggagaggattggagaaacaggtggggaaacgctcgactcagggatccctggctgaaggaggaagaggggtgggatacgggtgagaggtggggggtgtggtggggaatggagaatgtcttacacaaaacagaaagtcataacaagctggctttttctgcatgtgactgggagatgggagggatctcacctgtgggtcaagcggttctggggtccctgtgtcagatctgaagccctttgcctgaggttgcaggacatcattgttcctcttcagggtctgtgtcccctccatggagccagggttctgggttaggggaggaggaaataaagctacatccagatgccacctctacccactctccacacccttcttatacttggctgattcttctgatcttctgagagccccggagagaaaacacactaccttgaggttcatcaggggaaggaagagcttgaggggacagtggagaagcaggaggtaaggtctcaccgtctcgctgcgactgcggcgcgggggcttccaggacttgcagccagtcagtga

SEQ ID NO: 23149 - DNA, 946 bp, Artificial sequence
  DNA replication origin
cctacccagtttgcctctcggctgcctctttctcctccttgctcagagtcaactgaatgccgtgacctcacagatgtctccccgcaccacctcagccactctccaccacattaacttgcctttagacttatcagtagtaccaagcgttatcttatttatttgtttttgtgtttgtcatccccaggggagtcccctgaagacagaggtgctgtctgtcctgtgcctagaacagggcccagctcagaagagctgtgactcactgtgctggcactggcttctgacggcaagtcttcctgggagagggatcttccgcttggtccttcctggaaaggcttcagaaggctggggctcagattgtcagtgctgacgctcctacacattttgcggggaagtggaggaggctgctccgagctagcctgagccctgcttgggagggcctgagacaactcctccagggaaccatgaaacaacttcggccctggaaacagaaaaggggagggtgggtggcaggtgatcagaggtgttgttgtaactgggtccctcatcttgggaactcacagggaagacaagaagggcagagggaggatgtggaaaatggcatgagacctagaagccttaggactaggaggacaggcagtgggatgaggatgccatggcgggggcaagaggtaggctgatcaaagaaaaacaagagaagatggttagcagaagcttgagggagggggacctccccaaaattcccagaagccagggaggtaggaaggtgatgggaggtaggaaggtgaagggagagggcttagcgcttactcaccaggagtccagagcaattggccggggatgacggtagttggactctgggaagggatggattcctctatcatataggctgctgggacgaagatgggtcgagaggtggagggagcttctaggcgtcttgccaaccacc

SEQ ID NO: 23150 - DNA, 957 bp, Artificial sequence
  DNA replication origin
agcttgagggagggggacctccccaaaattcccagaagccagggaggtaggaaggtgatgggaggtaggaaggtgaagggagagggcttagcgcttactcaccaggagtccagagcaattggccggggatgacggtagttggactctgggaagggatggattcctctatcatataggctgctgggacgaagatgggtcgagaggtggagggagcttctaggcgtcttgccaaccaccagtcggagttggtctttcgaagcagtaggaacctatccccttcagccagagacacctgctggccatctgccccagtataagtaaaggcatagagggcacagagctgggatccccgaggagggcttcgggggcccagccctaggatcccccaggaacttggccaccaccggctggatagcattgtagccagcactgtcacctgtgagaaaaagggacactggagacccagaagggaataggcctggctgtctccaggtagacagacatggttctaggagcagtgttgcagggaggtgaggacgggagcccttgagttgggggagagggtagagcaaacagcctggtgaggatcggtgacaggttttgggggctgagaactcctggtggtgtctggtgaggaagtatgtaagtaacatgagagaggatgtggtcagcagggctgcatggccagcaaggcaggaaattagaggagatgacctaggccagtagttttcctccaagtaccttgtggggcccatcagaagattcaggagcaggagttggtcctgggtagtggtgggagtcttgaggtggacacaggaaggagataagaagaaagaatcaggttcaagacagaaacagggagacacaaggttaatgacaaagacaaaaatgtgtgttattctttattaaatttatgcaagcatcaatgtttccgttaccagtcacctcagaccatag

SEQ ID NO: 23151 - DNA, 842 bp, Artificial sequence
  DNA replication origin
cctcttccccgccgtcaacctgtctaggaagtgagaagcgtctctgcctggccgcccatggtctgagatgtggggagcgcctctgccccgccgccccgtctgagatgtgaggagcgcctctgcccggccgcgaccccgtctgggatctgaggagtgtctctgcccgaccgccaccccatccgggaggtgaggagcgtgtccgcccggcagccgccccatccaggaggtggggggcagcccccgccccgccagccgccccgtccgggaggaaggtggggggcagcgcccgcctggccagccgccccatccgggaggtggggggcagcccccgcccggcagccaccccatccgggaggtggggggcgcctccgcctggccgccacccagcccgggaggtgggggggcacctctgcccggccgccctgtctgggaagtgaggagcccctctgcccggccgccaccccatctgggaggtgtacccagcagctcactgagaacgggccatgatgacaatggtggatttgtagaatagaaaagggggaaatgtggggaaaagaaagagagatcagattgttactgtgtctgtgtggaaagaagtagacataggagactccattttgttctgtactaagaaaaattcttctgccttgggatgctgttgatctatgaccttacccccaaccctgcgctctctgaaacatgtgctgtgtccactcagggttaaatggattaagggcggtgcaagatgtgctttgttaagcagatgcttgaaggcagcatgctcgttaagagtcatcaccactccctaatctcaagtacccagggacacaaacactgcggaa

SEQ ID NO: 23152 - DNA, 1668 bp, Artificial sequence
  DNA replication origin
ttccacacagacacagtaacaatctgatctctctttcttttccccacatttcccccttttctattctacaaatccaccattgtcatcatggcccgttctcagtgagctgctgggtacacctcccagatggggtggcggccgggcagaggggctcctcacttcccagacagggcggccgggcagaggtgcccccccacctcccgggctgggtggcggccaggcggaggcgccccccacctcccggatggggtggctgccgggcgggggctgccccccacctcccggatggggcggctggccaggcgggcgctgccccccaccttcctcccggacggggcggctggcggggcgggggctgccccccacctcctggatggggcggctgccgggcggacacgctcctcacctcccggatggggtggcggtcgggcagagacactcctcagatcccagacggggtcgcggccgggcagaggcgctcctcacatctcagacggggcggcggggcagaggcgctccccacatctcagaccatgggcggccaggcagagacgcttctcacttcctagacaggttgacggcggggaagaggcgctcctcacttcccagactgggcggccaggcagaggggctcctcacatcccagacgatgggcagccaggctgagacgctcctcacttcccagacggggtggcggccgggcagaggctgcaatcttggcactttgggaggccaaggcaggcagctgggaggtggaggttgtagcgagccgagatcacgccactgcactccagcctgggcaacattgagcactgagtgagcgagactccgtctgcaatcccagcacctcaggaggcccaggcgggcagatcactcgcggtcaggagctggagaccagcccggccaacacggcgaaaccccgtctccaccaaaaaatacaaaaaccagtcaggtgtggcggcgcgcgcctgcaatcccaggcactgggcaggctgaggcaggagaatcaggcagggaggttgcagtgagccgagatggcggcagtacagtccggcctcggctcggcatcagagggagaccgtggaaagtgggagaccgtggaaagtcggagacagggagagggagcaattttttgtatttttagtagagacggggtttcactatgttggctaggctggtcttgaactgacctcatgatccacttgtctcggcctcccaaagtgctgggattacaggcatgagccactgcacccggcaatataagcactttcttttttttttttttgaaactgagtctcactaggatggagtgagtggcgcaatctaggctcacggcaacctctgcctcctgggttcaagtgattctcctgtctcagccccccgagtagctgggattacaagcacgcaccaccaggcccggctaatttttgtacttttttagtagagacggggttttaccatgttggccaggctggtcttgagctccgacctcgtgatccgcctgcctgagcctcccaaagtgctgggattacaggcgtgagccactgcatccggccaatactaagcactttcaaggctcatatagaataggaagtactgccgtggctcatgcctgaaatcccagcactttgggaggttgaggcgggaggatcacttgagcccaggagt

SEQ ID NO: 23153 - DNA, 923 bp, Artificial sequence
  DNA replication origin
ccctccgcccggcagctaccccgtctgggaagtgaggagcgtctccgcccggcagccaccccgtccgggagggaggtgggggtcagcctccgcccggccagccgccccgtccgggagggaggtggggggtcagcccccgcccggccagccgccccgtccgggagggaggtggggggccagacccccgcccggccagccgtcccgtccgggagggaggtggggggccagacccccgcccggccagccgccccgtccgggagggaggtggggggccagacccccgcccggccagccgccccgtccgggaggtgaggggcgcctctgcccggccgcccctactgggaagtgaggagcccctctgcccggccagccgccccatgcaggagggaggtggggggggggtcagccccccgcccggccagccgccccgtccgggaggtgaggggcgcctctgcccggccacccctactgggaagtgaggagcccctctgcctggccaccaccccgtctgggaggtgtacccaacagctcattgagaacgggccatgatgacaatggcggttttgtggaatagaaaggggggaaaggtggggaaaagattgagaaatcggatggttgccgtgtctgtgtagaaagaggtagacatgggagacttttcattttgttctgtactaagaaaaattcttctgccttgggatgctgttgatctataaccttacccccaaccctgtgctctctgaaacatgtgctgtgtccactcagggttaaatggattaagggcggtgcaagatgtgctttgttaaacagatgcttgaaggcagcatgctcgttaagagtcatcaccactccctaatctcaagtacccagggacacaaacactgcggaaggccgcagggtcctctgcctaggaaaaccagagacct

SEQ ID NO: 23154 - DNA, 1331 bp, Artificial sequence
  DNA replication origin
tgaccccccccccacctccctcctgcatggggcggctggccgggcagaggggctcctcacttcccagtaggggcggccgggcagaggcgcccctcacctcccggacggggcggctggccgggcgggggtctggccccccacctccctcccggacggggcggctggccgggcgggggtctggccccccacctccctcccggacgggacggctggccgggcgggggtctggccccccacctccctcccggacggggcggctggccgggcgggggctgaccccccacctccctcccggacggggcggctggccgggcggaggctgacccccacctccctcccggacggggtggctgccgggcggagacgctcctcacttcccagacggggtagctgccgggcggaggggctcctcacttctcagacggggcggctgccgggcggaggggctcctcacttctcagatggggcggctgccgggcggagggtctcctcacttctcagacgcggcggccgggcagaggcgctccttacatcccagaaagggcggcggggcagaggcgctccccacatctcagacgatgggcagccgggcagagacactcctcacttcctagatgggatggcagctgggaagaggcgctcctcacttcctagatgggatggcggccgggcagagacactcctcactttccagactgggcagccaggcagaggggctcctcacatcccagacgatgggtggccaggcagagatgctcctcacttcccagactgggtggcggcacggcagaggctgcaatctcggcactttgggaggccaaggcaggcagctgggaggtggaggttgtagcgagccgagatcacaccactgcactccagcctgggcaccattgagcactgagtgaacgagactccgtctgcaatcccggcacctcgggaggccgaggctggcggatcactggcggttaggagctggagaccagcccggccaacacagcgaaaccccgtctctaccaaaaaaatacgaaaaccagtcaggcgtggcggcacgcgcccgcaatcgcaggcactcggcaggctgaggcaggagaatcaggcagggaggttgcagtgagcagagatggcggcagtacagtccagcttcggctcggcatcagagggagaccgtggaaagagagggagagggagaccgtggggagaggtagaggtagaggtagaggtagagggtagagggtagagggagagcatttttgtatttctaatagagatggggtttcactatgttggccaggctggtctcaaacttctgacctcaaatgattcacccgcct

SEQ ID NO: 23155 - DNA, 1138 bp, Artificial sequence
  DNA replication origin
ccgttttacccccactataagggactcccatatttcttggcccctcccagctaatgggcacataggccttttgaacttttctttttaaagttggtatccatccactgggattgtcgacatctcgagtcttcttaaagaggtctcctggccgggctcagtggcttacgcctgtaatcccagcactttgggaggctgaggagagcggatcacttgaggtcaggagttcgagatcagcctgaccaacatggtgaaaccccgtctctactaaaaatacaaaaattagccgggtgtggtgatgcgcgcctgtaatcccagctactctggaggcagaggcagaagaatcgcttgaaccctggaggcggatgttgcagtgaccgagatcgcgccactgcactccagcctgggtgacagagcgagactacgtttcaccaaaaacaaaaaacaaaacaaacaaacaaaaaaacgggggtggtctcctgttctagccccgtaaatctcccaaaaggggccgaggtactggaatcccttggtagtcattttccgcttctctcagaacagcgcccttgacttttaccttgtagttggtaagccctcagcctgccagaagtcatgtattttgcccagtggacccgattctgtttggccacctattttcccccacggtactcctatggctttctccaagaccctctcttgctgtaccagacagcaagtcctgtgactccctgtgtgaggagcgcggcacaggcctgcctcctaggtgttcgggtcgagatttacagcggagtctcatcccgggacgtgtgagtgcacttcagcgcaggactgccctggactggggagaccggagccgcgattttagactcaactccccatcacttgccaagggatcttaccgtccttgtttgtaaattaaagataaaagttgtgaaggtaaaatgagaaccatgaacttggaggcaacttgaccaaaagtaaaacgcaccacccagaatgcaaagtatttttcttgtgccttgaaaacagaggccatgtggtggcctgttacatatcctgtcataccctcatgggggcagccagagtttaagtagaaactgtcacaaggccggttgtgactggagtggtgtggcaatgacag

SEQ ID NO: 23156 - DNA, 1031 bp, Artificial sequence
  DNA replication origin
tgcagcccctccagttggctcgtcgctgtccgctgggcgggggcccggccccgcccctctcccgtccgggcagcggcggaggcggcggctcctgcggcggcggctgcggcagcgacggcggcggcggcagcggcagcagcctgcgcagtgccttctgggaacggaatccccagggctgcccctggcccccatggcgcatgcgcgggaggccgctcggtgatccgcggcggcggcagcggcgcttcctgctaggaccggccggggccgtaccggaggctcgggctccaccgaccctcctcccaccccctcccactcaccctctgggccgcgactgcgcagggcggggccggccgaaccatgggccgcggtgagtgcggggcccggccccccccaccctgcccctccccctcccgtccctaccctctgccccctccgcgtcctctcggcccctttccccggccccatccccactcccccgccctcacctgcccccgccgcttctccctctcactgccagacttctgccttcctcaccgccctcccctcagtgcttcgcccaccctccgcccgccctctccccaagttccttcctacttcgtgcgccttcccctcctcctcaagctgagggaagcagtctgggtgacagggcgccttgttgtgagagggaaagtttggaagccgccagtgtggggtgggagcaatggtgaggctggggaggatacctgcaggttggaggggcttccccttctatcggaggacaggctctcttggagataatcggaagccagtggaataggaggttctgaatccctttgccgtaggcttgagggaaaatcaggagcttcccaggatcctgggagaagactgagctgtgatcctcacctcttaagacccgaatgaactatatcagcgattgtctgatggagcaggcatggggggagttctgctggtaccaccccagcgggcagttgggcaattgcctggtgacctgtggggcaatctgtactttttatatcatcttcctgggtaga

SEQ ID NO: 23157 - DNA, 1683 bp, Artificial sequence
  DNA replication origin
actgtggttgagcaatggagaaggtggaggctgccccagactcagagggagaggcaaggccccaagcatcccagggaagccagctccactcagtgccaggccctgctcagggctggggaaagggaaagcctctccaccagccaggggaggcagagggcaggccgggcctgcccccatccccagtccttcggatgggctttgaagcacagggctggggactactggggctttggaggcagctggtggggcaggggcacctgtaaaagaggagagaaattcagctcaagggaggccctttctcccatcatccaaagaagccaacctccctgcccccaacccagaaaaccctcaaagagctctctgaacattcccctaaatgccttggctgcctctttccagccaggatgaggaagggctccacaatactcacatacctggcacactgctgaggctgccactggtggtcccaggcagggagggctggatggggtgcctgggctggggagggctccctgaggagagggttgggggaggaggaaggtgtgcatctgaccccaaaaggttaaagcttccatcagagtgggaagggccaggggtggggagtcccagcagggacagcacagaagggagaattggttgggatggctccgggagagaaaagggttgggggacaggagcaggggcccgaggacggctccgtctaggggtttgagggcctctcccttctagcaatcgaaatacagtagggggtctgcggggacgacgctgagagggacgaagtgatgaggagtgggaagctgagggtgcctgggcacggggccttcggccctgtaaagtgctgggagggggtagtgggggatgctgtgccttggccgctgcagagagtaggctgctagcaaggaaggggggtgccccaggcccctccaccgtgggggcccctcccaggggccccaggaccaggggcaggtgcatagtggctgaagacactggtggctgagaggcaggaccagggtgggcggggagattattgctcgggggcaggggagggggtgttaaggcatcactacagtggaagagaggagggtctgaaggtggtgaggaggaggcatgaggggccggaggagagcccaggtcagagggcaccaggctggatctgagggcagctccccagttgtatgagggagcattgaggctgatagcaggtggaggaggtggggctggagagggggcattgccccttgggaggaaacgggggctgctactgcccccagaagggactgggtcagcaagccttggggggaaaagccccccagggcctgctagagtgggaaaggcctgggaaactgagggtggttctgggggaagggagccaggacccccattaagtggagttgtaggaggaactcgacagggagggcgggcagaggggggccctggggacacagtgtggaacatttgggggctcgctccctctcctgcaataaatgaaaaatgaagggtcagcctgtggctccccttccaaaaactcttttgtcttctctagtcccatctcccacaagttcccaacctccctgtgccctcctttcaacatgcagctccccacccactcccctttctctttgctccctctcaaggaactcctcccaccaccagccttccaagcccttaggttttcctcggtct

SEQ ID NO: 23158 - DNA, 1140 bp, Artificial sequence
  DNA replication origin
gatactggatattcatatggaaaaagtatttctccatatttcaaagtctagttcttggtagcagtttattacaagtgcccaggcttcatgattcatttccatgggttagaacccaggggcctaagtcactagctccaaacctgttttgagatatttcaattttatttaaaaggcccaagaatcagggctttgcaaacagatgttgttagctgtaattccgctgacttgactctccctcctgccattgctcattggtggctgcaagcccagcaaggtctttgcaagccctgcaacctatataccacccaggctggggttggcatacccgcttattgctgtagctcccccgagaaagggaaggacctgtctaggggagaaaggtcagagtccggaggagtctgtggcagcacacattcttaccgcatcgaactccgcttgatcatcctcaggtaggtcgctagtttcataaacatctggctcattcctggcctgcaggtagaagcagtgaccacccaacctcactacccagcatccaacaacaccccttcccccactccatttgaataagctaacagagaaggcggggtgtgatgtcagggttctgtcctttctcctccacctgccccgtgagtcaacagtatgtcagttcccatgtctcaaggggtagggatgacagcggaaacaattgggacctgacagtaaacggtgagtgtaagtgatagcaacgatgttaccctaaatctagaggcgggcaggtccttggcaatcactattgccaaagaaggtgaaggctatcctccaattaggccccgtacaccaccaccctggcacaaggattgagagtgactcaggaccttagtactcaaggtcctgtgtcccaaccctcaccttgagaagcaggcagggcagcacaaaaggaaggtacacgccaggattgtcatgggagtgggggctgggggagggcataggttccctcaaggatagagctccccatctggcacaagagggttctgccagatggcagaacctcttccttggcaggatgaaggccatcgttaagtggtctggtgtgtgtgtctggggtagcgatggggtcttatggagagatttgggggggacatgggaggcgttgacacggat

SEQ ID NO: 23159 - DNA, 1098 bp, Artificial sequence
  DNA replication origin
agaacctcttccttggcaggatgaaggccatcgttaagtggtctggtgtgtgtgtctggggtagcgatggggtcttatggagagatttgggggggacatgggaggcgttgacacggatggtggaaaaactcaggcacaagaggtcagtacccggagtcgatttctgggccgagctaccggcgactgccggaaagggggcctggtgcgccgtccggcggcccggcccagtcgggtcagaagagttcggggggtgctgaggccgatcggagaacgagcggcgggagcccttgggcggaggatgggctgcaggcgggaggggtcgcgggctggtttctgctgggggtccttgggaggtcgggggcgcggtcctggggagccggggccggtcctgtactcacaatgccgggaaggtcggcgtatttagggtccgccatggcggcggcgagacgggctgggggacccgggcctcggtggagccggggccggtgttcgggtaggggagaggctgggttcgggtcccgggctaaggcggcggcaaagggagcggcagatgagcaggaagtctcgcgacagcagtagcacagcagaagggtaaagcaaaagtcgcgagaacagccctgctgccacacccctggagaggccgggattggggagaacgaggccagggaatgaggtaatggccaggggacgccgcctaggattgtgggatgtgtagttttggtgtactggagcttgggcggggagcgacaataacgaaccttggggagctatttcatacagccttttctctcacttttacagcaagtcagtgaaagaacatttataattcctgtttggggctcccaggaataaaatgactagattaaatgatacaggtagtcatactgtgacacagccggggtttcaaaaacaagaagtttgcttgatactgtgtattataaaaacaaaataaaaacaagaagtaaaatttagtaaacgcgtagtgtatgttaggaatgaaaaagttaggcaatcttctcaagtaagggctttcagataatttgaatttcagataataagtaggtgtgtgtgtgtggtgtgtggtgtgtgggtatacta

SEQ ID NO: 23160 - DNA, 850 bp, Artificial sequence
  DNA replication origin
tgccaagcactgtggataaagatacataagaagcacctctgaccttgactgccctcgtacatgcccctccctcctcaagctagtttttgtttcctggcccagcacccctcaagccctacaggactcgaccccagatcttttctccccacacacagcctgaggtccctaccaacctcagggggagtgggcaaggcctagaatttccctttgggccattacagataaaggtgcagaacagaaacctgggtaggcaatgtgatagaagagatgggaggtttgcagtcacagatttaggttcagatccatggatgaatagcatgaccttgagaaagttattcaagttctttgggcctcaatttctgcatctgtaaaatggaaatattgatactacttctgaatgttgttttgggggttaaataatatacgtagagtaacaggcccactgttaatattagttcccttaagatatcctccttgggtagggctgtcatgatgaggtagagctggatggctactttctattggatcctcaagagaaaggatgaataagcaggtactgactaggatctcagggtttgggcatttttctttaggggggtcagttggggaatctgaaaccctcttcctactgtacctgggaccaaaaggcagacctgaccttaggattccagaggctccccccaagattgggtgtggcatcaatgatttctttcccagtaaaccctgcatcagacctactccccacaacacacacacaaaaatccaggctataactactttagggaatgatggaaggtttggtcttagagcccacttccatccacactctgcagagaccctggactgctca

SEQ ID NO: 23161 - DNA, 1077 bp, Artificial sequence
  DNA replication origin
gctgcgggggtctagggctggttctcaccgagtgggctacgccccacaggaacacacccaccagcgggtcggccgcccggaacaccttcaccttctgctgcacgaaatgcttcttcttggtcttggaggcgaagccgaaacctgggccggggcctgctgtcgccgccgataccgtggctggtgggaccgaggaggacgccatagtctcccgcgcaaccgaccaagtggaagccggagccggcagctatccaggcgcccgaccccggaagcggcgctcacctgcgctgctgtcacgtgaccggaggccggacagcggacgcgcgaacagggcgaggcaggacggggcggggcgacgctggccccgccccccggcgcctgcctgcctgccccaatgtccgctcagtgtgtgggctcacctggcgtgcgggatccctgtaagctgacgaagcaagcggcccgcgaggcccctcgaactgtcaactaggagaccgtggtgcggcctgggctggcctgattgactcccaaggtctagggcttctttgctgcaaagtggccgccttccggctttgcccagtttctaatgagtaacctcggacctgatgctaatgcgaaagcattcttaccgaatgggggttgggaaggggagggttttggaaacccaaaattcttaccagtggtctcaagcgtcttgaaattcattcattcatttaacaagtatttattgtgcacttagttgtactaggtcctgttctaggggctgattttccttttattgaagcagggtataggacagtgactgccccgaagtagttgggagtctaatggcactggctggccaatggagatcaagtttgcagtatgcaaagtatgagctatcctagaactgtgtatgaagcaaagacaatgatacaaagaaaggaagtgtagctggtcagggaaggcttcaaagaggatagagactttactgagtttggaagggtgggtggagttcaggaatagaggttaaaaggctgtctagacaaagagaacagcatacaaagacatggagacaagaaagaacgaagccgggcgcggtga

SEQ ID NO: 23162 - DNA, 1230 bp, Artificial sequence
  DNA replication origin
aataaatacttgttaaatgaatgaatgaatttcaagacgcttgagaccactggtaagaattttgggtttccaaaaccctccccttcccaacccccattcggtaagaatgctttcgcattagcatcaggtccgaggttactcattagaaactgggcaaagccggaaggcggccactttgcagcaaagaagccctagaccttgggagtcaatcaggccagcccaggccgcaccacggtctcctagttgacagttcgaggggcctcgcgggccgcttgcttcgtcagcttacagggatcccgcacgccaggtgagcccacacactgagcggacattggggcaggcaggcaggcgccggggggcggggccagcgtcgccccgccccgtcctgcctcgccctgttcgcgcgtccgctgtccggcctccggtcacgtgacagcagcgcaggtgagcgccgcttccggggtcgggcgcctggatagctgccggctccggcttccacttggtcggttgcgcgggagactatggcgtcctcctcggtcccaccagccacggtatcggcggcgacagcaggccccggcccaggtttcggcttcgcctccaagaccaagaagaagcatttcgtgcagcagaaggtgaaggtgttccgggcggccgacccgctggtgggtgtgttcctgtggggcgtagcccactcggtgagaaccagccctagacccccgcagccctgtccaaacccctcggctccgaggcgtccctgtttccaggctccagcctccggagccccacgcagtgccactcccctcccccgggttgtcttggtccctgcccaccaaccccaggtgttcccccagcaggttttctgactgtggacttttttctccccaacagttctttactgctccactctagttccaccttccccccgtgaaatccagctccctgtgctttgactccttcctgccatgtctagcttcagcctcaggctacgcggactggccaggaccgggcgcaagcggggaggacattagggggagtggctttttctcgggtggttgttggtgagagtgtaggtggagggtgaggggccgaggggagtagatggatgaaaaggttctttcactttgctttccaccttgcttcccagccccggtccttggcttttgaatcttggttttgtctcggggaagctccaggtttcctgggctttctaatcctgcttgtcccttcctt

SEQ ID NO: 23163 - DNA, 1378 bp, Artificial sequence
  DNA replication origin
ctctcagggagcctgtgtttaagggtgcagagaccagctgaagaattctggtgttcaaggtgttgggcccctaactaaggatgtgggtttctagacagatggctgtgaacttttttaaaaaggctgtgaagggtgtgcacgggaatggaaaacttagtctttaaccttgtgggaggtcagcggtagtgagggccagggaagagtagggtgatgggacccttcctcttcccagagttctgggcttgctaacactccatctttgtaaaggtgagtaggcctctcagcccaccagctaaaagaaaaggaatctagtattcccccaggcttcctgggaaagctgtcctcttcctggagggaaggaagagtacagcagggtcctgggaaagtgaagaaagtgactagccctccagtctagaggggggagtgaaaaaggggtggatgaatagaggttgttgccagtttgggagattcctgcctgtcttggctgaggaagtcttttggctggtggaaaaacctggcttgatgtggccccagggaagtgagttggattgggcggagactgcttgatgtgggaagcagagcagagctttttttttttcttctttgagagtttttaactctatttgaaccatacacttgacaccaccaccacctcgagccactttttaaaaaatgtattcgcttcccattctgcaccagcctccatatccctgtttgtggaaagaaaaatcagaggcactgaccaatgatcatctgagagcaggttgtgggggtcataggaggtaacaatctagaaagaggcaggagatgagggaggggattgaaatagtttagtacccggatttgtttattttttagagccaatgcttttctttttactatgactcttcccatcccacattgttcctcaaaggcccttctaccataaggattcaaaaaattgccgccctccccccgaatccccatatacccaccaacacttcacccacccatccaccaccagctcctgggagctgctacgcagctggctgggaaagaaaagggagagtgctccgccgggagcggggagcgagtagggtggcgtctccagggatttaacctcctaccctcagttccatgacgccaccccctccctccaaagactgggacagcgcctccatttttgttttggggaggaagggcaggggcttgcggatagaagggggtcaaaggaacggtgattatcacctgtgaggggaaagggggtgctgtcctccctccttcccttttcctcagcctgcaccccctgcaatcccccacctttcggggtctccccctccttgttgctaaggcccggaccgtcatcccagcaacagcctcagtcatgtgaccggcaatg

SEQ ID NO: 23164 - DNA, 1101 bp, Artificial sequence
  DNA replication origin
accccctccctccaaagactgggacagcgcctccatttttgttttggggaggaagggcaggggcttgcggatagaagggggtcaaaggaacggtgattatcacctgtgaggggaaagggggtgctgtcctccctccttcccttttcctcagcctgcaccccctgcaatcccccacctttcggggtctccccctccttgttgctaaggcccggaccgtcatcccagcaacagcctcagtcatgtgaccggcaatggcggcgctgacgagaggtaggtgagcccggcgccccccacacccaccgcgcgccccccgggccccgctcgcacccctcacgcgccccccgctcccccggcgccccctcctccacctcccctccccgcgcgcggctccgggctccccgctccgtgcccggccgatcatctttctagcaccctccagccttggcctccattcgggggttctgagggctgcgatcgggccgacatgcacccccacccggcggtggggatccgggggctttggctactgagggatgtggggagttggttccgggtcgggtcttggaggaggccgtggggggagggcgggagctgcttcagtggatgcccccagggacccttgcccatccgggctgtgcctccctctggcctctgtctggagggagagactggttccttgtccggcctgggttgccacagaggaatcacagacccaccctaaactggggccccgcctcccttttctgtgccagcaggacttggacctaggacacctaggtcctgggtcccccgtgatggggagagaagtgttgcatcgcggatagactgtatgggctgagactctagggttccattttcacttatgaatctcgaggtgcatctggccttgggggacgatgatggaggcatgaagggacagctgctccttcttggatcagtcaataaatggaggtcacactaatggcccttctttctgtttgagctgcatttggaagtgttgtggagacagccccgtagcccaatgcgaccagactcagggaaaacatcaggcccctccagctgagcccttgtgtgagccccgcccctccctaaatgccagac

SEQ ID NO: 23165 - DNA, 608 bp, Artificial sequence
  DNA replication origin
cctgaaacttggagcagggtgggggttcagtatgaagcccccggaccgccccgcccctggccgcactgaccggatactgggggtcatggggggcatgctgcgcgcatgcgccctccctgggcaggagggggtaagaatgggggctcgcggtggggtcgggggtctttcggggccttcaggagggctgcacccacaactcaacttatccgaaaacgagttctgcggggcagtcgcaggaatacatgaattctattacgagggccatagccccgttctgggcgagccttttataacaatgtgggttttgacaggtaggagaaggggaagggggaggtcagggctgcctaggagggcaggttccttacagtggttctgtccccgcagcccccaaggagaagccctctagggttggtgggtaccgagccagagtctgaacgtacggagggagatcacagaagggatcgcgaacatgaggtcctcgccggggctctgcagcccggtaagaagctgggggtggggtggggcacagtttgctatcctgcgccaagtggcgaattcaaaaatattctattcttattagcataaagttcgcatctaatttgcatgag

SEQ ID NO: 23166 - DNA, 1051 bp, Artificial sequence
  DNA replication origin
cggccctcgcctcctccccggcccgggcctagagccacccctaaccagaggccggagacagctggagcggctgccgcatcccggcccagcctcccctaccatccctcccccttccactggacatctggaccctaggcccccgcaccgacagggttccggaaaccctccccgcccagcccggcggccgggccccgcgcctctctctctctagagcccccagccctcctcaagactagacttccgcctacccctggacacctcctcccggtcccctccctccccccctcccacagcctggaccggggtaggagggagggggggtgtgcgcccggcgccgtccccgccccgccccccgtgattccccctgcatggccggcccgggtggggggcgcgggggggcccgggcgccatgcggggggggcacaaagggggtcgctgtgcctgtccccgtgtgatccgaaaagtgctggcaaaatgcggctgctgcttcgcccgggggggacgtggtgagtgccaggtcgagagggtccagtgttgagtggggggcgggctgggggttcagggcatctgtttgccctggcccttgggatttagggttggagactgtatgtgttttccaggaaagtggtttcttaagtgatccctaaggtcccttctgcctccaaatttctgttagttcaagttaaggaaataggggaaggggcagggaactcatctctttccctttgtcaaatgggtttgagaaaaacccacccacaatccccttaggcctagaaccgattattttcctcaaaccttttgctaagaatctacttctgaagagggacaggagaatggaggaatgagaatgaggtggttctacaaggggctttataaggaatcacagctctctgtcgctgagcacaggccaacgataaccctgatggaccctcctcactggcctcctctattgggtctacgcatgtgttggggaggtgggctgcagaagtcttttctttttatagtgattactgcaattggtggaggaggggactgggagtggcagatggac

SEQ ID NO: 23167 - DNA, 1020 bp, Artificial sequence
  DNA replication origin
acctgtctaaggcttctcgcaggattgcgcagatgaggggaggtggggatggggatctgatggagctccacagtccttacctcaaacttggcctcagatccctctctcccaccctcgacggtaggaacccaccatctgctcccggattcccagctccctaagcctcctcccggaagccctctagagcttgtgctcccgacaggctgctgttagggcctctcaccctggggcacgtgcacgatgcccacggtcactccggccaccgcatctccgagcagccaggcccgccagcggtaatggggcagccagtgcagcgcgggcagccgagccagcagcaggcgccacgcccctgtcccggaacaagcgcgagcccgcagcctccacagcccgaagagccggggaaagccgcgctcttcaggtagctccggttcctgctcttcgcccctgaagagctgatggaaccgagcctcggtgagagcttccctgagcctggtcgccaaggggtacttaaggtcagaggtgtcccccgcgcctgggtaggtcctggtgccctgaatcccgctcattctgcccttggccacctccaactccgcccggtcttaaatactcctccgcccgctaagccctgagtcccgcctcccacgaagcagggtccaatccggccctgaggtcaccctcgcttgaggaccttctcgggtctggcgagagccgcggcttggagagggagagtctctatgttaggcgtttctgcagacatccttggccggatctgatcgctggctctggggtggctgtggaaatgtgtagatattagagagagagaatccgaaaggcaagcgcaccccgacactcaacacccgctatttacccttccttagacttttcacttaactcccggttcctttccccatcggcaccttgggcggagagagaggctggttcctcttgggtcactggtccttccctgagccactacattctcccagccagagcaaaaaagttcagcgcccatcctgaacc

SEQ ID NO: 23168 - DNA, 1158 bp, Artificial sequence
  DNA replication origin
ccgagaaggtcctcaagcgagggtgacctcagggccggattggaccctgcttcgtgggaggcgggactcagggcttagcgggcggaggagtatttaagaccgggcggagttggaggtggccaagggcagaatgagcgggattcagggcaccaggacctacccaggcgcgggggacacctctgaccttaagtaccccttggcgaccaggctcagggaagctctcaccgaggctcggttccatcagctcttcaggggcgaagagcaggaaccggagctacctgaagagcgcggctttccccggctcttcgggctgtggaggctgcgggctcgcgcttgttccgggacaggggcgtggcgcctgctgctggctcggctgcccgcgctgcactggctgccccattaccgctggcgggcctggctgctcggagatgcggtggccggagtgaccgtgggcatcgtgcacgtgccccagggtgagaggccctaacagcagcctgtcgggagcacaagctctagagggcttccgggaggaggcttagggagctgggaatccgggagcagatggtgggttcctaccgtcgagggtgggagagagggatctgaggccaagtttgaggtaaggactgtggagctccatcagatccccatccccacctcccctcatctgcgcaatcctgcgagaagccttagacaggttctggctcagagaaccggagagaggcacaacgcctggcccccaggacttggccacagcgtccctgaccttgtctgctccatgacctctcactgaggcccattaacccctcagttccctgatgaggcttgatttagcatccttgatgtcagctcctaagagtctgggaagtgcatttaagtcctggaggttggacaaggccccctccccacagcacacctttccatccacttctatcccaggcatggcttttgctctcctggcctccgtgcccccggtgtttggactctacacttctttcttccccgtcctcatctacagcttgctaggtactgggagacacctgtccacaggtgagtgaccagggacttccaatgactcttcttccctatgggatgaaaatggacaggggctgttatttcccttcttcctaatttccctcttcacctctcctaccttcacct

SEQ ID NO: 23169 - DNA, 1385 bp, Artificial sequence
  DNA replication origin
tgtttttattttgaaccacacctggggcaccataaactttttcagcgcttagagcctacaaaggtcttactggaacattgttatcttccatctctcctatctataattccatcccctcagtcaccctttctcacagatccccagtcttctctatataggtgccacctgggattctagccatcttccacctgtttctccaccaccgccaccttgcctggatggcccatcctttctcctcatccaaggatgccctcttacctgtgttttcccaccagcatccaccagtagattggtggtggccagcgtagccgagttgggaaagcaagagaagagggaggagatgaggttggaggcaccatgtgccaggaactcctggagggatacagtgagatgaagtgggagagacaaaggcatggtgggaagtcaaatgagagggttggggtccacagtcagagtcccacctggttggagtcaatagtgtagctatacttgtctgcatggatggaggccagggaggcagacaccgcaaaactaaccagtgcaatgggcagcgagtcagccagaatcctgggcagctcagccaggttggggaggaggggttggggaaatctggagagggagggatccatggtgaggaggggttaggtgcttcagtgagataaggaaggcagagaaaatggggggtggagataagagggagtgttgggtgggagaggtgggagaagagaaagctggcatcttttcattctcttaccctccaggcaacagccccactatctggacttggtatcttgtgtccacagaagaggtgaagcagagcacggaggccagaagcacctgaaaaagagagcaaaatgaaggcatgggaagagatggggtccctggcagaagctagaaggggctgaccatgagagaggaccataatgcaggcctagctggctgcaggagcccagcacctgggggagcggggatgtgtttgggatgagggcctgacaactgatttgtagtgtagagctgggaaagagggatgacatatgcctgaggccacagagcctggagccgtggaagtaagaggacgcttctgtgaaggatggtggatatgaagagatgccactgagccttccaaagagggaagctggacgatatctagtgatatactggcatctgtggagacgcggaacgtttatttagttggggagagagagaaatgtcggtggagggtggagagggagatgcactgtgaattacagggaaggaccctggtgaggacagatgtcagagaaggtgctgtgaccagcaagacctcaagggagcgctgtaggatggcagaggaaactccaagaggtctagggggtgctccgtgagagacgtgggacagtgtcgag

SEQ ID NO: 23170 - DNA, 1081 bp, Artificial sequence
  DNA replication origin
aaccgagatgcaggagagggcgagaagaaaggaggccgggagaccctggggcctgggaagtgaggggaggggtaccgggaaaaccgcggctggcagtgcaaaccctagcgcgatgtgtggagtggagagcgctcttgggagccggcaggagcctctgaggacgcgggggccaagggccccatcccttgccctcccttcttccctccctttctcactccccaccctacccccacctaggatgtggctgggccgccgggccctgtgcgctctggtccttctgctcgcctgcgcctcgctggggctcctgtacgcgagcacccgggacgcgcccggcctccggctacctcttgcgccgtgggcgcccccgcaaagcccccgcaggcccgagctgccagatcttgctcctgagccccgctacgcacacatcccggtcaggatcaaggagcaagtagtggggtgagtgccgaccgcggcggcgcagcgcagcgctcgctgggggtggtctgggggcttttgttttctccactgctgggctcagatgcctgcattctcctaacgggctgtgtggagtgaagtgggaggtggaagtgggaggctgctgaggcttgggctggggaaaatctgttctccctgaaccttgccatggggataaggatggggatgggcgtgggaggttgtgcagtcaagggagggccctgaaagactccctgaggtcctgattcaggtatgagaagagactccaggtggggtcctggttggtgggtaggcagctcctgaaatcctggtaattggccctatcctacaactctaaaatccagatttaggggataggtcatccgatccttggtccccctcccgaggactatttgaagggcagcatttaaggggacagagcctagacagacagaattgcagggccaaggtgtggggtgctgtgtcagtgtttatgggatgaatggagctgtgtagctgggctctgatgaccctcactacctacccccttcaggctgctggcttggaacaactgcagttgtgagtccagtggggggggcctccccctccccttccagaaacaagtccg

SEQ ID NO: 23171 - DNA, 852 bp, Artificial sequence
  DNA replication origin
ttccaagacgggagggatcgggcgcgctccagaggcaggagggtcccccacaccctcaggctcatgcccagctcccccatcgggcagcccccagccccatgaggaccctcaggccggggcgagagcccggcacagcccggaccgaaattttgccgctgccttagagcgttagacaggtcagtgcccgggggtgggtgggggtgggattggttggtgaggggaggaggaggaggcgggaggaggcgggaggaggcgcgcttcccggtccactctgtcccccgcgccgcttgccgaggccactcatcgggtcacctccgccgggggcgcccgccagcacgggcatgattctgcattttttcctgacaggctaggtgtggagccgccctccgcagcccaccccggcccaggtgatgctcagactgaggagtcgggggcgcgccggccagggcgggcggcgggcttggggactgccactgccctgatagagcggggcttttccgcttacgcacggccgcgtcgaaaccgcggcatccaaatgtcttcagcattaagatgccaggcctcgggtgtgtgaggaaaccgagatgcaggagagggcgagaagaaaggaggccgggagaccctggggcctgggaagtgaggggaggggtaccgggaaaaccgcggctggcagtgcaaaccctagcgcgatgtgtggagtggagagcgctcttgggagccggcaggagcctctgaggacgcgggggccaagggccccatcccttgccctcccttcttccctccctttctcactccccaccctacccccacctaggatgtggctgggccgccgggccctgtgcgctctggtcc

SEQ ID NO: 23172 - DNA, 1096 bp, Artificial sequence
  DNA replication origin
cgcctcctcctcctcccctcaccaaccaatcccacccccacccacccccgggcactgacctgtctaacgctctaaggcagcggcaaaatttcggtccgggctgtgccgggctctcgccccggcctgagggtcctcatggggctgggggctgcccgatgggggagctgggcatgagcctgagggtgtgggggaccctcctgcctctggagcgcgcccgatccctcccgtcttggaactcccggggcttttgtggagcgcggcgcggtggtggttctgggcgtttcctgcccgggggcggttggcggggcgcgaggaccaagttaagagtctgttgcaccccagccccggggcaaagccggggatccctggctccgcgtcccactggcagcgcggggagggctctggccgccgcccggctcttcgcaccgcagcgcagcgcggctcagctcccggctcgttgcggctgcttcggctccgcgcggggaatgcgagcgccccggcgccttctagtgggcgcggaggaaactgcgggggcgcggagcaaacgcgggaaggtcctcgctcacagcccccagtccttagcctccaaacactggcatctcaaccgcctgctcccacgacatccattccattgcctgctcgttctgagcttgtaggcaaggatgggcaaataagggctttgggaggaggtagggcgggggcgcgctaaaactcaagtcaagtttgaatgttaggatgaagataaaggaaacaacccctggaaaataaacgctctgcctggctaacaaagactgaggcacagcctccctctccccctcctccccgccctgccccccattatttaacagacactcaagagatacacactgggtaattgaaggccctatttccccgaactgccgcttggtgcaaccttgcaggaggaagggaaccccagagaggccagattggcggtagttctgcttgcaagccttaggtcatagcctgatacctcacattgccgagaatcggagttctgtggctccgtggttctaataaaagatgcatcaagattcaataggaaaaaaagatataacaagaaatatagaacataacg

SEQ ID NO: 23173 - DNA, 777 bp, Artificial sequence
  DNA replication origin
gtgactgcgtacctgtgactgtgcagcgcccgtggtgatctggggtagggggcacccctacagtgggacccctcccccattattctttctgtccagcccctccctcccactggagcagctccagagccattcctcacccccgtgacctctcccagccagggctgagaggattcgaggtggctgggagggtttccaggccccctgccccttccccacaaactgggtgatagggcggacttacctggcccagccctgcctccctcagccaacccagcccttgggctgtctgtgtcagtggtttccggtctttttttttttttttttttctggctaaaatagtttgcaaaggaccaggtaattggggaggggagagaggtgggggcaagggggaaatgcccccccatctccttggaggcagtggtgtgaatcttcttcaacagcaattaaagaggaagtgattttgtctagggggtgagctgctggtctgttcttggaggcaggtcagggcatggccttggtcaagatggggtactggggttggacagggacaggcagaggtgcctcccactggggctggtggcaggacagtacccatgggcatggaggtggttccatcatgtacaacagttctgggttcatgtagtggaggacgtgggcaggttggagtcagtggggaccctgggaacagagaaggcactgactcttaagatgatgccagtcctgggagagttgggatatggtacttagaggagaggacaggcccatggagaggggtgg

SEQ ID NO: 23174 - DNA, 741 bp, Artificial sequence
  DNA replication origin
gcccgagctcaacaatcccagggcgggagcccatacccaggctggctcctggggcgacgccacgccagagggagggtttagtacatgggagggctagccccgggacttggggccaatacggaaaccctaccccttccatgctcatctcactgcccagtgaagggggcaagggcagcgaggggcaggacccctgctgctcatgggggtgggggttcccaaccctttccgtgaaagggaccgtgagtagtggaaaccaggacgtcccctacacctacccatgggtggaagctaaagagtccggggggaaccaagagcctgggtccctcccactactatcttgggagggagaagggatggagcaggagcgggctaagagggctgcgggggccttgtaatttattgctttgttccccaacatggggatgggggcgggcaggggcgtggggagggcgttttggggtaggggaagcccagggtgggcagggggtgggttggggtgggggtgctctcgggttgtgtctgtgaccgtgactgcgtacctgtgactgtgcagcgcccgtggtgatctggggtagggggcacccctacagtgggacccctcccccattattctttctgtccagcccctccctcccactggagcagctccagagccattcctcacccccgtgacctctcccagccagggctgagaggattcgaggtggctgggagggtttccaggccccctgccccttcccc

SEQ ID NO: 23175 - DNA, 881 bp, Artificial sequence
  DNA replication origin
ggtcacagacacaacccgagagcacccccaccccaacccaccccctgcccaccctgggcttcccctaccccaaaacgccctccccacgcccctgcccgcccccatccccatgttggggaacaaagcaataaattacaaggcccccgcagccctcttagcccgctcctgctccatcccttctccctcccaagatagtagtgggagggacccaggctcttggttccccccggactctttagcttccacccatgggtaggtgtaggggacgtcctggtttccactactcacggtccctttcacggaaagggttgggaacccccacccccatgagcagcaggggtcctgcccctcgctgcccttgcccccttcactgggcagtgagatgagcatggaaggggtagggtttccgtattggccccaagtcccggggctagccctcccatgtactaaaccctccctctggcgtggcgtcgccccaggagccagcctgggtatgggctcccgccctgggattgttgagctcgggcaggaccgggtcttctttccgcccctagggggcacaagcgggcatgtccaagcgcctaggagcccgtaccgctggggacctccccttccgcgaaccccgagcgggtagacccagagcaatccgagtgtggaaacaatggagagggggcgtgttgagctggggtctccatgcctcgttggggagagggaggtgagtttgtgtcttctggaaggcgtgggggctgtgccctcgtgggggtaggaagtgctcccgtggggcggggtgcggatcggagaggtgagtgggtgcgtctgtccagcggtccgcccggtgtggtcgtgcccggcccgcgtggggatgggggtgtctctcccgc

SEQ ID NO: 23176 - DNA, 1580 bp, Artificial sequence
  DNA replication origin
cccacgctagcggcgctgctccggcggcgggggctgggcgtggcggtgatgctgggcgtggtggccgcgctgggcgtggtggccgcgctgccgccctcacccgggcagccgtgctggagaaggatgtcggcgcacagctggcttccagcctggcgggcgtagaacagcgccgtgcggccctgggcgtcacgggccgccacgtccgcgccgtactagagggcggaaacggccgcgtgaccgcgcgtccccagggcgcccacacccggcgccgcctcccccacatggccaagcctacttccggggtccctctgggaatttcgggctttcccgcgccaggcgttttccgagatgaagcctcaaagaccccctttcctccccccagctcacgtacccacagcagcagttgcgtgatgacgacgtgggcgagctcggccgccaggtggagtggggagcgcagctgtgggtcctctacgctggtgtcgagcggcccgtgtcgcgcatgggccaaaagcaggagaacggtagccacgtcctgggcctgcacggcggcccacagctggcggcccagcggctcctccgaggtgctcagcggcgccaggaacagtagctgctcgtacttggcgcgaatccacgactcgcgctcctccctgcaagaccagggatcaacggaaaaggctctagggacccccagccaggacttctgcccctacccacgggaccgtctcaggttcgcacaccctcagcaaccctccccccgctctgttccctcacgcttaccgcgaagagtcccgcgagggcttggcacggcctcgcgtgtcgctttcccacacgcggttggccgtgtcgttgccaatagccgtcagcaccagggtcagctcccgtggccagtcgtccaagtccagcgagcgaacgcgggacaggtgtgtgcccaggttgcggtggatgccagaacactcgatgcagatgagggcgcccaggttcaagctggcccacgtggggtctgcggaaggagcgtagaggtcggctcccagccgggcagcacaggcaccccggcattcactacactccctagcccctccgctgcctcctggcactcactgggggccccgcagtccacgcagattgaattccccttggcgttccggatcgcctggatggccacggcctcgctttggctgtctgtgcgcagctgcagagagggtttgggttggcactgactctgcctccaagccccacctccttctcagacacctctgctctcctctcacacgacttcggccgtgtcgttgccaatggccgtcagcaccagggtcagttcctgcggccagtcctccactccacctcaaactcttaccttgaccttgctgctctcacagcattgcagactggctaggatctgactctcgatggcctggacccaggcatcccgctcctcaaaactggctgcctcaaagtgccacgtctgacccgtgctggacacgatcaggaactcaaagttttcctctgagtgggggatgggatggggtcattaagggacagagttcaagcaggggctgcctttcccaagaccgtcctccctg

SEQ ID NO: 23177 - DNA, 1109 bp, Artificial sequence
  DNA replication origin
cctctgctctcctctcacacgacttcggccgtgtcgttgccaatggccgtcagcaccagggtcagttcctgcggccagtcctccactccacctcaaactcttaccttgaccttgctgctctcacagcattgcagactggctaggatctgactctcgatggcctggacccaggcatcccgctcctcaaaactggctgcctcaaagtgccacgtctgacccgtgctggacacgatcaggaactcaaagttttcctctgagtgggggatgggatggggtcattaagggacagagttcaagcaggggctgcctttcccaagaccgtcctccctgatgtccatcccgagcccctgggagtggggcagtgggggtagggaaagcagagggtggggggcagcaggaagcccgagcacatgcaggggaaggcgggggcacccccacccttctgcaccccagctgagcgcccctcccggctccccacttgttacctgctttataaatatttcttaaactaccaaaggattttagtttccacattttgcgcttggctggtttcccgaagcgaaggagatagagatagaatggagagcagaacagagaaagagagaccaagaaagaaggagaaaaagacaggtagatggagagatggagagagatagtgacagagtgccagagacaaagcaggacagacagatggggagagaaagcagaactaaagtcagtggccccggagcagagtggaacagaagccaagagccatgagagtaggcagatctggaacctgggtctgagcacccggcagagagcaggggcagcagggatgggttatcaagaccagcgaggagctggacctctgggagaagaagggagggtcaggatctgagtgaacacgggggaaggggacagaagctggggcgcagggctgagatgagagggccctggggctggtggcggtgggggtgcggggaatcactgagggacaagaatggggatcactatggtcaagggctgttggggagcacttggcaatagaaagttatcgggagaaggccgggcacggtgactcatgcctgtaatccccaccgcctgtaatcccagcactttgggaggcc

SEQ ID NO: 23178 - DNA, 808 bp, Artificial sequence
  DNA replication origin
cgcagggctgagatgagagggccctggggctggtggcggtgggggtgcggggaatcactgagggacaagaatggggatcactatggtcaagggctgttggggagcacttggcaatagaaagttatcgggagaaggccgggcacggtgactcatgcctgtaatccccaccgcctgtaatcccagcactttgggaggccgaggcgggcagatcacgaggtcaggagatcaagaccatcctggctaacacagtgaaacccagtctctactaaaaaatacaaaaaattagccgggcatggtggcaagtgcctgtagtcccagctacttggaaggctgaggcaggagaatggtgtgaacccgggaggcagagcttgcagtgagccgagatcgcaccactgtactccagcctgggtgacagagtgagactccatctcaaaaaaaaaaaaaaaaaagaaaagaaaaaaaaaagaaagaaagttattgggagaaggggctgggtggtcacagaatccaggatctggggaatcagtgggagatgctgagataaggggctgaatcactggggatcagcggggctgccgggtgcaggggctggggtggtaagtggagttgagggaaggaagaggaactagaacgtcattaggagagggagcaggagctatagacatggacatcgttgagaacaggggctggggaaaggaattagctggggaacaaggaaagaaggacaggggctgggggatgtccatccactctttcactaagttgtgtgcagtggtaatggtagtcaagcactcagctcaggcacttt

SEQ ID NO: 23179 - DNA, 1062 bp, Artificial sequence
  DNA replication origin
tccatccaccaacatttctttcttgtactgctcacctgtccagaagagttggaaggggtaacaggtcagaggtgacaggtcaccaaacctccccatgctcccagtgcttttgctattatggcctcatccttcccccctggtctccacacctgcctaatcattgatctcactcctggatccctgaccccaatggttagcttactatggctcttcagaactcactctctgtcttctccagcacctggtatgagccagtcaggaatcggtggatgagcgatgacttcccactcctggcatcgcccagcacaccctgagggcaaggttgtggagcagaaattgtgggatataagagaaggcaggatgcatgggtctggacactccagaaaacccagagagataagtcatccaagcaggaccctacagggcctggatgacagtcattccagagagagcagttgggaggatcagagcagctggggggatcagagcagttgggaggatcagggcatgagtgtggtaagaaatgatcccaagctcaaagtggagcacgagctgaagaatgtcagcaattcagtaccagcttttttgtgtgttgggttgtttagaaaacatactagatatgttgtgtgtgtgtgtctctgtgtgtgtgtgtttgtagcatgtcacagctctaggcactagttggaaaactttacccaattctaggcagtacaacatgaaggccaaagggcagataccagaaatgagaagcctggaggaggaccatgaacaaacaggaaaaaggggatggctgcataaagactagataggaaaaacttgtgaggaggctgtagcaaaccccatgttggtgctatgaaggcagactctcaggagaactggaaaacgattccctattcccaaagagagagagagagagaaggagaggtgaagggagagagctgagagtgcagtgggtgggaggtcagccttccctataggcaaggggactgggttacctaccaggcgcagttcaggaatggagcggctcaaagtccattcctggctattgatcacagcctctgt

SEQ ID NO: 23180 - DNA, 1159 bp, Artificial sequence
  DNA replication origin
gggtcaaggggtcaaagagcagcgccgggactggagcttcggtctctgccgccgccaccgccgccgccgccgggggagggggctctacagcttcgacctctggtggggtcggggctggggctggagcccgagggaagttgtcccctcggaaaggcaagagtaagaccttggacaacagtgacttgcatccgggaccgcctgccggctctcctcctccgctaaccctcccaccaactccgagtccagccactgctgtcaccgctgcttccgcgcagccccccgggcctgcacctccaatcactctggagcctccagctccggggctgaaacggggccgggaggggggccgagcatccactcgtgaccgcaagatgctcaagtttatcagcggcatcttcaccaagagcacaggagggcctcctggctccgggccccttcccggaccccccagcctgtcttctggcagcgggtccagggagctgctgggcgccgagctccgcgcttcccctagtgagttgagtcagggcttgagaacagggagggaagggtacctggaatgctcagcttggggtggaggagcgaggtccaggaaactagggaagcttttctctggggtgggcggatgaaccaagctcacccctctgtcaaggattggggcaaagaataggagtcctgaagcggggcgagtagctacattgtgcgacaggagaaaggacttgatttcagagggactcagcctcagagctttctgggaaagtaacgtccttgatcagagtgactagaaaattgctcccagagaagcccaggaccccacttccagcctcagctgaactctgggagcatggaaacggggctttgccgtgtttagagcgacgttgaaggtgaaggggatgaggaagcctcagtttcccctgagcacttggggcaggtggcatgacagtgaccttgcaggcagcttctcgccagggactagtcgtcccctgggctgagagcaggctagtgatgtttttcgtgcggtgaaggcggattgggcggtacgcgagtccgcgggggctggaacgtgcagaatatttaaatgtgaagtgagagggggcggataggaagcctcacttcccccactgcccaccccctccccagagccgcattgaaacccacccgg

SEQ ID NO: 23181 - DNA, 787 bp, Artificial sequence
  DNA replication origin
ggatcagcacgagcagcgcgggcaccgggggcgcggagcccccagccctgtccccggctccggccagtccggcccgcccagtctcccccgctcccggccgccgcctctccctctgggccgtccctccgggacccccgctctccgggggactgagccccgaccccaagcctgggggcgcccccacctcctcccggcgccccctgctcagcagcccgagctggggcggcccggagcccgaaggccgggcgggcggcggcatccctggctcatcctctccgcaccctggcaccggcagccggaggctcaaggtggcgcctcctccgccggctcccaagccttgcaagaccgtgaccacgagtggagccaaagccggcgggggcaagggcgcgggtagccgcctgtcatggcccgaaagcgagggcaagcccagggtcaaggggtcaaagagcagcgccgggactggagcttcggtctctgccgccgccaccgccgccgccgccgggggagggggctctacagcttcgacctctggtggggtcggggctggggctggagcccgagggaagttgtcccctcggaaaggcaagagtaagaccttggacaacagtgacttgcatccgggaccgcctgccggctctcctcctccgctaaccctcccaccaactccgagtccagccactgctgtcaccgctgcttccgcgcagccccccgggcctgcacctccaatcactctggagcctccagctccggggctgaaacggggccgggaggggggccgagcatccac

SEQ ID NO: 23182 - DNA, 855 bp, Artificial sequence
  DNA replication origin
cctcgggggctgccaggatccccagtctcggagcctctggcaccggcggcgccggccgcggccgcagacggagaaggcggcggcggaggcaccgactcgagcttaaccagggtcagcgagatgaggtaggtcgttgtccggcgctgaagcgcgcccgcgccccggctcatggggcccggagacccccgagctggggaggggaggggactcccccggactgcctcaggggggcccggccatggggccgccctgctcgctgcccccagcccccggaccccgctgagcccccggcccggctccgctgtcgccgccgcctccgccgcctccgcttgcgcccccctcccatcacatggggcgccccctccccatgctccccgccctgcgcccccaccctcttggagccccgggaccttggtgctgctccagggaggcgcgccggaccgtccaccccggcctgggtgggggcgctgagatgggtgggggagggcggggaggacagtagtgggggcaaatgggggagagagaggaaaagggagcagaaaaggggaccggaggctaggggaaacgaacctgtgcgggggaggcaggggcggggaattgggactcaagggacaggggccgcggatgcggtcggaaagagggtctagaggagggtgggaagctagtggggctggccgtgcgggggattcgcaggggcgcggggaggatgctggggatggagatacaggaggcggcgggggaggaaagagggaacgggaggtgggtgggaacccacgggtctggggtctgggaggggaggggcgtgagatccgggcgaagagtccgggggcctcgcctgggctcggcttggtccgg

SEQ ID NO: 23183 - DNA, 1541 bp, Artificial sequence
  DNA replication origin
agtagtgggggcaaatgggggagagagaggaaaagggagcagaaaaggggaccggaggctaggggaaacgaacctgtgcgggggaggcaggggcggggaattgggactcaagggacaggggccgcggatgcggtcggaaagagggtctagaggagggtgggaagctagtggggctggccgtgcgggggattcgcaggggcgcggggaggatgctggggatggagatacaggaggcggcgggggaggaaagagggaacgggaggtgggtgggaacccacgggtctggggtctgggaggggaggggcgtgagatccgggcgaagagtccgggggcctcgcctgggctcggcttggtccggatgcgcgctgtgtccgggcgctcccctcacattgaggaggaggcggcccccaggcccccccaccctatctcccccccaccttttctccaccagcaccgatgtctgcgagggcggtgcaaaatccagggctggatttctctcccaaatcctgggctggatttcctgggacttggactcacctcctccaacaacctagccccctcctctcgcgcaccaaggttaggaagcgcgattgtgaggtatggcatttagggataagggtgaaaatcgatctattgggtggacaggggccgcggtaaacagagcaaacccagggtcactgccaattctggggaagatgaagtgggaaagtgggggccctgaaatcccttcccccaggatctcttgtctcccccaggtacctggacggttcccgttctcatgacccagctccctttcccactcacaccaccacatttaatactttgacggggccaagacttgagctcgactgtcccaaagtgaacttggaaaatgttccccagggatggggacaaacatggaacttagcagggtaggagagaagggagagatctgagtgctggaggagcccaggccacagggtaagtcaaaggctccagctctaggaggagggagaaggatgtgtcttagactgatacccccccatgccaaaatgcatccagtctccatagcaaccgtagctccaagagtgcctcagaaacagcgggcagaagcagagaggaatccgtgtgtatggtgggtaggggaccaaccgcgggatgctgaattagtggaggcactgccctgacacctggctacccacaggtggaggatttcactccccaagtataaggacccttcagttgaggcagtgagagccggcctcttcagggttccctttcagtctcctgaggtttgctgagtgggattctttcagaagattaaagaggaggcaggcagagtgaatggaaaccgtctgctccgtgtcccccacccctctaggggtcttggagttcaaggctctctatcctccagccaggtgagaatcctgaagtggttaggccaaagtggaaaagaggttgagaccccttgggggtggggtaagatgggcgaaggaaggtctctctgcagccttggagaccccttcccgggacttggggagtcacagcagtcccctgatttg

SEQ ID NO: 23184 - DNA, 1794 bp, Artificial sequence
  DNA replication origin
gccgggaagggggcgcgcgctagagagccgagccgggccggggtcttcggggcctgcgacagccgttcactgctgccaccgccggggctccggtgcttgcggggccgagcgggctggcggcccgggggcggcggggtgggcggccatggccagggcagggggcggggaggggggctcagggtgccgcaccccgcgggtctgggtctggagcgggccgggcccccggggttacgcgcccgggtcctcctgcggcggggccgccccccatcgccgttctctcggtcccagtccccctccggctccgggatcaggcttggctcggcccgtgcgctcggcggtggcaaatggcggctccttccggcggcggcggcggcggagacccccccggagtggcgggcgggcggggcgggcgccggggagcgggtgaaggatggagggaggggcggggcggggagggggagaggagaaggggccgcggctgcgcatccccgccctgccccgcacgagcaggtgtcccaggggcgggggcaagtgtgggatcccgaggagggtggaggaaggggagtggccaaggaaggggagtgtgcacacaagttgactaggtgtgtgtctgggagtgggggatgagcgggtgagcatggaaggtgagtggttaaatgacgcaggtgtaccagggagggtgaggcttgtgcaaaatgggaatgtgcaaagaaagagctgtgcaagtgtcggaggtgtgagggaggtacatgggcaggggtgggactcaagcaatatacactttacccaaagggctgaaaagtgtgatcgatggggactgggaaagagaggtgtgtaaggaatggaatcggattgtctgagaaacagaagcctgtgattgtaatgtgtgaaggaggtgagggagggagcaggggaggtaggcgtgctaaagggatgggagtgtctttcctggtactctcctgccctcacctccactacactgaagtgaacaatacacacacttacccctttccttttatggagacttccctctgaggccaagttctacccccatcacatttttttctttcttacacttacattctccctctcctcccctttgcaaagctgagggaaaagggattccaggggagctcattgggtcaaacatactgggaaaaaatttaattagtgaaagagtaattaacagaagaagggaggggacagagcctgggacagactgccaaattaaggttcctcaatagaaagtgatggagagacagtaatgttcccatgaagtattcaaatgttttggatggactaatgaatgaatcagaaaaaggggctgggacccaagcagacagagaggacgtcttctgttgcaaagacagtaagctgtgaaggtcttatgtggaaggtgaggctgaagtggggaatgctggtgtgggaagggagtttgaaaaactcacagacaattatcttagccttccagaaggcttacaaagcacccacccctagcaaggtagccaataaaacattcacctcttgagccccttagtcagttcagtccttgaggtttttcttactagtgttccagctgcccttgccaggaggggcccagggctacaagtatcaggatggaaagaggaggcatctgtattaatatgtattctattttgctctaagtcatggtttatattcatcttctagtttgaactcttatattctcagccagatggttaaggaaaacagaagttagagtggaaggagtggcaaatagggtaataaaatggctttagattttagacaaattct

SEQ ID NO: 23185 - DNA, 791 bp, Artificial sequence
  DNA replication origin
cgctgccccccgcccccggtgtccggacgatgctcaagtctcggctccgcatgtttctgaacgagctgaagctgctggtgctgacaggcggggggcggccccgggccgagccgcaaccccgggggggccggggaggcggctgcggctgggcgcccttcgctggctgctccacccgggacggcgacggcgacgaggaggagtactacgggtcggagccgcgggcccggggcctggccggcgacaaggagccgcgggccggacccctgccgccgcccgcgccgccgctgccgcccccgggcgcgctggacgccctgtcgctcagcagtagcctggacagcggactccgaacccctcagtgccggatctgcttccagggcccggagcaggtcaggcctgggcacctggccgggcgcggagggtggaggcgcgcacctggggtgtcagcggagaccgcgagcaggcgcggcgcctaaggaggctgggcgggccccaggacacggagtgggaatggggtgaggccgaggggctggcaggggactcctggagcgcttgtttgtgtcggagggtcaagggtccccaggaaggggtggggctttctccccggagagcgcaaaatccctctcacccattaacagggactgctgttctctcctatttccctcgccccagggtctccgtaagctaaggggacctgttctcttgcaggtgggcagaaaggagagtgcttctgtgccccccttgaagggaggggcccagccagcgcccttgcttagctcagtatttctccccgt

SEQ ID NO: 23186 - DNA, 1402 bp, Artificial sequence
  DNA replication origin
ggagaaagctggggcccgagggtggaacctcttagtttggtcacagtgggagactcgaaactctttccccctccgccacgttcttcttttggccttgaggaatgtgtccaaaatagcggcagattttccgcggggtgtaaggacgagtgtggcgtttctctagagagccccccgaccggggccacctggccccggaggctggggcgggagctggctcctggggccgaagccggagcgctccctccccttctccaccgagcgcgaagggccggtgctgcagttgaacacactgaggcctagagcctggtgggcggccagcttcggggcctcgtgcgccccacgtctccccgtttggcaacattagtcagcaggtcactaattcctggggttcacgttccaaggagctcccccaacttccctaggggcaaatccgctgagttggtggtgtcagcctctcccaaattccctcagtggaacgagaggagctgggaggggggaagggtggggggagggaggcagtgtgttcctcttgcatcactggccggactttaaataagcctgccctgagaagggatggccttgcctactcagatcccaacccccgagaaggctccggcctccctgacctcggtgttgccatgatttctgctctcctggctgcatcactaaccaggctgtgacccaggcagcaacttcaccgcctctgctggctgctcaactgtgctgatggctgaaaaaggaagggagcctgcgtgtgtttatagctcactcctgactcttcccactccctttttatcccaggaaaagaccctaagagctagccagaggggaagaaacctagatgtggggggattcaagagggggcagtggtgatgagtagggggaggagccctgtgcttccccactaggtcttcctctcttgcagggactctcttgcagggagtgtgccttgggcatcgtggggccacgcgaggagtaagggaaagctggactgcgccggggcatcttagaaatcagagctggaagtttcatccaccagggtgaatggcaggctacagaatagataacagcagaaagcaaagcaactggcttgacagtgttaagttgctggtgttggattttcttggagttaatgtttctccttttttgtgtgtgtggtttaagccagcagccactgggtctctccctccccatgtaattttttattttaattgagatggagtcttactctgttgcccaggctagagtgcagtggcgcaatctcagctcactgcaacctccgcctcctaaattcaagcaattctcctgcctcagcctcccaagtagctgggattacaggcgcgcgccatcacgcttggctaatttttttgtattttttagtagagacaggggtttcgccagt

SEQ ID NO: 23187 - DNA, 978 bp, Artificial sequence
  DNA replication origin
ctggctgggcgggaggacgggcgggcgcgcgggctgggctgggctggggggcctgggcgggggcccgctccggctcccgagactccgacttccacagctgttcacatcccccctctcgtttcctccccggaccgggaagggaggcggcctgtacaaagggcgggcggcccgggcagcggctcccccgggtgcccccggccccgatcccccagcggcagctccgggctcctcagtttgggtccaacatggagaatccggagcgaaaacaagaggaggaaatgggacacggggcggtttccaggctcccccctcccctccgtactccagataaacaacccgcggctgcagcgcccacccccgcgcgcctcccggctctcgactcggcctcttcacggccagctggagcttcccgctgggggctgcgtcctaggccctgggaccctccatctgtgagcggccggggctgcggacagtcgggagctttgctattttgttacggaaaaagcgaatcctcaaggggggtggggtggcgggcgggcaggctggcgggggagacttgaaaccgttccggtgctccgattggctctcttggagaaaaggggcgtggcccctccttactatgcggtgagaggacctaacaacattccaggcgccacggccacgcccccgggccactccccccgcgccagactgcggcctcccagtctcctcggccacacccccttcccaactatttaaaaggccgctccgaagctcacgttctggtgctctgtgctggggtgttcttttctcggagggcgcactcggggaaggtggaaaggtttcccccttcaggggtgaccaagacaagccgctaagcctaacctgactccagcaggggatggggcggatcggaagttaccttacccccctgcttagccctagaatcaaggacgtaccaagtcacataaaagtacaaccgtcgaggccaggcgcggt

SEQ ID NO: 23188 - DNA, 1205 bp, Artificial sequence
  DNA replication origin
gccactccccccgcgccagactgcggcctcccagtctcctcggccacacccccttcccaactatttaaaaggccgctccgaagctcacgttctggtgctctgtgctggggtgttcttttctcggagggcgcactcggggaaggtggaaaggtttcccccttcaggggtgaccaagacaagccgctaagcctaacctgactccagcaggggatggggcggatcggaagttaccttacccccctgcttagccctagaatcaaggacgtaccaagtcacataaaagtacaaccgtcgaggccaggcgcggtggctcacgcctgtaatcccagcactttggaaggccgaggtgggtggatcacgaggtcaggagttcaagaccagcctggccaagatggtgaaaccccgtctctactaaaaatacaaaaaaattagccgggcgtggtggcgggcgcctgtaatcccagctactcgggaggctgaggcaaagacttgcttgaacccgggaggcggagattgcaggtagccgagatcgcgccactgcactccagcctgggcgacagagcgagactctgtctcaaaaaaaaaaaaaaaaaagtacaaccttcgaatcccgaaaggggtgtgtgcgtgtgggcggacctaggactccagagtataagagctggaactgacctcgggactgtgtcccccaaaacactgaaaatgagacctgaggtgctgggctttcctcacacccaccgacttactcccatttaggcggccccgactccgcccctcctccctacctccctcatcctacccctctctttttgcccccacagtcccagcttcctttagatggatggaggtctctcggaggagcttcagctttgtggactcaggctgccttccccacttgctctttaggcctcggggcacgctccgctggctacagctcctggagtctctgctcaaggttgtgggtgcttttgttccccagcggtggtagctccagaaaggctggtttcagctcaatatcaggtcttttccagtgatctacatctgtccacaggtgacatgggctgccttgggacaatggtagctgttcaagtcaaggccggcaagagtggtgtagagtgagattgcactgggtgacttctgagctaaatccaaccccaatattctgtgattcagtggcactcaccctgccaaggaaggggcttcct

SEQ ID NO: 23189 - DNA, 1248 bp, Artificial sequence
  DNA replication origin
ctcaaccagctgcagacttaaaggtgcagtgtcttctttctctcccaagggcagaggttccccagggtgcttttgacgacccctgagctggggtggggtggtttcaccaagcaggggtcagggttcagggttcaggaaccccccaccccatcccccatccccgggatgtttccttttagctcgggaccagggaggggcatggaaatccggtcgccaaatcagcaggcagagccgagctggggcggcctccagcgcctcgcctcggtcagcgatcactctggagaccagcgatccccgtgggggaccctgagctgaggggttacaatgaaactggccggtggcagatttgcggtggccaagagcagacttctaagggtgatgcttactgttctgaccagccctggttatttgtttgaggctaagttatgtgagaagaaaaacgagctcaacacatatatccagcacctatcatctacctattaggcactgtagggagaaaccaagaccttttagacagtcgtcaccttcaagtggtttataggatttaggtgatgagatatgtagatatagacatagaggcagacacgagatatagagattaaatagcactagtcagtttcaatgcctgttccaggctaaacagaagagcgttacaaggctgtgcataattacttgcttgatcaacagcacagataatgagtccttcaggccttgggaagagggctctggaggccctgactgagaggtgggccagaggcaaggcaggagggggacaggcagctgggggaggatggacggcatgtgtcaggaggggagaaaggagcatgatgttggagtaatccctttgctaaactgaggaactggagagaggaggagtgggggatgagggtgggaagccgtaggggggccaggtgcaggtggccttgagtgcagggctgagtgtggacttgatctggtgaaggcagtgggcgagcctgcagaggtgggagggcaggtgaatggtatgatgaagggggtgtttttaaggaccagaagtctggcagcagtgcgcagaataaactcgaagcattgatggagacccgttggaggcttctgcaaggaaccaggctgacgtaaggtcacagtgctggggtgttaagagaaaaggtgaaaatgaacagcgagaaataagagattttgaagaaagaatggagataattgattgtgtatacagcaaaggggagaaatcaccagaggtgatgttgattt

SEQ ID NO: 23190 - DNA, 1231 bp, Artificial sequence
  DNA replication origin
tgggctggccaaggccggagccagctccctctgcttgcggggaggtgtggagacagaggcgcgggcgggaaccggggctgcgcgcggcgctcgcgggccagtgcaacttccaggtgggcgcgggttcggcgtgccccgcactcggagcggccggccagcccgcgtccccggcccggggaattaagaggcttagcacccgggccagcagctgcggagggtgcgccgggtcccccagcactgctggtccgcccacaccgcgctggaattgtcgccctgcctcagccgcctccccgcagggtcagggctcaggaccggcagcccgccatgcctgagcccccctcatgctcccgccgtgggctcccgttcggccagagcctccccgacgggcgctgctccgcgcgcccagtcccatagggctgaagagctcgggcgcgcgccgcgggactgccggacagctccgcccgcggcccctccggggcgattcactaggcgaagtcagctgggttcttgagttaggtggggacttggagaaattttatgcctagctaaaggtttgtaaatgcaccaatcggcactttgtgtctagctcaaggtttgtaaacacaccaatcagaactgtcaaaacgggccaatcagctctctgtaaaatggaccaatcagcaggatgtgggtgggctcagataagggaataaacgcaggctgcccgagccagcagtggcaacccggtggggtcgtcttccacgctatggaggctttgtcgttttgctctttgcaataaatcttgcagctgctcactctttgggtccaagttgcctttatgagctataacactcaccaagaaggtctgcagcttcactcctcaagtcagtgagaccatgaacccaccagaaggaagaaactctggacacatctgaacatcagaaggaacaaactcccaacacagcatcttttaagaactccaacactcaccagaagtgtccgggcttcattcttgaagtcagcaagaccaagaacccaccaattccggacacaataccactattttttctcttatgatttctcttcttagtaagtgcctacattattcatctttcctcaaatgcgataagagttggaaaaagtaatcgttgactagaaaggtacatcccaccaagatacagcagagaaaaaagagcaaaagtctttggtgaacagcaagccatctctggaagtcttccactcaggccaccag

SEQ ID NO: 23191 - DNA, 1105 bp, Artificial sequence
  DNA replication origin
ctattattgtacaccttgaagatgaggttaattaagtcctgttgtggggtttgagggccggaatttaatttttggagttttatttaatgtcgggagcagattgggtaataaaatatatattgagaataagacggccttttgaccttttagggtctagggctgtaaagcatctcagggttgctgccaaacgagccatgaactgggctgggtttttatatttgatgaaaaagagcctaaacactctctgatttgggataaagaaaaaggagcattaactttgactatgcctttagctctagccaactttttaagaggaaatttctgggcaggtgggggaaggctacttatggaacgaaactgtaagccgacccagtgtgaggaggggaggtgataaaaggattacagggtggaggagcagaggctgaggaagaattgggacctagctcagcctggcgaggaggggagaggtcagatgggtctgtagaaaaggaagattagaaagactcagtgatgcttggggttgggactgaggggacaggtgggagggaaagaaggaagatttgggacaagttgcattgggaacagagactagggagggactgatgtgtaaaagaatgcctggagatcaggcacctcagaccatttgcccattttacgacaagaattatttagatcttgtaggatggaaaaaatgacagtgccgttttctggctatttggaaccgctgtcgagtttgtattggggtcaagcggcattgtagaagaaaataaggcatttaggttttaggtcaggtgtgagttgaagaggttttaggtttttaagaacataggctaagggagaagaagggggaatggagggtggaaggttgcccatagtgaaggaggcaagcccagagaaaagagagagtagagacatggagggaagggatttgggggttcttaccctccagaaaagcaggaaagtggtcggggcacggaaatgggttggggtgcagagataagaggtcagggcatggaaataagggatcggggtgcagagataaggggtaggggcacagaaaggatcggggagttcttgccccccggaaaagcagcgaaggggtaga

SEQ ID NO: 23192 - DNA, 1048 bp, Artificial sequence
  DNA replication origin
cgcggcactaagcacgagaggccggggctcggccccctgcagcactaggctctgggagccgcgcgcggcgcgtcccagtggcccgactcgccgtgcgcccggcgcccaccgcagcctgcatgccccgcgctgcgccttgcccggcccccgccgcctcctgctcgcaccgctgcagccgggcgccggagtaatatgctcactcgagtgaaatctgccgtggccaatttcatgggcggcatcatggctggcagctcaggctccgagcacggcggcggcagctgcggaggctcggacctgcccctgcgtttcccctacgggcggccagagttcctggggctgtctcaggacgaggtggagtgcagcgccgaccacatcgcccgccccatcctcatcctcaaggagactcggcggctgccctgggccactggctacgcagagtgagtgcagcgacaccggcggcgcccctgctctcctcgcggcccttccccgcacggttccagccctcttctctccctgcttctcggcctcagggctctcactagctgccggcgtccaggcctcggcggggagctctttacttacactggccatttccctcttctccccactccctcttcccccagcccaaggacgcggcgtctccagccccggtatgggtggtggaggggtgggtggcagcgctggagcgtgggaaagctaaggtgagacaggtctgtgaatccggggtctctgtcacttggggaaaaaaaacgggcagaaaagctctgaagtttgaaacacataaggaaaatctgctatctgtacccccaccctcccaaaatatagttgacgcccccgcgtgatgaagagtttatgggggtggaggcttggaggagatgtcactgcgcctgggagcttgtgtccgattccgggaggtggccgtgtccgagtgcgtggttgtacatttccgaaggtctcagtttctctcactttcagcccgcgagttcctccgcttctcctttagcaggtagtaaaatgctgcgctttcggtaaatgccagtactatttc

SEQ ID NO: 23193 - DNA, 1329 bp, Artificial sequence
  DNA replication origin
tcctcacttcccagatggggtggcggccgggcagaggctgcagtctcggcactttgggaggccaaggcaggcggctgggaggtggaggttgtagcgagccaagatcacgccactgcactccagcctgggcaccactgagcactgagtgaacgagactccgtctgcaatcccggcacctcaggaggctgaggctggcggatcactcatggtcaggagctggagaccaggctggccgactcagcgaaaccccgtctccaccaaaaaaatacgaaaaccagtcaggcgtggcggcgcgcgcctgcaatcgcaggcactccgcaggctgaggcaggagaatcaggcagggaggttgcagtgagccgagatggcggcagcacagtccagcttccgctcggcatcagagggagaccgtggaaagagagggagagggagaccgtggggagagggaaagggagagggagagggagggggagggggagggggagagggagagggagagggatttcttattactcagtccaagtgaaccactagtattacagttgactcttgaacaacacagtggttggggaaccaactcctgcgtggtccaaaacatgcatataacttttcacttcctaaaacttaactgctaatagcctgctgttgatcagaagccttacctgtaacataaacagtcaattcacacatattctgtatgttacatgtattacattctgtattctaataaatcaagctagagaaaaagttattaagaaaatcatagaaaggagatatatttactattccttaagtggaagtggatcatcataaaggtcttcatcctcatcttcacactgagttggcagaggaggaagaggaggggttggtcttgctgtctcggaggttgtagagactgaagaggtggaggaggtgaaagtgaggcaagaggggtcaggcacactcagtgtaaattgtagtgaaaaatatctgcatgtaagtggatctgtgcagttctaacccctgttgttcaagggacaactgtatacagtcagaaaattcagtgtcaactatattctaaatttctggatgctgtggtaggaaaacttactttcttaggttctcacaacagttttggaaaccagacagcttggtagagatttaatacattcagccttccttatgacactacagaggtcagaacagatatcaggtatttgcagctttttttaagagaatcaggtcattacctgcaggcagggtattaatgttttggtcagtctgtgggagtgtgcaggctatccaatgagttgtctttttccatttagtaaattctctattccatgcaag

SEQ ID NO: 23194 - DNA, 1126 bp, Artificial sequence
  DNA replication origin
agggttgggggtaaggtcatagatcaacaggatcccaaggcagaatttttcttagtacagaacaaagtgaaaagtctcccatgtctacttctttctacacagacacagcaaccatccgatttctcaatcttttccccacctttccccctcctctattccacaaaaccaccattgtcatcatggcccgttctcaatgagccattgggtacacctcccagacggggtggtggccgggcagaggggctcctcacttcccagtaggggcggctgggcagaagcgcccctcacctcccggatggggcggctggccgggcggggggctgacccccccacctccctcccggacggggcggctggccggacggggcggctgccgggcggaggggctcctcacttctcagatggggcggctgccgggcgtagggtctcctcacttctcagatggggcggccgggcagagacgctcctcacctcccagacggggtcgcggccgggcagaggtgctcctcacatcccagacagggcattggggcagaggcgctccccacatctcagaggatgggcgggcaggcagagacgctcctcacttcctagatgggatggcggccgggcagagacgctcctcactttccagagtgggcagccaggcagaggggctcctcacatcccagatgatgggcggccaggcagagacgctcctcacttcccagatggggtggcggccgggcagaggctgcagtctcggcactttgggaggccaaggcaggcggctgggaggtggaggttgtagcgagccaagatcacgccactgcactccagcctgggcaccactgagcactgagtgaacgagactccgtctgcaatcccggcacctcaggaggctgaggctggcggatcactcatggtcaggagctggagaccaggctggccgactcagcgaaaccccgtctccaccaaaaaaatacgaaaaccagtcaggcgtggcggcgcgcgcctgcaatcgcaggcactccgcaggctgaggcaggagaatcaggcagggaggttgcagtgagccgagatggcggcagcacagtccagcttccgctcggcatcagagggagaccgtggaaagagagggagaggg

SEQ ID NO: 23195 - DNA, 994 bp, Artificial sequence
  DNA replication origin
agaggcccctcgcggcgccggctctggagacctaaactccgccggggctgtgcccagggcgcgtctgagcgtcgccgccttcaccctctcagcagcagcggggactcgcgtcaggactgcgattcctttcgcctgccgagctgtagcggcagtgtctgcgggcagaggagcggcggccgtggcagcagcatccccagcccgggcgggacccttgagcgccggagccgacagctggaggcaggaagggagggttgtggcgcccgagctgggcgcgttcccagcgcctgccctccgccgctggccctgtcccgggcgcccggtgcgggtctcgaacaatggtgcggagcgccggcgcgagccccgcgcccgcccagcggccgtagaggaagtggccgggctcccggcgaggtgggcagggagacgtcccccgccactcgctggctggagtttgcctgcgcgtccggcctctcccccggggatcccctgggattaccgacggagctcaatttcgagagtatggtgccagcgcccgggctaatctagtcctctctactcgctctttttcccctcctcctcctacttctcctctccctcctcccttccctcgggtcggcgctgcctctggattgcctgcgtgtgggagtacaactctgcctctccaaggagaacgggttgtgaccactgaacaaaacttgcccattgaaagcaaacccggaacagctggataatgtccaccccgagccgattcaagaaggacaaagagatcatagccgagtatgaaagtcaagtcaaaggtaaggatgggagcggctgccttgctccttttgtgtgccttcttgtcattgtgctcgtggagttgcgtatctaacttggtgtctgcgtgggaggaaggtggtgaggggacagctcgagccctgtctgagccacctgggcttcctacaagccagttagttcccagttgcaatcccagtcccgtcaaacccacggggagctg

SEQ ID NO: 23196 - DNA, 1727 bp, Artificial sequence
  DNA replication origin
taaaggaaatttaaattaaaaaaaaatttagttcaaggccaggtgctgtggctcttgtctgtagtggatcacttgagcccaggagtttgagactagcttgggcaacactgcaagatcctgtctctacaaaaaaaaatttttaattagccagctgtgatggcatgagcctgtagtcccagctacttgggaggctgatgtgggaggatcgcttgagccctggaggctgaggcggcagtgagccgtgatggtgccactgcactccagcctggatgacagagtgagactgtctccaaaaaaattgttttagttcaagagaatggaaacaatggtagtgaggaaaagcaatgttgtatcccgaacttttcctcaacaaagaaaataaattggcacagttacattagttcacaaaggtattccgagtagaaaaaaaatctttttttttcatttaattttattcttttcttacagactcgttcaaaacaagccatgactcctcagcaaaacagctccatcaagcgtctcgccaacctctcccttggggctcagtcaagggaatgaaaaaacgaggctagacacctgtccccaacggaaaaaccaagaacacacctggagagcagctcagacaaagggagccaggcggggaaaacagtaattggagaggagaccgtgcttccagtctgttgctggtttacaaggtaaatctattcctggacgaaaggggtacaggaacagcacccgaaaaccggcgacaggctgtggcaggcccgacgtctttcaagcccagctcctagcgtcgacgcccctccttccaagacgtttcccagcaggccctgcgcccagtttggatcaagtgagccgcctgagattgccaagcgtcctgtgcgcatctcattaacgcatctgcttattcatgcatttattcttttgctggggagggggtggaggggaacggtgtctcactcattctgtagctcaggctggagtgcaggtggggcgatctcggctcacggcaacctccgcctcccaggttcaagcgattcttgtgcctcagcctcccaagtagttgggattacaggtgcacacgaccacgcctgggtaatttttgtacttttggtggagacggcgtttcaccatgttggccagcctggtctcgaacccctgacccccggtgatctatccaccttggcctcccaaagtgtaaggattataggcgtgatccacggcacccggccttatgcatttattcttattgagcatctaacatgctctaagcatcgggggcaaaaaagtaaatgagatataacagcacttaacacacagcatttatttgcacgggtgttggctttctagccctccagcgactgcttctaggtaggggccctctttcgtttttgcatcctccgagtctagcacagtgcctggcactgactaggtgctttgttaacaaaggaatgactttaaaaggtatttttgatagggagctcggttctcaaacctgtagccctacgtggggtaggggaggcgggagaatgggtgaacaggcagacacgaggagaatgggagacgtgtttgtattaggagtgctcacagcaatccacagcttccctgtgttcctcgttctcaaataagaggaggggagtcgagggcaggatggggcagccctccccgcgcaggagggctgggtttgggggccccagccgggagttctcactgcgctcccgagcccg

SEQ ID NO: 23197 - DNA, 859 bp, Artificial sequence
  DNA replication origin
tcccttcctggggcgccgaccccgcccgcttgcttgcttgcttgcttgcctgcctgcctgcctgcccggcgccacgcaagagaaggtgccaggggacgcagagcgactagaggcgcgcggtcccggccagcaccgtctctggcgttgtagctgcggccgtggcggaggactacggcgacaaggacgagggccgctctcccagctctctgcgtgccgcgccgctccgctccgctggctgaccatctggagtgcaggctgggaggcgggatggagtgatagggaaggtgactcggggctcgggggcagcgggaccgggaccaggtttggtccgcgtgaggcttcgaggaagttggccggggcggaccggcccgggggagtcccgacgccagggagggtgcaggcttgggaccctctatggcggtgcaccccctggctgggcggaccgggtgggggtgggtacgagccggggccgccgccgaggagcgcgtcccgagtgcgtggccggcggttgcttggtgtttcatcacccgaattgccacgaggcttcctttaggggagggatcgggggagggatgggagcaaggctagcagaggagggtcggcatcgcctgtggttccgaagcccgttagtcatcgttgtagcgttatcaactgtggagacctcaaacttgattcttcccccacccctggacaaaaaggaaaagtgttatttctgtgcagtaattggccagcacggacgctccatttcttctcaaaccttcctcaccatcctgcaggactagagaagcatgaggtttccctgtaaccagaaaaacgagtactttttgaaagtgctaattagttgtggcgggcgggggtt

SEQ ID NO: 23198 - DNA, 1272 bp, Artificial sequence
  DNA replication origin
accacacacgctgaacacactcttctaaacagctattactgttctgatcaagagttaactttgttagggaaaaacaagtggcaaactcatgtatttggtcttttgtactcagcattggtcagagggcagtgaagaatcagcctcttggcctaaactgaaaattagtttcattaccatatgcaggaaggataaatattgctgcctagtttcagtaattctatccagacatgcctgtgagctcccagaaactgacaagacactcagataatttaatgcaagtgcccccaaaccgttgaaaaaatagccttttttttttttgagacagggtctcactctgttgcccaggcttaagggcagtggtgcgggtcccagctcactgcagccttaaccttgccagctcaagtgatcctcccacctcagcctcccaggtagttgggaccacaggcgtgcaccactgtgtctggaattggtgggttcttggtctcagggacttcaagaatgaacccgcggaccctcccggtgagtattacagttcttgaaagcagcatgtctggagtttgttccttctgatgtgttagaagtttgttccttctggttggttcgtggtctcgctagcacagtactgaagctgcagaccttcgaagtgagtgtgagagctcttaaggcagtgcgtctggagttgttcattcctcccggtgggttcgtggtctcgatggcttcacgagtgaagctgcagaccttcgcgatgagcgtttcacggtgggcgttacagctcataaacgcagtgtgacccaaagagtgagcagtaccaggatttattgcaaacacctaaagaactgtgcggaacgggacccccaccgaggtgccaaggcgtgctctggcagcctgctttattctcttatctggccccacccacatcctgctgattggtccattttacagagagccaattggtctgttttacagagagctgattggtccgttttgagaggctgctgattggtgcgtttacaatccctgagatagacacaaaagttctccatgtccccactagattagctaggtacagagtgctgattggtgtatttacaaagcctgagctagacccagagtgctgattggtgcatttacaaaccttgagctagatactgagagccaattagtgtattcacaatcccttagctagacataaaggttctccaagtcctcactagactcaggagcccagcaggcttcacccagtggatcgcgcactaggggcgcaggcggagc

SEQ ID NO: 23199 - DNA, 1165 bp, Artificial sequence
  DNA replication origin
ccgccgcgcgccactcacttgttggccggagcggggcttgccctggggcgctctcctgaagaaggaggtcctggcggtgaagaagaagtcctcggcgtcctcctccaggctgctgtagccgctgctcatgctgccggtcccgtcgcgcgcgggcggcctccccggggcgcaggcggccagggagggggtgcggcgcccgccagccccgcgaggttcccggcgcgcagccccgggcagtccttatgcagctgcggccgccgctcaatcaggctctcccggcccctcctgccgcctccccgccaggctccaggcgcggctcggccccggtgcgcccgcgaccccgcctccctgggccccgccccggacgggcgaccggccgagccccaccccgcgcggccgcgaccctccccgcccgcccgcaggtggggggagcccggcccgccccttccaggcgcgcgggtttctcccgacagcgtcgcggaacccggaaagccgggcgctagggctgcgtctgctggggctgtgctcgggtcgcttcctcaacctcccggaaactgcaaattcctctgcgagccgtccgcccgcccccagcctcgctggctcgagtttcggagagggcgggagcagagcggggaactttctctgcgtccactccctgctcgcccccgcaccagggtcctgtaggggtgggtgggggttgcccggccgagggaccccccaggtcccacggcttcctgcagccgcaacgcccagtcctgaaccccagcagctcgcccctccaggaggatttcaagttggcagagatgggtggggaggtcaaaaactgggttgagtttattcgaatgaaaacatcctttctggtcattcatttgagcttcggtcttacccttttccccttctttctagcgagggctcacttccaaataagatcgttatcttaggcgcactcagtgcaactgaaaggtgaactagttctatagttacagaacaatcgagtgcttatcaattaaatgtgctttgtaaatgtccccgccacaatcagccttccacggtcacccacaaggcatggtttaagtggtggggataaggagatcagggaattccatccatccacgtacaaaaaaagtttccatgttttctaaaactcttcagtcagctaatcctc

SEQ ID NO: 23200 - DNA, 929 bp, Artificial sequence
  DNA replication origin
ccggggaggccgcccgcgcgcgacgggaccggcagcatgagcagcggctacagcagcctggaggaggacgccgaggacttcttcttcaccgccaggacctccttcttcaggagagcgccccagggcaagccccgctccggccaacaagtgagtggcgcgcggcgggcgctgcagcccgcgccccagagttccggggaacccgccagcccgcgccccctgcctccacgtgtctctgcggggcgctcgggggatgctcgccgggaaggaggagcgggccgagaagtggcttctgccttttcgggtcccgggaacgtgcctggagcttgtgcgtgtaggcgagggaaggcggaggaagggcggggaggctgagggccggcttctgccttccgcgccagatggcctctgcagctccgcctcgggctgccgcctgcggggagcagccccggagccagcaggcgtccccgggccactcccccaggtttccccttcgcgtccccgctgggtcgacggtcgggttcgcgcgcctgtccttcctgttagtcagcttactcatctgtggcccccagagtggcttgggtcaacgtgtaatagctaggggtggccgggtgacctgacctcccctcttcctggcccgggcgacctggtggagtgggggtccaagggcaccgtgggcctcgccaccataggctctcactaaatctccgttgcgggactcagggttgtgcgttttctgtaaagctaggttttttggtgcccagatgttttgcaaacaagctcctatgctaaatactagccagcgacagctaaccttttcgccggtttcttccttttttggaggcagcatgccgtgggaagcacgagttgggaaaagatgggaagggaacttgtgccagtttcgccagctgtagccgtgttttttgggaggcctt

SEQ ID NO: 23201 - DNA, 973 bp, Artificial sequence
  DNA replication origin
ctgtccttcctgttagtcagcttactcatctgtggcccccagagtggcttgggtcaacgtgtaatagctaggggtggccgggtgacctgacctcccctcttcctggcccgggcgacctggtggagtgggggtccaagggcaccgtgggcctcgccaccataggctctcactaaatctccgttgcgggactcagggttgtgcgttttctgtaaagctaggttttttggtgcccagatgttttgcaaacaagctcctatgctaaatactagccagcgacagctaaccttttcgccggtttcttccttttttggaggcagcatgccgtgggaagcacgagttgggaaaagatgggaagggaacttgtgccagtttcgccagctgtagccgtgttttttgggaggccttcccgaaacggggcacgtcggctggactgaggagcccggtgctagagcccgcggcctcctggcactaggagccgcaccaggggagccgggccaacccggccacgctcacatcagattacagaagattgtaatggcacaaatttgttgcttttagaaaacaggcgttcgccaaacatttctattaataccggactgagacctagagactagaagcaagaagaatcgttcaggggccggatgataacttcttttggtggatgtgggagggtgcaatctgtcagggtggtcttgccagacctcttaagtttagccactttctgaagtaaaattctttctaaaattcggaagttctagtcttttcaggctcttaagtcccaaaccaggaggaggagaggagacggtgaagggtaagctgaagtcaagtgcccttattcagtaaccgcagttaatctcaagtcccggtgccatagttgtccgtcttgtattgtttctaaggcttaaggccccactatttacgagtcactttgagtgggatctcttactttcagcagagtgtgttctgagagcat

SEQ ID NO: 23202 - DNA, 955 bp, Artificial sequence
  DNA replication origin
ctcgccgggctccgtgtcctcatcgccgtcccacgtgtcccgggagcgccgcggccgctccgccgctccccggaggcgcggggctgggggagctgcaggaatcgtttcttcctcctgactctccagcctcgcctcgccaccgccgccgcggaattccagctccgtccggagccccgggcggcccccgccggtgggaaggacgtccatggtccccggcgcgcggctgcccggctcccgctgctcctcccgcctcgcggcgccggccagttccgggaggaggcgcggcttcgtcctcgccggtggtgccctcccgggcgcggcgccagcgggctctggatccccgaggtgcccgggcctcccccgagccggcacctgagccgctcccctccgctccggaccgggcgagaaggagactgccacgccactgagctacctggggccacctgctgcccgggcccggcctctacccagagcgctctcccgtgcgcgagaaggcgcaggacgtggccagaacaccgttgggaagaagccagcagcacggagggggagggcgctgaggccgccgccaccttcacttttaattaagcacgtgatttaactcaaaaagagggtgactcttgcctcttattcagccgccagctagaaataatgcccaggagggttctaaacgcccatcaataggcccaggccaggagctccttcttgacatactcggaacacaataccagcccttctcactttcccacctgatctgagcgccttcaaaagccttcttagtttagtctctgacaataagctttctaaaactctgaacacctggcaaatatctgggacttaataacgctgtgaacttttttcctccagtgaaaaccaaagcactggattaaaatcaactaattccctgatacaagatgtaaccagagtgagggtttaataaatgttcttgagatgaccg

SEQ ID NO: 23203 - DNA, 1068 bp, Artificial sequence
  DNA replication origin
tggcgaggcgaggctggagagtcaggaggaagaaacgattcctgcagctcccccagccccgcgcctccggggagcggcggagcggccgcggcgctcccgggacacgtgggacggcgatgaggacacggagcccggcgaggcgtgcggcggccgcacaagccgcacggcgtccctggtgagcgggctgctcaacgagctgtacagctgcacagaggaggaggaggcggcgggcgggggccgcggggccgagggccgccggcggcgccgcgacagcctcgacagctccaccgaggcctcgggctccgacgtggtcctgggcggccgcagcggtgccggcgactcccgcgtgctgcaggagctgcaggagcgaccgagccagcggcatcagatgctgtacctgcggcagaaaggtgagggccgggcgcagcagggtcccgggggcttcctggagccgggttgtcctcgccgtctctgcccgcgctccagcgcgcacctgggctgctcggcggagcgctcagatactgtctctttggatctgacggtggtacccaccgtggcacagatttatgtccacacttagttcttaagttctccggagtaattgaatcaagcgtcagttgatggagtgggcagtttccccgctcttccctcctcccatctcccggtgtgttcgcggaggccccaggggagaggcagcccagattctaatttcacctgaacagctgttaggacagggttggaggttctgatacgtatacctgacctacctagagggcgccgccagaatcgaggcgagtcgtagggctgttctttcctttttttttttttgtttttttgtttttaaagtccgccttctctggtcacaccacttagtgtttaactagtgaggcagaataattcgataatgcggtttcgaagcagagcgtgtgaattctatttctgccagagcgtacggttccaggcagctcactaggaatttttgttgttgttgttttgttttctttttttccttctcggtggcaggttagtggagggccctagagtgttgaggtttattacagaatttaa

SEQ ID NO: 23204 - DNA, 884 bp, Artificial sequence
  DNA replication origin
acaagctgaccgggtctctgaggcgcggggggagatgcctgaagcggcagggcggcggcgtgggcaccatcctgagcaatgtgctcaagaagcgcagctgcatttcccggaccgcgccccggctgctgtgcaccctggagccgggtgaggaccccagggctgcagatggggcgctgtaaagtagcgccggggctgcccgcgcttctgccttagcctgactccgtctaggccggggagctctggggaaagtccgcgtgccacctggtgcggggcaccgcgttggcacctgcagggagcgattggtctggaagggtagagggcagacgggggcctgggtggggcagcggccaccccaggcgcggagaacccgctgcttccaccctctccccgcggacccccaccctgcggcctgtgtgctcggctttctccgcgtggcggggaagtgcgggtggctgcccgggccctcagaggccgcaccacctattgtgttccaggctcgcaggaagccagaccttgcgagaggtgtgtgggggcggagagtggcacaggtttgacactgcaggtcggaggaggaagacagtggctgcaaaggcaaaatcgggtgttattttcccaagagtcccttcagcgtgagtgccggggtcagctcgaactggagcctgtaatttgtgagtgcgagtggggagcagcaggagatccttttcataggtgaggtccaggaacgagcctggtcgtgctaggcaaggcccttcccactgtcagcctgtgtttacccatccctgcttctccagactgcataactccgtgtcggctccatcacccggcatccctccccgggattttaagagcctggccctagcgcgggctcctgggcacggaggttt

SEQ ID NO: 23205 - DNA, 1013 bp, Artificial sequence
  DNA replication origin
ctcgtgccgcacctacgcaacctggcgccgtcagatactctgctgcgctgcagctccctcagccagggctgttcccgtttagacggctgggcgcgtcgcctcccggcctgggtgccaaggagcctgcgagagcaggaggagggggcaggcaggacgcgggaggaggagggggggaccagcgggcgcgagtcgcgcaagaagatggggcgcgggcgggagtgggggcggcagagacgtaagactggcaaagctggcgaggccagcagtcagcggggcaaatagagcgagaacagaagagcgggaagggctggcgcgagcgaggtgcgagcgaggagtggggcccgcgaggcctgggcggccgccacttgggggcgctgtggggcccccccgggggcggggccgcgagggacccccgaggctgcattcacagtgcggtgcgcccagtggagcgcccgcgaagtgggcgtgtagggctggcggacccggagaagggcactcagagacccctgggacatcactcgccacctcctcgggccaagggaggcttcgggggagggaaatggggagagcagacaacgctgggcttgactgagtgctgatgatggtgatggtgatggtgatgatgatgatgatgatgatgatgaggtgatgactcctgttcctcctccggcgctcactgaaggcgcaaattgcccttcgtctccctttcagccagtaggattcctctctccgccaaccctatgcgctccgttctgcgataggctggcactttgcgcgctcccaagcagttaaaactcgaggctcgactgtccgatggtgccgatggcaggcgctggccttggctcgaggcgcagggcgtccagctggtacttgcccgacacccagcatttggggattcccgtctgtctccctgataacccggcagtgcccggaagagtgccctgggccctggacgatagctgtacctgaccctccggggtagggctcctctaacatcgtggatatcttcacgt

SEQ ID NO: 23206 - DNA, 1447 bp, Artificial sequence
  DNA replication origin
cgagaggaagagcagcaacagcaccggtcagggggccgcggcaacaagacgcggaacagtaataacaataacacggcagccgccacggtcgcagccgcgggaccagcggcggcggcggccgcggggatgggggtccggccggtctcgggcgacctctcctacttacggactcctgggggcctgtgccgaatctcggcctctggcccagagagcctcctgggagggcccgggggcgcctccgccgcccccgcggctggcagcaaagtgctgctgggcttcagctcggacgagtcggacgtggaggccagtccccgggaccaggccggcggcggcgggaggaaagaccgggcttcgctccagtaccgcgggctcaaagcgccgccggcgcccctggccgccagcgaggtgactaacagcaactctgcagagcgaaggaagccccactcgtggtggggggccaggaggccggcgggccccgagctgcagaccccgccggggaaagatggagcagtggaggacgaggaaggggagggagaggacggtgaggagagggacccggagaccgaggagccgctctgggcgagccggaccgtgaatggcagccggcttgtcccctacagctgccgggaaaactattcggactcagaggaagaggacgacgacgacgtggcctccagcagacaggtattaaaggacgactccctttcccggcatcggcccagacgaacccatagtaagcctctccccccgctgactgctaaatcggccggcggcaggctggagacttcagttcagggagggggaggactcgcgatgaatgacagggcggcggctgccgggagtctagacaggagccgaaacctcgaagaggcggcggccgcggagcagggaggagggtgtgatcaagtggactccagccccgttcctagataccgtgttaacgctaagaaactgacccctctcctgcccccgccacttactgacatggactcaaccttggattcgtcaacaggctcccttctgaaaaccaataatcatattggcggtggggccttcagtgtggactcccccaggatttattctaacagtctccctcccagtgcggcggtggccgcctctagttcactcaggatcaatcacgccaatcatacgggctccaatcatacctacctgaaaaacacatacaacaaaccgaagctttccgaacccgaagaggaacttctccagcaatttaaacgggaggaggtgtccccaacagggagtttcagtgcccactacttgtcgatgtttctcttaactgctgcctgcttatttttcctaatactgggactgacttacctaggaatgagagggacaggagtatctgaggatggagaactcagcagtaagtattaaatcctgtgggtaaggtaacaaagagaatgttgttagtggtccgctttagccg

SEQ ID NO: 23207 - DNA, 945 bp, Artificial sequence
  DNA replication origin
cggactgcgcacttcccagagccgcggccaggcagaggcagaggcagagggagaggcagagcgagagggggcgcgggagggtccgccgcgggctcatggaaaggccaggcagccgccgccggtgtccgaacctcgctccctccctccccggctccgggcgacggacggggcggcgggaggcatgacgggaaattcctgggcacgggcagccgagtccaaatatgagcataggagacgagcgagggaggaccacggagcgcgccggccgcggacggggcccgctgcccggggctcggcggccgccaactccctcctcctctgccctgtcctcttcctcctcctcctcctcctctgcaccgtcctcctcctcctccttctctgccctgccctcctgctcctctcctccccctcgtcctcctctgccccagggctgccggccgccttctgcctgggggcatccctttccaactcgggaccccagaacacagccaagcgcccacctggcgtgttccacctgagaccgctgaaggagtgggaaacggacaaaccaacacgaagagaccggacagcgagccagggacctgtgggaagacgtgtcaggggttgttgagagcgttggtggtgaggggataaaaagttgtgggagagtgaggcaggagcagggctgccagttagttacttggccatcctatacatacagaacgagcactcactgtaatacggagaaccagccgcctgcgttccaggtgagcgggccctctctagcagaggagggtgagtgtgtgtgtgttcttggccaaaattgcaaaggtgctcgtcccaaacttatatttgaacaccatatatggagcccaggcaggctggctgaacagtagtttttcacaacaaaatgcttaagtttacaccggtctttctctccacctccaatctctattcatgtccacc

SEQ ID NO: 23208 - DNA, 1166 bp, Artificial sequence
  DNA replication origin
gcaccgcgcctcctagggtggcgggagcaggcagcggcggcaccggagagtcggagggggacgggctgctagctcctgagtcttgcaccaagcgcgcgctgcccgggctggaagttttctgagttcctgccccaagattcaagtgggatgagtgtgtgtgagtgtgtgtgagtgtgagtgtgtgtggtgtgtgtgcgtgcacgcgcttgcgcttggggagggggtggtggtggggggagtgcccacctctaatcgtgggcggataaaggggagggggttgcgcaggaagaaaagtatgaggaggagggaggccaggcggaccgccgagccaaggcgcctggctgctagccagaggcagcgttcgaaatacaactgcctcggcggcggcggcgcccgggtgccacccggagccccgctcacgtgctcccgcccggcggcggggttaaagggacaggccggggatcccgggctggctcgccgtgggcctagctccacccgcctctcgaggtcacccctgggcagttgtcctgggaaggcgcgggaacgtgactgtcccggagccacgtttcggggcttggcctttacctgcgcctctaccgtgccgagccaacactttgcaggaagcgtctaggctgcacctcaggcagcgcaccggttcactgtgagtgggaagggactgcagtggagtgggagaggtcccctgacagccgtactccgcctcggaatgccctcaccacagagcctgcgggcgggcgagcgcgcacatacacggagacatgcatgcagatacacacgaacacgcgtgtaagcacatgcacgcagatacacgtggacacgggggcattcatgcgctggtaaacacccgcatttacacacacacacatacacacaggcacgcagatagacatgcacattcgcagacacatgcaaacaatgtgcacacacagagcgccccagcttcttcattgaacttttttctccaggaaagactagaggcaaccgaagttccctccccatccccctccccgggaatccgatgttcccagggtaaagggcaccttgtagattcctaacaccacaattgcactcactgcccaactctcccttcagtttacctcgatttaaccttctgcctgagaactctctttctgccaagtcctaatttt

SEQ ID NO: 23209 - DNA, 1349 bp, Artificial sequence
  DNA replication origin
aggacgcgcttcgcccgaccccacctcccgccttccccgggccgcccgccgcggctccccacctccccgcccggagggttgctggcgccccggggccgcgcggcgcactcgtggggtctgcgccgctccccccggccggccggcgggcagtgtgcgacggccgcggcgactgggctcccgcactccggccgccccgcgcgtgtctgggccccggcagtggggacggggtgggctggtgcccccaccgcgccctcgtactgacttgctgctgcttcctggggcggccgcgtcctctcttctgaggcgctggggcggcaggttgtccctgggctgaagtggacggctgccccgcgccctcaccgcgtgcgctcatcctgcctcccgccgccgctaccgccgctgcagccgcttcgcctcgaccgccccggagctgcccagcacctttcgggagatgaggtgatagggctggggacgccggcggggcgagcgcgagctggcgggctgcgagggctgctgttgcttaggctgccgccgctgccaccatcaacaccggacgtccagcggctgccaaaaagagaagaggggaggaggaggaggagaggaggaggcgctgccggtggcggcggcggcggtgggtgggtgccggaggtggaggtggcggtggaggtggaggtagcaagaggaggagggaagcgagggagaaggaagagaggctttgaggtcgcagaggctcctctcgcgggttgggatcaggagttgcgggcaccgggagcacttcggaagcggcttggaaagggaagagacttggagtgaattgtgtcccttgaaatgttaggcggggaaagaattcctcctcctcttccccccaccctgcgagagagagagagagagagagagagagagagagagagagagagagagagagagagaagagattgagattgaaagtgccttgggcagtcggaaagcaaaggaggatggggagactccgccgggatagggtcgggcacggagcacaggcagaggacagagtagtgggtggcaccgcgcctcctagggtggcgggagcaggcagcggcggcaccggagagtcggagggggacgggctgctagctcctgagtcttgcaccaagcgcgcgctgcccgggctggaagttttctgagttcctgccccaagattcaagtgggatgagtgtgtgtgagtgtgtgtgagtgtgagtgtgtgtggtgtgtgtgcgtgcacgcgcttgcgcttggggagggggtggtggtggggggagtgcccacctctaatcgtgggcggataaaggggagggggttgcgcaggaagaaaagtatgaggaggaggg

SEQ ID NO: 23210 - DNA, 1263 bp, Artificial sequence
  DNA replication origin
gcgcagaccccacgagtgcgccgcgcggccccggggcgccagcaaccctccgggcggggaggtggggagccgcggcgggcggcccggggaaggcgggaggtggggtcgggcgaagcgcgtcctcggactttcgctattgtgcacggccccgagtggcgcggtgtcgcccagtgactggaagcgaccgggatccgacaaacccgggctcgcaggcgctttccgagttgcttttgcaactgcccgggaggaaggaggtgccggggacccgggcgcttcggccgatctgggctgaaggggctagagtcttgggggccggaggctctttctcccgcctcccggggctgctcgcgggtcgggggctggcgcgccgcagccgcccccttggcgccctcctccaagctctcggtggcccaagactcgcgccctcccgacaaagaacgcatggagacccggctgcctggtcctttttgggctctttaaatatgcggcggccgccggagggagcccggggcaggggctacggggagcctggttccccgcaggacggggttaactcgcccagctaagggcgcgttgaaaggagtgtccaagagagtgcagggtagccagggtcgcttccttgtcaggggcccggtcccccttttgcccctggatctcgcgcctcagagctgcagccattaaatgctcttctccaaggccagtggccgggggttgagtaggggacgatcgaggggcgcccgggaccctgcggagtggagggttttgtctgcggatgcaaccaattaagcgtgcagccggcgcttgcagagctgcgctcagcgcgcagggctgggggttttgttcgctgtaatttccaagccgcggcgggcagagttggagcgggatatgtctattgagaacatttaaactccactttctcgggctttaaaacttgctctctgcttagtcttaaatcgcttccttcatggcaaacacgccgattagaaaataatcctagagtcccaaagttgtccgagagcaaggtggggaaactgaacaatgtttgcttgccagtgcattttagaaaaattgagagttgtacctttttgaaatcatcaaaggaaacaagccgatctagaggcccctgagttttcccgctctgcccaagcgacactttacaccgcatttgaatcctgttttacacctcccaggaagtctctgccctcccccacttgtttcccacccgccacccagttctaactcactaattgccccccctccaaa

SEQ ID NO: 23211 - DNA, 1316 bp, Artificial sequence
  DNA replication origin
ggccgggcaaaggggctcctcacttcccagtaggggcggccgggcagaggcgcccctcacctcccagacggggcagctggccgggcggagggctgacccccccacctccctcctggacagggcggctggctgggcagggggctgacccccccacctccctcccggacggggcggctggccgggcagaggggctcctcacttcccagtaggggcggccgggcagaggcgcccctcacctcccagacggggcggctggccgggcggagggctgacccccccacctccctcccggacagggcagctggccaggctgaggggctcctcacttcccagtaggggtggccgggcagaggcgcccctcacctcccggacggggcggctggccgggcggggggctgacccccgacctccctcccggatggggcggctggccgggcaggggctgacccccccacctccctcccggacggggtggctgccgggcagagacgctcctcacttcccagatggggtggctgccgggcggagaggctcctcacttctcagacggggcagctgccgggcggaggggctcctcacttctcagacggggtggttgccaggcagagggtctcctcacttctcacacggggcggccgggcagagacgctcctcacctcccagacggggtctcggccgggcagaggcactcctcacatcccagatggggcggcggggcagaggcgctccccacatctcagacgatgggcggccgggcagagacgctcctcacttcctagatgtgatggcggctgggaagaggcgctcctcacttcctagatgggatggcggccgggcgcagacgctcctcactttccagactgggcagccaggcagagaggctcctcacatcccagacgatgggcagccaggcagagacgctcctcacttcccagacggggtggcggccgggcagaggctgcaatctcggcaccgtgggaggccaaggcaggcggctgggaggtgtaggccgtagcgagccgagatcacgccactgcactccagtctgggcaccattgagcactgagtgaacgagactccgtctgcaatcctggcacctcgggaggccaaggctggcggatcactcgcggtcaggggctggagaccggcccggccaacacagcgaaaccccgtctccaccaagaccagtcaggtgtggcggcgcgtgcctgcaatcgcaggcactcggcaggctgaggcaggagaatcaggcagggaggttgcagtgagccgagatggcagcagtacagtccagcttcggctccgcatgagaggga

SEQ ID NO: 23212 - DNA, 944 bp, Artificial sequence
  DNA replication origin
ccgcccctactgggaagtgaggagcccctctgcccggccagccgccccgtccgggagggaggtgggggggtcagccccctgcccagccagccgccctgtccaggagggaggtgggggggtcagccctccgcccggccagctgccccgtctgggaggtgaggggcgcctctgcccggccgcccctactgggaagtgaggagcccctttgcccggccagccgcccagtctgggagggaggtgggggggtcagccccctgcccggccagctgccccgtccgggaggtgaggggcacctctgcccggccgcccctactgggaagtgaggagcccctctgcccggccagctgccccgtctgggagggaggtgggggggggtcagcccccccgcccggccagctgccccgtccgggaggtgaggggcgcctctgcccggccgcccctactgggaagtgaggagcccctctgcccagccaccaccccgtctgggaggtgtgcccaacagctcattgagaacgggccatgatgacaatggcggttttgtggaatagaaaagggggaaaggtggggaaaagattgagaaatcggatggttgctgtgtctgtgtagaaagaagtagacatgggagacttttcattttgttctgcactaagaaaaattcttctgccttgggatcctgttgatctgtgaccttacccccaaccctgtgctctctgaaacatgtgctgtgtccactcagggttaaatggattaagggcggtgcaagatgtgctttgttaaacagatgcttgaaggcagcatgctcgttaagagtcatcaccaatccctaatctcaagtaatcagggacacaaacactgcggaaggctgcagggtcctctgcctaggaaaaccagagacctttgttcacttgtttatctgctgaccttccctccactattgtcccatg

SEQ ID NO: 23213 - DNA, 900 bp, Artificial sequence
  DNA replication origin
tgcaacctccaccttccagccgcctgccttggcctcccaaagtgctaagatgacagcctctgcccggccgccaccccgtctgggaactggggagcatctctgcctggccgcccatcgtctgggatgtggggagcccctctgcccggctgccccgtctgggaagtgaggagcgcctctgcctggcggcccttcgtctgggaggtggggagcgcctctgcccggccgccccgtctgggaggtgaggggcgtctatgcccggccgccccatctgggaggtgaggagcgcctctgcctggctgcccatcgtctgggaggtgaggagggcctctgcccggccgccaccccttctgggaagtgaggtgcgcctctgcctggccggccgccccgtctgggaattgaggagcgcctctgcccggccgcctggtctgggaagtgtacccaacagctccgaagagacagccaccatcaagaacgggccatgatgacgatggcggttttgtcctaaagaaaagggggaaatgtggggaaaagaaagagagatcagattgttaccatgtctgtgtagaaagaagtagacataggagacaccattttgttctgtactaagaaaaagtcttctgccttgggatgctgttaatctataaccttacccccaaacccctgctctctgaaacacgtgctgtgtcaactcagggttaaatggattaagggcggtgcaagatgtgctttgttaaacagatgcttgaaggccgcatgctcgttaagagtcatcaccactccctaatctcaagtacccagggacacaaacacggctgaaggccgcagggacctctgcctaggaaaaccagagacctttattcacgtgtttatctgctgaccttctctccactactatcctat

SEQ ID NO: 23214 - DNA, 1074 bp, Artificial sequence
  DNA replication origin
ttatatactatacgctactttaatttggtcttttccacttaatctcactttatatacattgttccatgctatttcatactatttaaaaacataacttaataatatcggaggacgcggcggcgctgctcctccgctgccgccgggagagtcggcgacgccgccagctccgcgcgcgaactcccgtccatggcacgcagagcggcggctgcccgagctgctcgagtctcgccccgcgccgcgccgcacttttagacgagtgcggaggggaagtcagcgcggagctgcagcccccgccggccgccgccgcgcggcgagagggagttcccaaagctgcctcggcccggggcccggccggccccctccttgcgtcctccccctcgcggcgaggctgccccgcgcccaggctgccccgcgcccgcgcccgccgccgcggcccgcagcgatgatcttccccagcagcagcggcaaccccgggggcagcagcaactgccggacgccctatcgcaagcagcagtctctggtcccagcccaccccatggcccctcccagtcccagcaccaccagcagtaataacaacagtagcagcagcagcaactcaggatgggatcagctcagcaaaacgaacctctatatccgaggactgcctccccacaccaccgaccaggacctggtgaagctctgtcaaccatatgggaaaatagtctccacaaacgcaattttgcataagacaacgaacaaatgcaaaggttatggttttgtcgactttgacagccctgcagcagctcaaaaagctgtgtctgccctgaaggccagtggggttcaagctcaaatggcaaagcaacaggaacaagatcctaccaacctctacatttctaatttgccactctccatggataagcaagaactagaaaatatgctcaaaccatttggacaagttatttctacaaggatactacgtgatgccagtggtacaagtcgtggtgttggctttgctaggacggaatcaacagaaaaatgtgaagctgttactggtcattttaatggaaaatttattaagacaccaccaggagtttc

SEQ ID NO: 23215 - DNA, 1715 bp, Artificial sequence
  DNA replication origin
ccgccggcgagtttgaggggagcgcggggcgcgcggcgccgcttcaatgtgcccgggagccgcctcggcgccccagccccgctgaacagccccggcgcggctgccctagaggacgagcgaggaggcgcggagagccccggagaaagagagccagcgagaaagagcgagcccgacagcgagcgcagggagcgacaccatgcccggctggaagaagaatatccctatctgcttgcaggcagaggagcaggagagaggtgagccaggcggcggggccggggagggagggcaggggtccgggccggggccgcccggtgcctccctctccccggctccctcccgacccgtccacccgccgacgggggaggggcgccgcgccctcagggcccgcgggcgaatccaggtggcgtcttgcgaactctgattcattttttttgcgggggggggggggggcgggatgagagggcagcgggagaggggtggtgctgcagcagggaacttttcgcttggggaaagattttttctggcgaggatgtaggggaaactccagcttctgcagggcccgctcgcacgtggagctccgagcggccgtctgtggggtgggtgctggggggtgatggtgggcatggaggggggttcctgcagtgctttaagtgacttttcaaactttcctccacctcccgcggccaccctcgcgttgtccccgcctctggctgggctgcgacggcattgccaacccaaagttgctggagattcataaagaaggaagaggagaaggaagagcgtaggggaggcaagggggcgctgccgcaggtctctagaaggggagaggaggggaaagattgtcccctcgatcagggtctggggctgggagtgactgcttggagatgagttatgccccagcgcagtccccgctgtcagtttaataccgcaggactgcgggcttttcttaattactgtctattttctttgcaaaaggcggctctctgcctggtgccttgcagcccttttgtgcttcagcttgacaagtgtgctggacactttgcttttaagtaacttgcggagaggaaagttgaaggccttttgcaccttcaaggcttagttctgttgaggtcatttcatggtgtttggatggtgcagaggttggccagggagttcagcttggtaacctggatatgatgtactgagtgcaccagaatttcctatacaggccccatggggctagagggatgtgcacggtggctctgctagcatccagaggaacgctggctggcaaggtccaccagggtttatccctttgcttcttctatcctgtcctgtcctgtcttcgaggaaggtgctttggaaccggataggtttcaggatgcaggggctccatgggctgtgggaaacagccggtgctgaggttaagcggcgcagcgtgggtaggtgggcgaggaaagccagaggaggccggccagtctggtgtgtggagaaggcagtgttgtcaagggggcttaatgcagcagtttggtgagctggtatggacggtggcttggttattgggcatgttaaaagtttcaagcttttgaataacacttactactgaagaaccaatgtacaatttccagtttttctctaggtggcacaacctgtctttggtttgtatcctgtttaatgactcagggaattcatccctttttaagcacctccttattagatatgtgcattcattttcc

SEQ ID NO: 23216 - DNA, 1330 bp, Artificial sequence
  DNA replication origin
cggccgggccgggccgggccgggccccgccgggcaaggctgggggctgcagcggcggctgccgcggtgtggccgggaggccgggccgggccgggggcggggagctggtgcaggccgagagcggggggctgcggagcccccgggagtgggcgccggcgagaggagtgggctggcgccgccgcctctttcccctcctcctcctccttcttcctcttccttgtctctccgccgccagcaggtgggactcggagccgccgccgcacaaagctccgccggcggcaggactgaggctgcgggctccccgggcgcctctcggcggagcctcccccgagacgcgcgcgaggctgagcgggcacggagggggcgcgcgcgctcacaccctccgcgccccgggcggcctgcgaggcgcgcccggcctgccaggtaccgagcctggcaccgagctgctggtgcggagcccacgccgctccaccgcggccgccactccctctccgcctccctccccgagcccaaactggcggctcctccggcttaggcgacgacctcggtggagtaaggggcagtgtccttccctctagtccctcctccgcgccgctctccctacgccctggctgtcgccccctcccccaagttgagacttgcagctacggatttgctaacttcgccctcaactgagggaaatagcaacttttgggatggtcagcgctggtcccaggaatacgtttcctggcagggtggggagggcgtgaatggagactctcttttgttttaaatgatgcagggagaccttggctgagtgaatatgtaatcgctgtcttcaagcataggaagggctttatgatcaggttttatgattagtttcttccccttgtcataggctcatagaaaatcggtggaaaaatgagtcaggtgggagggagacagctttgtgatacagcctggaagattctgcccagacatgggactcttgcttgtggtttcaaaacggtaatgctaggaggggctcctgacagtgttccaggtgacattcggtgactgtcctgtggagtatgacatctgcctctgcctcaaggctgggggctggctagaaaatacctgtctgtccctccggagtatctgatgtggaccgaagaatttagggcccctgaggctgtaactactggtttgtggttgttggggcccaaccactgcactgctatgaatgactcggtgtcctgcagtttattttggcctctgaaggaactgcagtttgctctcccgaattgaggacattggctcacactggccttctctccctctcctcttggaaacatagtaatactgccagagaa

SEQ ID NO: 23217 - DNA, 1501 bp, Artificial sequence
  DNA replication origin
gggcctagagaccgcggcgggcaactgcctaggagaaagaatggggggagggggttgcaagaggggagaggaaaggggctccgcagggatcgggaggccagcggaccggtgggctggagacttcggggcagagaagctaccggctacggccgaaggggtggggcaaggcctgcgtgacggccagggccgcggctgcgagaaccccgaggtggggtgagggtcggatctcggcctcacctaaagtccttgtcgctggatgtcattttttccagcaaattggaaatgtggtacgaggcgctcgccatgttgacggcctcgatcccgcctgctggcgctgctggagctgctgcccgctgccgctgccgccgccgccgccgccactggagctcctcctctcgctcgcggcggctcccgcttccagggtcgcagcgcgacgccgacgctgactagggaggcgcctcgacgggctgccccctccctggcgaggcgtgggcctgtcccggggtaagccgaggctacagagccagcctaacgacggcgctgttcgcgtgagaacgagctcatgggcggcggggcgtacagaagggcctctacggggagccagacacttccactcagggccgtctcgctcccactcgctccgcactcgctccctagggcaaaaggccaaagcccgcctccttcgctccgggggcgggggcggcagacgcgggcgctacggaaagctaaggtcagagttcacggaggcctccccacgcacgctgtggagaagagagttaaaaaacaattcggttggctgaagcctgtgtcagttttcatgtgacccgccttttggaggcatgacaacacaaaaaaaaggggctgttctcgcgagactctaaagcgacggttaagggacaggggacgagtggagcaagtgggccttaatctgaaaataacttgattgtttaatgacattaagagaaaaagattacgagctttgagaaggaggaagcctgggagtaacgacagttaaggagttagcttgcggaaccaacataagaatttataacagggaggtgtcgtttgggatcagacgcgtggcctgcattgccgtagccaccgtggtgtaatgttgccacgtaaaaaccacaaatcccagaattcagtcgggtgatacactggctcagaatgtgattggctgcgggaactagtagcttcctcattggctcccgtggaaggagtgaatgctgggatttgcagtctgatgggggagccgtgctgggtaaaaaccttagaatcgtcgcgcactccgtttctgccgcggattcttatattctccaatacaggctttttctgttatgcagtatttgcagagcaggctgctgcagtttggccaggcgcattgcggatcagttggtgttcttgccagaggcctagcagcagcttcctagcgctactacttgcacctcccaaggcagctgagcctccccacttctctggccagacacactcctaccgt

SEQ ID NO: 23218 - DNA, 1381 bp, Artificial sequence
  DNA replication origin
ggagggacgtaatactagggaaaattctttttgtcacaggttccctctcccagtgaccctaacttggaggcctctttaggagtcccagagactctgagagggtcacactgtaccttgaaacagtttttggcgtttgtataaagctgcggatgcgctctgtaggaggttgctatgacaatttgcaaacagtagagtggatgaaactccgcaggaggtggctcccttccgactggagtctgcactagttcgggcctgcacagtaggtccagccaggagccagagatactcgggcggggcagagcataatggacccctggccccaagagaacttcagaaactaggcacctctcgagaaggaagtgcatggcataactctgccccgtcatccgggatttgtcgggctttcccaccccacctcctctcacagttgaagtggcaaaacctgtgacctttgaacagaggcgcactgtgtgccacgcacgacgaggcgcggatgtgagacgggaaagcaatttttttttggtcttcaaggaaaagagaggttgtatatggcgaataaaaaaggcagggaaattctccacgtgtcttggaagggaagggggaaagagatgtgtcgggtggggtgagaggaattcgaggtgtcgctccctcaccgcagagctgaaaggaaggtgtgtctctcccagtggccgcgcaggggaaaggctcggagttgtaaggaaataggagatgtctctgatgtttatttttgcctagcaacccacagccaactgcttccccagctgccgtccacacgcgcctctctgcctccccttgtcctagcgactggcgagcggtcacttggtgtcagtaaaccggggagggtgtgtggtggaggtgggagggcagccccctctttcgcccctgctcagggtcaacgagctcagcggccgcccctcccgggacttgcctctccgaggtgaccctcgcacaactaagttatctacatgatgaattggggagaggggagtggctaagtcgctgggaccaagaatggggggacggggaagcagtactgtctgtgagcagccattcagttcgaagagctgaaaatgcatttatgtttaggggtgcgcatggcaggggaggggtctctgcggcgctttcggccggagggcagcagcggtaggttgagctgtagggcagagaaggggcgccgcggggccggggaggggaaaaggtcgccggagtggagccgagggaagcagtgcagatggccggagggggcggaggagggcgagcggaggccgccgagttttccggggagcggaggggcggctgcgcgcaaaccgggggactgagaggagccgggcgggaggttgggtgggggtggggtgtgcgt

SEQ ID NO: 23219 - DNA, 1637 bp, Artificial sequence
  DNA replication origin
agctgtccaaacccacctcccggctgctggccgtctgcaacgtgggccgcctagccccggcgcggcccggctcccccgccgggtcgcgaactcgcgcgccagggccccacttaactttgcagctgcccgcgccccgcccgtgggtgtgcgctggggagccgtgacccgaacgcccgtttttactgccccggtctcttcctccgtctttctttggaagagggttgtcgctgcccagcggggttggagggggggtctgggtgactttctcccccctgaccctcttttgtctcctcccgcacgtggcttccaggccgaggtggggacagcgccgttcgtcagcttcaggcttccccggggctcggtgcaggggccacccggagcggagtggggactggcccgccctcccccatcgccctgccgcctctccgggccagcaacgctgccgccgcagcccacacggtgagacccagcccgcgggcggcccgggcggtgggggcgggaggggccccaggccgaagcacccggacttggaggggtctgacgccgggagaagaggggtcgagatacaagcagccccacgcctcgggccgatggtctctcgtcgacgccgccctggttaagttgggcgagcccaaagctgcagccacaaaggaagattcgtggcgtgggccccttacttcccctccagagctcgcccacccatgacctcctcttcctaggaacttcctccttgctgctttccttctttcctcatttttcgtccttgcatcccagagttcccttccctgacccggtaaacatctctgtccttcccccacctccccgtgggtagtgggtatttatagaaacagatacgtgttaggggacagccagaccggcctgcccggaaaatcgatcccccaaagagcctcccaggcctggctccagccagcagggagcatcgccaattgtcccccgcgtgtgtaagcatgttttatgagtgctacaggtttgagcacagcagaaattgtaatcaacattaacaaaaataagggccgccgcagcagtcaaaacaagccacccctgtaggattctgcagttggacattattcaaaaggaaagggcaagcgttgctttggaggtgggaaagaaaaagcacctaacaggtgctgtggtctctgggaggggagaggccagcgtgggactggttgctggtggctgcggagactggcaagctggattcgactaaagcatgtaccttttctcagctcccagggatcacccttggatggtgatggccagcctggaggaggtctgcacttggaggaggtgatggtttggaggtctttttttcccaattggattttccacaggaacagcctaagatggttctgtgtgagggaggcttgctagggattggttttatttgctaagtgaaagttgagttcttgaagaaaaggccatctccggtctacaggggagtagctctggggacatatgttatggggaaacttgtttgtcagagaactgtgaggggatgtctagactgtagttgcacctgttagacttggagagatgtgtgcaagtttcgtaggaaaatgttttgttgctgttactatcttccccctccctctgtctgtctctctatcctgacacat

SEQ ID NO: 23220 - DNA, 1214 bp, Artificial sequence
  DNA replication origin
tcgccaaacctcgcccagattcaggcgtgtaaaccagccggagcggcgcggcagcggcaggaccgccgtggcgcctagagtagcgacccggggggagcgcggggcgacgctggctgcagggacccggtgacagcgtgagaggttcgcagagtgagtgcgtggccgctgagggaagccgcggcggcggccgcgcggggccgggcgccggctgaggggagcgggtggggtgcggcgaggcgcgggccgggcgcggcggtcaggggccccggcggcggcagcccctcggcgcgcggcaggtggcgcgagggccaggcgccgggcccgcgagcgcgctgccttgcgggccggcgaggaggagcagccgccgccgccgcgggagaacagcgcgctttgcggaaggggtcaaatgtctgaaatatggcggaggaagtgagagcccgaggacccccccacccgcccgctctcttcagcccgcgtccgccgcagcttctcccgccgccctcctttccccgccggctcccccgaagactcgctccccgccccgagccccctcgcttgtcgcctgggttccctccgtggtatgggtggaagttagaacggaaaccagaaagttgtcctttgcgaagacctagcttctcccagccccgagctagggcgaggagccttcgggggaaaccactcccaggcgccccgcgggcttgagcctgacagcgaaaaagtttgcctgaaacggggcttgcttgctccatttgttgcgggaagtggcaggaggaaggcagcggagagagccccacttagtctggcagcagccaccgtgtagagaaaaactgttaaaggggcctttcccttcgtcagcaagaggaaatctctttctcttagagggagagaaaatccaggaagtttgtcctcttctctttttcgccatctcgaggtgtctaatcctaaaactatcagcgccatgaattttatttaaaactacgcccagtgaaccgggctctccggatttttcttctgaaaaacactgatgtcttttggagaaaagatcatttttgcaagttaaagcagatggtttccttccccttcgctttcccccctctcccactctctttaatagtttagaaaaacattttggccctgtaacttctgattggtatgaatagaagcagttctgtgttgcagtaaggggaaatcacatttttacggggtagaaagtt

SEQ ID NO: 23221 - DNA, 1061 bp, Artificial sequence
  DNA replication origin
ggcctgtgtggccctgtgtgtcggaaagatggagcaagaagccgagcccgaggggcggccgcgacccctctgaccgagatcctgctgctttcgcagccaggagcaccgtccctccccggattagtgcgtacgagcgcccagtgccctggcccggagagtggaatgatccccgaggcccagggcgtcgtgcttccgcgcgccccgtgaaggaaactggggagtcttgagggacccccgactccaagcgcgaaaaccccggatggtgaggagcaggtactggcccggcagcgagcggtcacttttgggtctgggctctgacggtgtcccctctatcgctggttcccagcctctgcccgttcgcagcctttgtgcggttcgtggctgggggctcggggcgcggggcgcggggcatggggcacgtggctttgcggaggttttgttggactggggctaggcagtcgccgccagggaggagggcgggatttcggacggctctcgcggcggtgggggtgggggtggttcggaggtctccgcgggagttcagggtaaaggtcacgggggccgggggctgcggggccgcttcggcgcgggaggtccggatgatcgcaggtgcctgtcgggtcactagtgtgaacgctgcgcgtagtctgggcgggattgggccggttcagtgggcaggttgactcagcttttcctcttgagctggtcaagttcagacacgttccgaaactgcagtaaaaggagttaagtcctgacttgtctccagctggggctatttaaaccatgcattttcccagctgtgttcagtggcgattggagggtagacctgtgggcacggacgcacgccactttttctctgctgatccaggtaagcaccgacttgcttgtagctttagttttaactgttgtttatgttctttatatatgatgtattttccacagatgtttcatgatttccagttttcatcgtgtcttttttttccttgtaggcaaatgtgcaataccaacatgtctgtacctactgatggtgctgtaaccacctcacagattccagcttcgga

SEQ ID NO: 23222 - DNA, 973 bp, Artificial sequence
  DNA replication origin
ccctaaacgtctcccaagcggctgcagtctgcgacagagagtgtccctcggtggagcgccctgtggctgcccaggctacagccgtggccgaggcgaggacacacttctgacctggggctccagcaaagactgtccgcgagcggcgactccatgcccgcagccctccgcccagctcagccgcccggccgcgggcaccagcagccgcgccacgaaagggcgcaccgcgcgggcgccgtctctcctaggtgcgaaggcggctgaggccccgcccgggaggcacccgcgcggctccggagtgggccggagggacgtccgggggcggggcccgggcgcgcccgccctctgaccgggctataacacccggccccgccgggcggccgcgggtgggtagaggtgcgcgcctgggacctggtgaggctgggggtgcgcggggccgggcgcagctgtggcagctgccggacggcggaggcgccaggaggaggaggagagggaggcgcgggcggctgggtcgagggcaccgaggctgcccgtgctcccggtctctggttgcacggctcactcccgaaggtgttgcttccagcttttgcctccttaggaggcagggagcgtcagtgtcgggagaccctgagaccggagtaccgagacgtagctggtgatgcccccgcctgccctcatgtgttctcaggttcttcttatttttattcatctctagaacatggacttcccgtgcctctggctagggctgttgctgcctttggtagctgcgctggatttcaactaccaccgccaggaagggatggaagcgtttttgaagactgttgcccaaaactacagttctgtcactcacttacacagtattgggaaatctgtgaaaggtagggtccgtctcgtgaacactttgccaaaccctcagtcctccctttcagtattcattaaatatgccccagcttcctgtctgctcttccacgcacct

SEQ ID NO: 23223 - DNA, 1639 bp, Artificial sequence
  DNA replication origin
agcagtaacagtagtaactgctgtaatgatagtctcaagtagtagtagtagcagtcagccacaagtggcgcctgaacagggactaacagggactatcagggacagagacctgaagagacctgaagggacctgaagaggcctacaaggacaagtagagataagagataagagataagaaagagataagagataagaaagagataagagataagaaagagataagagataagaggtaagaaagagataggagatgaggaagagatgagaaagagacaggagatgaggaagagatgagaaagagataggagatgaggaagagatgagaaagataggaaatgaggaagagatgagaaagagataggagatgaggaagagatgagaaagagataggagatgaggaagagatgagaaagagataggagatgaggaagatatgagaaacagacaggaaatgaggaagagataggagatgaggaggagatgaggaagagataggagatgaggaggagatgaggaagagataggagatgaggaagagataggagatgaggaagagataggagatgaggaagagataggagatgaggaggagataggagatgaggaggagatgaggaagagacaggagatgaggaagagacaggagatgaggaagagacaggagatgaggaagagacaggaaatgaggaggagatgaggaagagataggagatgaggaggagatgaggaggagatgaggaggagatgaggaggagatgaggaggagatgaggaagagataggagatgaggaagagataggagatgaggaagagataggagatgaggaagagataggagatgaggaagagatgaggaagagataggagatgaggaagatatagataggggacagctaggggataggtagggacttgtaggaactaacaggtgccatagagacagatagggataaagactagcaaagactagcaatataaggtcagtgccctaaagaggtacaaaagtagagactagcaaagactagcagagatttgcagggacagacagggtcctatagggacttgaatgaggaaggtctgctggaacataaaaaactaaagcccagaaaaaactaaaaccaaccagatgaactagacaccccgttacaagtctgccagcagcaacataaggtcagtgctctacaaaggtactggtcagtgccctagaggtacaaagaacagggagtttttgaatcagggtaacatgaggaagaatttggttatttcttttcttttttgtttggagtttggtatgtaccatcttcgtgttattatttcggggtttaatagaattttttgccccaactacagcacctatcgaaagtggtgaacaggaaagggagaatggaaattggcttgtaccatcttttgtggctacagaagggctaactttagcttcggctttcatggattgtaaacatgcactggcacctgtgagatgtacagaggacttgagaagttttctcggagcttgtcaggatgtgggaactgagcttcattgctctgcagtattgactcaggcaatggctaatttggtaactgacagatctaaaagaagccaagggtcaagccctaaagtgggaaagtgttataagtgtag

SEQ ID NO: 23224 - DNA, 1364 bp, Artificial sequence
  DNA replication origin
gggcctagcgcggcgggaagcgccagccgggtgccgccaacaatagggagcgaggcagcgccggcgagggaggagccggcggcagctgcacagcggcccgcgtccgcgctccgggccccgcggcgactcgccgcgcccgcggcccgtgaaacgacgcggtagaacgaggggcgggggggcgccacgccaggggtcggcggcgcggcccagaggcggcaagggcgcacactctgcagtcgcttcggctcgcggccgcagcgggccccgggtcagcttcccggccgcagcgccgcccgcgtcggcggcggggacctgggctctcacgtacctggttgaactcttcgccgacatccgcgtaaatgtctatgtggtccacgccgtccgccatcttccttcagcctcggccgccgccgccgccgccgcctcctgcaggtctgcccgccgcggcagcagcagcggatctagcggcggtgggggggcgcttgcgtcacttccgaggcccgagggagggaggcgcgggcgacaggggccggccgggggcggggactctgcagcccagccgctctgctggctgaggaaaggctgcgcctctgagggcagaggacgtttcttttgtgtctgggtgaggcccgggagtgggggccaatttttttgtcctactcgcgcatccagcttagcagtgggtcccacctgtttccacacaccgtcttttcacgtggcctctggcatactcagacgttttgttaatattttcatttatccgttgttcttatctttctcacatccaggacttttaaaggtggaagttatatgtccgtgcttaaatgcaaagtgtaacccccgggcattctgtgaacggcttaagaccaaaaacaatgtcttgtttctgcatcctcagagaccagcagagttttatttgcatcgtaaacgctagatacccgtcagtggttatctttgcatgctgtttatgttgccatttccatctctaatcttcgtgggcttctttcccccccaccttcctctcgcattcattgccattcattttttcttccttagatctacagtaggttgtctctggcgtagttcagatgcttctaacatgaatgcagtcatcttagagcacacccaagagagtggaggtatcttgaggccaggggggcttctctctcagaatcctagaatgtcccaacgggaagggaactggaaaggtgtccttaggtctaaacatctcattttacagaagagaagactgaggcctaatagaacctaagtgatttaaccaggtcacatggtcaataaaggtaggaacattcagccacgatactttactcaaagatgtctctccagtttgaaactttcccctc

SEQ ID NO: 23225 - DNA, 986 bp, Artificial sequence
  DNA replication origin
ggatgtcggcgaagagttcaaccaggtacgtgagagcccaggtccccgccgccgacgcgggcggcgctgcggccgggaagctgacccggggcccgctgcggccgcgagccgaagcgactgcagagtgtgcgcccttgccgcctctgggccgcgccgccgacccctggcgtggcgcccccccgcccctcgttctaccgcgtcgtttcacgggccgcgggcgcggcgagtcgccgcggggcccggagcgcggacgcgggccgctgtgcagctgccgccggctcctccctcgccggcgctgcctcgctccctattgttggcggcacccggctggcgcttcccgccgcgctaggcccgggcggtggggccgcgtgtaagcggcggagagaactggccgccgccgcgccccctcccccgtcgctggtcggaggaggaagccctggcggggcgcgtgcccgccgccgccgccccttccccgccgctgccgctcgggctccgattcctcccatcgctccattttgtctccctgcccgcgcactgtcgcctcatggaaggccgcgttcacggccctttgtatcccgcgcgcccagtccccggggctctccttctcgggtttgcgacaggtttcggcgtggcgccttcctcctcccctcacactttctgaaggcgactgaggtgcgggctcatttgcaacaagtcctttgacttttggagccacagataaaagtcggtgcgctggtcctgcctcattaatccagggcttgcagtgctttgaagcccagtcgttgttggcctttgtgatgaaaatacctgtgaagatgagtggccggggaccaaaaggaagaattggaagcgcgatggttggatggaacaaaaagatgttagctcacccacagatctcatagtgattaaaatgaaagaacgttcaccccaaatccttatgatgtggtttaaaaataaagagttatagataagaccctattttcgaa

SEQ ID NO: 23226 - DNA, 1217 bp, Artificial sequence
  DNA replication origin
ctgttaggtacacctcccagacggggtggcggccgggcagaggggctcctcacttcccagacagggtggccgggcaggggcgccccccacctcccagacagggcggcggccgggcgggggctgcccccacctcccggacggggcagctggccgggcgggggctgccccccacctcccggagggggcggctgccgggcggagacgctcctcacttccctgacggggtggctgctgggcggaggggctcctcacttcccagacggggaggctgccgggcgtaggggctcctcacttctcagacggggcggccggtcagagacgctcctcacctcccagacggggtggcggcggggcagagacactcctcagtttccagatggggtcgcggccgggcagaggcgctcttcacatctcagatggggcggcggggcagaggcgctccccacatcccagaggatgggcggccggacagagacgctcctcacttcctagacgggatgacggccgggaagaggcgctcctcacttcccagactgggcggctgggcagaggggctcctcacatcccagacgatgggcggccaggcagagacgctcctcacttcctagacggggtggcggccgggcagaggctgtaatctcggcactttgggaggccaaggcaggcggctgggagatggaggttgtagcgagcagagatcacgccactgcactccagcctgggcaacattgagcactgagtgagcgagactccgtctgcaatcccggcacctcgggaggccaaggctggcagatcactcgcggtcaggagctggagaccagcccagccaacacggcgaaaccccgtctccaccaaaaaatacaaaaactggtgaggcgtggtggtgcgcgcctgcaatcccaggcactcggcaggctgaggcaggagaatcaggcagggaggttgcagtgagccgagatggcggcagtacagtccagcctgggctcggcatcagagggagaccgcgcagagagggagggggagggggagacttctttcttgatttcattttcagattgttcactgttggcatacagagatgctactgatttttttgtatgttgattttgtatcctgcagttttactgaatttgtttatcaactcttaatagcttttttggtggagtctttaggtttttccaaatataatatcatctacaggctgggtgtggtggctc

SEQ ID NO: 23227 - DNA, 1106 bp, Artificial sequence
  DNA replication origin
tctgtgagcgcccctgagcgccggcagcggccgcggtgggttcttcaggtgagtgcggccgcgggagggagaggcccggagcgtagagcaccgcccccctcggcgcccgcgcgcccgcctctggcgagtcggccaggaggggcggccgcggcaggtgcaggtgctggcgccgtgcagggcgcggcacgcgggggttcggggggatgcccaggcccggtgagctcgctctccgcctgggcacttgggctccgggcccttgggggcggcgtgtgggggggactttggcgacccgggtcagccggccgccccctgggctgctggtgggcgtcgggcggcggctcctcccccgggcacgggcgcgttacacattaactgcgcggtcccgcgcgcccggggcagggagcccgagtccagcgggttacctggcggcgggcgggcgcggccgggagcggagggccgcggtcgcgaagaggatgaagagagagttcccgaacaagtcggaagcagctcacaacaccggacgccgcgcggcagggctgtggacctggggtggtttcgtgtcccagtcttaggaaactacgcgcgaggcaccgtgctgaggcgtagaggtcaccctcgggaggtttcggtgaaacctggtgggaaattccgggcaggcgcccggagtcgcgcccaagtaggcagctccgtgccgccagacttgtgttcgggggagttgagacgaactgcacgggtgggattgcatggctctgccctcccagcgttgacaactcgccccgaccgcccaggaagcgcgagcttactggctccagaagtgatgatgctgggtggaagtcgcagcatgtgaagagttgccggttgttatgggattaaaaaagatgaaagggtaaggtcttgaaagacacgagcgctgagttagttagtactgattactgagaggcaatttagtttcatggaaatgttgcctgttcggaggctacctgttatacactctcctgtttcaccccaactccttccgttcagtgtcgggttaaaagccttgtaatctcttgcagtggaatgattgcataattggaggaggggcccataagaggattacaacaaaa

SEQ ID NO: 23228 - DNA, 803 bp, Artificial sequence
  DNA replication origin
cacccatcgtctgagatgtggggagcgcctctgtccagccgcgaccccgtctgggaggtgaggagcgtctctgcccggcagccccgtctgagaagtgaggagcccctccgcccggcagccgccccgtccgggagggaggtgggaggtcagcccccgcccggccagccgccccatccgggagggaggtggggggtcagcccccgcccggcagccgccccgtccgggagggaggtggggggtcagcccctgcccggccagccgccccgtccgggaggtgggggttcagcccccgcccagccagccgccccgtccaggagggaggtggggggcgcctccgcccggccgccgccccgtccgggaggtcggaggcgcctctgcccggccgccccttctgggaagtgaggagctcctctgcccggccaccaccccgtctgggaggtgtacccaacagctcattgagaacgggccatgatgacgatggcggttttgtggaatagaaaagggggaaaggtggggaaaagatagagaaatcagattgttgctgtgtctgtgtagaaagaagtagacataggagacttcattttgttctgtactaagaaaaattcttctgccttgggatgctgttgatctatgaccttacccccaaccctgtgctctctgaaacatgtgctgtgtccactcagggttaaatggattaagggcggtgcaagatgtgctttgttaaacagatgcttgaaggcagcacgctcgttaagagtcatcaccactccctaatctcaagtacccagggacacaaacactgc

SEQ ID NO: 23229 - DNA, 1027 bp, Artificial sequence
  DNA replication origin
tgaagtctcctatgtctacttctttctacacagacacagcaacaatctgatttctctatcttttccccacctttcccccttttctattccacaaaaccgccatcgtcatcatggcccgttctcaatgagctgttgggtacacctcccagacggggtggtggccgggcagaggagctcctcacttcccagaaggggcggccgggcagaggcgcctccgacctcccggacggggcggcggccgggcggaggcgccccccacctccctcctggacggggcggctggctgggcgggggctgaacccccacctcccggacggggcggctggccgggcaggggctgaccccccacctccctcccggacggggcggctgccgggcgggggctgaccccccacctccctcccggatggggcggctggccgggcgggggctgacctcccacctccctcccggacggggcggctgccgggcggaggggctcctcacttctcagacggggctgccgggcagagacgctcctcacctcccagacggggtcgcggctggacagaggcgctccccacatctcagacgatgggtggccgggcagagacgctcctcacttcccagacggggtggcggccgggcagaggctgcaatctcgtcactttgggaggccaaggcaggcggctgggaggtggaggttgtagctagccgagatcatgccactgcactccagcctgggcaacattgagccctgagtgaatgagactccgtctgcaatcccggcacctcgggaggccgaggctggcggatcactcacggttaggagctggagaccagcccggccaacacagcgaaaccccgtctccaccaaaaaaatacgaaaaccagtcaggcgtggcggcgtgcgcctgcaatagcaggcactcggcaggctgaggcaggagaatcaggcagggaggttgcagtgagccaagatggcagcagtacagtccagctttggctcggcatcagagggagaccgtggaaagagagggcgagggag

SEQ ID NO: 23230 - DNA, 912 bp, Artificial sequence
  DNA replication origin
gccaccctgtctgggaggtgaggagtgcctctgcccggccgcccgtcgtctgggaagtgaggagcgcctctgcccagccgtcctgtctgggatgtgaggagcgcctccgcccggccgccccgtctgggaggtgaggggcgcctcttcccggccgccccgtcagggaggtgggaagcgcctctgccctgccgccctgtctgggaggtgaagagcgcctctgcccggccgccccgtctgggaggtgaggagcgcctctgcccggctgccccgtctgggaggtgaggagcgcctctgcacggctgccccgtctgagaggtgaggagagcctctgcctggccgcccactgtctgggatgtgaggagctcctctgcccggccaccccgtctgggaagtgaggagcacctctgcccggccgccccgtctgggaggtgtacccaacagctccgaagagacagcgaccgtcgagaacaggccatgatgacgatggcggttttgttgaaaagaaaagggggaaatgtggggaaaagaaagagagatcagattgttactgtgtctgtctagaaagaagtagacataggagactccattttgttctggactaagaaaaattcttctgccttgggatgctgttaatctataaccttacccccaaccccgtgctctctgaaacatgtgctgtgtcaactcagggttaaatggattaagggcagtgcaagatgtgctttgttaaacagatgcttaaaggctgcatgctcattaagagtcatcaccactccctaatctcaagtacccagggacacaaacactgcggaaggccacagggacctctgtctaggaaaaccagagacctttgttcacgtgtttatctgctgaccatctctccactattatcctatgacactgccacatacc

SEQ ID NO: 23231 - DNA, 830 bp, Artificial sequence
  DNA replication origin
gcgtctctgcctggccgcccgtcgtctgagatgtggggagcgcctctgccccgccgccccgtctgggatgtgaggcgcgcctctgcctggccgcgactccgtctgggaactgaggagtgtctctgcccgaccaccaccccgtctgggaggtgaggagcgtctctgcccggccgccccgtctgagaagtgaggagcccctccgcccggcagccgcttcatctgggaagtgaggagcccctccgcccagcagccaccccgtccgggaagtgaggagcgtctctgcccggcagccgccctgtccaggagatggggggcagcccctgcccggccagccgccccgtccgggagggaggtagggggcagcccctgcccggcagctgccccgtccgggagatggggggcgcctctgcctagccgccccgtctgggaagtgaggagcccctctgcccagccgccaccccgtctgggaggtgtacccaacagctcattgagaacgggccatgatgacgatggtggttttgtcgaacagaaaaagggggaaatgtggggaaaagaaagagaaatcagatgttacggtgtctgtgtagaaagaagtagacgtaggagactccattttgttctgtactaagaaaaattcttctgccttgggatgctgttaatctataaccttacccccaaccccgtgctctctgaaacatgtgctgtgtcaactcagggttaaatggattaagggcggtgcaagatgtgctttgttaaacagatgcttgaaggcagcacgctcgttaagagtcatcaccactccctaatctcaagtacccagggacacaaac

SEQ ID NO: 23232 - DNA, 1474 bp, Artificial sequence
  DNA replication origin
ccctgagttgacacagcacatgtttcagagagcacggggttgggggtaaggttatagattaacagcatcccaaggcagaagaatttttcttagtacagaacaaaatggagtctcctacgtctacttctttctacacagacaccgtaacatctgatttctctttcttttccccacatttccccctttttctgttcgacaaaaccaccatcgtcatcatggcccgttctcaatgagctgttgggtacacctcccagacggggtggcggctgggcagaggggctcctcacttcccagacggggcggctaggcagaggcgccccccatctcccggacggggcagctgccgggcaggggctgccccctacctccctcccggacggggcggctggccgggcaggggctgccccccatctcctggacagggcggctgccgggcagagacgctcctcacttcccggacggggtggctgctgggcggaggggctcctcacttcccagatgaagcggctgccgggcggaggggctcctcacttctcagacggggcggccgggcagagacgctcctcacctcccagacggggtggtggtcgggcagagacactcctcagttcccagacggagtcgcggccaggcagaggcgcgcctcacatcccagacggggcggcggggcagaggcgctccccacatctcagacgacgggcggccaggcagagacgctcctcacttcccagacgggatggcggctgggaagaggcgctcctcacttcccagactgggcggctgggcagaggggctcctcacatcccagacgatgggcggccgggcagagacgatcctcacttcccagacggggaggcagccgggaagaggcgctcctcacttcccagactgggcggcggggcagaggggctcctcacatcccagacgatggttggccaggcagagacgctcctcacttcccagacgggatcgcggccgggaagaggcgctcctcatttcccagactgggcggtggggcagaggggctcctcacatcccagacgatgggcggccaggcagagatgctcctcacttcccagacggggtggcggccgggcagaggctgcaatctcggcactttgggaggccaaggcaggcggctgggaggtggaggttgtagtgagccgagatcacgccactgcactccagcctgggcaacattgagcactgagttagtgagacttcgtctgcaatcccggcacctcgggaggccgaggcgggcagatcactcgcggtcaggagctggagaccagtccggccaacacgggaaaccccgtctccaccaaaaaatacaaaaaccagtcaggcgtggcggcgcgtgcctgcaatctcaggcactcggcaggctgaggcaggagaatcaggcagggagtttgcagtgagccgagatggcggcagcacagtccagcctcggctgggcatcagagggagaccg

SEQ ID NO: 23233 - DNA, 1304 bp, Artificial sequence
  DNA replication origin
cgggcagaggggctcctcacttcccagtaggggcggccgggcagaggcgcccctcacctcccggatggggcggctggccaggcggggggctgatccccccacctccctcccagacggggcggctggccgggcggggggctgaccccccacctccctcccggactgggcggctggcccggcggggggctgacccccccacctccctcctggacggggcgtctggccgggcagaggggctcctcacttcccagtaggggcggccgggcagaggagcccctcacctcccggacggggcggctggccgggcggggggctgacccccccacctccctcccggacggggcggctggccgaccccccccccgcctccctcccggatggggcggctggccaggcagaggggctcctcacttcccagtaggggcggccgggcagaggagcccctcacctcccggacggggcggctggccgggcggggggctgaccccccccacctccctcccggacggggtggctgctgggcggagacgctcctcacttcccagacggggtggttgccggacggaggggctcctcacttctcagacggggcggttgccaggcagagggtttcctcacttctcagacggagcggccgggcagagacgctccccacctcccagacagggctgcggcccagcagaggcgctcctcacatcccagacagggcggcggggcagaggtgctccccacatctcagacgatgggcggccgggcagagacgctcctcacttcctagatgggatggcggcggggaagaggcgctcctcgcttcccagatgggatggcggccgggcagagacgctcctcactttccagactgggcagccaggcagaggggctcctcacatcccagacgatgggtggccaagcagagacgctcctcacttcccagacggggtggcggccgggcagaggctgcaatctcggctctccgggaggccaaggcaggcggctgggaggtggttgcagcgagccgagatcacgccactgcactccagcctgggcaccattgagcactgagtgaacgagactccatctgcaatcccggcacctcgggaggccgaggctggcggatcactcgcggctaggagctggagaccagcccggccaacacagcgaaaccccgtctccaccaaaaaaaaacgaaaaccagtcaggcgtggcggtgcgcgcctgcaatcgcaggcactcggcaggctgaggcaggagaatcaggcagggaggctgcagtgagccgagatggcagcagtaccgtccagcct

SEQ ID NO: 23234 - DNA, 1010 bp, Artificial sequence
  DNA replication origin
cctggccagtcgccccgtccgggaggtgaggggcgcctctgcccggccgcccctactggaaagtgaggagcccctctgcccggccagccgccccgtccgggagggaggcgggggggggggggtcggccagccgccccgtccgggagggaggtgggggggggtcagccccccttccggccggccgccccgtccgggaggtgaggggcgcctctgcccggccgcccctactgggaagtgaggacccctctgcccggccagccgccccgtccgggagggaggtgggggggacagcccccggcccagccagccgccctatccaggaggtgaggggcgcctctgcccggccgtccctactgggaagtgaggagcccctctgcctggccagccgccccgtccgggagggtggtgggggggtcagccccccgcccggccagccgccccatccgggaggtgaggggcgcttctgcccggccgcccctactgggaagtgaggagcccctctgcccggccacgaccccgtctgggaggtgtgcccagcggctcattggggatgggccatgatgacaatggcggttttgtggaatagaaaggcgggaagggtggggaaaaaattgagaaatcggatggttgccgggtctctgtggatagaagtagacatgggagacttttcattttgttctgtactaagaaaaattcttctgccttgggatcctgttgatctgtgaccttatccccaaccctgtgctctctgaaacatgtgctgtgtccactcagggttaaatggattaagggcggtgcaggatgtgctttgttgaacagatgcttgagggcagcatgctcgttgagagtcatcaccactccctagtcttaagtacccagggacacaaacactgcggaaggccaaggccgcagggtcctctgcctaggaaaaccagagacttttgttcacttgtttatctgctggccttccctccactattgtcctatgaccctgccaaatccccctctgc

SEQ ID NO: 23235 - DNA, 1249 bp, Artificial sequence
  DNA replication origin
cggtgagtttttggtaaattttcggaagtctggcagcggggcgcgcggcgggggcggcagattcggggcccccgcaaggcgggggaatgccccggggccggtccggtcgcgcccagggtccgccggtagcgtcccggcccaccgcttcccgttgcttttgtctcggctccaatcgagagacggagagcggagcgggcggggaggggggtggcggcggtggagggagggagggggtgtgtatgggggtggtggtggaccggacgtaaagcgtcgctgtactcgggccgctgcagcagcagcagctccagatcctaggcccggtcccatccgcgagtggtggggcttccccagactccactcccctaggctcccgccagcgcggaggagccgctgccgccgcgctgcttcctgggggagaagagaaggcggcagcggccgtggccgtggccgacgagctcgagcccgctttagacggctctgccgccttcccggcagctggtgctgtctgtggcttcttaccttctctcaatacacgtatatcatctgccagttatgtgtatttctgttagtgtgtttgcaagtgtcagatgggagacactggactggctaacgggtgtcaggatcctgcaggccctgggataccgaaggctgtgcatggtggagggagaaggaatgcaactgcgatgccgcctctgccaccgcaccaggaaggtgaagcttccgtagtgtcgtagactgagtccggatgatcctggggcggcggaggaaccacagacgcttctgtctgtgaagttgcaagtcctgggtttctacttccgcaggggcctctccaccttttgctgtcgtaggtctcgcttaaaagtttaacagaagaaaagagtagggttaaaagaggcctttgtagttcttcattgaagcactgttgtctgtccgggtgaaagctgataactcttggtaactgtggtccttagcaaaagagaattggagttttcttttatacaaagtatttccaaggttttagaccttatatttattccaggcctgtaggtacggtattactaccacaaaagtcttacattaagggtaccaccctctcagagggaacctaaacatcaacttccttcgaatccttggagacatcttcacttttcaacatccggaagactgagtgcaacatattttgtttcattttcataaaagtcttggtcagagaatcccactccttttaaaatcgtttgggcaattcctc

SEQ ID NO: 23236 - DNA, 1046 bp, Artificial sequence
  DNA replication origin
ggggcgtctcctttgggcgaggggctgacgggcacaagcgacagcggcgacttgcaatcggaatcttcgctcactccccttagagggacgtccgagatgaaagattaagatcaatttagcttaaccggagggaagttaaaataataataataataagaggggagggtggagttcaagtggagcggcgggaatcttgaactccaaacgagtactggtcacctgcagggagagcggccaggctccgggcgcaccccgggaagcgggcacgggtggcggtgtgggaggacacgagccgcccaggccgggcggatcgaggtgaaagccccaggctagcggtgtgcgctgggaggtccccggggacgactgaatcgcaggttcccatgccacgggcgggctggcgcgcggtggtgccggaggcgtgacccagccgcgcccacgccgccagcggctgcgcccaagggagcgcagtaaccgtccagtcccaggacttgggcctcctaaccgtcttggcgcagacccgcgccccctgaccctgctgaggccgggagggctgcaggattggagttaaacaagctgagtcaggtggagtttgctgtggaggcaatgtgcgtgggggcaggaggctggacgaaggaaacttgctgcttaggtcgtcggtgacccttgtggcaacttaggtctctggcagccgagttgaccccaacttgatttgcccccatggctggggctgactgagaccaaaggaaaaaggtggagagctttgcagcctggaaagaaataccactttacccatcagaaaagtactcttgctttggggctcgcaagaacagaatcatttctgtcgtttccctccttaggagtcttgccacccctgacccgccccaggatttgtagatgaggtttccaggagcgctgcttaaagcgacagcgccgggcagacccactttgggacaggtactgtttctagacctgtgttctgctcttaattcttgccgttgctccctcctcccccaattacgctaacaatgcttcagcctctattgttt

SEQ ID NO: 23237 - DNA, 1351 bp, Artificial sequence
  DNA replication origin
cggagcggggcggggcggaagggcccgggtctgctgcggacggggcggggcggagcctcctcctgcacgggggagcccccgggctcgccccagctcagacactcctagccttggggcagctgccgggcgagtcagcggagtagcggccagcgggcgatggagacagagagacacccgacgagaggaggcggggtgggggaggcggggagagtgcgggggcggaggctggcagggggcgctggaagctggagcggtccgtgcgctccccgcgcccgagggtgcaggaggctctgaagcggctgctgcaccgcggggcccaggcggcggctggggggctggggggcgctgccgccgccgccgccgggggcgtcgctggcctcggcccctttgttctcgcgcgctccccctcgccgcccactcccctgctgtcgcgcggcggcggcggtggcggcggcggctcctcccgcccgaggcagtcgggctcggcgccgggggcgggagggggcggggggagcacgccagccgccgagagtggggggcgatggcgaagctccgggtggcttacgagtacacggaagccgaggacaagagcatccggctcggcttgtttctcatcatctccggcgtcgtgtcgctcttcatcttcggcttctgctggctgagtcccgcgctgcaggatctgcaagccacggaggccaattgcacggtgctgtcggtgcagcagatcggcgaggtgttcgagtgcaccttcacctgtggcgccgactgcaggggcacctcgcagtacccctgcgtccaggtctacgtgaacaactctgagtccaactctagggcgctgctgcacagcgacgagcaccagctcctgaccaaccccaaggtaagaacgccccgcgcacccaggggctccccgcgagggaggtttggaggcagcgtcggtgttagactccgcgcggggagggttcggcgtgtgctcgcattgctaggaggagaccaggtggcgcaggctgtgctcaaaccaggaatgactacatcagggagccccagggctccggtcttttcaggtgggtttacgcgcggcgaccagtggtgcccagaggcttactttaaaacctgtcttgcctggtctcagattttgaggcctcgacccagtccgggtcctgcgcctaccggactgggtttggagaagtgcaaggagccaagaaagttaacttttcctccatttaaagccagtggttagcggggatccacctactccagctcacggtcaaggtccgagcttcagctggtctcatctagaactcagatggaatgaccttccttgaaaggtcgaggggactctcgaaagttgtga

SEQ ID NO: 23238 - DNA, 1282 bp, Artificial sequence
  DNA replication origin
gggtcgagaaccacagactggggaaaagggagagtacgggaggaggaggaggcagagccccgcggagccggaccggacccctggccgggaaggtatcggcgcggggcagcgggggcagcttggcccacatcgggccccttggcaggctcaggcgttggctcctcggggctccctccctcgccggcgcattgttcctttgccgggagacgaggaaattgccttttgattgcggaagtcagcggacggggctggggcgaggcagcgcgggtcagaatggcagcgtgggaagggcggcgcgctgcctgtccccgccgcctctcgcgtccgcagcccgcccggggcggcaggagcagcagcagcagcggtggccgcagtggcccctgcgcgtcgccagccccgagggaagcgcgctgcgcccacggggcgcgctgagcgcgcgcaacaggtgaccccctgccccggccctcgggccgtcccacgtccagccccctcggtctcctctggatcttaactactgagcgcaatgctgagccatggagccgggttggccttgtggatcacactgagcctgctgcaggtgagtggcccgagaaggggtcagagctgatgcgccccctccccgccgaaaaccaaattcccactccactttctcgtctatcgggttgtgctttgaagagggaggtggcaaaatttcttcttctgccttgggaagaatgatcctctggtgagccccccaacccagaatgacagcttatccagctgtcaaagcaaaaagccaccttctctctccagctgctctcaagggacagcagctagggagaaagttgccatccacctcccctgcaagcctcttctctggccagagggcaaaaggactggctgaggcaagggacaaaggataagtagaggagaaagtgtggcttgaggagcttgctgtggacatgtccctgagcagtccagactgtggacttaaactgttgtgtctgattcctttgcagactggactggcggagccagagagatgtaacttcaccctggcggagtccaaggcctccagccattctgtgtctatccagtggagaattttgggctcaccctgtaactttagcctcatctatagcagtgacaccctgggggccgcgttgtgccctacctttcggatagacaacaccacatacggatgtaaccttcaagatttacaagcaggaaccatctataacttcaggattatttctctggatgaagagagaacagtggtcttgcaaacaggtaaaggatgaca

SEQ ID NO: 23239 - DNA, 1495 bp, Artificial sequence
  DNA replication origin
gctgcactgtgggagccccttcctgggatggccgaggccaaagccggctccctcagcctgcggggaggtgtggcgggagaggcgcgggcgagaaccggggctgcgcagtgcttgcgggccagcaagagttccggatgggtgtgggcttggtgggccccacactcggagtggccgggccggccccgccggcccctggcagtgaggggctttgcacccgggccagcagctgcagagggtgcgccgggtcccccagcagtgcgggcaaaccggcgctgcgctcaatttctcaccgggccttagatgccttccgtggggcagggctcgggacctgcagcccgccatgcctgagcctccccgcgtccccccgccgtgggctcctgcgctggctgccagagactccccgacgagtgccgcccccttctccaaggcgcctggtcccatctaccgcccaagggctgaggagtgcaggcgcacggcacgggactggcaggcagctccacctgcggctccggtgtgggatccactgggtgaagccagctgggctcctgagtctagtggggacttggagaacctttatggctagctaagggagtgtaaatacaccgatcagcactctgtatctagctcaaggtttgtaaacacaccaatcagcaccctgtgtctagctcagggtttatggatacaccaatcagcgctctgtgtctagctgatctgggggacttggagaacctttatgtttagctaagggattgtaaatacatcaatcagcaccctgtgtctagttcaaggtttataaatgcaccaatctgcgctctgtgtctagctgatctggtggggacttggagaacctttatgtctagttaagggattgtgaatgcaccaatcagcactctgtgtctagctcagggtttgtaaatgcaccaatcagtgctctgtgtctagcgaatctagtggggacttggagaacttttgtgtgtagctcaaggtttgtaaatgcaccaatcagcaccctgtcaaagcggaccaatcagctctctgtaaagtggacccatcagcaggatgtgggtggagccagataagggaacaaaagcaggccgccccaggaagctttgttatttagctgtttgcgataaatcttgatactgttcactctttgggtccacactgcctttatgagctgtaagactcaccatgaaggtcttcagcttcactcctgaagccatcgagaccacgaacccaccaggaggaatgaacaactccagaggcgccgccttaagagctgtaaaactcatggcgaaggtctgcagcttcacacctgagccagcaagaccacgaacccaccagagggaagaaactcagaacacatccgaacatcagaaggaacaaactctggacatgccgcctttaagaactgtaacactcaccgcgagggtcggcggcttcattcttgaagtcagtgagaccaagaacccaccaattctagacacaagaggat

SEQ ID NO: 23240 - DNA, 1269 bp, Artificial sequence
  DNA replication origin
gcagaggtggctcgcaagcggcggggctctgccctagattgccagtaggcgctcgactcacatccagctccaccccgggagatgccccagaagccccgcccacgtccaggcacgttcttctggggctagtcgcaggggccgccccggcaccggcgctcacgtgacccgaggtgtgacgtaggaggaaggagacgccattagagggaggcagagagggatcgttcttcgcttttcctccggtgcctgacgtggtgggctggggcccttcattctcggactttccctcagcccttccaggcctcgcccgaggagggcgtggggacagcgcccgggtcggcggggccggggcggtgggggctgagccggccgtggctgtgaaggcgctgccgcggctgtcgggagggcggcgcgacactcgggctcgggcggccgggaagcgacgggatggctgcggccggcggcggcggcggcggggcggcggcggcgggccgagcctactcgttcaaggtggtgctgctgggggaaggctgcgtggggaagacgtcgctggtgctgcgctactgcgagaacaagtttaacgacaagcacatcaccactctgcaggtgcggacctcggggagcgggagggggcgcctcagggcccctacccctccggggctggggaaactttgccgccctggtcccctggatgtaggctggcaaatctcaggcctgtcatctccgccttcggtttacctttccgaattcgccctggggaatcaccaggtcggggcagcctgtagacgcgaggacaggctgttgggagggaagtggaagggccctgaaaagtccccagtgttccccgtggtggctgcgcacgttgtggtctccgtccgtgggctgttttttcccatttactgcagttcctgggtcccaggtgtcagtgttgcagtctccaaatgttagctccttttctttctttcagaattaggaacttagctgcgtatttgattttgcgaattaggtgatttgtaacttcagcgcttactgatgactaagtgtttatgcaagttccattttgtcctgagtaacaggaatggcaaaagagccatctctggaggttttttgaaatgaccgcttgcctaggcgtgttacgcagtttcattgcagcctgcgtgggtctgacttgcgggtcactcatattctgcgaggtcgattgacccacgctgaaacatcaagtgaatactggccaacaattggtccccagactaaaagccgctgctgttactc

SEQ ID NO: 23241 - DNA, 1363 bp, Artificial sequence
  DNA replication origin
ccccatcgcggctgcgaagggtgagctgctcttctcggccccctcctcctcctcctcctcctccttcttcttcttcctcttctttttcttcttctttttcttctcctcctcttgctcccccagctcgccgtccagggccatcacaccgcctcctcctcctcccccgccccctctggcaccccccgcgggcgggccacccgggccacagccagagcaggcatcggagagctcacgcgggccgagggcgcgcgactggggatgctggcccgggttcttttaagacgggttctggacacaagcgacggcagcttccgcgacccccatcagccccgcctcactctggacaccgggctgtgagctctgggacgcgcccaacttggaaagcgtcttgcttgcccagcgcgcgctacttctcggacgagcacccggcggcggggcacatgctgcccccgcccctgcgcgcctgcggctcccggctctccctcccctgcgccgcgctctcgcctcgctttccgcgggagccttccaaccggttctcggctagggagaaggacgggagcggtgggaagagcgagggtgtagagagggaagttagggctttcgctttctccccccactccagcggcggcgttcggtcctctgggtggaatgtgctcgcagcagcagtgacggcggccacagcacgggaggcacccgagccatacaccctgcagctggagagaaaaggatggccgaggtgggagagactagagtgaaccagcaggaggaagtcccagggccgcgaagctacgacggagatccgtcctggaaaagccttctccaccctgggcactttaagcggcggtggcggcaaacggcaggaggttgcagacccgacagcgagactccctcattccagtcttgctctgccctccggagatgacaagtgagaaagaagtgtccggccgggccatccccttcaggtagatgaagctctgggtttgctccatatcccaagggggagagccgaagtgcgtatgtccgagcgcgtgtgcatgtgtgtgcgcgtgtgtgcgtgtgtgtatatacacaggcttcgggtttagattgccagggctactccagctgcattgagggactgaaactcccagagaaaggcaaaggagagggagcgcgcgaggaggcaggaaaggcgggagggaggggagcgactgagcggcagaggcaggcactgggagattagagagcttttctccgctctgtcacaccagacacccacagccacagagggggttgctgagccgcctgcaagaagtacattgtaaatcttcagcgcaacaagccccgcagtcacccctcttcctgactccttagccccaccgcg

SEQ ID NO: 23242 - DNA, 1024 bp, Artificial sequence
  DNA replication origin
tgggagccgtggacgcagctgcgcctgtcgggccacctgaagccgctgcactacaatctgatgctcaccgccttcatggagaacttcaccttctccggggaggtcaacgtggagatcgcgtgccggaacgccacccgctacgtagtgctgcacgcttcccgagtggcggtggagaaagtgcagctggccgaggaccgggcgttcggggctgtccctgtagccggttttttcctctacccgcaaacccaggtcttagtggtggtgctgaataggacactggacgcgcagaggaattacaatctgaagattatctacaacgcgctcatcgagaatgagctcctgggcttcttccgcagctcctatgtgctccacggggagagaaggtatggagggaggcggtgccccgcgctgccccaccccggcgcgcggctcgaacctctgggcggcctgcgaccccggggacccagctggcttccaatacccgggaagccaggggtggggggaaggaaacgaaagcggagtagggcagtcagaactccggggtctcccagatgcctcggggtctcgctgccgccaacttcgcaaactgactcaccggtgccaaaagatgaatgctgccccctcctctagtcgggacctctcctcttcctgtcagagttccttagccatcgaaacgcagggctctttttctgaagggtagctgataatctgagcgatgccagagtgacatgaaaagcttgccaagttactgtcgagggaaaatacgtggcgctgaaggccaagacaacagcgcatccaggttagcatgtcagggcaggtcagggacacaccgttctccacccccacccacaacatgcccatcttccctgactattagtctcctgccaggtgcagagcagaggatgggctttggctgcgtcaagtttccccaaacttcaagttgagattcggagtgaaaagagtggtttccagagataggctgagaggaccgggacgggggtggaggttgccaaggccagagcca

SEQ ID NO: 23243 - DNA, 1155 bp, Artificial sequence
  DNA replication origin
gataaagaaaaaggagtattaaccttgactatgcctttagctccagccacctttttaagaggaaattgctgggcaggtgggggagggctagtcacggaacaaaactgtaagccggaccaggtgtgaggaggggaggtgataaaaagattatagggtggaggagcagaggctgaggaagaattgggacctagctcggcctggcgaggagcagcctggggagcaagggagaggtcagatgggtctgtagaaaaggaagattagaaagactcagcgatgcttggggttggtactgaggggacaggcgggagggaaagaaggaatatttgggacgagttgcactgcgcacagagactaggaagggactgatgtgtaaaagaatgcctggacatcaggcacctcagaccgtttgcctattttacaacaagaattatttagatcttgcaggatggaaaaattcaaagtgccattttctggctatttggaactactgtcgagtttgtattggggtcaagcagcattgcagaagaaaataaggcatttaggttttaggtcaggtgtgagttgaagaggttttaagtttttgagaacacaggccaagggagtagaaggaggaatggagggtggaagattgcctatagtgaaggaaccaagcctagagaaaaaagagagtagagaaatggagggaagcggtttgggggttcttaccttccagaaaagtgggaaaaggggttggggcacagagataagaggtcggggcatggaaataagggatggggtgcagaaataaggggtaggggcatggaaataaggggtcagggcacagaaataagggattggggcgcagagatataagaggttggggcgtggaaataagggattggggcgcagagatacaaggttgaggtacttgcccctcatctagaaaagcgggacttgctgctaagagtgaaggagaaggggttgaggggtacttgcccctctcccagaaaagcagagaaggggtagagacaaggagagaaggggttggagtacttgccctgtccccggaaaagcagagaagtggtagagacaaggagagaagggattgaggtacttgccccttccccagaaaagtgggacttgctgataagggcgaaggaccaaggcaggcgtccc

SEQ ID NO: 23244 - DNA, 1131 bp, Artificial sequence
  DNA replication origin
accacggcgggcgacaagctgcagccgtcgccgcctccactgtcgccgccgccgagagcgcccccgctgtcccccgggccaggcggctgcttcgagggcggcgcgggcaactgcagttcccgcggcggcagggccagcgaccatcccggtggcggccgcgagttcttcttcgaccggcacccgggcgtcttcgcctatgtgctcaattactaccgcaccggcaagctgcactgccccgcagacgtgtgcgggccgctcttcgaggaggagctggccttctggggcatcgacgagaccgacgtggagccctgctgctggatgacctaccggcagcaccgcgacgccgaggaggcgctggacatcttcgagacccccgacctcattggcggcgaccccggcgacgacgaggacctggcggccaagaggctgggcatcgaggacgcggcggggctcgggggccccgacggcaaatctggccgctggaggaggctgcagccccgcatgtgggccctcttcgaagacccctactcgtccagagccgccagggtaaggccagaatcgaccccttccctgctgcttcaacttctcccaactccctccccaactttctgttcttttccaccccagggcctcaggcatggggggtagaagagacccgggatttcctagcgatacagttagaggctcatcctttgcagggtaaacccagggaccccggccaccatccctacccagtcccatctttctcctcctcctcttctcccaactcaaacagatttgctttagcagatgggacctagagggccaatgtcgacttttctgtgcacgtctttggaccctgtcctgaaacgggtatgaggattcatctcgagtttctccctcactcctttgttctaacttttcctttagctcagatctctcttctggcctcctggtcatccctatttgacattttcagtgaggcccccttcacatctgactcacccagagccgtggctccaattgggggttgaatctgaggacagaggaaggggaaatggaatgtatctatgtgtctggggaggtggagggaggaaaggtttgcctggaggtttatgttgtgaagagaatctccagaacgttgtttgggcc

SEQ ID NO: 23245 - DNA, 1241 bp, Artificial sequence
  DNA replication origin
taggaatgtagagatgaagccctggggagaggtggctgggaggctggaaacagggacactgtcagcgagactttcagctcagggacccagggggtgtgcctccaagcagcttttccccgagcctcgcccctcctagaaagcaaatcccccaccctccacccactaagggatttgtttttcttgggaagggggatgggtgggatgcattgatcacttctattcttaaagatggatcttagttagttgtttcctttcccaagtaataataatatcaacaacaataataataataacgtgaaaaggaaatcgaatgaggaaataagtcagaggtctcctaggtgaaaagcaacagcagagattttttttttctctgacttctgtgttgtctttttgcttggtctgtgagcaggtgtagaggtgatcctagaacaggttgctcagaaggcactccctgagcgctagggagtagagaggggtccggggttgacctagggtgggtgtggaatccgggctcttcacagggtggggggagggtgtgctctcacccaacactgccaagttgcctgaggaaaactccctgcctaagagaattgcatccaagctaggggaaggggagaaagaggagggtcttggagagtgggaatgagaggccaaccaggggaggaggagagaatggggcaaaggagggggagaaagtaggtttagagggagagagagtgtgtttggggaggcagagagggggttaggggctgggagcaggttggacttgagtgggaacagaaaagaggaagagtggaaggtgaaaagatgaaggtgaagagatcagagccaaaagaaaggaaagcgggaggcagggaaaacggtgtcatgaaaggtcaagaaagactaggactgctatctctgtagttctctggaaacctgggaaaggtttgatgcaagaggcggggacagcgctggacgctgatcccctcccggggagggtctttgccccgtgcctgtctgccaactctgcatccctggactcgctctgggttggtggtgggggtcatggtgtgtctttgacggctaagatctttaactcggcgctgtgtttgcctccccctagtcatgtctgagtcacagagatgggcaagatcgagaacaacgagagggtgatcctcaatgtcgggggcacccggcacgaaacctaccgcagcaccctcaagaccctgcctggaacacgcctggcccttcttgcctcc

SEQ ID NO: 23246 - DNA, 1293 bp, Artificial sequence
  DNA replication origin
ccccccacctccctcccggacggggcggctggccgggcagaggggctcctcacttcccagtaggggcggccgggcagaggcacccctcacctcccggacggggcggctggccgggtggggggctgacccccacacctccctcccggacggggcggctggccgggcggggggctgacccccccacctccctcccggatggggcggctggccgggcggggggctgacccccccacctccttcccggacggggcggctggccgggcagaggggctcctcacttcccagtaggggtggccaggcagaggcgcccctcacctcccggacggggcggctggccgggcggggggctgacccccacacctccctcccggacggggcggctggccgtgcggggggctgacccccccacctccctcccggtcggggcggctggccttgcgggggctgacccccacctccctcccggatggggtggctgccgggcagagatgctcctcacttcccagacggggtggctgccgggcggaggggctcctcacttctcatatggggcggttgccaggcagagggtctcctcacttctcagacgggacggctgggcagagacgctcctcacctcccagacggggttgcggccgggtagaggcgctcctcacatcccagacggggcggcggggcagaggtgctccccacatctcagatgatgggcggccgggcagagacgctcctcacttcctagatgggatggcggccgggaagaggtgctcctcacttcctagatgggatggcggccgggcagagacgctcctcactttccagactgggtagccaggcagaggggctcctcacatcccagacgatgggcggccaggcagagacgctcctcacttcccagacggggtggcggccgggcagaggctgcaatctcggcactttgggaggccaaggcaggcggctgggaggtggaggttgtagcgagccgagatcacgccactgcactccagcctgggcaccattgagcactgagtgaaccagactccgtctgcaatcccggcacctctggaggccgaggctggcggatcactcgcagttaggagctggagaccagcccggccaacacagcgaaaccccgtctccaccaaaaaaatacgaaaaccagtcaggcgtggtggcgcgcgcctgcaatcgcaggcattcggcaggctgaggcaggagaatcaggcagggaggctgcagtgagccgagatggcagcagtacagtccagcttcggctcggcatcagtgggagaccgt

SEQ ID NO: 23247 - DNA, 905 bp, Artificial sequence
  DNA replication origin
aagtgaggagcccctctgcccggccagccgccccgtccgggaaggaggtgggggggtcagccccccgcccggccagccgccccatccgggagggaggtgggggggtcagccccccgcccggccagccgccccgtccgggagggaggtgtgggggtcagccccccacccggccagccgccccgtccgggaggtgaggggtgcctctgcccggccgcccctactgggaagtgaggagcccctctgcccggccagccgccccgtccgggagggaggtggggggggggtcagccccctgcccggccagccgccccatccgggaggtgaggggcgcctctgcctggccgcccctcctgagaagtgaggagcccctctgcccagccagccgccccgtccaggagggaggtgggggggtcagccccccgcccggccagccgccctgtccgggaggtgaggggcgcctctgcccggccgcccctactgggaagtgaggagcccctctgcccagccaccaccccgtctgggaggtgtacccaacagctcattgagaacgtgccatgatgacaatggcggttttgtggaatagaaaggggggaaaggcggggaaaggattgagaaatcggatggttgccatgtctgtgtagaaagaggtagacacgggagacttttcattttgttctgtactaagaaaaattcttctgccttgtgatcctgttgatcggtgaccctacccccaaccctgtgctctctgaaacatgtgctgtgtccactcagggttaaatggattaagggtggtgcaagatgtgctttgttaaacaggtgcttgaaggcagcatgctcgttaagagtcatcaccggccgaggcgggcggatcacgaggtcaggagatcgagaccatccgggctaaa

SEQ ID NO: 23248 - DNA, 1118 bp, Artificial sequence
  DNA replication origin
tatgcagaaaactaagaagaatcgcaagttttcagtagggtgatgtccaaactacttgatctggtgcggggcggagagactgttttgcttttgatccaagtgaagacaatagaaatgtgctcgtcccacttcctcaagtcctcaaaacctggaaagaaatgacaccgagtgaagtaggtggctaagaaccctccgagaccagttctgttcgggccagtccgcctgacaaagcgggctcagaaagacaccgtggtgtttccctcaactgcccaaacatatagtcaagtggggctgggggacgcaccacgggacaaggacggtcgtgatgggcgcgggcgcgggcgcggtccgcgaggccccctgcctggcccggatctccccagcctcccctctctgcccagctctcctggccccagcttgtttctgtttcttccattgccccagaaacttggtatgagttttgatttctccatacaggagccgaacctgtgaacaagcttcctactcctcccaactcactacccccgagacccactcctcgggagcgcgagtgccgggaccttaccttgtcttgcccgggagctgcccctttcaggcagagttggaggtgctgcggagaagccggtgcccgtgcggctgcgagtgcggctgtgggtgtgggtgcggtatttggtgcggatgcgggtgcgggtgagggtgtgggtgcgagtgaggatgagagtgtggatgtggatgtggatgcggatacgggtggagctgctggggctgaggcttgggttggggctgaggctggggttgtgattggggctggggttgcggctgaggctgaggctggggttggggctggagctgcggctgcggctgcggctgcgaggggggctgctgctggaccaggtgctgctgcttctgccgcgtggatttgaccgccaggatggcctgacgattcttgtactgcaccatctgcagcgtgatctcggcgttccagccctggtcttgcgggcaccgaaagtcgatctccttgccctctgccatcaccacagtgaagtacatgtacttgcccttgcgctccacacagtccacggtcttcatgttggagaagtgcagttccttgagcttga

SEQ ID NO: 23249 - DNA, 1094 bp, Artificial sequence
  DNA replication origin
ggaacacctggccactgcagttcagacgttttgaagttcttgtgtgatggagatgtggctagagtttctctcacagtagaggcaagtaattgcaactcagaaatagttgctacttggctgcctctactctattattgtacaccttgaaggcgaggttaattaggtcctgttgtgggttttgagggctagaatctaatttttggagctttttctactgtcaggaggggattgggtaataaaatgcatattgagaataagacagccttctggcccctctgggtctagggcagtaaagtgtctaagggttcttgccaaacgggccatgcactgggttttcatacttggtgaaaaagagcctaaacgctaactgatttgggagaggttggataaagaaaaaggagcattaactttggctatgccttcagctccagccacctctctaagaggaaattgttgggcagggggggagggctagtcgccgaatgaagctgtaagccagaccaggcgtgatgaaggaaggtaatagaagggttatagggtgggggagtggaggctgaagaagagttgggacctggattggcctggcaaggagcagcctggggaggaggggaaaggtcagatgggtctgtagaaaacgaggattcacatgactcagagcttggggtggagactgaaggaactgacaggagagaaagaagaaagatttgggacgagttgcattgggagcagagactagggagggaccaatgtgtaaaagaatgcctggatgtcaggcacctcagaccatttgcccattttttggcaaaaattatctaggtctcgtaggatggagaaatcaaaagggtcattttctggccatttagaaccattgtcaagtttgtattggggccaagcggtgttgcagaagaaaataagacacttagattttaggtcaggcaagagttgaagaggttttaagttcttgagaacacaggataagggagaagaaagaggaatggagggtggaagcgtgcccacagtgaagaaggcaagtttaaaaagaagggtagagacacagagaaggggggtggggagcagccctgggctgcaatgtg

SEQ ID NO: 23250 - DNA, 1434 bp, Artificial sequence
  DNA replication origin
ccctggagctggctgacgactctgcccgagttcctgaagaggggtcccgggggtcccggagcggaagtgggagcgcgtgggcgtgggctcctcggctgcctggggctccagacttgtgctgcgtgcggctccggagctctgttctcgctcctgagcagctgctaggtttcccaagcgactgtctcaaccgcccggccgcctcccccgggcagccagagcttcacatctacctccagccgggacccgcccccgagccgcggggcccacgcccagagccctccgccgtccccagcgcagtgcagcagagcgcgatccagtctggggccgggccgcgcttccgcgcacgcgcggagaaacccgcgccctccgaggggggaggggacagagggggcgtcacgggggcaggagaagaaggaggaggaggcccgcgtcgcctccggcggggctcgcgctcgccccgcgctcgccctccgcctcgcccgagccccgggagggtgaaacgctttctcccagcatgcagcgggaggagggatttaacaccaagatggcggacggcccggatgagtacgataccgaagcgggctgtgtgccccttctccacccagaggtgaggaaccgtgctgagtggattccttgccctgcggccctccagcctttcttccccggactcgccgagggcggcggccgacgtgtgtggggtagtgggacgtgccgaagttggggagggtggggaggcgaatccaggcctgagcgcggctgcgagcggataacgggggaggagatagcggggcgggcccgaccggggcgggctctgggacgcagtccctggctgtgcctggaggacagaggtggaggtgttgatggttctgctgtgtcgccgcgctgcgtttgagagcagaggcggaggggcctggtgtggtttttgaaccgcagcttagaccctagtcttgctccaagcctcttggggccaggtggaagcgcgtctggttttgatttctttttccttcgccagggtgaatgacggtatctattgcttccttttagtccactgtgaggggacagtttcatgggcatagtgatgtccttccaggtaatgccatgggtagcacctcgggcaccttgtgtcgggcgtccttttttgagcatttgtccttaagcgattaagaagagaggtaaaaacttttgggaatagacttacactcacattagcttgtcaaagtaccgtttttctaggagctaggggtggacagtgcaacacgtttcccatcacaacatgagtgtcttcccatgtaagtaaacagtgccccgctccacagtcagtcagtctgtgcttgtttacctccgagtttgtagctgagctagtgctagttaaggcttggaagcaattcttgatgcattctgatttttagtgatccacagtgatgtctgtatgcg

SEQ ID NO: 23251 - DNA, 859 bp, Artificial sequence
  DNA replication origin
tccccccctcgcgataagaagacccggcggcaggagaggggatgaagatggcggacgcgaagcagaagcggaacgagcagctgaaacgctggatcggctccgagacggacctcgagcctccggtggtgaagcgccagaagaccaaggtgaagttcgacgatggcgccgtcttcctggctgcttgctccagcggcgacacggacgaggtcctcaagctgctgcaccgcggcgccgacatcaattacgccaatgtggacggactcactgccctgcaccaggtctgtgcgccccgccgccggctctcctgaccgtgagggttctcgtcggcctcctgctcgggcctgccctcagttctccacctcttgaggctgggggcggcgggagactccctgctgcggggtgagggggcggtttccccagagggcgggagggagagctggtggaagggagggcgctgggcttgaggccccccttcagaacagttgctggtggagttgggaaccgggtgatttccggggcataggggaaaaggaactgtggtcgtttggggccccagggccattcgtggataagtctgggatttggggtcgagacaaggaggggtgtagtggggttgtgcctgggccccggtgtcagtggtatattcggaggggtggatgctgaaggaagaaaactaacaaggggcattacggacggttaggcagatgaacatctttgacttgtaggtgggcattggatttgttgcactttttaggacttgattacaaatgatgataataatagtaatctagagccctaagccgagtgccctgaacgaacgatttcctgttttctcatttattactcttggtcactgggg

SEQ ID NO: 23252 - DNA, 1266 bp, Artificial sequence
  DNA replication origin
tcttcatcccctctcctgccgccgggtcttcttatcgcgagggggggaagggggaggcggagagggaagagaggggaggcagggggtgtgtgaatgtttctatgagtgcgggccagaggagggctgggaacccggagccgacgctcgagacttccagtatcccacagagcactggggcggcgcacccggccgagcggacctcccttcctaccacagaagccctcccgcccccagcacggccacccgtcaccggcggccaatctaacgtaacttcgcgagatccggactgggaggcgcccttcgaccagtgcgcatgcgccctgggcctgtgcccgccccaggaagagcgctcccgcgaactgcggcggtggtggctgggccaccagagggaagcgggtgtggcccaggcagcgggggctgggacagacctggaaaggaggaagcggggaaggaaggttgtcctgtcgggctgggggctcccgggaatccggaggccagcagtggaaccgcaaggctctacagggcagatctgcctcccgtgctgtctcagctacgccgagtcgttggctcagggcggaggattttcctattggccgcgttatttgaatggaatggaggataggtcgtgaagtaggtgctgctggttgatctttctaaggaactcagatgaacttgggcatgtcagaattaataaccttttaaaagtggggtctgtgtggccgagggttttaatggtaagttcttgaggtgaccacctattgacaagggttgacctgctgtaattgctgtggcttcctgccaacccccactttagaaatgtttttcttcctctctttacttgttttgttttgctttctctcacgcttgggttctcttctttcttccttcagtgctttaagcctgtctcgtactacccatgagcttagctcagcctgattactggtccttaccttttaagggatttctggttacagctccatctctttctaaggaggggtaaagacctagctgcgtctagcatttaaacggaacgttaaggaaggcaattaattcaaccactatttattgaatacctactatgagccagtaactgtactaggcactgaagatacaatgaaaaatatgacatttatttgaaccacctcttgagttcagtcgcccaaacaagactaatttatcatcgtcataaaaaaaagactttaactttgccttgtatgaccacacgcgcacacacataggatttgtaatactgatgtcttatgagcc

SEQ ID NO: 23253 - DNA, 958 bp, Artificial sequence
  DNA replication origin
gaagtgaggagcccctctgcccggccagccaccccgtccgggagggaggtggcggggtctgccccccgctcggccagccgccccgtccgggaagtgaggggcgcctctgcctggccgcccctactgggaagtgaggagccactctgcccggccagccgtcccatccaggagggaggtgggggggtcagccccccgcccagccagccgccccgtccaggagggaggttggggggtcagccccccacccggccagctgccccgtcccggaggtgaggggcgcctccgcccggccgcccctactgggaagtgaggagcccctctgcccggccagccaccccgtccaggagggaggtggggggggtcagccccccgtctggccagccgccccgtccgggaggtgaggggtgcctctgcccggccgcgcctactgggaagtgaggagcccctctgcccggccaccaccccgtctgggaggtgtacccaacagctcattgagaacgggccatgatgacaatggcggttttgtagaatagaaaggggggaaaggtggggaaaagattgagaaatcggatggttgccgtgtctgtgtagaaagaggtagacatgggagacttttcattttgttctgtactaagaaaaattcttctgccttgggatcctgttgatcggtgaccttacccccaaccctgtgctctctgaaacatgtgctgtatccactcagggttgaatggattaagggcggtgcaagatgtgctttgttaaacagatgcttgaaggcagcatgctcgttaagagtcatcaccactccctaatctcaagtaatcagggacacaaacactgcggaaaggccgcagggtcctctgcctaggaaaaccagagacctttgttcacttgtttatctgctgaccttccctccactattgtcctgtgatcctgccaaatccccctctgcgagaaa

SEQ ID NO: 23254 - DNA, 1242 bp, Artificial sequence
  DNA replication origin
ggcagaccccgccacctccctcccggacggggtggctggccgggcagaggggctcctcacttcccagtaggggcggccgggcagaggcacccctcacctcccggacagggcggctggccgggcggggggctgacccccccacctccctccctcccggacggggcggctggccgggcgggggctgacccccccacctccctcccggacggagcggctggccgggcagaggggctcctcagttcccagtaggggcggccgggcagaggcgcccctcacctgccggacggggcggctggccgcgcggggggctgatccccccacctccctcccggacggggcggctggccgggtggggggctgacccccccacctccctcccggacggggcggctggccgggcggggggctgacacccccacctccctcccggacgaggtggctgccgggcggagacactcctcacttcccagacggggtggctgctgggtggaggggctcctcacttctcagacggggcggctgccgggcggaggggctcctcacttctcagaccgggcggttgccaggcagagggtctcctcacttctcagacggggcgtccgggcagagacgctcctcacatcccggacggggcggcagggcagaggtgctccccacatctcagacgatgggcggccgggcagagatgctcctcacttcccagatgtgatggcggccgggaagagacgctcctcactttccagactgggcagccaggcagaggggctcctcacatcccagacgatgggcggccaggcggagacgctcctcacttcccagacggggtggcggccgggcagaggctgcaatctcggcactttgggaggccaaggcaggctgctgggaggtggaggttgtagcgagccgagatcaggccactgcactccagcctgggcaccattgagcactgagtgaacgagactccgtctgcaatcccggcaccttgggaggccgaggctggcggatcactcgcggttaggagctggagaccagcccggccaacacagcgaatccccgtctccaccaaaaaaatacaaaaaccagtcaggtgtggcggcgcgcgcctgcaatcgcaggcactcggcaagctgaggcaggagaatcaggcagggaggttgcagtgagccgagatggcagcagtaccgtccagcttcggctcggcatcagagggagaccgtggaaagagagggagagggagaccgt

SEQ ID NO: 23255 - DNA, 816 bp, Artificial sequence
  DNA replication origin
cgatggaagaaaggcatcgaaggctactcgaggctgacgaatcaatacttgctcctcctgagcgaaaaaacaacacacaaacatagcacccaaagaaggaacacgaagcagctccgcgccccgcgcgaggccgctttggcagcgaggaaaggcctggtcccggcgcgcaaagagcgcccttttcgcagggcgcgtccctgctctcgcttcgagccctctcggcccaagcatcctatccacctcccggattttctctggtgcggcccagagcccttttactttaccttccttagccgttatcacgagccccctggaatgatcggaaacacttggccactgggagctgcaggtgcgcaggaaatccgcaccctcaagctggagggaaaaccaaggcagcggcagattaggaaagaaacatcggttccggggttggggtggggtggggggcggctttcctgcttcctcgggccgggtacgcatttcctgcctattgcaagcacccggtcttcttgggtcactgggggttcattagagacggagcgggaggggcgggcgagaaagggggaagggaaaaaagaccaagcagctggaggttaaggccccgcggaaggcgtttaatcagccttcgcatttccctgccccggcagcatctaggcttacattttcttgtttgggtctgtagctgaaggggtccacccccagctcctgcatcttctcctgctgatccagccggtgcagcaggtcctgcagccgctcaatatagctgatggcgctccgcagaatctccaccttgggcagcctctggttggggttggc

SEQ ID NO: 23256 - DNA, 1335 bp, Artificial sequence
  DNA replication origin
acttttttctattattgtacaccttgaaggtgaggttaattaaatcctgttgtggggtttgagggccggaatttaatttttggagttttatttaatgtcgggagcagattgagtaataaaatgtattttgagaataagacggccttttgaccttttagggtctaaggctgtaaagtgtctcagggttgctgccaaacgagccatgaactgggctggatttttatatttgatgaaaaagagcctaaacgctatctgatttgggataaagaaaaaggagcattaactttgactatgcctttagctccagccacctttttaagagtaaattgctgggcaggtgggggagggctagtcacggaaagaaactgtaagccggaccaggtgtgaggaggggaggtgataaaaagattatagggtggaggagcagaggctgaggaagaattgggacctagctcggcctggcgaggagcagactggggaggaggggagaggtcagatgggtctgtagaaaaggaagattagaaagactcagtgatgctttgggttgggactgaggggacaggtgggagggaaagaaggaagatttgagacgagttgcactaggcacagagactagggagggaccgatgtgtaaaagaatgcctggacatcaggcacctcagaccgtttgcccattttacgacaagaattatttagatcttgcaggatggaacaattgaaagtgctgttttctggctatttggaactactgtcgagtttgtatcggggtcaagcagcattgcagaagaaaataagatgcttagattttaggtcaggtgagagttgaagaggttttaagttcttaagaacacaggctaagggagaagaaggaggaatagagggtggaaggttgcccatagtgaaggaggcaagtttaaagaaaagggagagtagagacacagagggaagcggttcaggggttcttaccctccagaaaagtgggaaaggggttggggcacagagatacgaggttggggtgcagaaataagggatcagggaacagagatataagaggttggggagcggaaataagggatcagggtgcagagatataagatgtcagggcacggaaataagggattggggcacagagataagcagtgtgcagaaataagggattggggcgcagagatataagaggttggggcatggaaataagggattggggcacagagataagaggttggggtacttgcccctcctttagaaaatcgggacttgccactaagagtgaaggagaaggggttgggggtttcttgccccccagaaaggaggagaaggggtagagacacggag

SEQ ID NO: 23257 - DNA, 1049 bp, Artificial sequence
  DNA replication origin
cgtccccgcgcagcggctccaacaaagccagaggaccggagacgacccggcgaggggctgggagtggcagcggggaccccagagccagaaggaggcgtcccctcggcggggcgagtacagtgggaaggggcagcgggaacgtagcggggagagaaaggggaagaaagtgttctgttctcggcgcgaacgccttcctggctcgtcctcgttccccttctcctcctgcctgagcgcgtcccatgtcccgttgggaattggcaggcggggaagggaggaggggagaggggacgcggtggcctggcgagcgagccgctcccttacctctgtccagggtgagcggctggaccactgtcaatgtcgccatgtctgccgtgggagccgaagtgacgctcggcttcagcatcagcaaccgctcgtagtgagaaaaaaaggaggagattgggggcgggggtggagagggaagacggaaaggagggggaggagggggaaggaaggaaggtggtggtggtggagaagaaagcttgggtgggttggtagccagatggagacgcaactgttccgcggcggcagatcttcagttgcggtgcggagctgagcaggtatccgagagcgactgcatcgccgggctctgggagggaaggctctgccctagaactttgctattccacccccaggagcgctgggtgggtgtagctggcgggttgcttcctttcaactttccactctaataaaatggtcagaatatacgtgtgtgcatgcgggtgcgtgtgtgtataaggggaagagagaggatggaaaggggatatggggaagggagtgggagatgagttttctcagattaagagaaattgccaatccaataatcccatcccctttagagagaaaatgcttccattatcagaaatgtttgggatgtaattacatttgcagttaatttctgttgaagtttttcggaatgttgacctataacggcatataaagataactgactaaaggccagcgttccatcagtagatgttcatttaggacctgagtatattgcctggaga

SEQ ID NO: 23258 - DNA, 832 bp, Artificial sequence
  DNA replication origin
caaaaagttaccagggatgggggatcagggttggcacagaagtcactcaccacctggtagagggcgagtgtttgttctccagcgttttggtccagggcttgtaccagctgatctgctcggcagctttgccccagaacctctcggggtcggtcaccgaggctgcgaagtgggtcttgtactcgctgccactgccggaggacagtgccctgcatccccggcccccgagaccgccccgcgggcccgggaccactaaagccctgagggccgcaccggctccccgggccggagaggacccaggcaagggccctccgagccccccggcgctggtgactttacgacactgcagccaagacggtttcatctcctccggccacccgcggtccccgagtgtgcgacaaatggtactcttgcaacttcctggggcctgagggaagggagtagggggcgggggcaaattccgaagtgagcccagagcccagaagtttggaagccacactagagtcgccgggaaaaaccgacctggagcgaccagagaagcaacaggctaaagtgggggccccgggacaggggtgtcacagcgccgttgcagcaggttagttgcgctgctgcacgagatccaaaccccaacatgcacttccaaccccgcagccttccgggaaaaatcgcgctcaaactccagaacgtccttccgatttcaacacacaagtactcctaggaggaggccaacggcccatctctcaattttcaatccagcagtttgtacacggctggtttaatctttggaaggtcgttggtggaggtggcatcgcctctgacctgcaggaaaccagca

SEQ ID NO: 23259 - DNA, 939 bp, Artificial sequence
  DNA replication origin
aagaaagaaagagagagagggagagagagagagaaaggaaggaaggaaggaaggaaggaaggaaggacaaaagaaagaaagaaaggaaagaaagaaagaaagaaaggaagagaagagaggagaggagagaagagaagagaagagaagagaagagaagagaagagaagagaagagaaaagagaagagaaggaggagagaagagaggagcggagaggagaggagccgagcggaggggagcggaggggagcggaggggagcggaggggagaggagggcagcagaggtgggtggggagggaaggggaggggaggggaggaggtgaggggaggggaggaggtgaggagaggggaggaggggaggggaggggaggggaggggaggggaggggaggagaggagaggagaggagaggaggaaagagaactattgctagtgacttgtagaaaatacaatcagacaaaatggcagttcctaggactctaagcatactaaggaatcataggtagaacaaaagtgagctgaaaaagaccgtagttgttgttacagatactttggttatccttctttgtacctctgaacatcctaggacccaaggactgacgcatcttcaatataaacatatacatatttcctcacacacttatgcacacagacaagataaacactcttgctctcaaactggtccacgtgcagaataggcttctgattagtgacaacccctaagcatgctgcaatccttaactgaaatcctatgaactcccaaagccccatttccaggatgttctaaaaacatctgcttcacactacccgggctgtaattaagtggctagcagttatttatggagacaagaaatctagatgtcatgttgcaattgggaaatagctacaataaacaaactagagcattctctttgtagaagagcatgggatacttcatttaga

SEQ ID NO: 23260 - DNA, 1464 bp, Artificial sequence
  DNA replication origin
gcaatcaatcgctcagaaggaatccggctcggagctctactgagcctgcctgtgctaatttgggccgagctggcgcctcacggccatgtttgcgccacctacagcctcggagggtgagcgtcatggcggcttcttgccctctcccggtgaccccggacctgcccacgctgcgtgccaagttgcagggactgctgcagttcctgagggatgccctgtccatttccaatgcacataccgtggatttctacacagaatccgtgtgggaggagctggtcgacttgccaccggagacagtgctggctgcgctgaggaagtcagcgtcggagacggaggccctgccctcagagacgcgccccctagtggaagcagagtgggaagcaggtgggtggtggggtaggcggggcgggaagggaggcggaggagaaggtcccggcagacgaagcgagccccctggtggaagccagcagaaccaggtgcgtggcggcggaggcggggcggcccgctgggaaaccgaggaggggtcggattagttgaggggtggggtggggatgttctttggaatcaggatcactctttctttgggtgcttgtgtatgtccacaatttaaagaaagcaggaaacagggcaggggagttccttcatctagtaattccataataattgacgctagggaaactaggggagcagtgctctcacaggttttataaatgccagcatgtggtggaagattactcaacagttaataaagataatttcaagtggtggtaatgaagtagaaaataaaaacagtgtaatgtggtagggattgtgtaaggaggctgcctcaatttaggaggtcaggaacatgagaaggcactagctgcagagccacagggaggggttgcaggcggtgggaaccgcaggctaggcttggctctagccaggtgaggggctgcaggtgcaggacgggaggcaagcagaggccagatggcacaggcctttctaggccttggaaggattttggattttaagtgtgacggaaacccttgggattatttaggcaacatagtgacctaattcacatttgaaaagataactgtgaattatttgaagaatagactagggcaaaagctgaagctgagaggccagttaggagactacctcagtagtacaacagatgattgtatcttggactaggatggtattcggatagtcactatttcatttaaaaactattttaaagtacctaatatgtgtcttgaatttttgtaggctcaagcttttcctaccctcaagaaatgtagattcttctcaggcaagcatattttggaagtagaatgatggacaccaacaggcttctgggatttttactttccttctagacttcccaaagttacccttactagtgaactttattcattgagcattctctgaatgcaaagcatcactagagggacctcttataatagcacttggtaaatactg

SEQ ID NO: 23261 - DNA, 1036 bp, Artificial sequence
  DNA replication origin
gctggggctggggctgggagggagctaataaacattgaatgtgcagcagctgccttggcggccggagtccgcccgagcgacaccggagcagtgcgcccgggaggcggcgaggggaggcggttcgccttgtccctcccacccgcgcctctttctctctcttcctccagctggtcccagagcccggcttggtccggtccctctgcccccatcccgcacccttccacctcctccgagtcccactcctcacctaggacgccccaaactgccatgggttagggtggggatcgcgacccgcgcgaaagaccagccctgcgcttccgccgggggacgcggagcccaaacgccgctcaccgcttgcgggcgccgggcatggggagtgtggtgtgagcccgcacccggggaggacgcaggagctgcggagacgggcgcgaggaggaggagaggagtcgtggattggaaggacccgagggagggagggtggggaagcgagggaaaagtgaagctgggaggagaaggcggcggaaggtggagattgatgcttctgttttttgttgccgctgctgccctcgcgctgggagccgagccggagggaaggcggtggagagatgattgcagagttggtgagcagcgctctggggctcgccttgtatctcaacaccctgagtgcggatttctgctatgatgacaggtaaggggccgagaggagggggcgacgggctgcagggggcacactccgcagtggctctgaagcttccctctttaaggctcaaagtgcgtcttggaggaactggttcagcacctgatggtttaggcgacacgtaaacattaacacctaaatcaaacaccggggacgtgaggcgcgctgggcgggccgagggagtttccgctcctagtttgcagcaggttctctcccttgcttctcggctgttggcagacgcttgagtttcttagcggaaatcccggcaatttgggaaactgtttaatgaacgtattaaattaaagtcttaggtattccttgatgcaacaaagcacatta

SEQ ID NO: 23262 - DNA, 1394 bp, Artificial sequence
  DNA replication origin
ggttaattaaatcctgttgtggggtttgagggccggaatttaatttttggagttttatttaatgtcgggagcagattgggtaataaaatgtattttgagaataagacagccttttgaccttttagagtctaaggctgtaaagtgtctcagggttgctgccaaatgagccatgaactgggctggatttttatatttgatgaaaaagagcctaaacgctatctgatttgggataaagaaaaaggaacattaaccttgactatgcctttggctccagccacctttttaagagtaaattgctgggcaggaaggggagggctagtcacagaacgaaactgtaagccggaccaggtgtgaggaggggaggtgataaaaagattatagggtggaggagcagaggctgaggaagaattgggacctagctcggcctggtgaggagcagcctggggaggaagggagaagtcagatgggtctgtagaaaaggaagattagaaagactcagcgacgcttgggattggtactgaggggacaggcgagagggaaagaaggaagatttgggacgagttgcactgggcacagagactaggaagggactgatgtataaaagaatgcctggatgtcaggcaccgcagaccatttgcctattttacgacaagaattatttagatcttgcaggatggaaaaattcaaagtgccattttctggctatttggaactactgtcgagtttgtattggggtcaagcggcattgcagaagaaaataaggcattttaggttttaggtcaggtgtgagttgaagaggttttaagtttttgagaacacaggccaagggagtagaaggaggaatggagggtggaaggttgcccatagtgaaggaagcaagcctagagaaaagagagagtagagaaatggagggaaggggttcaggggttcttaccttccagaaaagtgggaaaaggggttggggcacagagataacaggtcagggcatggaaataagggatggggcacagaaataagaggttggggcacagaaataagggattggggcacagagatgtaagaggttggggtgcagaaataagggattggggtgcagagatataagaggttggggctcagaaataagggattggggcgcagagatgtgaggttggggcgtggaaataagggattgggggttcttgccccatagaaaagcgggacttgccgctaagggtgaaggagaggggttgaggggtacttgcccctcccctagaaaagcagagaaggggtagagacaaggagagaaggggttggggtacttgccccttccccagaaaagcgggacttgccgctaagggtgagagaccaaggcaggtgtccctgcgtggtctgacatctttgaaacgtgggtg

SEQ ID NO: 23263 - DNA, 875 bp, Artificial sequence
  DNA replication origin
cagaggtcgtgggcaaggtcctgtccaaaaaggtgggggctgtctctaaaaccttgaggtagtatgcaccaggtgagctgatgtcaaaggtgggtgtaggggtcttcccacgtaaaggcaaagaagtcttgagaattggggtgcaaaggaattgtaaaaaaaagtatcctttaggtctaggatggaaaaatgggtggtactggagggaactgtggaaagtaaaatgtatgggttaggaactactggacatactgggagcacagcttggttaatgagcctgaggtcccagactaagtgataagttccatctggttttttaacatgtagaattggtgtgttaaaagggaagtttgttgggcagaataggtgactggaaggagatgaaaatgataggctttaggcctgcaagagctgcttgggtaattggatactgcttctgtgaaaggaactgggtggggtttttaagggtaatgcggatgggggtgtggtgttttgcaactgagggtgtggaagtatcccaaacagcagggttaactacggatgggggataagcaaaggttgcatattttagggtgggaggttggaggagtagaagaaagctagaagcaccagaggggtcttggtggatgtgttggttaccatggggaatgtggaagtggagagtagtgtggagttttgaaaggatgtctctgcctaggagtggagttgggcatgagggcaggattaagaaagagtgagtgagggaaaagatgtgaagggagcagaagagtggaggggtgactcagggtttggagacttgtccatcaatacccacaacagagactttggaggactgggtgggtcctgaaaaattaggtaaagcagagtaggttgcc

SEQ ID NO: 23264 - DNA, 1196 bp, Artificial sequence
  DNA replication origin
ggggcaaggtcatagatcaacagcatcccaaagcagaagaatctttcttagtacagaacaaaatggagtctcctatgtctacttctttctccacagacacagcaacaatctgatttctctatcttttccccacatttcccccttttctattccacaaaaccgccatcgtcatcatggcccgttctcaatgagctgttgggtacacctcccagatggggtggtggccgggcagaggggctcctcacttcccagaaggggcggccgggcagaggcgccccccacctcctggatggggcggcggccgggcagaggcgccccccacctccctcccggacggggcggctgccgggcggagacgctcctcacttcccagacagggtggctgcggggcggaggggctcctcacttctcagacagggcggctgccaggcggaggggctcctcacttctcagacggggcggctgccgggcggaggggctcctcacttctcagatggggcggctgccgggcggaggggctcctcacttctcagatggggcggctgccgggcggaggggctcctcacttctcagacggggcggccgggcagagacgctcctcacctcccagacggggtcgcagcagggcagaggctctcctcacatcccagatggggtggcggggcagaggcgctccccacatctcagacgatgggcggccgggcagagacgctcctcacttcctagacgggatggtggccgggcagagacgctcctcacttcccagacggggtggcagccaggcagaggctgcagtcttggcactttgggaggccaaggcaggcggctgggaggtggaggttgtagctagctgagatcatgccactgcactccagcctcggcaacattgagcactgagtgaatgagactccgtctgcaatcccggcacctcgggaggccgaggctggcagatcactcgcggttaggagctggagaccagcccggccaacacagcgaaaccccgtctccaccaaaaaaatacaaaaaccagtcaggcgtggcggcgcgtgcctgcaatcgcaggcactcggcaggctgaggcaggagaatcaggcagcaaggttgcagtgagccgagatggcagcagtacagtccagcttcggctgggcatcagagggagactgtggaaagagagggagagggagaccgtggggaga

SEQ ID NO: 23265 - DNA, 879 bp, Artificial sequence
  DNA replication origin
ctgccccgccaccccatctgggatgtgaggagagcctctgccctgctgcgaccccgtctgggaggtgaggagcgtctctgcccggccgccccgtctgagaagtgaggagcccctccgcccggcagccgccccatctgagaagtgaggagcccctccgcccggcagccgccccatctgagaagtgaggagcccctccgcccggcagccgccccgtctgagaagtgaggagcccctccgcctggcagccgccctgtctgagaagtgaggagcccctccgccccgcagccaccctgtctgggaagtgaggagcgtctccgcccggcagccgccccgtccgggagggaggtggggggcgcctctgcccggccgccgccccatccaggaggtggggggcgcctctgcccggccgccccttctgggaagtgaggagcccctctgcccggccaccaccccatctgggaggtgtacccaacagctcattgagaacgggccatgatgacgatggcggttttgtggaatagaaaagggggaaatgtggggaaaagatagagaaatcagattgttgctgtgtctgtggagaaagaagtagacataggagactccattttgttctgtactaagaaagattcttctgctttgggatgctgttgatctatgaccttgcccccaaccctgtgctctctgaaacatgtgctgtgtccactcagggttaaatggattaagggcggtgcaagatgtgctttgttaaacagatgcttgaaggcagcatgctccttaagagtcatcaccactccctaacctcaagtacccagggacacaaacactgcggaaggccgcagggtcctctgcctaggaaaaccagagacctttgttcacttg

SEQ ID NO: 23266 - DNA, 1233 bp, Artificial sequence
  DNA replication origin
ggctgctgcccggccccgccgcccagccaagccgccgcctgggtggccattcccaagccggactccggggaagtggcagcgtggatcccagccgccagaattcgaggtctgcggcggctttcaaaacttgacaactttcctttccaggaggaccccgttctggagcgttatttcaaaggccacaaagctgcgatcacctccttggacctcagccccaacggcaagcaacttggtaagtcttattcttgttttgcttttgtaatgagactaaactccatgggccggaaacctttcctcctgtccgggcagggtccctaggagaacggctaagggcctgtatgagggttgagagcacccggagacgagggcccagcgcggcggggcgcagctagggccccctctgccatcccggcccccagcccccggcccggccaagagcctcctatccagcggtctgggcctggcggacgactttcgcaaactaaccaccaggaggagtgagtgggaaggggaggggtttctcctcggcccggggagggtggggtgttggctggagagtttgtgaaaagttgtgagccgagcaggaggaagtagggagagaggagttgggctgtgccggaggccgaggaccgagagggctcaggtgacccctggaaagcctgggtggctggaaaggagcctagcgcctgcatgaaaggaagaacctgctgggaagtacctgagctcgagctgtgggttccgccgcccttcccctgcgtggtggcttggtggccgcgtctgcgcctcagccctgagaatccggatggcggtgaggtggacttgggcaggcaagagctgcctgctgctggcgtttttaacagtggcctatatcttcgtggagctcttggtctctacttttcatgcctccgcaggagccggccgtgccagggagctggggtcaagaaggctctcagacctccagaaaaatacggaggatttgtctcgaccgctttataagaagccccctgcagattcccgtgcacttggggagtgggggaaagccagcaaactccagctcaacgaggatgaactgaagcagcaagaagaactcattgagagatacgccatcaatatttacctcagtgacaggatttccctgcatcgacacatagaggataaaagaatgtatgagtgtaagtcccagaagttcaactataggacacttcctaccacctctgttatcattgctttcta

SEQ ID NO: 23267 - DNA, 1135 bp, Artificial sequence
  DNA replication origin
ctcggaaaatggttcccactgccgggcgaggtgagtggcggccgccgcccgcccgcggccgggggcggcggggcaggtcacctgcgggggaggccaggcggagcacggaggtcgggcgtcgcggcggggatcctgatagctgggtgcgcagcgggttgcgccggattcgggagaagctgacgggggcggtcggggcccctcgcaggttgcctcttgccgggagattgtgaaggtgagcgggcttctcgccgtgcacctcagcgccgggtcagtctgggagtcgctgctccgggcccgagggatggggcttgttggggcttctggtctacacccgcaggtcttcggcttcacgaagccgcctcggccgcgccacagcccatcccgccaccggtcgcccccgccacggcgcgtggtgaccttgagggcaccgtgcccggcactccctctccccgcgccccgggagggtcacccctctaatccttggcctcggccccccagacgcactgcgggaggggagcgggggcccctggtcggcccctggccctggtggttgattgttggcgtgtcaggacggtgattcctcgggagttggagagccgcctggtctttctcctcacgccttccgtctggccccccaggatgttcacagttgtttccgattcgtgtttattcacttagtttaagagaaaaaagcctgcgcccccacctccctttttgaggaaggagtctgtaggaggaccgcgttccagtggcaggggtgtggggtgggggctgtgctctctttatcccatcctgcgggagaatcctgtggctaagctggttagcgacccctggttctgcgccgcggtcaccagccaggttggtctctgtgcgcatttcattcaccagttttctgcgggactcgcagcgctgggagtgctcgcaccctgtgcgctgcttggctcggaggggagggcagggcgtccgggtgggttaaaggggtctgcaggtacttggagggctcgaccctcctcgacaggctgatatttaccttttctttgggttagagcgctgcagacagccacctttcgcttctgtgcccgctacttttcttggtttattaataatctaatggcttctgttggtatcgattgct

SEQ ID NO: 23268 - DNA, 1536 bp, Artificial sequence
  DNA replication origin
gccgtccgcaacagcagccgcgggcggggtgcagccacctccgtgagcgccgcagcccgccccactcggggcggggcccgcgggcaccggagagcggacggccgagcacgagggggctgcgcgcagctccgggcagggaccccgtctgcaccgggtggcctgcaagattgccggggtaggcagggggaggagaacgctcacccgttccggtctggcgctcccttttctccacacccacacgcctcccgctccacgctggcggcgcagctgctcccgctgccacagccgccaccgccgccgaagctcgcgccgccgccgctgccgccttggctgagcgcggtcacgtgacgcgatccgcggggagcctgggggcgggcgagtgcgcgcgcgcgcgcgcggaggaaccgcggctcggaccgggactgggagctgagcggcactgggagggcgtttaaggggaggacccggcgagcgcgccctcggctggcgagcgcgcgcctggcgattagaacttgccgcgcggtcgggaaagggtggccggagtgaggggcggaggtggggacttgcgcctccgcacgcccctccctttcttccttcccctgagcgccttggcttgccgctgcccccgccccctccagcgcgccccttccctcctgccgcagcctgcgattggctgagaggctctgacgtccgtgtttccatgacgtgttggtgcaggagggagcggcgggggaggagggggtggccaggcgcgcggggaggtgactccgtcagtcacagctgctgtttcggcgcggggccgggccgctgccgcgacgtgtggaggcaggagagcgatgattgccgcaggagaagtgcgggcgcccttcacctggggcccctcccgaaccgcccccgggcccatgcccctccagggcccaggagcgagccagcgggagggcgagggcgagcgctcctggcgaggacagattaaggcgaacccccagtcagcggacatttgagcggctcctcgccgcgtctctgcccccactccaaaccggactcgacgcctgtcccgggccgtgacgcacgcaccggaggaaaaagtgcttctcggctcgctccctctttggggaagagagctcactccccatgcgggcgcgggacactccatctctgttcctgccggtcgggtccgcaaacaccggggatcccagctgcggcgcccaaagggttaacgcaggcgttcggccagtgcaaaccggcctcgcaggatccgcgcttaaaatccgggtgttttcattttgggtttgtttcttctactatgccaagctggtggctctcttttaattctcttgtaacatctcaaccctgcacccatctttcctgaggggaaaaggaaacgggataacttgcggtatttcgatgctcaaaggtaaccggcggctctgctccaaccttcaagagattttgcaagttgaaaaaaaaaaaaaaaccatccttcgtaacatctacttaaaaaaaaaaaagcaagttttccttcttgtacacgcatat

SEQ ID NO: 23269 - DNA, 1633 bp, Artificial sequence
  DNA replication origin
cttgaccggccgcggcagcgtgctcacatccgctggcgggctccgcgggtaggagtggcgagggtggtggcgcaggccgcggcctctgcggccccagcgcttcttcctgcctgggggcttcacccagccagggttccaggacccgctccagcaggagcagcagcaaaagcagagagggtgcaggccatacacccgaaacacttgcaccgggcaggggaatttccagaatcctggagggggtgggcgccagggccctccccagcacccccagttagagcacacgggtggttggaaccaaaagcccgggccgtgctgttgcttcggctgcttccttgggggcccatactcggtcttggggctatatcggtgcggtctattgtacgctggagcacccgggcgccttcgatggcaggacgaccaggagctcaaggaggccgagtgtgcccagccacagccacagccgccgccgccaccgccgcccaggttcagagggtcttcccttgtgtcgagggtctgagtcatggttcagggagctccgagaggtccagatggtagcgacctgaagctgtcgtcaagttttgccaggtaggacggtcagaagagcctcgtctcgtcaacctgtctctccacgcagcgccacgtgtctacccctgggatcacgttttcctctccaggaggctgctctcttcctggtttgcacgctcttcggtagtaatcgcttgtccttcgcacctgggttgtctcgcccaggtgtgctgggtgggactggggctgggtaaggatggtgggggaggaaggtgttggcaggcgacacgcagtgagacccactcccgggtccccaccacacccggctctgctgaggcacgggctggggccgggggaggcaggggttgcgcagttacctgctgctccctctcaacccaggtgcttcactgtcgccgtcctggcaggactgtggtggcgagggcagcggcagcctttaaatactggctgtggtctcccgcgtgcccactgcgttcttggtcacccagggcaacagccaattggggtcgaaatcgtcctccctgtgtgcaaggccgggttctgtccggaaccaggctccaggtgaacattcgcagggggcttgtgacgcagcgtttgggggaggtgaagaggggtccaggctgggtttctgctgctcaattcaagcaagtctggaggcagtttatccgaaagctttgtatcaccttgaggcgggggtttagaagatgggccttcatctgaacccggtgggggcgggagaacttgagttttgaaaaccccacattctacacctttggagggcctaagggatcatggaaaattactggagaaaggaaactttgcccaacctcttaccttctggccggtgccaactcttcttactcctgagaattgggattcataatacataaaacaagaccacgaacatttattattgcatgtgctcactgacaaataatcctgtcatctaccctgagaggtaggcgtatcttatcacctgtcacagatgagggaactgagagcttaatttccccatggttgtggggctaataaatttccaggctacgatttaagcctaaacctgtttgacccaaaagttaggttcctaatg

SEQ ID NO: 23270 - DNA, 1083 bp, Artificial sequence
  DNA replication origin
gccgtgtccttcatctccaagtttctccgcaccaaggggctcacgagcgagcgacagctgcagaccttcagccagagcctgcaggagctgctggcaggtgagcagggcgagggcgtcggagggacgcgggccccacatccctgggtcagagtccggccgtcggggctgcgggaacctcggcagcgccccggggccggtcgcgcttgggccccgccgcgggaccggtgtggttgcgctgggtggccgctaacagcggttccccgcgaggctttaggggctggacggagggcgcccccttccccccagctggcaaaacggagaggagaagacaacacgcacaacaaagaaacttaagcccaccgaggcgggagctgcggtccgaggaccgtcggcggatttggggacaaaggagccgtggggctggggtgggttcgacgtcccctttcctcagccccctccaaccgttgcgtggtcggcggcccagccccggggtgggaagctgcgccgctgccccggagccagctcagaacggacgtgccgtctccccgcgcctcctgcccctgcccattaatcatcggatttgtcaccggcacaattaacagccctgcccagagcgtggtttagggttgcttgtttttcttcccttcggggttaacagtccggtggcgcttctcatctccaaagccatcaactccattgtgtgcatctggggtggggtggagaaagtaaacagtttctcgcctggccataggtgccagtggcttcccgactggccgaggctgcgcgcctgattcctgttttggcggctcaaccggttggttcctggagattgttttgtccggtactactgtgttatttctaaaaccctgcccgctttttccatccccgcacatgcacaacaacggatgcaatcctggacattttaaaaagttgatagttttcattttcgctcctcaaaggagcctggggtaggaggaatccgcagtgggagctaacgatcctaagcgttgtttctctgttcttcttttcttctatagaacattataaacatcactggttcccagaaaagccatgcaagggatc

SEQ ID NO: 23271 - DNA, 1669 bp, Artificial sequence
  DNA replication origin
agtcgttcgctcgctctctctcgcgtgctccctctcgccgcctgtggggaagtcggggccgcccgagcggccgtcgccaccgcctcgccccgacctccttcccggtcccctcccggcccagtccctcccgcccgcgcaccccgagtagtgagtggccccgcgcagggtctggagagtcaccgcggcggcgccgggtggtggttaaaccatgttaaggaggattttacagagggtaagagagtgaaaccgtctttctggcagcacgtgagcgggacagccggagctcggggccgcggcgcgggcgcccctcctcagcgcgggctccttccttccctaggccccacagcccggcaggcgcttaggcctcggtcgcccggcccgggggcggggagggcgggtggggccggcgcggcggggcggcaggcagagccctggtggccccgcgcgtccaggcctggcgcccgctccggcgcggggctccgtgtgtgcgagcgggctgcgagctggagggtgtggtgccggcgcgttcctcccgggaaccctgagtgggagtgaaaatggagagttggtgcccgtgggacgggccagccgccgcctgccgggctggagaacgccccatgggagattcgggcggcttgcttcgcctttccccacccgccgcactccccgtgccccccaatttgacacgatgcgcacctgccacacacggccctgctttctcctttggaccacagtggagggtggtgtggtgagccccggcctagcctgggcccaggcgtgggactgacactggcacagtcagccgagaaggaagatgttactcactgttggaaactttttttttaattaaaaatatgttttctgtgcaagccccactaccttattttagctatccaagaataaatccgcagtaagcttgatcaagtggtatatacacttagtttctgcctgtgctgtctctgaaatctggaaaaccttgaggatagaaagattagagcattagaaaactgtaggtgtatcatttaagaatcagttactagaataacataattcacatctcttttcctgtaagagttattgtacctgtcaacttaaatttgttttttttttttggtatagcttttttcttttctttttgaggctgatagggtgtaacaaaatgtaaatgattgaaaagtaggtgccgagcctattagttctttaccgagggagtaggataactagttcaaaggacaaaagaaattagtgaatttgtaggattcagccgaggaatgtgcggaagagagttgagtcatccagtagataggaagggagtgctcttgcttctgcctagctttctcctgaaagaatgaagtcatgtgaaacttggtcagttattagagggagaaatagttaacttctttatctgacaacctgtgttgacatttaattgtattttgcagtgttttgtgaattttgaaatcccggtaagcgatgattttggcagtaacaagggcatgtcctttactttccccatcacttccttagttcagcagtaaagacatctgtgcatgatttactttcaggctttaggagatttttcttttatcagacctggaggaactgattacctcatgtttcagattgtgtttctgtcatagttctgcaagtgaaaattagtttgcctgtg

SEQ ID NO: 23272 - DNA, 1144 bp, Artificial sequence
  DNA replication origin
gcgggcgggagggactgggccgggaggggaccgggaaggaggtcggggcgaggcggtggcgacggccgctcgggcggccccgacttccccacaggcggcgagagggagcacgcgagagagagcgagcgaacgactaggcagcctgcgagcgcctccagcccgcccgccgggcagcccccgtaactgacagatgggcgggcccgcccgcggccgccggggggcggggcggtggcgggcccgcccctcgcctgtccattcgcgggaggcggggctgaagggggccggtccaggccagcgaccaatcggaagcggtggcaacgtgggcggctgcgtgacagacaggcggcaggacgctgtcgccgcagcttcttccggctagctgggggacgccgaggctgcggagtgcacgcctgggctccgtcagagggccgcgcccgcgcgacgaccgcgtgcccgctagtgggaggcgggcgaggacccctgggggtgtccctccctgacccaggcgggaggaggggacgccttaggctgttttgtaaaatgtgtcggtgtgacccttccggcgatggctcctgactcgacgtggtattgagcctgagctatatgctagtttctgctggaaacgctgactctgcctcttagcccctgggttgaagccgactagagaatctcagacgtgcttaaccggtctgttgggcttccctgcccttttccagtcccaggtttcctttccctgctcccttcctgcttctaatttcagccaaagagaaagcaaagatttagaaaagaagggtaggaagaagctggaatttgaattggcaagagaagtttgaggttgtcttttctagatcaaaacaatttttaataggctgatgttcacatgttgcactttctaaagcccgtgcttgacctcctaaggaattttaagtcctattctgataatcgatttatgaagtaaattgtcattaacgcctctgttttatagattaagaagaaaatgaggtcacagataaatatcgtgccaaaacgacgtggtctttgaactgacctccaggcacgatgtcattatttaactcgagaaatcacagcttctgcgtcctaccattctgccaatattcacagccaagaggctcaacttaacacc

SEQ ID NO: 23273 - DNA, 922 bp, Artificial sequence
  DNA replication origin
cgccggggagtgggggcgagggcgagtcgggcgcaggagcgcccgggagcgctagtcggtgcgggaggtgcggcgaggccggtcagtcccggggccggcggccgctccgacgcgggcgggacgggacgctagcgcgggtcactggaaccagggtgccgagatgaaagctccgcctctgcccagttgtccgccgctctccatggagcccgactcccgctcgcctccgctccctccggccgtagccgccaggggaagggcggctagaggcgcgcgccacgcggagacagttgcgaagacccgctcccactgagcagcagcaccgcggcgaccgcgcgccgccccctctgctctgtttaaatgaagcccacatgcgccccgcctcccccgcgcgccactgcgcctgcgtgcagagaccattgcaatggggtgggtgggtaggtgtggcgggggaggtaggggcgggacctcggccgcccggtgggcggggccgcgcgcactcccgggctggagttcggcgaggccttgggactggcgctggagcccagcgtgggatgaccgtgccccgaaaacatgccagtgaatggaaagaagccaaggtcccctccctccctgcttataccctcaactttgccaatgaggaccctaaataccagctgcactacaggggatgtaactacatacaccgtcaccaaagttgcagcctggccaagaaatgccaggggacgtcgcggcgattgcagactccgcggtgactgtgtagatacgtccagaattcgcccttgtagcgcggggagaggcgagagtgaaggcctagaaaagttaagacgttaactgttttttttttctttgttttcacaaatggggggtaggcaaatttcctttttttttttttgtatttaaatttttaatctttggttgggga

SEQ ID NO: 23274 - DNA, 1243 bp, Artificial sequence
  DNA replication origin
ttaccttgatgatcctgcggggcagcccggccatcttgtcagaacccgagttcggcctctggtctcgtctccggctcctctcgcctcacgcacgagtggaagtcccgggctccacttccgggggacgttgccgcgcccgtcgccgcagccgccgccgaggcccctcgggaaatgtagtccctgctcgggcgcgggctcgggcacgggcgggcttccctccgacctggccccctcccccgtgcgccccgccccaaccgctgccggggatggcggaagtgacgctctgttgcggggcagggacttgggacaggccgcgaggggaggcgcggggctctggcgctcgtggccgagcctgcccgcgacggtggtacggcacgacccgcgcgcgactgcgcgcgcgtctctcttaaccgtggccacgcccgcgccggtggacgacgtaacagaggcctggcctacgacgtatcccattcattcattcacgcgttcgttctttcagctcacgcgttcgttctttcagctcagcctgcattgcgcgcgttccctgctggctctgcagtgaacgactgaggtggggctcatcgtcttgctccttcctcaaagggagggcaagaccgaaactcggtggcaaagctctgactgggggtctctccagttactcacacgctgttgggggagttttgatgtttaaattgtataaatcggacctctgacacgcccctaggcccagggtaggctgaaggaaaagggtttggagcgagttggaggcgggaagaatggttctgaacgcctagacctaaaggttgagactcagaattgttaacaggacgaatgaccaaggagaggtttaaagaacccagagtaatccgtaaagcagagattacctatagagtgcgaggtcctatgagagaattagagtgggggtgcccgaaaattgaattgttggggaagcgttttatcctgatgacggatggtttgctgtgtgatggactgtttgcaagcactttacttcatcttcacagcaatcgtgaggaggtgttgtttccattttacaaatgaggcttagatagttaaccttttccaaggagctgttttgtccccaggcagatccgccaagacctggcccttaactacttaaccacagtgtttcctagcacactaacagacagtagatggtgaataaatgaagacaagactgaccgtgccttccaggaacttagattccaatggagaagagagacca

SEQ ID NO: 23275 - DNA, 1006 bp, Artificial sequence
  DNA replication origin
aggacaagtagaaaaaattaaaaaggaaagaacaggagagattccccaaattggcattccggtctcacacctggcgcagcccgagggcccccaggaagaagcacccacacaaacttggttctccgccctaaagcgctgcggggccccgaggcaccaacccggggtgcggaggtgcgggagctgccgcatctccgcccgggaggctcctcgctcccctccccccgcttcctggtgcccgctctggcggggttgggggtgccgcggcggtcgctcccggaccaggatggctgcggtggttctcgccgccgcgggcgctgtcgaggaatcggcccgagcgcgcagccctcgcggggctccgaggcgaggccggggccgagcgggcggtcgcgagcgctgcggaaaatgcaaaccaccaacgccgcgctcttacctcgacctcggccgcggccgccgccgccgcctccgcaccaggcagcctcctcagcggacatggggcgggggggtggggggaaaaggggaggtgggaggggcccgggagaggaggggcgtctgcccttgtttcccccgttaacgtttaatttgggaacgagatgcccggggatgcaaccagccccgcgctcggaggcggcggtcggagttccgtgcgcagagggcacacaaaagcctcgaggatcattgcctcgaccccatcccccaccgcgcggcgacgccccctacgggctgggacacctccactctcggactgctgccgggtttccctccggctgcgaccctggaggtgggaaggagagagggagggagggaggaaggagcgagggcgggaggcaggccggtggggaggagcgggagatcaggttattaggaggattattaatttgaatggcagtttaggggaaataaaaaaaagaaactccagacacttccagacgccgagaaggggctggagaaagcaggcagcaacgctaggccgcggggcagagccgcggttcggactctctcttccccg

SEQ ID NO: 23276 - DNA, 1111 bp, Artificial sequence
  DNA replication origin
ctttccccggccggggttcgagcccgggagcctaaccctgagcagctgcggaaaacagtaaatcttccagcgtgctaagaagctatttccaagaagctcttcccgcgctctgcgctccgccaggcctgagtccctggagaaccactttccttacgcattcccaaggacccaggaccctgcgagcgtgctctccgcggtcccttggaagcaagggacgtatttccatcttattctttgcttcccacctcgaccccgcttcctagctgcttccttggggaggcgctccctcccgcacgcgtcgcggccgatcggctccctacctgtctgaccgagctcccgcagggccttcgccagacgcgccgcctgcggggatggctcctccgccgaccccgcggtcccccactggctccgcgtcccttccccgccattcccggagggctcaaggcaccgcagggtcatgagagaagggtcaccgcggcaaagacaggtggccgcccgagctggggtcagagaagggttcgcgtccttccttgaagtcagtgcgaatcccaaaacgagtccctgcggggtgtccgaaatggtggcagagagagaagggatggggctctttctccccagatcctggaggacggatgacaaagtccctcgcagccgcggtcacccactgatcgcctacaaagagaaagcgggaggttgggtcagtccaaactggacccctgcggctggggtgggggtggggaaatagacgtggaaaatcccagggactcctccgcctctacgttcctgcaccatttaaccccaagcttccagttagcgccctggcccagctctagagaaaagataaagagagcagagatccaagataaagttggctgaagaggtggggggcggaggtcaggaggagggtgaacagggtgtcttcccgcccagggtcactagctgaaatcaaagactggcgacctaggaagagcaaatagtcacctgcagatccagtgggaataggcccttgtcaaggacaagtagaaaaaattaaaaaggaaagaacaggagagattccccaaattggcattccggtctcacacctggcgcagcccgagggcccccaggaaga

SEQ ID NO: 23277 - DNA, 1004 bp, Artificial sequence
  DNA replication origin
gcggggtcgaggtgggaagcaaagaataagatggaaatacgtcccttgcttccaagggaccgcggagagcacgctcgcagggtcctgggtccttgggaatgcgtaaggaaagtggttctccagggactcaggcctggcggagcgcagagcgcgggaagagcttcttggaaatagcttcttagcacgctggaagatttactgttttccgcagctgctcagggttaggctcccgggctcgaaccccggccggggaaagcgtcgggcgcctccctttgcacggggtgcaatcagcaagtcggtgccgcgggccccgcaggcccagcagcatctggctcccgggcggagctgcggctgcagcccaggatcttggcggccaagttcagggactgacactgccgcgagggcggctgcccgggcgtcgagagtaggctgcgaagcccccgccgagcgcggcttccatggtcggcgcgcccagggtactgccgctttcaagtacagtcaggcaattcgcgcggcacgctgtctctaggcatctgaaaaaagaaaaaagaaaaaaagtaaagtatctggcaaatcattctggctttccaaatccgtatcctaaaagcttacagttgtggcacagttgaaattttggtagcaacagggggagggagagggaaaagttctctcgcttgcgattccggtctttccgtgtgggccacgggctttccctcccggggaggcaccggcagattgcaagtatcccggtaattgtgggggtggggggagcacaaatgttcagacttcttaaatacggacggtctctgagccttcttagaaagcagagtgggccggggagatggtgcaggcagatgaaatcaagaatgcaggggagatggatggttgtgattgggtttggattagggcaaagttcaaaagagtttagggaagattgtaaacttgaagtagtaattatcacttgggaattcccatttcttagtgactggtaaggtagtcataaa

SEQ ID NO: 23278 - DNA, 1390 bp, Artificial sequence
  DNA replication origin
taagaaaatgctctttcctctataatccatgtcctttgaaggagagattctttagggagttaaaaatctcattgtagtcaaacttcatggagagagaaggtaggcagaaaagaaaatcaaagtcaagagagttccatgtttttcttagtacaagaaggagggagggatggagagagggagaaaaggatggagggagggagggaggaatggagagatggagggagggataaagggaggaagggatggatggacggatggaaagagggagggagggaggaagggatggatggagggatgggaagagggagggagggatggagggaagggggtatgaagggatggagtgagggaagaaaggatggcgggagggatggagggagggagggatggagggagggagtatagagggagggagggatggagagatgaagggatggaaagagggagggagggatggagggagggatgaagggagggagagagggatggagagatggagggagggatgaagggagggagggaaggaaggagggaggaaaggatagggggatagagggatagaaagagaaagggaggagtggagggatgaagggagggaaggaaggagtgaggaaagatagggggatagagggatagaaagagaaagggaggagtggagggatgaagggagggaggatagaaggagggaagaaaggatagagggatggagggatggaaagagggaggaaggagtggaaggatgaagggagggagggatggaaggagggaggaaaggatagagggatggagggatggaaagagggagggagtaatggagggataaggggcagatggtaaactgttaagttttcacatatctcatttattcctcacaacaataaagttaatccttataaaaatctggaaatgtattgtgtatcctaattaataacttctttttgtaatttatgtgaatgataacttaaagaaatatttatttaacaagtatctgtcaagagcctggtattattggccaagcattgcactaagtcttaagtacacaatgggcaacaaagcagtctctaccccaagaagcttttagtttggtggagaaaaatagcatataagcaagtaaataacatataattacaacttgtgatgcattatctgatggaaacaaagtatgccttcattggagagtaagaaaatagtacagataggacgattgatgaaggtctagaggatgaaatagacataatcaagcaaagaacagagtacacatgtgtgttggggtgtgatcagaatgacgaaggccttccagctgggagctgacacattcaaaggtcctgaggtgtgaaagacttgtaatgcctgagacctccaggtcctggaggctggtgtggctgtggca

SEQ ID NO: 23279 - DNA, 1295 bp, Artificial sequence
  DNA replication origin
ccttgaacttcacatctagagcagaaactcacacttctcttcttctccctccacctcacccttctttccttaagccttccagaactcctgccatatccctcagcactggggagaacttgaagcactgttggagaagtttgaaacctgcaaccttcggcaggactcagcatgggacaaaagccacctcattcctttcccttcccaaaacagcatctcgagctggggaacttggagggaaggaagaaaggggatagcagccaattgccctccctggggcctggggtctggaaatagcctgggaaggaacagagatcatttcccaacgatccatagaggtcctcagcaccctccactcctatgcaccccctggctcatctgccagactgtaagggtgctgatggtgcccgcagctgccccgggaagctgggaggcatttgtgcatcctctgggaagccccattccgagaaatcatgaacctattccccagtgggcaatgattccctgtgcttcagaaattcttggcggctgtgggggcaacccagctgttattcaccctctgggtgaggtggtgagacctcagggggtccaaaggataaaagtgggtaatgatgagacagatggagagcctcgagggaaatacggggacttgggtctaatagtagaaagcagggcgggggctggttggtgcatttaacttgaggaacttttcagtctcactacagagaatgatctctgggggattatggcaatggccacaggtggcacttaactagagccaggtatgtaagaggccctggggctagatatggattcgaatctcggctctgatatctaccagcagtagaatgccagcacgttccacaacctttctataaccattctcctggactactaagtagggatgacaataacagtcactaattaatagggctgttatgagaattatgagtcttaacccatgtggtgagttcacaagcgcacccggcacgtagtaagtgctcagtaaatgttagccccgctcattaggttagatggtgagcagaactttccaagtgctaggcttgagagcctgggactctgttgccaagggagattagagaacctttgcaaatatgggcgctccggccctggggattgtccagaacgagagtgtggcgcctgcctttctgccacctcactcatccgacccggggaaacccacaccctgtcacaggggcgccttggtccccggagtctccggctcggccatgtctcccgcgcgcctccccggggcctccctctcgccgctccacacc

SEQ ID NO: 23280 - DNA, 979 bp, Artificial sequence
  DNA replication origin
gcaggagctggggcgcctcaagctgtgcgagggcgcgggcagcctgcacttcgtggacgcctttctctggaacggcagcatctacttcccctactacccctacaactacacgagcggcgctgccaccggctggcccagcatggcgcgcatcgcgcagagcaccgaggtgctgttccagggccaggcatccctcgactgcggccacggccaccccgacggccgccgcctgctcctctcctccagcctagtggaggccctggacgtctgggcgggagtgttcagcgcggccgctggagagggccaggagcggcgctcccccaccaccacggcgctctgcctcttcagaatgagtgagatccaggcgcgcgccaagagggtcagctgggacttcaagacggccgagagccactgcgtaagtcctgcccccggggcgccgcggagagcgctgctgccggggagccgccgccgccgccgaggcagaacgagctgggggcgagcggcggggcgggggtacagccgggtgacatttaccaggtctcaggttcacaccgcgggcggccgtccgaaggctcctctcggacggtccccgagacctggagcacggcctgaggtccccaaagggagagtgtaaaaaggggggcggggagggttggagttagactcaaaactctagtggctgcatcccattgccatccttccctgtccaaacggggacgcttgtttggggctgagtctcctcgcgcagcccctctttcccattcgcttctccagacttctctgtgccccttccgtgtagtcccagcaggcgtgtgggtctgaccctcttggtcaacagttagcaacacagtgccctcggcagagaagccattgaacctaaagggctccctgccacaccccagcctttgtggccccctgtctccgccccccaccggcaacgcaagtgctgtggtctgaagagttgctagcccgctcagcgtgg

SEQ ID NO: 23281 - DNA, 1058 bp, Artificial sequence
  DNA replication origin
cctggagcacggcctgaggtccccaaagggagagtgtaaaaaggggggcggggagggttggagttagactcaaaactctagtggctgcatcccattgccatccttccctgtccaaacggggacgcttgtttggggctgagtctcctcgcgcagcccctctttcccattcgcttctccagacttctctgtgccccttccgtgtagtcccagcaggcgtgtgggtctgaccctcttggtcaacagttagcaacacagtgccctcggcagagaagccattgaacctaaagggctccctgccacaccccagcctttgtggccccctgtctccgccccccaccggcaacgcaagtgctgtggtctgaagagttgctagcccgctcagcgtggagaaatgccagcctgcaacagaggcttgcgctggaaccgaacccctggcgtgagccggtgcgagggggcggtgccgtggctctgctcagggtgcgctgtggtcgccagccgccgggagaggctgggcgggaggtggccttgtggtaaaagcctcatcctagaggggagtgcaagggaaagtgttgggggtgctacaggcagtttctgggctccagattgcgagactagatggcgggactcagagtcaccaccctggggctgaaccaggcaagcgatacaggtttcccctgggctcccagggcagccacagcttttatcttgagattggcatttctttgactggaaaataaagaggcagttcaagagggtccagttgatggggattatggagccattgtgcacttctccggaggccgtttcccttccaaggcggctggcacatcaactccacatatggctcctgagaggggagcctgctgggagcctcctttataactggacaaaaatcaaagcgcagaaattaacggctacaggtgttgccattgttttggtacaaaatgaatcagagaggaaggggagaagtcactgcttggaaaatgtgttgatacaggggcacgttggctcccaggtatattaatatgtgtatagaaagacagcttcccccaccccct

SEQ ID NO: 23282 - DNA, 1087 bp, Artificial sequence
  DNA replication origin
cctgacacttggcaaggtcctgtgggaggacgagatgagtgaaagagcaagggcatgctctggtcacaaggaactcactgtttacttcaggagcagacataaaagaaacacttctcaataactaggaaaaaggtatttagacagcatttctttacagaatacagagtcaggaggagaagaacatgagggctttgcagagctgacatctgaaagggtcttgaaggagaagaaatgtgattgcaggcagaggaggtgtttgtgtgtcacctaagggcatgaaatagcaaggtgggctcagggcttgaggcgtagagcatgcaatgggggtggggggtgggagatgaggctggggcattgcatggacttcagtacactgggaacctagtgggcttcactcagaaattcagacacgaccctctgggcaagagaagccactgaaaattttaagaagtggaataagatgatctgatttgcattttagatcacacaggtagtttacatggtggatgcattgggtatgggcaaaactgaagacccgggaccacataggagactgttacaactctcctggggggaaataatggtgccctgaaccaaggtaggaaagagtaaggtggacaagttttgggtgtctttagaaggtagagtttgacacgattagatggcactggttagaaagagggggaatggctttaagatttctagcttgggtgggtgaataaatggatggtgttggtgcctttatggaatgaggtagtgtagatagagcagatttgaagtaagggcaaaaaaatgaggttggttttatattttgaggtgctctaaggatgtctatgtagagatgaaggggaaatagaaatatggtctgtggctcagaaaagaggcaggtactcactacatagaggcagtggaattagtcttagagatgatggctgaatcacggggagtctgtgcaaagggggtgagatggagataatgcagccaaagaagactagagggtggtcaagaggtggcaagagaaccagagagcggcatcaaggaaatacccaacaggctgggcgcagtgactcacgcctgtaatcccagc

SEQ ID NO: 23283 - DNA, 1246 bp, Artificial sequence
  DNA replication origin
gcgcagcgggctggggggcggcgggtgcgcgcgggcccgggggcgaggcgggctggggcggcggctcagtgctaacccacgcgcccccggcgtttcgccgccgccctccgctgccgccggaggtccgtgcctccccgatcctccgagctaaaagggtgggcgtcgggggcgtcggagcccaggctgcggttctgggatcccaggtccgcctgcccctcacggcgcccaggtccccgcgcgctatgcgggacgcccggttccccgacggcccgcgctctgctgtcctccccgccagggagcgcccgccgctccgcgagggaatcccgccacccggccacccgcggccccgcgtctccaggtctccggggtctcgccctgggtgtgacggtgccctccccgccgaacgtcccggcggccgccctgtctccctgtcctcggggcgtgtggccggaacccgagcgcggtgcgcagccggagcgcggggaggcggcggacgggctctgcccaagtgaaaagtcagaatctttgcgctgcctctccggagtttcgagccgagccgagcaggcgccctcgccattgtttgcagtgtaatttgctgttgctgattttggctgtgggcgaaaatagctcattctgagcctgctgcagagacgagccctgtagggcttcaaaataaagacggaggccgcagcccaagcgcgggtctgtcctgggagaggaagccttcgccctccccggtgaatacctttgccctcccgggctgttgaatcgtcgaggctggatgtgaggctctgtaacccgttctccccagggctgattgaagtgccatttaacaaagcacctcctccacgctggcatctgttctggcaggaggcacctggagttgttctttgctccgccaactacttactcgcttgtccgagaactggggatttgggtgtcagcctctgtgtaaagttcacggagggagagccgggctcagattctggcctgccacttccaagatcgagagaccaactggatggaaatagtagcaatagtgacggggttgtgtcgcggccctttgtgcaggattttggtcttcactcataatttgaagtagtaatcgattgccccagaagtgaagcaatgagtctctggtttatttgcccgctttccctttttcctttagcatctgttaatcattttggaaggatgatttgagtttttacagattgaatatatttggtggaataatacctcatgc

SEQ ID NO: 23284 - DNA, 1674 bp, Artificial sequence
  DNA replication origin
ggcggggacggacctcggcggggagcgcggtcgcccccgggggactgaggaggggaaggggcgccgcggggaccccgggcccgcactcttcggggctgcgctggcacgtcggagccctgggcccgcgcttgcgaggtgggctgcgcccggcactccgccccacgcctgctggcgagccccttctccggctcccctgacgcccgcctggctgccagaattctgcccaaagccccggtccttctttgggagcccgggcagctctgctgggcgtcggtggggctcccttggcgcacaccccagagacggagccagccccaggtccgggccaggtgggcgacaggtcgaggccggggctggggttggggagaggaaggatgcctgcactccggcatttggaaggcgcgagcctcctccaggcacggcccgccgacggcgcgcagctcctggcctggggcgccctcgggggctgcggctgctgctttaccggcaggtgccagggagcccgcgctcacccccaccctccagccaaggctgcctgtggaaaaacgaaaaataaacaggctcagctgcagtggctcttccacctccagggacagcttgggggactggtgctgcttgttgttagccccggagagagcgcaggccctagtgcagctcgttcttacttgtctggggaagttaattgacacgaagatgctggcgactttgtaagttaccagacccgtttgtattttaactttggaaatggaaggtgctttaatcaaatacaggatctcagcattaatatgtgtggaaaagcagtagaggaaacttaaggaaatcctattgggtaccctccacattgtcccagaactcctaaggccaccctgaagacagtttacgcgccaaggaaggggtggaggggtattttctgaagagacaaggctgagaagaaatggaagaaaaccaaaccaaaacaaaacaaaacaaaaaaaaagaagaaaacaaaaacggaataagactctcccaccagagtccatgcatttctctaggttggaacttgaggttggcttgttgtaaggtacgtaggcgcctattgctttggtcatctgagtggccctttcagagatttccgcctctcagcggctgggctgctcccaagggaactcgggccccttttggctggtggtaccagaattaagtgttctgtgtgtgtgtgttgaagggggtgtctttggagggagtatagagcaaatgtgaattggccccagctgcccctggaaagtctctcaatgagctgacacggaaatttacctggcttatacttttggagctagtccagacctgctcaggtgtttctggggagaacaggattccagccaggctggccagctagtttggcatgcagcagaaatggaaactggccgtggtgaggttacttgtttgaactccaaattcaggggtcagcaacctccttttactctcagtgcctcagggtaattaaagaaaagagcctggatgggatccgtagaaatgcgtgttagagggagaatcacgatttggagatggagggcattgaccagagtatcttaacatgtgatctgcctactacctgccttaggatgaaagaggtggatgcttgctgcaaatgcagattcctaggctttgtttcaaacctaatgagttagaatctct

SEQ ID NO: 23285 - DNA, 1555 bp, Artificial sequence
  DNA replication origin
aagagtgcgggcccggggtccccgcggcgccccttcccctcctcagtcccccgggggcgaccgcgctccccgccgaggtccgtccccgccgcaccctcactattcccgctgggaggaccccggcgcacgcccccgcccccgcaccccggggcgacggcgcactcaccctccgcatggtgtctgggccgtccgggcggggctcggcgacttgggcgcgagaagggctgggccggcggcgacgctcggccggccgggagctccgcgctgccccctcctgcacacgcctgcgccgcggccgccaagccggcgggggcggggcggggtagcgctggccgcggggtccccggggctctcccgggctgcggcggaggcgcggagccggccaagggcgcactgagctcgcggagctccggggccccggggcctttctgccgccgtcgcagcgtccccgcctcctcgggccgcttcgcccctctcctcttcctcgagttctggccccaccaggagcggagcgagtctccgatgcctgccccgcggcccccagaactgagctggagaagctttggggtgaaagctgggcccaccctacagggaccccaagtttgcggagcaagagtggattggcggagagcgcagatggcaattctcacccgccttaaaagtaccaccttaaaattctccccatgggatgggaaggtggcccgctaatgtccgttcctactcttcgttttctttttaatttttcagacagggtctcgctctgtcccccaggctgagcgcaggggcgcgatttcggctcactgcagccttgcgattctcccaggctcaagcgatcctcccgcctcagccttcccagtagctgggaccacaggcgagtgctccactacgcccggctaatttttgtatttttattcttttgtagagactggtgtctcgccattttgcccaggctggtctcgaactcctggcctcaagcgaccctccagcctcggcctcccaaagtgctgggatgagaggtgtgagccagtgcgtcggccctttaccattctttagattctgcgattgttttttgaaagtcctgagcattcataaagctttccgaggaggggtgggaagagagttaagagcggtaaacagcagatccacccggggctggaggaaacaccgtggaacagagaccgtctggtctcattcaggtgaaggagctcggcaggggaagaggtcagcatccccattccagcgaaacccacgggttttcctagcagtcccctgtgtgcacagctttctcttcacaatcgacctccaccccaacttttccaaacaacacgggagcccatccccaaatgctaatgcttctgcgggaaaaaaatgagaagggggaaaaatgtattccccagatcatgaaaacgctgcacacccttgagctcagaatgcaggatctaaatccgcaagaacaggatggaatgatgtgggaaggtcttccaggaagaaatctgattttattctgcttcgactgctgaacaaagtaaatcaaatagcacggaactcaaggcag

SEQ ID NO: 23286 - DNA, 935 bp, Artificial sequence
  DNA replication origin
gtgggggtcagccccccgcccggccagccgccccatccgggaggtgaggggtgcctctgcccggccggccctactgggaagtgaggagcccctctgcccggccagccgccccgtccgggagggaggtcggggggtcagccccccgcccggccagctgccccgtccgggaggtgaggggcgcctctgcccggccgcccctactgggaagtgaggagcccctctgcccggccagccgccccgtccgggagggaggtggggaggtcagcctcccgcccagccagccgccccgtccgggaggtgaggggcgcctctgcccggccgcccctactgggaagtgaggagcccctctgcccggccagccgccccgtccgggagggaggtgggtgggggtcagcccccgcccggccagccgccctgtccgggaggtgaggggcgcctctgcccggccgcccctactgggaagtgaggagcccctctgcccggccaccaccccgtctgggaggtgtacccaacagctcgttgagaacgggccatgatgacaatggcggttttgtggaatagaaaggggggaaaggtggggaaaagattgagaaatcggatggttgccgtgtctgtgtagaaagaggtagacatgggagacttttcattttgttctgtactaagaaaaattcttctgccttgggatcctgttgatctgtgaccttacccccaaccctgtgctctctgaaacatgtgctgtgtccactcagggttgaatggattaagggcggtgcaagatgtgctttgttaaacagatgcttgaaggcagcatgctccttaagagtcattaccactccctaatctcaagcacccagggacacaaacactgcggaaggccgcagggtcctctgcctaggaaaaccagagacctttgttcacttgtttatctgctgacc

SEQ ID NO: 23287 - DNA, 1543 bp, Artificial sequence
  DNA replication origin
ggcgggggctgacccccacccacctccctcccggacggggcggctggccgggcagaggggctcctcacttcccagtaggggcggccgggcagaggcgcccctcacctcccggacggggcggctggctgggcgggaggctgacctccccacctccctcccggacggggcggctggccgggcagaggggctcctcacttcccagtaggggcggccgggcagaggcgcccctcacctcccggacggggcagctggccgggcggggggctgaccccccgacctccctcccggacggggcggctggccgggcagaggggctcctcacttcccagtagggccggccgggcagaggcacccctcacctcccggatggggcggctggccgggcggggggctgacccccacctccctcccggacggggcggctggccgggcggggggctgacccccacctccctcccggacggggtggttgccggccggagacgctcctcacttcccagacggggtggctgccgggcagaggggctcctcacttctcagacggggcggctgccgggcagagacgctcctcacatcccagacggggtggcagggcagaggcgctccccacatctcagacgatgggcagccgggcagagacgctcctcacttcctagatgggatggcggccgggaagaggcgctcctcacttcctagatgggatggcagccgggcagagacgctcctcacttcccagacggggtggcggctgggcagaggctgcaatctcggcactttgggaggccaaggcaggcggctgggaggtggaggttgtagcgagccgagatcacgccactgcactccagcctgggcaccattgagcactgagtgaacgagactccgtctgcaatcacggcaccttgggaggccgaggctggcggatcactcgcggttaggagctggagaccagcccggccaacacagcgaaaccccgtctccacccaaaaaatacgaaaaccagtcaggcgtggcggcgcgcgcctgtaatcgcaggcactgggcaggctgaggcaggagaatcaggcagggaggttgcagtgagccgagatggcagcagtacagtccagcttcggctcggcatcagagggagaccgtggaaagagagggagagggagactgtgggaaagggagactgtgggagaggggagaggggaaagtagtttttaagactagagtaccattgtttctgtagtccccaagaatctttgcagccagtttctaaccttgtgtaacgtgaggcaaatgctcttactgaattctttttttttttttttctgagagggagtctctgttgcgcaggctggagtgcagtgtcatgattttggctcactgcaccctccacctcctgggttcaggtgattctcctgcttcagcctctccagtagctgggattacaataagcccacattacagtctcctgccaccacgcccggctaatttttgtatttttagtagagacggggtttcactacattggccaagctggtctcaaactcctgacctt

SEQ ID NO: 23288 - DNA, 1252 bp, Artificial sequence
  DNA replication origin
gtatggtgttcaaagtgaaagtctcctcctcctcaatttcactctgcagaaatcaaccatattcatagcttggtatgtatctctgtaggatcaaagattccaaactgagataatataagagtgagtctaccaagtaggaacggcagtgaactggaagtgtcccacctgagggggacagcctctactcagggccagaaggttgttgccacatgggaatacgggcctggggttactacattttacggttttttccagctagaaattcagacttttatgtgaaatatcctgaaatttaactgctgacaattaattcaaactttgacaggattaattcaaacacttctgagctgccagtctgaaactgtgtccggaattggtggattcttggtctcactgacttcaagaatgaagccgcggaccctcgcagtgagtgttacagctcttaaggtggtgcgtctggagtctgtcccttctgatgttcagatgtgttcggagttttttccttctggtgggttcgtggtctcgctggctcaggagtgaagctgtagaccttcgcggtgagtgttacagctcttaaggcagcgcgtctggatttgtttgttcctccgggtgggctcgtggtctcgctgggctcaagagtgaagctgcagatcttcgcggtgagtgttacagctcataaaagcatcgtggacccaaagagtgagcagtagcaacatttattgcaaagagcgaaagaacaaagcttccacactgtggaaggggacccgagcaggttgccagtgctggctagggcagcctgcttttattctcttatctggccccagccacatcctgctgattggtagagccgagtggcctgttttgtcagggcgctgattggtgcatttacaatccctgagctagatacaaagtttctccaggtccccatcagattagttagatacagagtttggacacacaggttctccaaggccccaccagagcagctagatacagagtgttgattggtgcattcacaaaccttgagctaaacacagagtgctgattggtgtgtttacaaaccttgagctagatacagagtgccgattggtgtatttacaatccctgagctagacataaaggttctccacagccccagcagagcagctagatacagagctaaacacagggtgctgattggtgtatttacaatccctgagctagatataaagactctccacgtccccaccagactcaggagcccagctggctt

SEQ ID NO: 23289 - DNA, 1251 bp, Artificial sequence
  DNA replication origin
gcaggggtggggctgtgggagggggcggggcctgctgcgcgtcacggctgtcgtagccgccgcaccgggtcgtcgcggccgccgaaccggggggcggggggccggggtgagcgctaagatggccgccccggctcgggctggtgagtgtgcgcgagggcgcgcggccgcggcgattggcggagtgaggacccctgcgggagcggacgtgcgacggcagcccccggggccgggaggcacctgggggcctattctcgccgcgcagggcgctggggggtcctgagagagggagagcctggggctgcgggcgcgcggaagggaatgagccgaggggcgcgcggcggcgacgcgtccggcgaattttgaattgcccccctgggaagtttcggtgggttctgcggcgctccgaccctgtcccggcggcagcctcagagtgcccggagatgctgcggcaaggcgcagcgggctggagggggcgagctgggggagaacgggcgcgggcgagggcttcggggactggaaggggcttcgcgctgatcccggcacgagcgtcgtggagaggtgggcgcggggctggcacgggctgggcgctgtgtggagcacgcaacgcccgggtccagccgcatccctccaccctcccggattaccgcgaggtgatgctcgaagccccggggcacttcgggagggcggttgtggcactcggttgaggaggaatgcgcttcccggcgtcttgcccgccttctctccatcgatcggtccccgcgctgccggcacctgctgccgcttaaagcttgaaaatcagcttcctaaagccattcccgatggccttcgatgggaaagaatgccatatggctgaattcattatgggggataagaaatatgtcagtgtgcgcggaggggaacctgttaatacgttcaaatttaagagtaggtaagacaccataccccgcccccatgaaaaaagaaagtgaactatatagtaactgttccaaatgcaaggttgagctgttgttaaattctactggtagctcgcagtttttatactggaagcaaaaccatttaggaacccttgggagattcactttctcctcagaccagtcctcaagtcccccactcccgccaccttttaagctttaattgttgtatctgggcaagtaacggggattgtgaaatttgcatggaaataagaccttcaggtcctgcacttgaattccttatctgttaagtagctgcctgtgggggtgaaagtagggg

SEQ ID NO: 23290 - DNA, 1434 bp, Artificial sequence
  DNA replication origin
gcgacgcttggggttggtactgaggggacaggcgggagggaaagaaggaagatttgggacgagttgcactgggcacagaggctaggaagggactgatgtgtaaaagaatgcctggacgtcaggcacctcagaccatttgcctattttacgacaagaattatttagatcttgcaggatggagaaattcaaagtgccattttctggctatttggaactactgttgagtttgtattggggtcaagtggcattgcagaagaaaataaggcatttaggttttaggtcaggtgtgagttgaagaggttttaagtttttgagaacacaggccaagggagtagaaggaggaatggagggtggaaggttgcccatagtgaaggaagcaagcctagagaaaagagagagtagagaaacagagagaaggggttcggcggttcttaccttccagaaaagtgggaaaaggggttggggcgcagagataagaggtcggggcacggaaataagggatggggcacagaaataaggggttggggcatggaaataaggggtcggggcacagaaataagggattggggcgcagagataagaggtaggggcgtggaaataagggattggggcgcagagatacgaggttggggtacttgcccctcctctagaaaagcaggacttgccgctaagagtgaaggagaaggggttgaggggtacttgcccctcccccagaaaagcgggacttgccactaagggtgaaggagaaggggttgaggggtacttgcccctcccccagaaaagcgggacttgccactaagggtgaaggagaaggggttgaggggtacttgcccctctcccagaaaagcgggacttgccgctaagggtgaaggagaaggagttgaggggtacttgcccctcccccagaaaagcagagaaggggtagagacaaggagagaaggggttggggtacttgccccttccccagaaaagcaggacttgccactaagggtgaaggaccaaggcaggcgtccctgcgtgatctgacacctttgaaacgtgggtgtataatcagagaggcgtccctgcaatgtttaaacaccaagggaaggctgccttcccagtccgtgaccggcgccagagttttgggtgcacggataaaatgtgtctcctttgtctctcccagaaaatgaaaggaattgaaattaagagaagggagagattgaagagtggaaaggagaaagtggttgagggacagtgagagaggttggagaagagagtaagaagaggccgcttacctgatttaaaattggtgagatgttccttgggctggtcggtctgaggacctgaggtcataggtggatctttctcacggagcaaagaacaggagtacagcggattgatctcccaagggaggtcccccaattcgagtcacagcaccaaatttcatgcgcg

SEQ ID NO: 23291 - DNA, 1299 bp, Artificial sequence
  DNA replication origin
tccggcacccgcccggcccggctgctcccggctcctcccggccatggggagctgcgcgcggctgctgctgctctggggctgcacggtggtggccgcaggtgggtggtgacgcggcggggcccccaccccttccctcgctgcttctctaacccatctcgggactcgggggtgcaggggagccagggctgcgagcgcagagcgctgctcccgagggtgaaatgagtggccatgttccgcctcctttccccggggctccgcagtttcaaatactattgatttatttttacaactgggatacacatgcgcttggataaccagctatcctgggtgcgccctgccggggatactgcgaccggggtttctttcttggtttggcttgttaaaaaactgcttttccacttggtgagggaacaaaggacccagctcgccatcccccggcacttcatggcctaaggaatgatgaggaggggtggcccagcgaccctgggcgcgcgtgggctggggccggtctctggtagaagcccatcgctggtgtccctgacctggtgctgggtactagagaaccaggtaaggacacctggggcagggctgagcgccctctccccggagcagtgactggaacgcagtgggactcctggcttggacgataggtggtgatcaccccgggcttgcattgagctggctggccgcccctggggaattggtaccctggcagagactctgcgggaggtcggaggcgggtctgctccctggctcggtaactggacaaccggcgtcggcgtcggcagatgccctctccctcccactcccatcctggctttcttgggctgccctaggccaccggctcctggctcgtggtttctgtattcgggagccccttctgctcctctccctccctcttgcgggtcacctggtttccagttaggcgtaagcgcagccctgtaggtgagggggagagatgtgagggagtctgcagacatccagtctctcgtgcggatcttgactgcttcagaaaggggcgcctgggctagagggatgcgctggtggctacagaacattgtagcacgcatctcctcccttgggcttccactcttccctgagggccgctggcacccagcaaaatccaggctttccagtctgcatcccaaaccagtccaagtcacaggagcatccttagtatcattgaatagtcccttgagtgactccaagtattttgccccatggattctttatctggctcaaatcttttctggacttaggagtttaggggcatttaaaattattggatatttttcccag

SEQ ID NO: 23292 - DNA, 1662 bp, Artificial sequence
  DNA replication origin
ctttgaaatttgtaatgagatatggagtagttctgtgattgctttggcagcacatatgctaaaattggaacaatacagagaagattagcatggcctctgcatgagaatggcatacaaatttgtgaagcattctatatttttagcaatatattgtactcttgaaaaatgctaagacagtgagtgtattcttaaatgcatgttaatatgcaaaaatgcatatgttcattggctagatttagtcattccacgctgtatacatatttcaaaacatcatgttgtacatgataaatacatacaagtttatttgttaattaaaaaacagaaatggattagttctgcctaaatatactagactcagaagttaataataaatgtgcatccacccctttgtttaatttgccttggctattaagttaacatttatgctaagaacctttggctgttatagtttcctatcatttatttggtaaaaagattaattggagaggtgtttcaatggctccattaggagatatgaagaaagccccaccattgccagtatttgggaactcaaagcgtttattttctaaagcaggtgatgctacatgaattgctgtccacaccttctgctactttcctctgttggccagaagaataattttaatgtcgcccaaatggattatgctgacctcaacccagatccccctgggagatataaacttcttatatgttcctggctgggtcattgtaaataatatctacatgtatcccaaagctctgaattatcctcatctgtaacagacacaacgactaaatggtatctggaacgtagttaattttctggaaaatattcaaaggaacaaaatgagcactgcaatacaaaattgctgtcgacttaacttttgccagtttccctggatgtgtaagtagaattatattttcacagaacttgcaaaaatctcagactcggctgctatttaatctctttccagaagcaccagccctgagcaatcctatctgcaattagctgcgtgtggttgctactaaattgctccccataagttagttcctaacactgtttcacagcacggcatactctataaagggagaacgcttggaaggaccgaagagttccctttgtcgtgcccttgccctgcctctggacaacgatgttcttacactgccgactagctaatcctgtgacccttttctttcagcaccttgagtttgagttaggcaatacctcttacaccaaagtgggcacaccttcggatcatgtaggcagcgattgtttagccgagacatccccctacccccgcaaaaggcagcagagaagcggcgaacgccgcttagcagttggcgcgctctcagtgcgggtgacgcggggctgggttggggtgttccgtccccgggtcgtgggactccccgagagggggtggctggaggaggagggagggcttgtttcgctgggggatgtgggaagtaggcgctagcctgtttcgcggttttttaagccccttggcatgccctgacctgatctagagggagtctactgctcttaggaatgttccgggagaaggtgggagattgcttcccaggggaggcctgtgggtgctgcagggcaccaggggggtcactagggagatgcagggcgcgggccaggaggggcgccagggcagccgg

SEQ ID NO: 23293 - DNA, 1616 bp, Artificial sequence
  DNA replication origin
atcttcttgcccagcaggagagagttaactcagccagaaatgtgggtaaatactggaaacttactcagatgcagaagggactgtggctcaagatgttataatgtccagaaagcagggaatgtgttggcttgagttaatgccagcttccttgtttactggtgaagtgtgcttaaaagataagtctttggagtgtaagtgtgtgcaacctgagaatgaaagagagagagcagagagggaggagatggagaggagagggaggagagagggaaagagggagagagggaggagagagggaaagagggagagagggaggagagagggaaagagggagagagggaggagacggggagagagggaggagagagagggggagggtggagagagggaggagagagagaaagagggagagaagggtgagggagggagagagggatgagggagggagagagggaggagagagggaaagagggatagatgcaggagagagagagggagagagggaggagagagacaaggagagagggaaagaggaagaaacggagagggagagagggaggagggagagagggagagagggaggagagagggaggagagagggtggagagagggaggagagagagaaagagggagagagggatgagagcaggagagagaaacgagagagggaaagatggagagagggaggagagggagagagggcggagagggagagagggcggagagggaggagagaaggtggagagagggaggagagagagagggatgagagagggagggaagagagatggagagagggagggaggagagagggagggaggagaaagggagagatgtgagagggaggagagagggagagagggagagagagatgagggaggagagagggagagagggagaggttcagtggctcaggcttgtaatcccagcactttgggaggttgaggcaagaggattccttaagccaaggagttcaagaccagcctaggcaatgtaatgagaccctgtcttaataaaacattttaaaatgtgtgtgatgggtgtagttccagctacttgggagactgagatgggaggatcacttgcgcccgggagcttgaggctgcagtaagctgtgatcacacccctgctctctagcctgtgcgacagagtgggacactgtcttaaaacaaagggcggcggtgaggggggaggaggtttgaggaaaagaccatatgatacattatggtcaacttttgcaagattctgaaattctgctggatgattttgattataacagaatgattaatattaattgtgtatatagccctgttagcggtggagaatccatatccatctgggtctgcagcaacctcaattcttgcctcctcagaagaaacaatttgactgaggggcagaaggagagaccaagacaagttttagagcaggcgtgaaagtttattcaaaagctttagagcaggaaggaaaggaaggaaagtacacttgaaagagggccaagcgggcgatttgaaagaccagcacggtttgaacttttgacttggggttttataccttggcaggcttccgaggtcttgcgttgcttctcctgctcatccaacgctgagatctgatccggaag

SEQ ID NO: 23294 - DNA, 983 bp, Artificial sequence
  DNA replication origin
gggatcagccccctgcctggccagccgccccgtccgggaggtgaggggcgcctctgcccggccgcccctactgggaagtgaggacccctctgcccggccagccgccccgtccgggagggaggtggggggggtcagccccccgcccggccagccgccccgtccgggagggaggtggggggatcagccccctgcctggccagccgccccgtccgggaggtgaggggcgcctcggcccggccgcccctactgggaagtgaggacccctctgcccggccagccgccccgtccgggagggaggtggggggaacagccccccgcccggccagccgccctatccaggaggtgaggggcgcctctgcccggccgcccctactgggaagtgaggagcccctctgcctggccagccgccccgtccgggagggcggtgggggggtcagcccccctcccggccagccgccccatctgggaggtgaggggcacttctgccgggccgcccctactgggaagtgaggagcccctctgcccggccacgaccccgtctgggaggtgtgcccagcggctcattggggatgggccatgatgacaatggcggttttgtggaatagaaaggcgggaagggtggggaaaaaattgagaaatcggatggttgcggggtctgtgtggatagaagtagacatgggagacttttcattttgttctgtactaagaaaaattcttctgccttgggatcctgttgatctgtgaccttatccccaaccctgtgctctctgaaacatgtgctgtgtccactcagggttaaatggattaagggcggtgcaagatgtgctttgttaaacagatgcttgaaggcagcatgctcgttaagagtcatcaccactccctaatcttaagtacccagggacacaaacactgcggaaggccgcagggtcctctgcctaggaaaaccagagacctttgttcacttgtttatctgctgaccttcc

SEQ ID NO: 23295 - DNA, 1311 bp, Artificial sequence
  DNA replication origin
acccccccacctccctcccggatggggcggctggccaggcggggggctgaccccccgacctccctcctgggcggggcggctggccgggcagaggggctcctcacttcccagtaggggcggccgggcagaggcgcccctcacctcccggacggggcggctggccaggcggggggctgaccccccacctccctcccggactgggcggctggccgggcggggggttgacccccccacctccctcctggacggggcgactggccgggcagaggggctcctcacttcccagtaggggcggccgggcagaggagcccctcacctcccggccggggcggctggccgacccccccccccccgcctccctcccggacggggcggctggccgggcagaggggctcctcacttcccagtaggggcggccgggcagaggagcccctcacctcccggacggggcggctggccgggcggggggctgaccccccccacctccctcccggacggggtggctgccgggcggagacgctcctcacttcccagacggggtggttgccagacggaggggctcctcacttctcagacggggcggttgccaggcagagggtttcctcacttctcagacggagcggccgggcagagacactcctcacctcccagacagggttgcggcccagcagaggcgctcctcacatcccagacagggcggtggggcagaggtgctccccacatctcagacgatgggcggccgggcagagacgctcctcacttcctagatgggatggcggcggggaagaggcgcttctcgcttcctagatgggatggcggccgggcagagacgctcctcactttccacactgggcagccaggcagaggggctcctcatatcccagacgatgggtggccaagcagagacgctcctcacttcccagacggggtggcggccgggcagaggctgcaatctcggctctttgggaggccaaggcaggcggctgggaggtggttgtagcgagccgagatcacgccactgcactccagcctgggcaccattgagcactgagtgaacgagactccatctgcaatcccggcacctcgggaggccgaggctggcggatcactcgcggttaggagctggagaccagcccggccaacacagcgaaaccccatctccaccaaaaaaaaacgaaaaccagtcaggcgtggcggcgcgcgcctgcaatcgcaggcactcggcaggctgaggcaggagaatcaggcagggaggttgcagtgagccgagatggcagcagtaccgtccagctttggctcggcatgagaggg

SEQ ID NO: 23296 - DNA, 867 bp, Artificial sequence
  DNA replication origin
gtccgggatgtgaggagcgtctctgcctggccacctcgtctgagaagtgaggagaccctctgcctggcaaccgccctgtctgagaagtgaggagcccctccgcccagcagccgccccgtctgagaagtgaggagcccctctgcccggcagccaccccgtctgggaagtgaggagcgtctccgcccggcagccacccgtccgggagggaggtgggggtgtcagtcccccgcctggccagccgcctcgtccgggaggtgaggggcgcctctgcccggccgcccctactgggaagtgaggagcccctctgcccggccagccgccccatccgggagggaggtgggggggtcagccccctgcccggccagccgccccgtccgggaggtgaggggcgcctctgcccggccgcccctactgggaagtgaggagcccctctgcccggccaccaccccgtctgggaggtgtacccaacagctcattgagaacgggccatgatgacaatggcagttttgtggaatagaaaggggggaaaggtggggaaaagattgagaaatcggatggttgccgtgtctgtgtagaaagaggtagacatgggagacttttcattttgttctgtactaagaaaaattcttctgccttgggatcctgttgatctgtgaccttacccccaaccctgtgctctctgaaacatgtgctgtgtccactcagggttaaatggattaaggacggtgcaagatgtgctttgttaaacagacgcttgaaggcagcatgctcgttaagagtcatcaccactccctaatctcaagtacccagggacacaaacgctgcggaaggccgcagggtcctctgcctaggaaaaccagagacctt

SEQ ID NO: 23297 - DNA, 1360 bp, Artificial sequence
  DNA replication origin
acacagcacatgtttcagagagcacagggttgggggtaaggtcacagatcaacaggatcccaaggcagaagaatttttcttagtacagaacaaaatgaaaagtctcccatgtctacctctttctacacagacacggcaaccatccgatttctcaatcttttccccacctttcccccctttctattccacaaaactgccattgtcatcatggcccgttctcaatgagctgttgggtacacctcccagacggggtggtggccgggcagaggggctcctcacttcccagtaggggcggccgggcagaggcgcccctcacctcccggacggggcggctggccgggcagggggctgacccccccacctccctcccggatggggcggctggccgggcagaggggctcctcacttcccagtaggggcggccgggcagaggcgcccctcacctcccggacgaggcggctggccaggcgggggactgacacccccacctccctcccggacgggtggctgccgggcggagacgctcctcacttcccagacggggtggctgccgggcagaggggctcctcacttctcagacggggcggctgctgggcggaggggctcctcacttctcagacagggcggttgccaggcagagggtctcctcacttctcagacgaggtggccaggcagagacgctcctcacatcccggacggggcgacagggcagaggcgctccccacatctcagacgatgggtggccgggcagagacgctcctcacttcctagatgggatggcggccgggaagaggcgcttctcacttcctagatgggatggcggctgggcagagatgctcctcactttccagactgggcagccaggcagaggggctcctcacatcccagacgatgggcggccaggcagagacgctcctcacttcccagacggggtggcggccttcccagatggggtggcggctgggcagaggctgcaatctcggcactttgggaggccaaggcaggctgccgggaggtggatgttgtagggagccgagatcacgccactgcactccagcctgggcaccattgagcactgagtgaaggagactccgtctgcaatcccggcacctcgggaggccgaggctggcggatcactcgcggttaggagctggagaccagcccggccaacacagcgaaaccccgtctccacccaaaaaataggaaaaccagtcaggcgtggcggcgcgcgcctgcaatcgcaggcactcggcaggctgaggcaggagaatcaggcagggaggttgcagtgagctgagatggcagcagtacagtccagcttcagagggagaccgtggaaagagggagagggagagggaga

SEQ ID NO: 23298 - DNA, 1979 bp, Artificial sequence
  DNA replication origin
gaactcctggcctcaagcaatcctcccaccttggcctttccaagttttgggattacaggcatgagccaccatgcccagcctgaattctagaatagtttttttctaattctgtgaaaagtgacattggtagtttgataggaatagcattgaatctgtaaattgctttcataagtgtggacatttttaatgacattgattgttccaatccatgagcctggaatgtttttcaatttgtttgtgtcatctatgaattctttcagcagtgttttgtaattctcattgtagagttcttacacctctttgtttacaaatatccataggtattttgtgtgtgtgtgtgtgtgtgtgtgtgtgtgtaatgtaaatgggattgcattcttgatttggctctcagctcaaatgttattgatgtatacaaatgctgttgatttttgtacattgattttgtatcctgaaactttgctgaagttgtttgtcagatctaagcctcttttggtggagtctttggggttttttaggtatcgaaccatatcatcagtgaagacagataatttgacttcctcttttcctatttggatgcttttgtttctttctcttgctggattgccctggttaagacttccagtattatgttgactaggaatgctgagagtgcaaatccttgtcttgttccagttcttaggggaaatgcttctaacttttacctgttccgtatgatgttggctgtgagtttgtcatagatggctgttagtattttgaggtatgttccttcgatgcctagtttgttgagtgtatttatcataaggggatgttggattttattgaatgctttttctgggtctatcaagatgatcctatggttttggggtttaattctgtttatgtggtgaatcacatttattgatttgtgtatattgaacaaaccttgtattctaggagtaaagcccacttgattgtggtgaattagctttttgatgtgttgttggattcagtttgctagtgtttttttgaggattttcatgtctatgttcatcaaggatagtggcctgtagttttcttttttgttgtgtctttgccagattttgatatcaggatgataccaaattcataggatgagttagggaggaatcccttctcttagatttttttgtaataacttcagtaggattggtactagcctttctttgtacctctggtaggagtcggctgtgaatccatctggtccagggctttatttggtttggtaggttttttattactgattcaatttcagaactcattattagtctgttcagggttacaatttcttcctgattcaatcttgggagattgtgtgtttccaggaatttatctatttcctctagattttccagtttgttttcatagaggtgttcataatagtctctgtggatcttttgtatttctgtgggattggctataatgttacctttgtcatttctgagtgtgcttatttggatcttctctcttttttctttgttaatctagctagtggtctgtcaatcttgtttttctttcaaagaaccaactttttgtttcattgattctttgtatgattttatttttttgtctcaatttcatttagttctgctctgattttagttatttcttttcttctgctagctacagttacattcttatcaagagattttattttatgccacattctgttggtttttatgaagcaaacattattgaaatgtagcatatgtataaatttccagaatgaaaaaagcttgaaaagaaacatttggtattttctattgctagatggtaaaactagttgtcatcatttcctttcctgacagaagtttggtttatgagccaaaaaagattttgcctaagagctttggtatgtgtagattggccaaacattaagatttaaaatacttcagtcttacttggtacagcacaagcttaggttagttgtgtgaccttggataagaattttgacagccccc

SEQ ID NO: 23299 - DNA, 1283 bp, Artificial sequence
  DNA replication origin
ctggccgggcggggggctgacccccccacctccctcccggatggggcggctggccgggcagaggggctcctcacttcccagtaggggcggccgggcagaggcgcccctcacctcccagacggggcggctggccgggcggggcgctgacccccccacctccctcccggacggggcggctggccaggcggggggctgacccccccacctccctcccggacggggcggctggccgggtgggggggctgacccccccatctccctcccggacggggtggctggccgggcagaggcgcccctcacctcccggacggggcggctggccgggcggggggctgacccccccacctccctcctggacggcacggctgtccgggcgggggggctgaccccccacctccctcccggatggggcggctggccgggcagggggctgaccccccccacctccctcccggacggggtggctgccggtcggagacgctcctcacttcccagatggggtggctgccgggcggagaggctcctcacttctcagacggggcagctgccgggcggaggggctcctcacttctcagacggggtggttgccaggcagagggtctcctcacttctcagacggggcggccgggcagagacgctcctcacctcccagacggggtctcggccgggcagaggcgctcctcacatcccagatggggcggcggggcagaggcgctccccacatctcagacgatgggcggccgggcagagaggctcttcacttcctagatgtgatggcggctgggaagaggcgctcctcacttcctagatgggatggcggccgggcagagacgctcctcactttccagactgggcagccaggcagaggggctcctcacatcccagacgatgggcggccaggcagagacactcctcacttcccagacggggtggcggccgggcagaggctgcaatctcggcactttgggaggccaaggcaggcggctgggaggtgtaggttgtagtgagccgagatcacgccactgcactccagcctgggcaccattgagcactgagtgaacgagactccgtctgcaatcccggcacctcgggaggccgaggttggcggatcactcgcggttaggggctggagaccggcccggccaacacagcgaaaccccgtctccaccaaaaccagtcaggcgtggcggcgcgtgcctgcaatcacaggcattcggcagactgaggcaggagaatcaggcagggaggttgcagtgagccgagatggcagcagtacagtccag

SEQ ID NO: 23300 - DNA, 911 bp, Artificial sequence
  DNA replication origin
ggagggaggtgggggggtcggccccccgcccggccagccgccccatccgggagggaggtgggggggtcagccccccgcccggccagccgccctgtccaggagggaggtgggggtgtcagccccacgcccggccagccgcctcgtccgggagggaggtgggggggtcagccccccacccggccagccgccccgtctgggagggaggtgggggggggtcagcccccctgcccggccagtggccccgtccgggaggtgaggggcgcctctgcccggccgcccctactgggaagtgaggagcccctctgcccggccagccgccccgtccgggagggaggtgggggtgtcagccccccgcccggccagctgccccgtccgggagggaggtggggggggggtcagcccccaccgcccagccagccgacccgtccgggaggtgaggggcgcctctgcccagccaccaccccgtctgggaggtgtgcccaacagctcattgagaacgggccaggatgacaatggcggctttgtggaatagaaaggcgggaaaggcggggaaaagattgagaaatcggatggttgccgtgtctgtgtggaaagaagtagacatgggagacttttcattttgttctgcactaagaaaaattcctctgtcttgggatcctgttgatctgtgaccttacccccaaccctgtgctctctgaaacatgtgctgtgtccactcagggttaaatggattaagggcggtgcaagatgtgctttgttaaacagatgcttgaaggcagcatgctcgttaagagtcatcaccaatccctaatctcaagtaatcagggacacaaacactgcggaaggccgcagggtcctctgcctaggaaaaccagagacctttgttcacttgtttatctgctgaccttccc

SEQ ID NO: 23301 - DNA, 1136 bp, Artificial sequence
  DNA replication origin
tctgcccgatctgatctgattgcttattgatgtgctttagtagatttcaccatgctacactgtgtaaaatacacatgtagcatcctgccctggtgaagaagccgaatttggctgtcttttcatgaccctcttatttttaaaatgatcttctatgaaattcttcaggtgaaaggtaccttcagatgaaaggtataaaccaaatactattgggcaatttgagcaagaacattaaatataggttatgatacagataaaatcattgaataatattccatgaatctacaacctttcttcattccaatggttatagagtttgtagaagtatgtgttttctaagtgaaataactacttggctccttggaaccaactattaaaaaagcgtattgaatcatccttagaaaatttgaacgtcccatccgttcttaaattattagaagaaagttgataagattaaaaagtagaaaggaccctgaagagagagagctgcgcctagagttagcaagcagggactgttagtttcaaagtagggcggaaagaagaggcctgcccggccggggctggaaatcctaagaggcttgagaacgactagcagggagatccagggaactaggagggagacggatgggtggtgccctgcagacctgtggattgaaataagtgttcccgggaggcaaccgtgggatcagggatcgacaggacatgggatctgagacttgggtgagattgttgactgaggaaggtgcccagggggctgggaaaagtctggggcctgaagaagggggttctgggccgcaggccgaagcaatggggaggccatggagtaattagagccaggaactaaaattatgggggctactgcaaagatgacacctaagggctgggtgagttgagaggagtggacgaggcgctggatgtgcccagggacctcggagagaggatccaggcgaggggcggaggagacatacgtataagtgggggctgagggaagggatgcagaggcgtaagcggggttgagaaggggtgctgtgagagatctgggggctgaagtgcacaacatgagttggatggaggctacagaagagcagacggggacgtggggctaggcaggggccgcggcggggtgagccggagatccg

SEQ ID NO: 23302 - DNA, 1057 bp, Artificial sequence
  DNA replication origin
gcctgaagaagggggttctgggccgcaggccgaagcaatggggaggccatggagtaattagagccaggaactaaaattatgggggctactgcaaagatgacacctaagggctgggtgagttgagaggagtggacgaggcgctggatgtgcccagggacctcggagagaggatccaggcgaggggcggaggagacatacgtataagtgggggctgagggaagggatgcagaggcgtaagcggggttgagaaggggtgctgtgagagatctgggggctgaagtgcacaacatgagttggatggaggctacagaagagcagacggggacgtggggctaggcaggggccgcggcggggtgagccggagatccgggagcccgcaaggactagggtcgaggggcagggagcccgggagaggcgggcactgggcaggcgccccactgtaccaggctgcgcagattgtcctcctgagactggaccgtgagagcagcagtcccggtcagcgtccggcgagtaaagtcgacgctgcagcgcaggtgcaggtgcttggtccggcagacggaagccggagaggccaacgaacaggtatccactatctcgggcatggctctgggggatcacacagcacagcgacctacagcccaacgctcagctaccagactcgtcgatagagaacctgaggaggagggagagaggtaaagaagaggaggagggattcgcggtgcacgccgggaaaggaagtttcttaaagtcagacgagcgttgggggatgggtgaaggaactacaagttccatggtgccgcgcggcaagcgggcgcttggctacctgggagcgtgtgtgttagggatgttgagggggaccaagcgtgctcctggagctgaagaagaggaggggagtaggggcagttagaagggtggccgaagggaaatgatgagaatggagggggagataaaactgaacactaccattttggctctgttcaactttcgtggaagctgtggtggcaaacgtaagaaaatcaggttcattggtgtttgcatatagcgagggcggggcgga

SEQ ID NO: 23303 - DNA, 1094 bp, Artificial sequence
  DNA replication origin
ttcctcccttgctacctccttgctgcatttcatttatagagctttggcacaaggtatttcttaggtaatctacacctttgtctctctctctttttttttttagacagggtgtcactctgtcacccaggctggaatgctgtgtcatgaacactgctcactgtagccttgaccccctgggctcaagcgatcctcccacctcaccctcttgagtagctgtgactataggcacactccaccacacccaactaatttattttttatagagacaaggccttaagtcatcctcctgccttggcctcccaaagtgctggtattacagacataagccatggcgcttggccttacatctttttctttaaatgcaccaatcataattacatccaatgccaggaagattcaggtcagttcgacaaaactttgttgagaagagaatgtgtagtgtgggaaatgcccggcgccacatcagatgctctttctacgcgtttcaattcaacaatgggctttgattggtggttatgagccccgcactgtgattggttctggcagttcagatgaaaaaacacagccctagtcctcaaccatctcacagtgccctaacggagaaagacaggcaaggagacaaaatgcaatacagggagacgagtgaaacacagaaatctgtaagagggagggcgctgaaacagcacgggagacagggaagaggagaaagctacccgaagcaggtgcctgctggcctgggtgttaggggagggacagttctctggtggacggagagagaagggcatctcgagcaggcgggaacagcgcaggcagatacatggaggaatgaaacagcatgtttcgaggggccactggccactcggtgttgctgccgcaaatgttacaagggaggagggtgagactgacaatgtaggcggaacctagatcataatgggcctcgttaattatgaagacaagcttgtgctgtatctcataagtgatggggactcagagaagggcttcaaacagggagagaccagcagatttcatcaaaccccacacactcaccaagcctgcctttaaaatccacagacacggccgggcgcggtggctca

SEQ ID NO: 23304 - DNA, 1441 bp, Artificial sequence
  DNA replication origin
cagacggtctgtggctcttgtaatgagatcctgatttttccccctttttttctttctctcgctcctctttttttttcccctctggtgtgtgtgagagcaggaagttggagcagtcaggccgagccggctcacttcctttactgcattattccccaggcggtgtgcagtctgtgtaaacaggcttttccgccccgcgccgcgcgccccggccgcggctgtgcgccggggctggccgcccaggcccgcgcctcccccgccgccccggccccgtgcgcgccccgcaccgcccccacccgccccgcttcctgcgcggccaccccggggaggagcctccgacccgcggcgactccgcgcggccgcagcccctccccacggggaggggggtccgcccgcaacccgcagaagccgccgcgcttcccgggacaccggggatccctcctcacctcaacccctgggggtcgagcgcgcggggcaccacgacggggtcgtgccctgcgcagttggcccgggaggggggtcccgaggtggggaggcggctggactcgctgtttcccatccgctgggatggaagagttggggggcagaggggaatcgagagtggggttcagggtttggttgctctgggcaaaggactgcttttcttgtgggtgcgggcacagtttccgtctggggttggagatggacaccgttcctgtctgggttttcggtgttttaaaagccagccctcggccgggcgtgctggctcacgcctgtaatctgagcactttgggaggccaaggcggatggatcacctaaggtcaggagttcgagaccagcctggccaacacggcgaatccccgtctgtactaaaaataccaaaacaacaacaacaaaaacagccaggtgtggtggtgggtccctataatcccagctacttggcaggctgaggcgagagaatcgcttgaacctgggaggcagaggttgcagtgagctgagatcgccccattgcactccaacctgggcaaccagcgaaactccgtctcaaaaaaataaaaaagccagccctcagttggggggcgagcctgtggggaaaggataaggagccacaacactggaagtcatggaaataatgcccgcagggtcagagactgaggcttgaagggagcctctgtggtctcagaactggtcttcacacctccacatccctcaaggaggtcctgcctctgagggctcaggccaggctctgatgggagagcctgcccattgccctaggctgagacaaggttgggggggatggctgttgaagagcctctcccttcccaggcctgcgccccaacctcactgctcaccttccagaaccttccattcccatgccgccacttagcagcccagacccctggttttcaaacttgacccaaggggcttgttaaaccactagtggctgggcctctcctggagtccc

SEQ ID NO: 23305 - DNA, 1267 bp, Artificial sequence
  DNA replication origin
gggaaaaatcaggatctcattacaagagccacagaccgtctgcagacgcctgtcagcatggaaagtcgggggctttcgcccgggtcctcctagaaattccccccgaagaagactcccccacatctgggtaggtaacagggcttctgcctgttgctcggacacttaaaaagtttgtttgggggtgttttctttttttctttcttttcttgggcgcggtgggggtggggcggggggcgccgcggggtgggctgcgggccggggtgggggtggcggtgcgtccgcgcgggagggccggccgcggggagggggcgccgcggatgctcctgcgcccgcgtcgctgccaccgccgtcgcccgagctcgcgccgggcccggggctgcggggaccctgcgcccgcggctcccctccctggggctgcgctgcgaccccagaggaaggggcgccgggcgtgcaaccctgggagctcgcccagggccccgctgcaggcagcgcggggagcgggggacggcgagacttcgggtccctgggaagaaccgtggcaggagcaggctgagtgcctggaggctggaccaccgccgaccttccagctgggaccgcagtcaggctcccctcgagtgggcaaagtgcactggtgctcggatccagggaggaagacagggatggagagggcggtggaggacatgggtcgcgaaggtgtggggctgggggctgcgtccactctcgcttggcaggtgacccccgcccaggtcaccgccccaggcgcacgccccatcggacatttaaaagccggtggtctctattgggcatggttttggagaaggaccaggcaagaaatgatcttggggccccttccactccccatccctgtttaccttcgaactcaacgttggcctgtgacgctactgtaacttttggggaggcgggattaagattttggagtagttaaaaagcaaaaataaaaggtcttggttttgttatcttttctgaaccgaatcatcctagggacaagctgcagttaggcggcgggtggaggtggaagcaagaaatgttatttcagaaactgcaaaaggggctttttagaaagaaaaaaaaacgagtgtcgggagagtttctggcttgtctggaaacggcaagactaattgccatgcgcttccgctttgaaactggcagcagacagcatcttgaaaatgactcactagaggagctcacaaagaaactgtggtttgctccttcttaggtttatgtatttgtgccttttacagtttcc

SEQ ID NO: 23306 - DNA, 1041 bp, Artificial sequence
  DNA replication origin
gaccttaggacctagccatgacaacaaggcattacaagtgcacacacacacacaatagcccttggcaagagtcaaacatgcagcacagagaagcgctttaggagctgaggggcaagatcgtttagttcaggtcaacacacatgaactgagtgcccatcatgtgaaagctgctgtgtttggagctggggctacaaacgtggataaaatagtctctgatagttaggagctcataacttaagtcccttcatctagtatctcaggtgcaatacaaaaggaatactaagttgcaaaaggaatcctaaggaggaaggtattaactttgcctgagatggaggaagaatgtccagagggcttcctggagggggtgagaccactggtacagggtgttgaaggatcagcctgtggcagggtagacagggagaggaaggcatcgtcggcagaggaacagcttgaggcaaggcatagatacgtgaaatagctttgtgattaggggaggtatagcaataggaagcattgaaggggtatgagtgacagtctgaattgttttaggaatcaccctgctggcgagattgggaagggggaaggctggatccaagtaggatgctattggaatattccaggcgaaagaccatgagtatctaaggctgtatggtgggaggggtcagagggatggatctgatgttgggagtgccgtcagcaggagttggtgactgactgggtgggaggagtggggagagccagaattgagtgtgaggaacatgggaggaagactaagctccctgggaaaaggctaaacgtccagtcggggccatgctgagtttgaggaccctgcaggaaattcgggtggaaaagtccagctgcatctggagagcggagagtgttttggagccggagaggaagttaggcagtcatcaacacgcaaggggtggtgaaaccatgggaacggatgaggtcacttgtggagagggcctgtagcccagggaactatgggctgggctgggtggtcagggaagttctgagggagcgttgaaggactgttgg

SEQ ID NO: 23307 - DNA, 1087 bp, Artificial sequence
  DNA replication origin
cctggtgtcgggtcggccgcggggccgggaggctgcgtgggacagaggcgggggcgggggctactgggggcgcgggtggctcaggcccggtcgggaagttgagcgaggaggcgcggcgcggggggctagcgtgcgcctgtcacctctccggtccagcgaggaccttgggtcgcccggggatttccggggctcgggtggggtgtgagtgtctgcgagctgcttcccaggaggcgccgacagatatagacgccgccgcctccggtgctcgctgccgctttggtctgcgggggaggccggtctcctcgcgaggcggaggaggggaaagaggcagaaagtcccccgagacacaaaggtcccctcggcgggggtggagctggaggcgcaggcgacgctgcccgggaggggaaggaaggggcgcgggtccgcgggaggtgggcgaggaggcggcggtcgcggcgcctgcagctccttggagacgctggcgctgtgcgcgggtggggagcgcggaggaggaggaggagcccgcgcgtgggagcgggtagagacaaagatcagggcagcctcctgctggcgggtcacaccccggagtgttggtcaagagcggaggtagagggaaggtgggaaacccagcaaaccgatggggaggggaaaatggggggaggagggtgcctagtgctgtctccgtcgcagttgcttttctcagcatttttgtgcccgatgctatgcccgatgcttttgctccccaactcagctggatagctccagattccctccctcctgtcacccccacactgccacattgactctcctgtggtttttccctcgttctccccctacttttcacccactccttttcgggtaagcagtattttgctttcagcttggggaacatttgttaatgacaggatgtctgagcttgttctgaccctgaactgccttgaacttctctctcttcctcccaccctttccttttctgggatctataatgtcacatggccgttaacaattagcttttcttttgcaaaagtggcaaaaagcgtttagctgaaatctgtggctctcgcctcctttacatgaatatgtccac

SEQ ID NO: 23308 - DNA, 1054 bp, Artificial sequence
  DNA replication origin
gctctcgccgcgggtccggagcctcgggaggggccgcgggtgtctcacgcgttgccaagtccctcggtcaacatggctcccgcgccgacgagccgcgcggacggcccactaatcccctcggagcagccgggcgcgagcgcggcgggcgccgacggcgggctgagactgtctggccgggcgctggctccttctccgcggctctgcggcggcccgcggggagctcaggagactgcgggcggccgcgttcgctccttgcgtgtgcgtcgctttcacactcggcggctgcggattgacgcctccgcctgttccccggaggagagcgagtgcaagagaaaaaacacttttattgaaacgatccaaccagcggcggcggagaaaagcgaccggccgcgggagcttaccccacccccgcctgagcggctcgccgggggcagcgcgacccctgccggcggcggcggaggcgggggcggggccggcggccgggggcggggcctgcagggcggggcgggtgtccccgggaaactgcccgctccgaaatgcgggcgtcgggggagcggcggagggggccaggggaccccaccggaatgagtgcctgtccgcagcgactgggggagaaattatgtgaataattcagcccctccaacatccccctgcccctcaacttcccgctaccaaaccaaaactcgtgcttcagttatacaagtaattactgtacaaggtgtccatgccacagttctccactgactttctagagagtccatgtcaaaggacccacactgaaagatgttgatggctgcaacttttctcctttgttgtgtgtgggtacgtgggtactagtgccgcagtctctcacacacacggcatctattcatttaaactacagtacagtgttttgtatatattatcatgtgcccggcaatatgctgagtcctctaaggacggagagtctagctgggatgaaagatgatcaataactatcataaaaatctgaacgttatgagcggagaaatacaaggtgctatgaaaacagaaaggactactgttgcacgggtta

SEQ ID NO: 23309 - DNA, 1211 bp, Artificial sequence
  DNA replication origin
tttctagaaagaaagcatctttaaacatacatattcatcagaaatacaaatatttgtcatcagtgatactaatttccaggcaaacattttaattgcagtcaatgtattagattctaccaggttttaatttggatcggtaatacgggtttgattagggttctaggcctaattataggtcactagtcttcctttaggattatgcaccatctgttattttaaattgaccattgagggggttcccaagggttctccttcgttttgttatcaaacgttaggtttaggattcttgcgggtggtgggatccaaagccagagacggtttcaacaaaaatgcaagcgcgaatttgtcttgcgtctgaacgcactgttcaaattaaacaatttagacatgccccaactatgacactaagaagtgaatggtatagtacacttttgtcacaaattcaagggtaatttaagtgcccgattgtagaggtctggcttcccctgggtttctggaacaaaagaagcgttcgcgaggagaggggtaactccccgccctccccctcccaaagtaaatcaaatcaaggaatatgagtgcctgcagacaagcctcgcttcttttcttccccttcagggctagcgtttggggaaggcaaggctgcggctactcttggagcttcagtgtcccgggaggaagaaaggcccagccaagggtcctcacactggcgtggaattcggcgcgttcgtaggcgatcgaccccagagacgaaagctgcttctcaagctgggggagggagaggaaacggcgcacaaaagcagtacgacctgtcccttatcggcgtctaaggggaagggtggagaaaacgaaaacagaagcgggccgggagcctcggctcccgccccagcgccttttaaactgcgtttctacctcctctcgctcagcgcggcggctaatggaacccgcgcgagccgtctcgccaatcaccgccgcgcttcctcccgtcgcccgccaatggcggcgcgcgttcttggggcgtgggcgaagcaggctgctcgcctcctgcctgtagtgtgtgggctggggttggtgcgagcttccagcttggccgcagttggttcgtagttcggctctggggtcttttgtgtccgggtctggcttggctttgtgtccgcgagtttttgttccgctccgcagcgctcttcccgggcaggagccgtgaggctcggagg

SEQ ID NO: 23310 - DNA, 1353 bp, Artificial sequence
  DNA replication origin
tgcccctcctcctcgggtcccgtcggcctgcgcgcgcccgggagtttgaatttcctcggatttggagcaatatcgcagtggaaggcgctgtgggttgaggtcgccgcccacctctcctaggggaactatggagctggcagctgaaagactcagtgaagcaacgaggatgccggggagagggaaggggctgggctctgggcggtgccaagtctgtgagggggcgcggtcaccgcccagggttcccacgaacgccaaggcggccacgtcctgctccccctggtgaagaagctgccctgggcttgtcgtcctagggtctccagacatgtctgaggtgaagagccggaagaagtcggggcccaagggagcccctgctgcggagcccgggaagcggagcgagggcgggaagacccccgtggcccggagcagcggaggcgggggctgggcagacccccgaacgtgcctgagcctgctgtcgctggggacgtgcctgggcctggcctggtaagtggacgcgaggctgcctgggccggcctcctgtgggccccctgctgtttgggctcccacccggctcaacatccagccggaggtgatccaacctcccagacctgggccttctgtgcctctgtcttgaccccaaaggaaggaaacagcccagccttgtttttccctttcgggcgtttcttgtatctcatttccccccgtgctggtagcatgcccctatcgctcagaaggagttgaggctaaggtttgggaacgagccatttgttaagagctgcagattcggccacgctttctgaagctcccgctacacgtcagaagcgttcacgttgttataaaccgttacttcctgtccgctgtgccccattccgggacacatctgccccaccctactcaccccataaatacctaatggaaatacttgcaaccttaaaacagatcattatgtttggagaccgaggcaggtggatcacttgaggtcaggagttcgagactagcctggccaacatggtgaaaccccatctctaccaaaaatacgaataatcagccgggcgtggtggcgggcgcctgtagtcccagttcctccggaggctgaggcaggagaatcgcttgaacccgggaggcggaggttgctatgagccaagatcgcatcactgcactccagcctgggcgaccgagcgagactccgtctcaaaaaaaaaaaaaaaagaaaaccatatcattatgctcccaaaggagcaaacgttatagtagcagagcttggaggagtgctcatattttgatcaccgtgcatgcattatgaatttaaggtcttttattaagtaagttacagattgaatatggtaaagctacaaa

SEQ ID NO: 23311 - DNA, 917 bp, Artificial sequence
  DNA replication origin
ccaatgttttcttccagttctttcatcgtctcaggtcttccctctaagtctttaatccattttgagttgatttctgtatatagtggaagatgaggctgtgtttcattctgttgtatagattattctgggactgctgcatgtgctgtttcatctacttcaaatgccccctcctcctgtcttcaggcaaatacttgctggtccttcggctgtccatttaaatattacctcattcttttgataccatttattcaacaagtatttattgtgtgcctattatttacggggttgccaggagcttttctgcgttttggagaaaatggcagtgatgaaaacagacaaaatcctgcctccatgagcatacgtggcagtggaggatgaacaaataaatatgtgatgacgcatagcggcaataagtattgtcaggaataaggcagaagaggagagcagaaaagttggggtgctttttgtaggagtaaacaggaaaggcttctaggaatacaggtgccagtggaagtggcatttgagcagagacctgaatggcattagagcatgaggcatgcaggtgtctggagaagggaactcgggcagagcagatgatgagcgcagaggccctgggcgtgggcttggcgggcaggaagagcaaggaagctgtgtggctgcagcagaaaaatcaggtgggcaggggtactggaggtcacggtgaggagttcgggttttgttctgactgactgtgatggaaaccactggagagtgagagccggggagtggcatgcctgattcacctcctccaggaagcccccctggctcccaaggtgtgtgtgcccacatggtgccctctcttcccctcgtatctcacctctcagcactgaaatccgcctctgtctgctccccgtctgtgtgctcacaagggcaagggc

SEQ ID NO: 23312 - DNA, 1200 bp, Artificial sequence
  DNA replication origin
atgctacacagaattaaaagcagatgacatgcttgaaggtgactgggtatctatgtcagattgggtggttaggacatccgcctcttcaagtagccgagacctgaatgacaagatgaagtcagccatgcagaaaccgggggaggatattccaggtgtggggagcaggtggcataaaggcctcaggtaggagtgagcattacatagtcaaggaatgggaagagctgagcatcacagaggactgtggtgggaaactgcattctgggtacttggggcagagggtgccatgactgatctctgctgtgtggggaggggagtctcaaggagctatactgcataggcctggggcgaggtggcagtggccccgactggaagagagatggaggaagtggggaagagtggacaggattgagatatattttaggggtagggtggatgggatttgctcatgggctggatacagaggtaaggggaagacagggatccaggctgacttgtagactttgggcttgagttgcatggtgagtggctgtggggtggggaagttggtgagagaagagctttgaggggaaaatcaggaattgtgtcctggacatgctaagtttcagatgtctgtgaagcatcaaggtggaaatgtgaaagaagctggccacgtgagtctggaattggggggtgcccagggctggagatacagaactgggagccagtgtgttgggttgggtcagtgctgaatgggaggaccaggggctcagagcgtggcatcggaagaaagacttcagaggagatacagctcctggggatggctggtaatgagtgatggacacaggagcgaatggccggggctggagggaaagatcccgaaagtaaactgtcagggaactgtgagaccagatgctggaggggtcaatcctgtggatgttgatggtgccaagaagggtgacaggggtaggcccccaaaagaagactgaaaacaagaactgcatgttcacaaagggaggtgcctccctgcaaatgttaaaaatgcctgctgctgttccccatgacagtggaggtgggggctggtgagaaggaggagagacagttccagatggaaggattcgggggcgtgagagcaatgcattctgggggagtcccagggtttctaggatgcaatacggcagccggggcagaaaccagatgggaggctggttgggaatcttccag

SEQ ID NO: 23313 - DNA, 1204 bp, Artificial sequence
  DNA replication origin
ggagacggcgttcgggggaggacgcgccgccgccgccgccgctgccgccagggcaggcgcgcgccgcgtggagccgggcgggtgcgagggcgcgcggcggggggtggggggcacgcgccgcgcggggggcgggggcagtggggggcgcgcgcgcgggcccggggagctcgcggggagagcccggcgctcggcgcagcgcggcgcggccaagctccgcgcctctcccgcccttcctcggcgcgctcgccctcgcctcgccgctcgcattcgctgggggcgcccagaaagatgcacagaggcaacggctaggggagcggaggttcaagccacatgtctgcgtcctcgggggccagagcccgccagccctcgcggatcccggctcgcggccagcccgagcggctcgggtgagtagcggcacagcggccccctcgctccgcggcccccgctcgccgagacgtggctccaagaagtggtgccgcagccggggcagaggcggaggaagccgagtcgggcaagccgggaaggctgcggagacgctttgccggggcaggtgttgcagcctcagctagcggtctctacggagggggcgggaggggggctttttttttcaaacctgttctggttatcgattcccccaccacccccgggttaagcgcattttccatttcctttcctcattcttggggttccgaggagtttgaggaggtaaattgctgggtgtctctccaaatggtttgactttaacagtgtatattttccaaaggtcgtttgtctttaatattaaaaagccatgccaagtccacgtaatttccaggtgcgctgtgcatcgcctttaaggaatagcaggaagaatagaagctggcaaggttggtgtggagtgtgctccctctctcttccctcgtatttctttctacattgattaattagagggggacgtgggcatggactttccaatgttaagccttggagagcaggagcagagcagcagagactgcgatttgctgcttcggtgaaggtcgggtcagtgtttccagcgaaattccaatttgcgtgcttgtaacttggatgtgattttactccaggttacaacttgccaaaagccaaacaaggtcctgtgtttatcaggatgctgccatcgccccgtatttatttgtttatttttcctccaagaaaaccagccgtttataaacagcccctaaaacaa

SEQ ID NO: 23314 - DNA, 1506 bp, Artificial sequence
  DNA replication origin
gtttttatatttgatgaaaaagagcctaaatgctatctgatttgggataaagaaaaaggagcattaactttgactatgcctttagctccagccacctttttaagagtaaattgctgggcaggtgggtgagggctagtcacggaatgaaactgtaagctggaccaggtgtgaggaagggaggtgataaaaggattatagggtggagaagcagaggctgaggaagaattgggacctagctcggcctggcgaggaggggagaggtcagatgggtctgtagaaaaggaagattagaaagactcagcgacgcttggggttgggactgaggggacaggcgggagggaaagaaggaagatttgggacgatttgcattgggaacagagactaggaagggactgatgtgtgaaagaatgcctggatgtcaggcacctcagaccgtttgcccattttacgacaagaattatttagatctcgtaggatggaaaaattgaaagtgccattttctggctatttggaatcactgttgagtttgtattggggtcaagcggcattgcagaagaaaataaggcatttaggttttaggtcaggtgtgagttgaagaggttttaagttcttgagaacacaggctaagggagaagaaggagtaatggagggtggaaggttgcccatagtgaaggaggcaagcccagagaaaagagagagtagggacatggagggaagaggttcggaggttcttaccctccagaaaagtgggaaaggtgtcggggcgccaaaataaggggttggggtgcagagataagaggtcggggtgtggaaataagggatcggggcgcagagataagaggtcagggcatggaaataaggaattggggtgcagagataagaggtcagggcatggaaataagggatcggggcacagagataagaggtcggggcacggaaataagggatcggggggttcttgcaccccagaaaagcagagaaggggtagagacagggagagaaggggttgtggtttttgcccctcccccagaaaagcgggacttgctgctaagggtgaaggaccgaggcaggcatccctgcgtggtcagacacctctgaaacgtgggtaaatggagaggcgtccctgcaatgattaaacatgaagggaaggctggcttcccaagtctgtgactgatgcctgagttttgggtccacggataaaatgtgtcttctttgtttctaccagaaaatgaaagcaattgaaattaagagaagggagagattgaagggtggtgccaagattgaaaagagaaagtggttgagggatagtgagagaggttggagaagagagtaagaagaggctgcttacccgatttaaaattggtgagatgttccttgggctgatgggtctgaggacccgaggtcataggtggatctttttcacggagcaaagagcaggaggacaggggattgatctcccaagggatctccaagggtcccctgatccgagtcacggcaccaaatttc

SEQ ID NO: 23315 - DNA, 1359 bp, Artificial sequence
  DNA replication origin
cagcctccccattcctgtcacggaggattttcctcaggcgtcgtgacagacccgaggcgtgttgccggggcccgccgggccgaggaggagccgacgcggcccggggaactccagtcctcacacggttaacgctcttccaaggagagtggaggagggagggtccccgcccacgagaacgaagagaatctcagggccgaagccccgcctcagccggcccggcccctccccgccagcccgccacccaactcgggccgcaccaggggccgcacctgcccgcgcgcacacgccccccgcgcgccaggcctcgccgccgccgccgccctcggcacgcgcccgctgcggctgccccccaccgccctgcctcggcgcgggccacagcgcacgagccgccgccgccgccgccgcgctcctccccgccgcggacgccgcccccgcgtaaccgccgaggaagccgaggcgagcccgggtcgggcgcgagggcgcgcgggccgctgctgccaccgcgggtgttccctgcgctcccgctccagctaggactctctctgccgcctcctcctcctcctccgacctcagtcctcaccaccctcctcccgctcctcaaaagcacccccgagtccccaccccctcacgccgcacccgcgggaacgaggccttgggaattcaggggagtggctgtgggggcgcgtcgcggctcccagctcggccagcccctctttcaagacatggtctgatccccattgtaaaagctgcgccccgaagaggaggagagagtcgtgctccctgcctggggctgcagggagctctccgtgctgaagctcttgcattattttagggtggggcgaagagggccctggattttggggagtgggggtgggtggggaggaggacccgaggggggcaaggactctgtgggggagtcggtgagagactatggggaaggaccaggagctgctggaagctgctcgcactggaaatgtggctctggtggagaaactcctgtctggcaggaaaggagggatcctgggcggtggatccggacccctgcccctgtctaatctgctaaggtaaggacgggcaccagctccggggttggcacacctcattatgcattgtgatggatatacgtcctcctcctcacggttattgcacctggtggctgccagcgattcattcttaaattaggtaggaaaacagactgcgtgtatggagaggaggtatgagcctcccagtcagattgatgccttagattctttgagtaattttaaaatagccttccatcaatgcgtcagtaagctacttttcctctgagccctggtgcagaacttgtacatgtactagtgttgcttgaagaaaatcgac

SEQ ID NO: 23316 - DNA, 1484 bp, Artificial sequence
  DNA replication origin
ggagtcagcctgggggagtcagccccccgcctggccagccgccccatcctggaggtgaggggcgcctctgcccggccgcccctactgggaagtgaggagcccccccgcccggccagccgccccgtccgggagggaggtgggggggtcagccccccgcccggccagccgccccgtctgggaggtgaggggcgcctctgcccagccgcccctactgggaagtgaggagcccctctgcccggccagccgccccgtccgggagggaggttggggggtcagccccccacctggccagccaccccatccgggagggaggtgggggggtcacccccccgcctggccagccaccccttccgggagggaggtgggggagtcagccccccgcccggccagccgccccgtccgggaggtgaggggcgcctctgcccggccgcccctactgggaagtgaggagcccctctgcccggccaccaccccgtctgggaggtgtgcccaacagctcattgagaacgggccaggatgacaatcgcggctttgtggaatagaaaggggggaaaggtggggaaaagattgagaaatcggatggttgccgtgtctgtgtagaaagaagtagacatgggagacttttcattttgttctatactaagaaaaattcttctgccttgggatcccgttgatctgtgaccttacccccaaccctgtgctctctgaaacatgtgctgtgtccactcagggttaaatggattaagggcggcgcaagatgtgctttgttaaacagatgcttgaaggcagcatgctcgttaagagtcgtcaccactccctaatctcaagtacccagggacacaaacactgcggaaggctgcagggtcctctgcctaggaaaaccagagacctttgttcacttgtttagctgctgaccttccctccactattgtcctatgaccctgccaaatccccctctgtgagaaacacccaagaatgatcaataaaaaataaaaaataaataaaaaaaaaacatgtaaatacaacataaaataacaaggataggtaggattctaataggtgacactagagacgctgatagaaaacactccagaggaaatagcaccaacaaatacagagtcaggaaagtgtaggataagtgtgggaaaaccagtctactttgggatacaggattcacaatagtattacataacagacagaaactatagtgttctgggtttatccatgaaaagaaaggcaataaaaaatatttttatgacaagagacatatgagcaagccaggtgcagcagcatgcacctgtggtcccagctacttgataggctgaggcaggaggatcacacaagctcgggagtccaaggcaagcctgggcaacaacagcaaaaccccaccccaaaaattaaaaaagaaaaagaagaggccaggcacagtcactcacacctgtaatctcagggaggatcacttgaggccaagagttcaagatcag

SEQ ID NO: 23317 - DNA, 1424 bp, Artificial sequence
  DNA replication origin
cctcccagacggggcggctggccgggcggggggctgacccccccacctccctcccggacggggcggctggccgggcgggggggctcctcacttcccagtaggggcggccgggcagaggcgcccctcacctccaggatggggcggctggccaggcggggggctgactcccccaggctgactcccccacctccctcccagaccgggcggctggccgggcgggggctgaccccccacctccctcctggacagggtggctggccgggcagaggggctcctcacttcccagtaggggtggctgggcagaggcacccctcacctcccggacggggtggctggccgggcggggggctgacccccccacctccctcccggacggggtggctggccgggtggggggctgacccccccacctccctcccggacggggcggctggccgggcggggggctgacccccccacctccctcccggacggggtggctgctgggcggagacgctcctcatttcccagacggggtggctgccgggcggagaggctcctcacttctcagacggggcggctgctgggcggaggggctcctcacttctcagacggggcggttgccaggcagagggtctcctcacttctcagacggggtggccgggcagagacgctcctcacctcccagacggggtcgcggccgggcagaggcgctcctcacatcccagatggggtggcggggcagaggcgctccccacatctcagatgatgggcggccgggcagagacgctcttcacttcctagatgggatggcggcagggaagaggcgctcctcacttcctagatgggatggcggccggacggagacgctcctcacttcccagactgggcagccaggcagaggggctcctcacatcccagacgatgggcggccaggcagagacgctcctcacttcccagacggggtggcggccgggcagaggatgcaatctcggcactttgggaggccaaggcaggcggctgggaggtagaggttgtagcgagccgagatcacgccactgcactccagccggggcaccattgagcactgagtgaacgagactccgtctgcaatcccggcacctcgggaggccgaggctggcggatcactcgcggttaggagctggagaccggccaggccaacacagcgaaaccccgtctccaccaaaaaaaatacgaaaaccagtcaggcgtggcagcgcgtgcctgcaatcgcaggcactcggcaggctgaggcaggagaatcaggcagggaggttgcagtgagccgagatggcagcagtacagtccagctccggctgggcatgagagggagaccgtggaaacagagggagagggagaccgtggggagacgggagagggagagggagaccatggggagacgggggagaccgtggggagacggg

SEQ ID NO: 23318 - DNA, 1121 bp, Artificial sequence
  DNA replication origin
aggctcttaaacccatgaaggcaggaggtttatttgtctgtcaattcctcccaaagaggccaggtcccctcggtcttttatttatttattttttttgagacggagtctcgctctgttgcccaggctggagtgcagtggggcgatcttggctcactgcaagctccgcctcccgggttgatgccattctcctgcctcagcctcccgagtagctgggactacaggcaggtcccctcagtcttaattctactgtggcactgaatatctcaaggacttgtaatggtgttatgtggggacaagttcaggtagccttaagagaggttaattaattaaatgctactttttggttcctgctaattagaaagaactgccaagaagaattaaagtgcaattcgtaactcattgtgatggcctttcctcatgactccatctgagcggcagcgatggtaaatggaggagaaagcgctggatgtcagaagataagttacaaacggccttggggcccagcgcgggcatagaggagactggggaagcatctccaggcttaggaaggggcacaagaggtggaacagactttaagacgagtgcccagacagggctgctgaggtgtggggatggtgaagggagaacaaaggcgctgcccaggtctgggggaggcttggagcgcttggggaaggcaagcctggcctgcatcggcccccaggctaggtgagagcaggagctgagagcaggagctgagagcaggtttcccagtcactttaggctcaagggtgggcggttgcaatttcagcctggggttgggtagagtgtgaggctgaaaaaaacctgcgggagaggccagtggggccctcaaggggcaaggtcaaggcagggagcagccaccaagacagagcctcagttctgatagtgtccctgtcccaccagatccctgcaaccgccctgcgaggtgagcacagctgcaatgcttagctccattttacagatggggaaatggaaccttagagacggtgtcttaaccaagggtcacccggctgctggctggctgaccgagggccaataaaggaccagatcccacgctcccactatcctgggcagacctggccctccttaggggctggctcctc

SEQ ID NO: 23319 - DNA, 1411 bp, Artificial sequence
  DNA replication origin
cgggtgtttcgacggctccctgggcccctcccttccgccccgccgccccaggaacccgcgacggccccagttaccgtatgcggtgagggaggccatcctggcccgcgtcctgcccagactggccagggcgtcggctagagcggccccctgcgcgctgcgcccctggacggcccggcccggcgagtgcatgcgcttggctctagcggcgcccgggcgctccgcggctgagcacgcccagtcagcgcgccgcgctcgcccctagagctgccggcgcgcgggggcccccggccgggctgcgccgcgagagcggcaggagagagggcgtagaccggcagccgcgctccgggtccccgcggggattgaaccagccgcggaggacgcgcggccgggagaggggaggggcgaagctggaggtgggaggtgcccggcagaggcgcgccgcggatttggcccagcgcagccggcgtcgggcgggatccccggtgggttcacgccaaaaggggtggcagggatgtcgtggcaagggtcggggagtcccaggcgcgccacagcctctcgggacggtctcctttcctagggaagctccactggagagcgcgccggggaacacatggggtgggtctggccgcccgtgactctgggcgcgattcccagcccaggggacagtctggagaaggctttgcctgtgagaccaaagcacaggggagagtagcaaccttctcctgcgcacttctattagtgaagtcggtgactactaagtaccgaactctgaccccaacagttcagacctgtcccagtacatcatcttatcatctctgtttgtgtttctgtcttaccacgaggcgctcaccggtgtcctattcctgcccagcatctgatgagggcgcgagctcacacaaggttgagtgatggaatgtccgagctggtctcagcccgccttccctattgtgctgggtctccgtctagaatcagctggctgaggagagggaaaggagtgggagagcgagaacgagacccaataagtcggtggcacccattgcgggatgaagcaggggaaagaggaaggccgcccaacgcctcctcgggtcaggtgcaaccccgaccccgtcccttgccgcgaggctttgccattcccaagtgtaaagttgagaccacaccaaaaggaaggcccagaggcctcctggctcggggtcgaaggtcgtgatcaccaggccttgtaaaacgcccgcgcgggaggaattggggggcgatggtgtcaaggcattagctgcatttggggttgcgcctactcgggtggaggcaccgagggcaaataaatctggcggagacaaaactcggcgtttgtctgggaagcttcccgcgctctccagctctccagccgtcagagttgggcgcttccaacctccgcttc

SEQ ID NO: 23320 - DNA, 959 bp, Artificial sequence
  DNA replication origin
gcggctcgcagcggcgggtgcaggggcgactgccagccctcaccccgcctcggggtgcgttcggaggccgacacctggaggacgcctccagtccccgcgggacgccacgcctgcgcgccagggatccgggataagaagtgcgcgccgggctccggctgcgcgccgcggggccaccagtttgcgcgcagggctcaggcgaccgtgcggccatggacacgccacggggcatcggcaccttcgtggtgtgggactacgtggtgttcgcgggcatgctggtcatctcggccgccatcggcatctactacgccttcgctgggggcggccagcagacctccaaggacttcctgatgggcggccgcagaatgaccgcagtgcccgtggcgctgtccctcaccgctagcttcatgtcagccgtcactgtcctgggcaccccctccgaggtctaccgttttggggccatttttagcatctttgccttcacctacttctttgtggtggtcatcagcgcggaggtcttcctcccggtgttctacaaactgggaattaccagcacctacgaggtaaggggcagggtgggctgggaccatgcagggcgcgggggaaggggactctgcagacctctggaggcgttttcttgggggcagactgtcactgccacatcgaaatctctccccgtccatcgtcatcatcaccctcccttcactcctccccgtcccccgatcttcacctggcatctttcccttctactgagaggcgtcctctaagggtgaaaaaattcttgggatttactctcctgggcttagtgaaaaaaagaggcttccaaagtgaacggattgcaacagtagtgctcgctatggtcctttctacctttagcatctttgattcccaggcaaggggaaagatttttggggaaggtaagttcttcaggtctcaggccctgcttcttgaaaggaatactc

SEQ ID NO: 23321 - DNA, 1265 bp, Artificial sequence
  DNA replication origin
gagccccagcagggtgatggagttgggggccatccagagcgggatccactggagcagccaggtccagtagagctgcagcggcggctcgagcagcgagacgcccgccgcgctgtagcggtgctcctccagtcgccgcagctgcgccgcgctcagcggctcgctcagcgccctcagccagcgcggcgcggacccggccccggcgcctgccgccatggccgcctgagggccccgccgccgccaccgagcgcagcccgcgcctggcgctgggggcagggagaggtggagggagaggctggcggccgggtcctgcgactgccgggctggactcaccggtcgggcccgcacggcggaggtcgaggtcaggccggcctgcccggctgccggggccccagccccagaagctgtggggccgcggctgcggctcgcgggtggggcggggcctcggggaggggtccggctgggggcggggcggagggggtcctgctaggggcggggaggcgggtgccgcgctcgcgggtcaccctcggcgcccgccaacggcaacttgttatcggcgatcaaggtccttgactccccaggggccggctgcactgcgcctgaggtctgatgtcttaacccacggcgtcggattacgccctgaggtcgtctcctcgcgggctgcaccacgaccgagccggttcctctcctaggggtcggaacacgactccggtcgcccagtgttagccactgcaggaccacgctgcccgcagagcctgggggttttcgtgtgagaacacagttttgcagggctcgggtcacgggggtgacggccccatctgtcctgcttggtaaaacacacaagcacaattctccctttctgtacggaggaaggcggccctgccatgtattcgctctagagacccatcactgcggattcagagaccaaggttttgaaactgaaaatcagggcttagaaacactaacaaggagaccgaatggctgaaaccccgatacctattttcttcagcgcatttgataccaacaagggtgaatatttttacacatactcttccctggaataaagggcaggagtgtcctccccctgcaagggggaacaggctggcttgccacacgcattggtaggtcaccggccccttatctcacagtgcactcacttggacaggggacatctgtcataaacacgttctgttgcacaacctgagacaggcctgtcacttgctttgctcttcacttcatggctctgatctgcacgcactttctaaggc

SEQ ID NO: 23322 - DNA, 1160 bp, Artificial sequence
  DNA replication origin
tgacctctggccccctgtaccatcgccccctaccgccaccccctccccataaagattatttccggaccagcttagcggatatcataaagaagggagtgctctgggatactcccagaccctcggagaagaaagatgcggggcgggggttgagtgatggcgcttagggcactggtggggattcctggttcttcggcgccgccgcgggcacctcggcggccttggcgcagccaccatcccgccccaggcgtgtgcccggcggcccggtggcaggcgactgggagcggagcccggcggggccgcgtgctggcgccgagagggagggggaggcgcttgcagccgtcgctcgaccgcttggacagcgcctgcccaggcgtccttcctgggccttcggccctggcgctctctggccagaaccccgtccagcttcaggacgtctggggacgcggcgctgcggagaaagcagaccaagcaataggccccatctctttaaggatctggtccggagagaggctggggcatgtctcaggtcttgtctacataggcagaacgaagtggagggcaatcatccatttgattttccagtagaaataatccgagatctgggtgcaggaatgattgtggtgaattatccggataattggttctaattgaactcccctttgtggaggtggatctttctaaagggccaaggggatgacccagggagctgctcttggtatgtgggctggctgagtgtttctggaacaatagtgatgatggtgggcagtaatgacgggcggctcccgaagtgaatcacctctcttctctacctcagtttcatctttgcagaataggtaggcttcagaggtataggaccaaatcgtgccaacagaggtcaattctgtaacctttcccagccacacagccccttctccccatggtaacctgtggcttgatggcctcacaggactggctgaaccccgtgggattcacacctcaggcctttctccacatccctgaccaaggaaagggcctaagaggtctctggaagtataggaggtgagcacccaaaagcagagtcacaacacagcctgggcaccctgcacctcccagccagagtaagcctcagaccacttgcagaaataggaattattcaggcactccttacccacctcccacat

SEQ ID NO: 23323 - DNA, 1052 bp, Artificial sequence
  DNA replication origin
tcttgttggccgcgccgttggggacgtgctcccgaagggtggcaaagcccaggttgaccaacttgacgcggttgcgctcgcgctcgttgcggcgcgccacggcggccggctgctgctgcggcaggctgtagccaaagccgctgaagttgagccggcgtttgcagcgcatcagttcgggcgaagacgagcgctgtcgcttgacttgcttgggcgctgacttgtgaccgccccctgagggctggccgtcggccgccggtctcagctgcggcgcctgctgctgctgctgctgctgctgctgctgctgctgcgcgctctgcgctgccgctgcggcggctgcggccgccgcggctgcggccgtggcaaagaaacaggctgcgggcggcaggaagggctgctggggctgcggctggggctgctggccggcgccgccgctctccatcttggcagagctttccatgcgcagcggcggccaaggagtcgcggaatcagagcgatccgggacgcgaggtgcggggcccgcgagggggacacagagagaacttgggtgcaggaacagagagggaaagaaaaggaaatatgaagcgggagccctgacggaagttaaaaaatatatacaaaatccccgggagacttcttagagtgggagcaaaaaaagtgaaaatgctttttctcctccctgcacgccgcctcctcctccctcccctcctcccttcgcgggttggcttcgggagcctcgcgtggcgctcgcgtgtgaggctgccgctggcgccttcttgtttctaagaaaaaaaaaagcagaagcagcagcaaaagtcagtgctgaacgcgctctgccgcgtctcgcgttcctctcctactaaggctgcgctctcttgcgccgggtctcggtctctccagccgtggctcaggctgtttttattattttgttaactcccttcctttctgatttccttctttcactcgccctccctggccggatccctgtcggtgcgccttccacgttccctggccagaagtgagagagtgctgggctgccggagtgcgtccgcctt

SEQ ID NO: 23324 - DNA, 1386 bp, Artificial sequence
  DNA replication origin
ccgcccgcagcctgtttctttgccacggccgcagccgcggcggccgcagccgccgcagcggcagcgcagagcgcgcagcagcagcagcagcagcagcagcagcagcagcaggcgccgcagctgagaccggcggccgacggccagccctcagggggcggtcacaagtcagcgcccaagcaagtcaagcgacagcgctcgtcttcgcccgaactgatgcgctgcaaacgccggctcaacttcagcggctttggctacagcctgccgcagcagcagccggccgccgtggcgcgccgcaacgagcgcgagcgcaaccgcgtcaagttggtcaacctgggctttgccacccttcgggagcacgtccccaacggcgcggccaacaagaagatgagtaaggtggagacactgcgctcggcggtcgagtacatccgcgcgctgcagcagctgctggacgagcatgacgcggtgagcgccgccttccaggcaggcgtcctgtcgcccaccatctcccccaactactccaacgacttgaactccatggccggctcgccggtctcatcctactcgtcggacgagggctcttacgacccgctcagccccgaggagcaggagcttctcgacttcaccaactggttctgaggggctcggcctggtcaggccctggtgcgaatggactttggaagcaggtaggttgcattttggggtgggcaggggggtattcttgccttcgtcctccctctgagtgtctgtggaagtggggatgtctccaaggagataaggggatttttatttaaagaatttgtgaaagttggtcgatttcaagtcctagtttgttagtttcagcactggcctctgaaaatggccttgcccaggtctccaaggagtgaagggtagtagtgaggtgcagagatactggtgaaccgaatactgggacatgttaaaagagatgtctacctgacagactctttccccagacctccatctccctctaccactagcctacacgttcaaattaacctctcctgttcttttccttatgttatagggtgatcgcacaacctgcatctttagtgctttcttgtcagtggcgttgggagggggagaaaaggaaaagaaaaaaaaaagaagaagaagaagaaaagagaagaagaaaaaaacgaaaacagtcaaccaaccccatcgccaactaagcgaggcatgcctgagagacatggctttcagaaaacgggaagcgctcagaacagtatctttgcactccaatcattcacggagatatgaagagcaactgggacctgagtcaatgcgcaaaatgcagcttgtgtgcaaaagcagtgggctcctggcagaagggagcagcacacgcgttatagtaactcccatcacctctaa

SEQ ID NO: 23325 - DNA, 906 bp, Artificial sequence
  DNA replication origin
ctgtaaaaccagaacctgttcttcttccacttttaatttttgaggtgcataggattttttttcactttgacaatctgcttctcatattactttagctttctgtagtgagaaaaagcacaggattaggggtcaggtgcctcaggctccagaaccccatctgttagtaaatagctaacctgatccagaccattcccggatctgggcctccagaccctcatctggggaccatcattaggattccttctgtgatttgattattttcctccctgccagagccggggaggaggctaaacccttgcatgcaagtccaccaaagctgtcctaaaataataaagcaatttcctttgaaatggtcagaagaaaagtcaggaggcccttgcaaaatgtgatgaaacccagccccagctgaatattaagttagcgaggggtctgcaatgagggtggggggctggggagagaagagagatgcagggttggggagagagaaattttaattgcaattgtttggcctgctgatcctaggcaaatgacaagaagcccccaagcagcctcaaacacagatatttgaaaggcagagacggctgggggatggtttggtttctccctcccctctgaggctgtttgaggaacggtctacagtgctgacaagcacgggttttggaggccattgaaaagttttgggcctaaatagggtaggcagcttggcttaagtgttgctaaggaatacctggcaaccagcaacaataggccttttagagaatccagggcaaacagtgaccgtggtaatggggtgggcttaagggtctccttgcccggctgggcccctcctcttctcacacagaggcctgggcactgggctatgttccggaaattccctgcacaaagccccattcagtgggaggaggg

SEQ ID NO: 23326 - DNA, 896 bp, Artificial sequence
  DNA replication origin
ctgaggctgtttgaggaacggtctacagtgctgacaagcacgggttttggaggccattgaaaagttttgggcctaaatagggtaggcagcttggcttaagtgttgctaaggaatacctggcaaccagcaacaataggccttttagagaatccagggcaaacagtgaccgtggtaatggggtgggcttaagggtctccttgcccggctgggcccctcctcttctcacacagaggcctgggcactgggctatgttccggaaattccctgcacaaagccccattcagtgggaggagggccaatgcgtgtgctttgggggcagtgggggtggagacaggggatagggagagggcgggggagggggtaccggagaaggagctttactgccaaaaaaaaaaaaaaaaacctctcaagtctctttcttctcgcaaagactaaaagaggcacagaaagtgctaagtttgtaaaagagtctgaaaaggttcagaaaagtagcataaaaggaactggggaacgccccgtgaattttgaacagagagcagaaaagggaccctaaaaagcaattagtgatgctgcttgtaaatgaagaggcacctagtttggggtggggagctgagtctggaggtaggtgtgcaggggtgcagcaggtggtgggggttgaggggcaggtgaggagaatgaagtggggcgggaagcgggtgaggggaaggggaggccagtgaagaatggatggatggaaactggggaactgtggcctcagtccccactctaaccacatgccttcaggctgctctctccttgggctgtgcagatgccccacccactcagtttctgtcccctggtaaggcagccccccgaaagtcatgggtgcctgggacagtgaccagcacccagagtct

SEQ ID NO: 23327 - DNA, 1212 bp, Artificial sequence
  DNA replication origin
cctccctttgtcttctgcaatgcctctttgtaactcacaggtgtttgtgggcataaagcccatcagaagggagtttattgtgaagagttctttctttgccacttgttctaaacctgttcagagagtgctccatgccttagaccaaatctccataaaaatcaagaaacaagaagttttctgtacgcctgtacaacagccacactatgacattagtttcgacagctctgtgaccctgtattgtcccaactttattcactagtctctttttctctttctctctccattcctttttttaagcctttattggcatttttttatctactgtaaaataaaaaggaggaggatgggtgggggttttttaagcactctatgtggcagataaaaaaaaaaccactatctgcagttactgtagtaatggtttcaaaaaacacctgcaaatcaaagaaagacaccacggcagtgtcttcagacttttttttcctcttcttctcttaaagttccttcttggccattttaagtaggcccggcaatgaatttatgtgacagctatgaagttagtattaaaattgtgaatagtgcctagcagttttcatgcccttagtataagatcgcctcaatttgccacacagcggtgaatagggtaaagaagggagggggtgtcgaatgaatgggaggaggaggttacgtgaatgggagggtttcccgggagggggcagcacagttgtcacagggagaagagtgatttatttttgaaattccagaaaggaagaccaaaagaagctgcctaaaagatcctgaagtgcggggttggggggatgtgagataaataatatgtctacacacatttaacaagtgtcaaggccagctctagaagtagggacagggtgggggcggcggtggtaaatccattcctctggtcttccaagattcaatattaaatgccagcagggagcagatgtgggcaggggctgcagaacaggggtaaggagcgctgaaggaggggttaagcgtttatctcaatggaaattaaccacttggggggaattaaaagagagctggagcgggcggggaaggttagggggagaagcgggacagggagagtgtctctacatgtaaagagaggaactttcctggtgcggagatctggggagggcattcagtaaaatgaggtgagcagggctgcaaagagcaaggcggggcgtgccctccacc

SEQ ID NO: 23328 - DNA, 1023 bp, Artificial sequence
  DNA replication origin
cgggggattaaggagcgtgtgcgtctcggtccgggccgaggcggcgaggtgggggttggggcgggggaggagagctccttggccccccacccccctgccccgagacgggtcgacccgctcgggggccggcgaccaccgcgacgggttccgccgcttgcctccgctccttggcctttgctgccgtgctgcctcttctcacgggcgcggctggagtcccggggagcagcagagagcaaacggtccggctctacctcaccctgccagggggcgagtcccgcgctccctgcgtctacctggagctgcagggtccctatcccggggcgccgcccgcagcctcctccgcgggagctggagcactctgctgggtcctggggacgcggcgcagcgtggttccaagcgctccgcagtcgccgggcaaccacaatggggctgccttgccgtgagaccctcccccgcgactgccaccaaagtcacagaaaactttcacacctctcatctgacactgtggcctgtgcacgactccaagcactggggaagccttcgacatcagaatatgaatggcacctgttcttccgggggcggcaagggggatcccgatgtttatcaaaatgggttgattttccacggagggggtacttctggaggtagtaatccccagaaatcctgaaattcccccttccacctactcatctgcctcgaattgtaaaccattttgaatagaggagtagtgcatccaggaataatgcagccaacagcagggggcagagcaaggctgtagatggggacagtggccatttggggatacttttaatccaaagtcatgctagttggtttagaaacttctgaggaattttactctctgctcttcctcatctctatcccacctccgactggtcaaggacatttagctgtgccaacaaaggtcgttctcatctgcctgaggagtccacacacttcaacaaaggactggttaacaccccctaattcctgcccataagctgtccataggctgcacagaaccaa

SEQ ID NO: 23329 - DNA, 1340 bp, Artificial sequence
  DNA replication origin
gcgctacctgtgggagcgctaccgggaggcgaagagaagcacagaaggtgagtgaggcggcgaccccgccccggcgcctggggcccctcctgcgcgctcagctgggaagcgggcgccctaggacccggaccagcccagctgcggacctccagggcctccagtcgcgaaccccggtgcccacacccccagccgcaggcagcatcgctcctgcggagcgactcggggaaacggggaaaaatgcgctctagaaacttcacaactcgcgcctttccccggtcgggaaagctgttgtatatattcttgggatttttagcccgaaatctgcatctgaggggctttgggccgcgcggggctggggttcctcaggcctcccttgggagccggccactcccacgcaccgttaggtgttgttactcatcaatagtaataatagtaacagccgagtcgggctggcgcagagatgcccaagagcggggctgctggggaggtggccgatcccgaggctggtctgttttccttttggtgggggtgggttgggatgggatgggatgggatgggatggaatgggatggaatgagatgagatgagatgagatgagatgagatgagatgagatgagctgtgcggtgtttgaaagaggagaggtccaggtggggaaggttctgggttatccattaacctcggtgaggaggggattctaaggctgtgaatgggaacttcatggccaggtgcacataaaatgagcttggctcggttgttactactaatgaactaataaataccagtgccgggcacgtagattatctctaaatcgttcctgtaatctacgaaggaggttccacatccccattctatagatgggaaaggcgagactcaggtttaaatgacctggccaaggtgacgcctgaatttagggactgtctcagctcctaacccactgtcctgtttcctgtgctccgttgaccatttgggaaccaataatccattgtcgctgttgcttccaaggaggattcagaaccgaaatttgtatattggttacttcttgttgtggaggtggcacatagatagggagagattatttggtgagcaagaacgttttataggatcacattttccattttttttggccagaagtcagtttaatgaaaaaagcaaattggagtgattttcagaggggacgtaaaatgactagcaatgcagaattctatgaaatggtggcttactttcttagtttccctttgccaagagttaattttgctttggcttttgaagctgttgtgtggtatggtggaaagaagactggctttggagacattgggaattttgcaggtcttaagagat

SEQ ID NO: 23330 - DNA, 1642 bp, Artificial sequence
  DNA replication origin
cgccggggcggggtcgccgcctcactcaccttctgtgcttctcttcgcctcccggtagcgctcccacaggtagcgcttcatgtccggggcggtcccgggtgcagtgcacaagggccgggcggggcccgcacacggccgcccccgagccgcggtcccgcagccaccccgcaaagccgccgctgtcgctgccctcgccccggccccgcgtgccaccaccgccgccgctgccatggtcatgcctgctgcctgctgccgccaccgccgccgcgccgctctgcgactgctgctgcccggcccaagatctacccgcgctctgccctgcaggagggcagctcctgcgtcggaacacgtggcggcgcaggcctgccctcccgccgctgcggggcggggagtgggcggagccggaggcggggtctaacgggggcggggtcgatggggagtgggcgggtctgggacgggggcggagacggggcggggcggggccgggccgggggccccacgcccagcctgctgcggtcaatttcagggtggcgcgggggtggccgtgtggtgtggtggcgcgcaggccacatgggatggaatgatgaggtacgaccccagcgccgcccgcccagctccgccgcaccttcgtcctgccttctgggactgacccccagctctggccacaaggacagcgcccctcccaccccagctgctctggccccggccctagaaggtgacctctctccgcattaatggcctctggcagtctaattaatggcagtctggacctcccctggatcgtggggcccctctgagacgtccccgatccccagcttaaatttatccaggaggacctgtgagtgggtggctgggccgaggttccactcatgggctgatgtcggctggaggatcccagccccttaagacctcagtaagtttgaagggccctcccattacacagcctggaaggccaatgcccgccccccgcctaggtttccgcctggcggcagaggtcattggaacatggtcacccagctcctgcccctgcccacgctaacggctcggtgcacaggtcttctctcaaacctgctaggctccacccgtcctgtgcctgtggttccactaaagccaaatgaaccgcaacctccctgcctgggggcaattctgtgtggactgagtcagacagagcttctgcaggaaagactgatgtggcccagccagaaccctgctgaaaatcgccgggcagcaaggacttcccaagctgtcctgtggttacttaattttgagcaggtggagtagggggaatggccctcaaggctggcactctgccaaggagaccatactggcttgtgtgaaatgggtggaacacagtttaagacaaataacccaaggcattagtgtatgctccagttgtgggatggaggggtctggaggtgtttcatggaaaaaggtggcatctgggtttaaactaccatttattgaaggcttgctgtatgcagtatctcatgtaatcctctcagtaatcctgaaaagcagactccataatttctccaattttataatatagtcaatccctctatacctgccgagaatcggttccagaacacctgccccatacctacataccaaaatctgcgatgctcaagtcctttatataaaa

SEQ ID NO: 23331 - DNA, 1088 bp, Artificial sequence
  DNA replication origin
gggaagaagaaagggacagagggagggaaggaaggaaggagggagggaaggaaggagggagggagggaaggagggagggagggaaggagggagggagggaaggagggagggaaggaaggagggagggagaagaaaggaaggaaggaggggaggaaggaaagaaggaaggagggagggagggaaggagggagggagggaaggagggagggagggaaggagggagggagggaaggagggagggaaggaaggagggagggagaagaaaggaaggaaggaggggaagaaggaaagaaggaaggagggagggagaagaaaggaaggaaggaggggagggagggaaggagggagggagggagggaaggagggagggagggagaagaaaggaaggaaggaggggaggaaggaaagaaggaaggaaggagggagggagggaaggaagggaggaaggaaggaagaaaggagggaaggaaggaaagaaggaaggagggaagaaacgaggggaggaaagaaagaaggaaggaaggaggaagggaaggaagggaggaaggaaggaagaaaggagggaaggaaggaaggcaggcaagcaggaaggaagggaggaaggaaggaaggaggaaggaaggaaggaggaaggaaggaaggcaagcaggaaggaaggagacaggcaggaggaaggaagcctagctctgtgagggaagtggtgggtagatgtgggaggcaatacagggtttagatcagagcaaaggaacaacagccacatgagcagaagagagagccacccatttctaactgccctgacatgtcctgaatgaatggtaagtctgactctcttaccgtagtttctgtactgtaattctgtgatgaagtaatggatcacagacatgatgtagctgctttcacaggtgctgcccacaaaatgaggaatcaacaacatgctcggatgtttctttttgaagtaattaacccagttggcaatcagagtggacttcccacaaccgtgttctctagacaagagcaaaatagacttgtaagttggagtaggatttattctgaaaaataaaagggtaataaaatgtaaagaatattta

SEQ ID NO: 23332 - DNA, 1021 bp, Artificial sequence
  DNA replication origin
tgtgctccaaaccactattcacacctatagcataacagcacattcttgtaattatttgtgccatactttctcatctccacctccccaagactctaattcctgaaaagaacctttaattctagttcctaatgaatgcttattaaaattaatttaaatttctccttcctttgaatgcctatagtcactcatccttcattcaacaaatacttattgagtgtctgctacattccaagcagttgagatacaagactgaaccagacagacatagtctggagcttacattctactgaagcaaactgacaaagaacaaataaatagacaaagaactgcagacaagtgctctatggaaacaaaagatgagacggaatcgcagaggaggaattctttgggagctaacccaaggaccctcattgctggaggagagacttgtgctaagacttgaagttttgaagaaggaaaccaagccaagttgttgggggggtggtggggggaggaggacatgccaaggataatgaaaagaatggcctcgaaatggggacaggtttgatgagttggagaaacagcaaggaagcaggcgtgaatgttaacaggggaaagaactggtaaaatggtggcagataggccacaggtaggcagcggccagactgtgtaagacctcacaggccatgcattgccctagatgcaatgggatgccatccaaaggttttgggcccagggcaaatgtgatcctaatttcgttcaagatcacttttgctgccacgaggagaatggagtggtccaggagcatctgcattgctataaaggaatgcctaaggctgggtaatttacaaagaaatgaggtatatttagctcaaaaataaaatagtagccctcccgcactcaccaggtccggtcggtagtacctgtgcaccacttctgcccctgcgcacatggccaggagactggctgcgaacattttcaggtaggtggacatgggcacgcccgcgggcatggtcggcaggctggacggggaaggaagggg

SEQ ID NO: 23333 - DNA, 1120 bp, Artificial sequence
  DNA replication origin
tgcattgtgggcagaggggcgggggttgggaagatggcggctcccagcctcctcaactggaggcgagtttcttccttcacggggccggtcccccgcgcccggcacggacaccgagcggtggccatccgggagctgatgatcatctttggagggggaaatgagggcatcgcggatgagctgcacgtctacaacacgggtaggcgcggcggcggctcgtcggccccgcctgctggagctgcggagggggaggggaggcgaggcggcggccgcggccctgacagctgtcaccgcccggtcactgcttccttgggcgggcggcggggagcgcggctcagccgggcagcccgggtccggcagctctgtcccggaccgcagctcaggatctccggggcccttggggcgcaacggaccccgagcggggcgcaccggccttcaggcgggggatcccggacgcccccaccccagcccgacaggcggacgcaggcgacagaagaccatgtccaaccgcctgggccactccccgaaatctcgcctctgtcaaaaaacaaaacccactccaaaccaaagttccttagggcctttcccgtctttgcctgccttccttccttaggaggaagaccatctagggggtgaggagggaaaacgagaggccttctggcactctcgcctcaaatacaacccggtgtttggcaggtaacggtcaagagcccctccgtgagccgcgctctaaagcggcggggacgtggtgaggcggccttgtgtctgcatactcggtgtggacgcccttctggactggccctcggaaagaggactgtcataacttgagcaccactgcagatcacaagtgcccctgggcagggagcccctatctttgaggacctctgtggaatagaaaggaaactggatttaatttttttttccccttgtaaatgctcaggctgtcacaagaaatctgtttggtgtaaagacagtgatggaattttgggtctacttcatgaccgataacttttctttgatcaaacaacttaatcacaggaataatttgaaggttaacaaaatagtggagtctgagaagttttatttttttcaccctctcctcctcccagcgccccagcatatg

SEQ ID NO: 23334 - DNA, 1284 bp, Artificial sequence
  DNA replication origin
cgccctcccgcgcgggccgaggccgggccccgcgcctgcgaggccgctcccgcagcgggccgggccggggagcgggcgcggggccgcggcgcggctctttgtgcgccgggctgaggagcggcgggacgcgggccaggccacctcaccctcgccgccgttgagctccgggcccggggccgaggaggggccgcggggctgcgtcggggccccgctctcgacggcgtcccgggccggctccattttgtgcggggagccggccgaggggcgggagacgcggcccgggccctggccccgtagccccggcggcggcgcgagtccccgggggcgccctcctcccgcccgcggggctgtggcggggcccggcgctttgtctgcccgcacatcccgggggccgcgcggcgggtgggaggcaggcgttgggcgcggggccggggcggccgggcgagtcaggggatgcgctctgggggcggcctcctggcactcgcagggctgacaggtcgccgggaccaggccgtggggccggggccacccaggcacctgcgtggggaggaaggcatggctttagcttccccgcagcctggtttgcgcgtaaagaatgcagccatctggcggtttgcggtccctgtacttgccccgaaggtgggaaggaagcccttcggattggactaaggttttaatcattagtggtgggaggcgggaggatatgcagggccttaaagaacggtagtcttagagaacaaagaattacagagcacccacaaatcgtaatctcgcccaaagcactctaacaggataatttaaacaaggttaggtagcctgcgacctttaaaaaaatggcatcccactaacccgcatggaccccatagttgcgtggttcgtgctacaaatcactggggtggtttcatctctcttagtatggaaactaatcagcaacataaagtgatgaaagcaaacggatcaatatcagtggcactaatcagtggggggtttatttgtaaagtattgaaagtttaaccaaaattccttaaaaggcaaattattccttccctgcattgctcttgtatcttaatttaaggattactgtatattgatgcaaaactctggttgttgatgccaaagaatggagggtggaggaagggactactgcttttcttggatacaaatttgcatttcttaaaacattaaacagatgtatgcattcccttgagcttttacatatatcaacctgcccttaagaaaatatacaccatatgaggtgacagtgtttttctttaatgtactgag

SEQ ID NO: 23335 - DNA, 755 bp, Artificial sequence
  DNA replication origin
caagctcagggaccaaatgacagggagcgctgtgcatgcggcgacgctaacagggacccaaggaaagaaaacacgaggcgctgaaggcgctccaggaggcccccgccgttcagaccctcccggtggctcgggcgcgtcgtcctagggggcggcttctgtccttggtttccccttcttaaaaatccaggcgcaggcaggctgagctcaggcggctgaggcacctccacgtggcgggggaaggggtgacaaagagagggacgcccgagagatcccgcttcgcacaggcccgggtcagcaccgggaaggaggcccgcctagacccgaacggcgcgcccgggcagggccctggaagacctcgcgcctagaggagcggcatccggagcggcgcggaggcctcacaggaacgcgggactgggccgggggcggggcggggccgggggcggggcggggcggggcggggccgcggcgggcgggcgcgcgggcggcgcggagggagggtgtcgcgccgagggaagcggcccgcggcggagggaggggaggccgagtcctggaagcggagctccgcgctgggactggttccttcgcagccattttctgtccaaccaaacagccgattggagacgggagccaaccagggctgcattggaggtttgtgtctcgcttcggccaatgatcgctcctaaaccgactccactttagctcgaatgaaatgtccgtctcctcccggcgccgtccccgccgccaacgccgccgcg

SEQ ID NO: 23336 - DNA, 1470 bp, Artificial sequence
  DNA replication origin
cggcccggcccgctgcgggagcggcctcgcaggcgcggggcccggcctcggcccgcgcgggagggcgggaggctagtgcccccggccgcggcggcgttggcggcggggacggcgccgggaggagacggacatttcattcgagctaaagtggagtcggtttaggagcgatcattggccgaagcgagacacaaacctccaatgcagccctggttggctcccgtctccaatcggctgtttggttggacagaaaatggctgcgaaggaaccagtcccagcgcggagctccgcttccaggactcggcctcccctccctccgccgcgggccgcttccctcggcgcgacaccctccctccgcgccgcccgcgcgcccgcccgccgcggccccgccccgccccgccccgcccccggccccgccccgcccccggcccagtcccgcgttcctgtgaggcctccgcgccgctccggatgccgctcctctaggcgcgaggtcttccagggccctgcccgggcgcgccgttcgggtctaggcgggcctccttcccggtgctgacccgggcctgtgcgaagcgggatctctcgggcgtccctctctttgtcaccccttcccccgccacgtggaggtgcctcagccgcctgagctcagcctgcctgcgcctggatttttaagaaggggaaaccaaggacagaagccgccccctaggacgacgcgcccgagccaccgggagggtctgaacggcgggggcctcctggagcgccttcagcgcctcgtgttttctttccttgggtccctgttagcgtcgccgcatgcacagcgctccctgtcatttggtccctgagcttgggtgtttttcacatttcatctaaagatgcagacccctgctaagtctagccagccttcaccctgaatcttgaacttaagatgctgcattttccacccacccccacccctctagtagctgcagattgacaagcggcttttcccaaccagatgacattttggctgcaagaatccgtggcccgttcttgcctctgtgcagccaagctccttcgctgtctttctcaaactgcagtcctgagttcagcttcgcttagcagtgaccatcccagaggtgggtaatccaacactggatccactcactgcaaccggagctggggatggcatgccctctgcttccactaaccgagtggcctgcaccacattaaactctccagctttgattatgtaaaaatacagagatcttttatttatagagttcctactgtttctcagagtatttaaacatttctgcggcaagtatggaagaaaagacaaatgaaagccccaaattgtgacaagaggagtaagtagcaatgccactgtcatcagacaacctgacttgaattccaactccccttcttacaggcttgtgatcttggccaaatgtctgcttctcagggttgtttgggataatgtatacatagaaagccctt

SEQ ID NO: 23337 - DNA, 914 bp, Artificial sequence
  DNA replication origin
aggtgggggggggtcagcccccccgcccggccagccgccccgtccgggaggtgaggggcgcctctgcccggccgcccctactgggaagtgaggagcccctctgcccggccagccgccccgtccgggagggaggtgggggtgtcagccccccgcccggccagccgccccgtccgggagggaggtgggggggtcagcccccctgcccggccagccgccccgtctgggagggaggtgggggtgtcagccccccgcccggccagccgccccgtccgggagggaggtgggggtgtcagccccccgcccggccagccgccccgtccgggaggtgaggggcgcctctgcccggccgcccctactgggaagtgaggagcccctctgcccggccagccgccccgtccgggagggaggtggggggtcagccccccgcccggccagccgccccggccgcccctactgggaagtgaggagcccctctgcccggccaccaccccttctgggaggtgtgcccaacagctcattgagaacgggccaggatgacaatggcggctttgtggaatagaaaggcgggaaaggtggggaaaagattgagaaatcggatggttgccgtgtctgtgtagaaagaagtagacatgggagacttttcattttgttctgcactaagaaaaattcctctgccttgggatcctgttgatctgtgaccttacccccaaccctgtgctctctgaaacatgtgctgtgtccactcagggttaaatggattaagggcagtgcaagatgtgctttgttaaacagatgcttgaaggcagcatgctcgttaagagtcatcaccactccctaatctcaagtaatcagggacacaaacaccgcggaaggccgcagggtcctctgcctaggaaaaccagagacctttgttc

SEQ ID NO: 23338 - DNA, 1239 bp, Artificial sequence
  DNA replication origin
gagtcgcttcgcggccgctctcggagcccccagcccgggcaggggtgtggaaggtgccggagttggtctggaagtgctgagatgcgtggacccgctggctgcgcgctcctgctcctcctcctcgccgctccgccgcctcctccgatcccgccggcggccgccgctgcctggtcgcgggccgggcggctggggtgcgagcggtgatggtggtgccgccgccgctgccgctgcgctggccgctgtggctgtccgacgggccctctcccttctctccaaaggctacttcattgcgctccaacgatctatatattccggggctgggttttaccaaatgcaactcgcggcccccggcgaggggagggcgcctgcggagagccgggaggagggagggaccctagcgccggggcggagcgtcgcgctccccccgcccctacccgggatatggtcgcgtccagctgttgcccggggagtgcggtgtgcgcgccgcgctcccgcagggtcccaaaagccctcagtccccggccgggctcggccgccgtctggaggttgtgtcagcgtttccatgacaaaacccggaggaaaaaaagacgaagaaaatcgcctcggtgctgccacccacccccgccagcgtttggagagggaagtggcaagcagcgggctgggtctcggagggaagaattaagggttagggggtttctggtggctggcaattatttaaaatccctgggcgacgtagcggggaagttgccccaaacccccagggagcgagtgcccattttccgacgctcagaactgggcggtttcgtttttctttcaaaggacagcccagcttgggagtcggggttaaagagggctgacttaaagtcagggttaaggaaactgcacgaccctcgggtcaggcgacagctgagctttcccggggacttatacagacagaatctctgacacccaccatcaccaccattcctcaaggcaaaagggatctgtgggttgcaaaactctgctaccccaaagggtagagcatcctccaaattattcaaaattaacagcagtcttagctgggagggggtgagaaaatgcccctaggaagccacctcaaccaagtccagaaaactgctggaaaagccaagccagccatagcactggcaggtacatggaaagatggtgctgctttcttgtattgtgtagaatgacttccagtttccaattccatgcatttaggctgtttcacaatcaata

SEQ ID NO: 23339 - DNA, 1133 bp, Artificial sequence
  DNA replication origin
cgccccggcgctagggtccctccctcctcccggctctccgcaggcgccctcccctcgccgggggccgcgagttgcatttggtaaaacccagccccggaatatatagatcgttggagcgcaatgaagtagcctttggagagaagggagagggcccgtcggacagccacagcggccagcgcagcggcagcggcggcggcaccaccatcaccgctcgcaccccagccgcccggcccgcgaccaggcagcggcggccgccggcgggatcggaggaggcggcggagcggcgaggaggaggagcaggagcgcgcagccagcgggtccacgcatctcagcacttccagaccaactccggcaccttccacacccctgcccgggctgggggctccgagagcggccgcgaagcgactccgatcctccctctgagccttgctcagctctgccccgcgcctcccgggctccggtccgcgcggcggggtccctgctcctgcgccccgggcgcgcttcccggacaccccggtccccgcagccaggacaaagccatgaagccagcgctgctggaagtgatgaggatgaacagaatctgccggatggtgctggccacttgcttgggatcctttatcctggtcatcttctatttccaaagtatgttgcacccaggtagggggcgcgttagcgtggttttgttggatattttcttctctctcgcgctctagctcgctccgcctgatttctgcctcttccaaccctacctctccgccttcggcctcttcggggctcctggctgcccagagctcctggctgcccagatctacccgggtcaccgcgtcgggatggggaggagaagggaaggtgtgcttcgccctcttcttcctaccggctccgggctggaggatgggaccaggaggggcggtagtttttttttttttttttttcttcttctttttttctttgtgtcccttgtctgtctgtctgcgaggtagcagggaaacggagaggtgtgggaagcaaccgggggtgaggggctggtttgaggagaacgaaactccctccctgctgctgccgaggtcggaggatgaaagagttacccggagccggctgctctgcgcccgggcgagccgcctcttcctggttgc

SEQ ID NO: 23340 - DNA, 1773 bp, Artificial sequence
  DNA replication origin
gggctggaggatgggaccaggaggggcggtagtttttttttttttttttttcttcttctttttttctttgtgtcccttgtctgtctgtctgcgaggtagcagggaaacggagaggtgtgggaagcaaccgggggtgaggggctggtttgaggagaacgaaactccctccctgctgctgccgaggtcggaggatgaaagagttacccggagccggctgctctgcgcccgggcgagccgcctcttcctggttgccgggccgggggcgaagggtgtacgccccggcgaggttgcgagtccctgcagcaggctgggagcccgggactgggctcccacgtgtcccgggctccgcgcagagctgagcaggtgtggagagtggtcgggtgcccagcgttgcccctccaccacgcgccggccgtttgcccccggggtccggctccgcagtgaccttgcggctggtgccccggggcctgctccagcccccagccctgagctggaaactccgagctcctgggtcacgccttgaccactgcagttttggaggaaactttggccaggtcctgggctgaccgtccgtttgcatcccccacttctgggatccgagcaacgggaatcccccgggcggcgtgggaatgaaccccattcctccggtcccttgtggctcaggcaaagttccacgtccgaaatctggactgggggagggacgaggctcgtcgcttcctaggggtgcgagggaaagtttgggttctggagagggaggggcgccctcgagcgcggcggccgggggtgagcagctcggctgcgaagcccaacaggtagaacgttccgagaagccttccgggtaacgcgggtctccccgccaagccgtggctcccctgctcccttttaccctcccttagcagccccctgccgggccacgttggctcagaaatccattttctacgcctccgagttgcctttctcagcgtagtcacagcaataatttgcttttctaattgcaaggaggagggaggtggaaacgcatttccttccagggaagtggggttggtgtttttcatttttgcctcccgccttctcctttcactgtgtatctaacactttaaacagacgcagtcccgaattcatcaagcctgcgtttgggtcgatggcagaggaataaagctgttctttccatcaaacaggcagggctgcaggctgcagattccttgacagcgcagggacagacggcccctttgccccactcggtctggagcagttgttaaggcagccacactgccaaggatatggtccgactctaccacatgtaacctcaggacgtccgagccagccctgttaaagatggcttttgtttgcagctgggtatttttagtttaatgtcagcaaactacagcggtgtttgtctcctcacccaaacctgcggttgtgaaacttataaaggaatttaaaaatggacctggcttgcattccggcaggcaggccttggttgcagtgggcagggccagacagccaggggtatctcagagtgccaagctccagggcccaccggagaccgggccagactcaccccagagcgccaggggactggtggtgtacagatacactcgggttcaaacagtttaaacaaggggccggtgatttggtctagactctagagctgtgttcaggtttcgctgggaccgtgaatgccagtaatgctctgtacgaatgcccagaacacggatgagtgtcagccttcagcaggaatgcgcttgagcttctgtgtacctgttaattgcc

SEQ ID NO: 23341 - DNA, 1462 bp, Artificial sequence
  DNA replication origin
gctccccgcgcccccgccgccgggtcccgagcccaggcctctcggccccacctccctcccgcacctgatgcgcccgaacgcggcgccgcggccgaagccgagacttcccctccatggtcacctgttccggagcgcggcggcggcagcggccggtgtgagaagggtccccgtctcctcagaccagaccgagacaccaggggcgggggatggaaggggcattcacctggtgcccggcaccggtggtggcggggaggacagcggctcccagcccacagctccttcctgctcccgcgcctcctcgcgcggctgcggccccaagctgacagcccggccgtcggcgcccgcggccccctgactccccgccgccccgcccccgcgcggcagccccgcgcaagcgcagccgcgccgccgccggggaagcccgggccttggtgatgtggcccgcggggcggcgacccggagcgacagcaccgccccgcccggaccccggccgcgccctggcagacagctgtcgggaacgggggcgctggatgacggcaagggggcagttttctggggagcctgcccaggagagaagggctgtggcctccttcggcatccctcttccccaccagcccacgcacgcccacttcaccgcctgctccaaggtccgaacccccgaatccatgactcatgatttctcttctcagaccagcggcctctttttggctgaggtcatgtttcttgcagactggagttaaaaccgaaccacgtgtctttcggcccagcagcgcatagtgtgggcggtgcaggagccgagacgggcaggaaccaccgcaggagggggtgaggtttagggcagccccatagcaccctccccgtgccaggcaggtgtaggcgccaagcgcatggggcgctgaagagttggctggggtgccaggcttttcaagtttccccacacttgcttttaaacctagatcaaactgatccaaagtctgcatgtaaatccgagagctcatttattttatttacaaaactattgagcatctactgtgtatgattcagggaatgagacacaccccagggatactccagtgaacaaaagaaaggtgttggtccgaagacagttattttaaaaattacacagctaatgccataatgccaggattggtggctcatgcgtgtaacctcaacacttcgggaggaccaggcgagaggatcgcttgaggccaggaatttgagaccagcctgggcaaacacagcgagacctggagtggctaggagactgaggtgggaggatcgcctgagcccaggagttcaaggctgcagcgggctatgatcgcatcactgcactccagtctgggccacaaaatgagaccttgtctctaaaacaacaactcaaaattacacagctaatgatactcttttcctcaaatcaaagcttctaccaattccaagccacaccagtgatttagtagcagct

SEQ ID NO: 23342 - DNA, 811 bp, Artificial sequence
  DNA replication origin
tgatatcaggcccctggctttgttctctggccactggaggttaggtacctgctgtgctagaggggccaagatatttctggaccactggtcagaacacttcaatgggtggtgccagccaaagtgctttgtatggcagtggcagtgggatctgtcctcatatgcacatgccagcaatagcagtggggtgcggtgcacactcatcagcttcagaggggtgctggcagttgcaagggtgctgtttttgtgcaggcatttgtagtggctgtggtgttagcatgggggtggggcgctgtggctgctgctagattttgtgtgccctctgtgcgtgtgcttacatgggtagcagtggccactcagggtaagggggcgggctgctggtctccatgcatagtttcacaccactggcagtgttgacacaggggcagggtactggtggctgcgggactggtgccaaatgtgcgcacgtttatgctggctgcagtggctgcacagggcgcagggcaggtccactggtcactgtgcctagttttgcagctggtggcagtgttggtgtcggagtggggtactggtggtctccgtacctgcagatactccagtggcagtggcagcatggtggtcgggtgcagtgtgctcaagccagcagtagtggcatggccaggtgcacatgtacccacacactggcaggaaattggaggcgaggtctgtgtacacaggtgctggcaaagtgattcgggggttggctgcatgccagcgtctgcaggcaaggtgccatgggggagtctgcagtgggaggagagagtgggatcaggtg

SEQ ID NO: 23343 - DNA, 1092 bp, Artificial sequence
  DNA replication origin
caggcagcggagaggcgcggtccctgggactgggtgcgctcttggcaccagggtcagggcccacaggctccaggaagcccacgcgctccgccgggtcgcaccaggttggctgtccgaacgcagccagctggcggggcggggccttccagctgggggcggggtcttgacagctagggggcggggccttgcagctggtagggtggggcgggccgcgggctgtgggctttgggaggggtgcggactagcagaggccgagagcggcgagccgcgagccaggcagtccggggcatccagactgcaggccgcgcccaggccgcgcccaggctgcgccgcccgcctgcctcccgcgctgccgcgtcgccagtgctagcgctcctctccagcatgctgcggcggggcagccaggcgctccggcgcttctccactggccgggtgagtccggcccgggcgagcgtcccggctgtcaccctgtcctggtttccagactccggggcgggagggccggggcggtggggctggggatgagcagcgatgcttagactttgctaaacaccaagacagcgtttaaaacaaacaaacaaacaaacaaaaacagagagacctcagaggagggcttggggagggtcccggatgggaactggcacgcaggccattgtcttctgccgggagggggctgaggatgcagtttttggacgtgtcaagtctggctgggatggcaaggtgggaacagtcacttggtaaggaggacagagtctgcttcctttcctttttcacttcaatcatgagatccctggtcaagagctggagccatatggaaccgagactgtctcctggaggaggggagtatcaagtcaatagggtcctcgttggcggcctgggaggtgtaagcgctcgagactggcacgcagggccggttcagataatggcactcaaagctgatggctgcaagctcagtattcctgagctgagctgcagatggcaaaatttctagaattgccaggcgctgcagaggcagccacgctggaacactattctactgtagcacaagaaccgagctctggcccagccccgcgccttggaattgcatcagct

SEQ ID NO: 23344 - DNA, 1645 bp, Artificial sequence
  DNA replication origin
ggtttccgcccggcagcccgcagcccgctgcgccccgggccgcgtctcccggcggtgggagggggcggcccccactcggttcctggcccctcgcggccccgtcagcctcccgctcggggtgcgccgcccttcgtctgggtctccgcccccaggacccgcggccgagagctccggagcgcggcttccccggccggctgcgcgatgggctgcgggaactccaccgccaccagcgcgggcgcgggccaaggtgagtccggcgggaggcgggggccggcgggggcgggcgggagaggcggcgggaaggaagggtgcagggatcttgggtggggggcgcgcagccccctctccccgtccccattttcgggacaggagcagaccgcccgtttctggaaagaccgaaagcgtggcaagtcccccgcgcgggggcggttgcgcctggagcagtcgagcctgcggggcgtctctgccgagggagcgcggggaggactgtcgcgggctcccctgcagccgccggggctcacctgcagctggcgggtctcagggctctcctgggggagaggattcccggacgtggtccccggccgctcccccacctcccacacttgctcctccaggcctctcccccatctcctcggaaccaaggcgctgcacctggaaaagtgcagcagagcaagacaggacttttcgggcagtggtggtggggcaggaagcggggaagggtgggagtggggttggggagaactagaagcagagctgcaaaaacgcatctgtgtctgccttgatgccgaagaccggctgggctgctcttaggatttctctgagaagctgcagcagtaaggatgttttacatatgtgagacagagctttattattaacagtctgttaagatacttttcattaaacacacacacacacacacacacacacacacacaaatagaaacttctttttataccacttcatgttgattggcaggcaaggtcttctagcttccccgggccagccaggctttgtgtcaagtgacttttgccaaaactcacccttctatttcaccctgcctatgtctcgggatttaaggtaccctggatctgttttgagtaataactgctgacctatttcagtgtccttttggataaagagctcctatctcctccaattgaagtcaaccagatgccacatcctagcctaaccagcaaatgcaaacagcagtcagaggctgcggtatttcctaggcggctgtggaggccctggcaatgactttgtaaccttgggcctgtcacatcccttaacccagacgccggtaaaaaatggagtttaagactcaatttgagtcttgaattaaatcctgtcctggtgacaatgcagagagccacaggagagcgaactttttagattcatttaacagtggggaaggttagtgtagcaccttatgctaatgagggcagacgggcttcaaacctgcctgtggccagaaagctctgcttgtatgaaacaatgtcagggccacaccccgcactcaaattgtgtctcagtctactaggtactgtggccgtatgcaatccactgcatgtgtagcctacttaaaaaaggtgaagaaaagttatccacattaaaaaaaattgtaggaaggatttgtagcagattt

SEQ ID NO: 23345 - DNA, 826 bp, Artificial sequence
  DNA replication origin
gaaaggttttagtaattgaaacttccaagcaaagatgagagtgaccatttggccacattcatgccaaggctgcgaattatcatatttagtatcttgtcactcaaaaaaatacttattaggcatttactaggtggtaggctctgggctgggtgctgagatacagcaatgagcaagtgagataaggaattcctgcttcctggagtttccattcttgtgcaggaggctgtcagtaaacaagggaaatcagtaaagtatgcagcatgttcattgtaaatgctaatgagaaaaataaatctagcaataacaactggaagtgttgggtgaaaggggcgtgaattttagatggggtgggcagagaagggcttactggggagatatgagtaaagtgctaaatagggagatggcgtgcaaatatctggaggacaagattgcagacatgagggatcggcaagtgagaaggtgtgagatgagagcctggttggcaagttcgaggtaaagcaaaatcagtgtggccgaagaaaggcagagaggagaagagtaatgtgtgtaagtgatgtcagaggagtaaccgaaatcagaaggggaggaggagatagatgtgttatggaggaccgtgtggaattcaactttccctggaagagaaggggagcactggagggtttgacttggaatttaacaagatccctctcgctgctgtgttcagaacaggctgaggtgggctaaggaacgaaggaggctagtgccgtaatctaggatggagatgatggtggcaatggaatagacgtgatggggatggtgagaagagattgaaatctagagacgtgaa

SEQ ID NO: 23346 - DNA, 1254 bp, Artificial sequence
  DNA replication origin
tgttagtaaaataaaaactatagctttatggtggtatgcagtgggcgcctaatactggtgacacactctcgaacataaattgttcccctacaagtgtttctcccactgttagttcctcaaaaaacagcaggaggtgagttagctgtggatcagattgtgggctagtggatgtgttaatactaaccctggaacggatggacttgctgactaggcagtaggcagctctgaacctcctgtgccagtgaggtcagagcctgcccctaggacaccctcagtgtgaggtagggagcagagcagagcatgtgggcagcaaggtgccaagaggaagaaaaaggaaagaaaggggaggggaggggagggaaaggaagagaagaaaaagggaggagaggggaggaggagaaagagaaggagagaggaggggaggggaggggaggagagggtaggaaagggaagagataggaggggagaggagggaaaggaagagaagggaaggggagaggaggggaagggaggtgaggagaaagaaggggaggggaggagaaggaagagaaggagaggggaggaaaggaaagagatgggaggggagacgagggaaagagaagggaaggggacagggggaaagggaggggagaaaaggaagagaaagagaggggaggggaggagagaggaggggagaagagagaaaggaagataaagagtggggagtgggggagggaaaggaagagaaggagaggggaggtaaaggaagagaagggaaggggagaggaggggaagggaggggaggcaaagagaaagaaaggggagagcaggggaagggaggggatggaaaggaagagaaggagaggggaggaaaggggaggggagaggacaggaggggaggaaaagagagaaagagaaaggaaaaggaggggaggggagggaaagaaagaggttgggacaggaggggtggggaggagaggggacaggaagtaagggaaggcaaaagaacttgcttttcaacttcaccaatcaggttaagtctcccctcttccctgggggatgatatggttaggctttcggtcctgaactaaatatcttcttgaattgtaatccccataatccccatgtgtcaagggagagaccaggtggaggtaatcgaatcttgggggcagtttcccccatgctattctcatgatagtgagtgagttctcacaagatctgacggttttataaggggcccttcccccttcgctcagcagttctccttcctgctgc

SEQ ID NO: 23347 - DNA, 1304 bp, Artificial sequence
  DNA replication origin
ctccccctcccctggggccgcgcgagcgccgcccccgccccgtctgcgcgtcctcccggggaggggttggggggcgcggcgccccacataacactccccctcctgcgctgcgagccaccctctcccctccctcctgcaaacaccaccgcctcccctgccaccgccgccacctcgcccgacgctccacagctcgccgcggccggggggcggtgcgcggaccgtgcgcgccgcgggcgccagatgtgcagtccccgccgccgccagtgaccgagccgcagtccgagcggtatcgggccgcctccctgatgctgcgggggcgaccttgagcgtacagcggcttccctcggtggggaccccgacatcccagcgctgtgcccggtcttgccctctgtagcccggctcgccccgcgcttggacatggaaggggccgccgcgcctgtggcgggggaccgccccgacttggggctgggggcgccgggctctccccgagaggcggtggcgggggcgactgcagccctggagcccaggaagccgcacggggtgaagcggcatcaccacaagcacaacttgaagcaccgctacgagctgcaggagaccctgggcaaaggcacctacggcaaagtcaagcgggccaccgagaggttttctggccgagtggtgagtggggcaatcctggagggtgcggggggcgctgggtggacgcggccggggactgagggcgtgcgaggcgggggtctgtgcgccctggggctctcttgacagagagggggctcattgggaagccccgagacagactcctcactctttctccagcaccccgtgactcaggcgtgtctctgtcctgaaacacttgttacatcctgtctgcacatattttattttattttttggtttgtttttaaaaatttaatcctagcagcaaaggaatgttttagatttgcaaacactttgcagcgttgggacggccggggtctctctccctcgcaggcactcatttagaccatgccccgaaacgtcttatttccacaactctccaaagaaccacattcccagctaggagctagcccctcaagtccggtgttttgtaggtgtccctacccccttccacccatctgcccgcagctccttgctctgcatcctcccactcagactctgcatcgccctgatactgctgtgactgcaagggagggcgactcttgcctgtttttgagacaaggttagggagcaaaaataaagactactgcaagcctgaggattctaacagtttgcatcatggctttgggaggaccgaaatgtccagggca

SEQ ID NO: 23348 - DNA, 1015 bp, Artificial sequence
  DNA replication origin
ctgacttaacataaataaagtttaatatttgctgacactacttttccaatgcagattggctgggattttctgccatctttacacagagactcaggctggcttggggaggctccaactttgtaccaccatgattgtcaagataggaaaaagaagacatggggatttgctcactggctcctaaaggttccaagtgaaagcaacacaatcacttctgctctcattccattggcctaagcaagtccgatggtctcatctaacttcaagaggatggggtagtggatttctaccacatcgcaggggaggggaagaagtagaaaatattttaaaatactactgtagacacaatgtgtttatctctacaatagatctgctaaatccatatcttaagagaaaaccgaagctctgagaggttatgtcatttgaccaaggccacacagccaatcctctgggaagccaggactcaacctgcatgccactcatcctgactgtgggatctataggcacaacgtccacaaactgtatagaagcagaacagtttcaggatgggggtgggtggcagggaggccctgcaaatgcggtggacagaataggaattgaataggcatgatgcgcctttgtgtctgtgttctgtcattgctcctggggaagggaagaaggggcagggaagtttgtgtgaaatatcagtagaaggaaagtttggacaggtaagaatatcacgcgtcagagtacagcagagacacgtgtggaggatgagggcagtgtttcaggccattactctggcagcagtgaggaggctcccggggagggttggggagagcgggctgttgctggagtccggggtaaggtgaccaggggtagacaggaatgaaggcggcgggaatgtagaggaagggctgcacctgagagctgcagaggaggccccagtgaggtccactggtggaaaagaaccgccatgcgatctgcagaacaccagaccttcttcagccttcactcttcccaccctagtctggtacat

SEQ ID NO: 23349 - DNA, 1758 bp, Artificial sequence
  DNA replication origin
caggggctcccccgggactgggcgagcggcacgcgggcgctgctggcgtcggagcggcgagaggacgcgcggccggggaaggaggccgggccgaggaggcgggaggagggggcctgcctccgccgccgcggcgccgaccccgcctcccggtaagggaggccgagcgagccgagccgggagagcttgccacgcacgccggcccggcggcccctcctccccgccgccacgaccccggagagggagggccgggcggggtctacgggggccgggaagccggcgcgggggtggctgggcgcggggcggggtcccggcggggtctgcggaggccggggtgggcaccgaggtggccgcgaggggaggggagaagagcggagcggaggggaggggacgcggccgaggtggggctggcggcccggcgggttccacgcaggctgggggcggagggccagatcgaccccagccggggcggccgagcagggtccacgggggtcggggatgggcggccaggcggggtcggagggacgaaagccggggtgaacctgcgccgcgggccaagcgcgaccccctcccttcccgacctgtgcggagaggagagaaatgaaggggggcgcccaaggagccctggccccgggagtgggagtcagcgggtgggaacagatcgcccttcctttccgctgggaattgggggactccccctgctttcactctcccagcccgccatggggttgggccttgtcctttgccttgggtttgaaggcggagacaaaaaaggctgtccaaaatccagccagcttgggaggcatggttgatgcgagttagcaaagattctcgactgtggtaagtctgttcaaggggacgcattcaccaagtgtccccgttagccaagttagcctgctgtggccagctctttactttttccccccgaagccccttcagctctgttttctctttcggggtcatgaagtttgtccacggcccctactcctgacagcctctgggatgggtgctgcggaggcagcagcagccacacagaaagaggcagatcagcgttgtcacccctacttttgtaaaaggaaatctggtattgccaggctgtgtggttagcgactcacatatgttctcgaaatctcacaaaagccctgtgaggtagaaattattttacccattttataggaaggaaattgagactgagcgagccggcttcggattggctcaaggtcacatatagtcatcattcgaacctcactcagtctgcttctttctgaagtctgtgcagcttaatcacttcagaatgggaaggaaacgggggcccagggaagttaagcaacttgcccactcactcagtctaattggtgccggggcagggacagaactcactcaattccactgctttccccagtttctggtgagtgatgtgtgcctggcactgtgtgcacctggcactgtgtgtagtaggaatgctgtttcttctgtctgtaacctcctcccagttctgtaaacaaagacaaaaccatgccctgcccttaaagcctatagggttcaaatgccacctctttgatgatgctttccctataacaccatttgatacctctcatgggacttagcaagtaattgcaacgagaggcatatatgttagttcaatatagcaaacctttgttgagggcccactgtgtgccaggtatgtctcccctccctgaggactggaagcaaccatagtttatatttctccttctttctcgctttataaggtgttgctaa

SEQ ID NO: 23350 - DNA, 1383 bp, Artificial sequence
  DNA replication origin
gcggtatttaaagggccctgagggactctagggaggcagccacggcgcggccatcacaaaaccggatagcggggggacgacggcgcgacggggcaaggggatccagggcccttcagtctccgaaagccgagcgctcacagactgaacctattagagaaacagtcttcgtcagtttgaaccagagaggccgagaacagctcggatgggagggtgtttcggatgcgagagggcacggttcccccgcgcggcgagtggtgcggtccgggctgccgggggcggggtgagaagtgtttacggaactgaggccgccgagccgacgggagcgcccggcgttgggggcggggcctgccagggcactgggggcggggccgagtgggggagcgggggctgagcgggggctgagcgggggctgagcgggggctgagcgggggctgagcgggggctgagcgggggctgagcgggggctgagcggggggagcgggggctgagcggggctctggggaggtgggcgaagccgcgggccaagcctccagtggagtgccggacagatcccctgggcttccaggcgcactggcgtggaccacactgcgagctcccggccgcgcgtggaacattgagtgcccgcacacccctgtctagacggggcaatcggaactgggtgcccaccaacacactgtccacacttacagagacaacccaaccaacaacgctgctggtgggctttcccacgcacgtcagccactaaccgggtcatctccagttgcgtctacacctccacataaacacgggtctagatttgcacctgcacgggacgattagctccttggagtcacacccatccaggccctctgaagacttggcgtgcgtgcaaaagataaagcgtcttacttcctctagggttcttggcagcacctatctccgggagaagtttccaccttggttaatgtaaataaccagtcccaggagggctctgtgccgtctggcctgctgctcagctcctgctgtgggcgtgcttgagggtgtagagaaacaagcttcccccaactgttcacatcaaaactatgccttctgccaggtgtaaatcggtgctgtattacttgggaaatagtttcatgcaggaactacttacatgaagtttgtatagactaaagtatttctgtttagtgccgaaattatgtctggattgtggaggcagattggccaccaccgttcaaaaacaacaacaacaaacaacaggcaacattttaaagcagggtagaaagtcagttgttcagtggttacaacacagactcctctatggttccagtcctggctctgacattcactatccatgagatcttggtctctggggataacaatgatagctatttccttgggttattt

SEQ ID NO: 23351 - DNA, 835 bp, Artificial sequence
  DNA replication origin
cggcctcgaagtttgtgagaagccccggcatccaagtggggacgcggttttcccagggaccccctcctcggcggagttgaaagtgcagaaagaggggggcgagggccggggggtgctggaagtggaagtgagggggagcaagctgcgtctcctgcgggccccgataaagtggccgttcgcgggtcggccgcgctgtgattagaatatgaatggggcccggcgggcggaagagaaaggcggattaccccgggtgctttgaccatggacagaggcagagccggcgggccgcggcgggggcggggaagcgcggagtccctaacgccgtgcgggagtgggggtctctaaccccgggcccctggcagcgcgcggctttccgcgatccttcggaaagacgccccccgccccctcggtccgccccctccccacaatcagagctgagtgggacaatgtacggagactggggagcccgaggggccagcacgtgccgagttaaggtcacggtgcgggaggaagaaggcggcgcgcggtaccggctggacagagcccgggatggactgacggtagcgcggggttcgaatcccagctctgtaaattccttcatcgttctgggcctcagcttcctcgtctgtgaaatgtagcaaagttgccccctctcaagctttgggggaagataactgaagcagtggttataaaaggagccgggcatttgctgttccctctacttggcactctgccggctcctccttcctcacaggtgcctaaccggccgacacctttgcgtcaccctggtctcagctgagcgtcgcctcctcggaggggctgtgcctgaccactc

SEQ ID NO: 23352 - DNA, 946 bp, Artificial sequence
  DNA replication origin
tacattgtcccactcagctctgattgtggggagggggcggaccgagggggcggggggcgtctttccgaaggatcgcggaaagccgcgcgctgccaggggcccggggttagagacccccactcccgcacggcgttagggactccgcgcttccccgcccccgccgcggcccgccggctctgcctctgtccatggtcaaagcacccggggtaatccgcctttctcttccgcccgccgggccccattcatattctaatcacagcgcggccgacccgcgaacggccactttatcggggcccgcaggagacgcagcttgctccccctcacttccacttccagcaccccccggccctcgcccccctctttctgcactttcaactccgccgaggagggggtccctgggaaaaccgcgtccccacttggatgccggggcttctcacaaacttcgaggccgactgggggacggcggtggggtggggagggcagggggagggcggaggaacagagacagacagactgacagagttacgggaagaggcgggggaggggggacagtacagagagaccgagggggatagagacagagaggggcagagtcctagggggagacaaagagaagtggaggcagggtctggacagagacactagcagccaaggaaggagaaatggacagagacagagacacagaggacgagagggacagagagctagaaacagacaccgggagacaggcggagagagacagcgagatggaaggagagaaacaggatgaaggacccaggcccagaggaagacagaaagttctggaggaggcgaaccagccactcacctcctccccgcctagcggccttgttacgctcatattggggcatggggtcttagggattcagttccccttccccaccctttccccttcaagctcgcttcactccccacgcgtgtctgcgga

SEQ ID NO: 23353 - DNA, 1412 bp, Artificial sequence
  DNA replication origin
tcaacttgacagtggaaccccaaagaataacgcagagcttgcagaagttttcaattcgaggcgatgtgtgtaactggatgcgtggaagtatgtgtataagcgtgtgattgtgtacgtgtgtgagtgtgtgtgcgtgcgcgcgcgcgaaggagcgcgctttcgcttgccctggacacaaagttacgtaaagatgcgctggctcgcggcgagctcgaggtgccacttgcagaaactttgccagccgaccgccccctcccggacccaggtcctcctagggtatgggggcctcggaatagcggtgcgctcggggtctggcggccagggccgggaagccgagcggaacgccccgaggcgggggagggtgacggcttcgcactgcgcctgggaggtggggaccgaggctccggctggtagagacgcgcagctggagggagtggcggcggcgaacccggtggtccgggggaatccgcagaaacgggaggtgggagtcctgggctgtggggtcgggcttttagcttttctgccaggaaggggcacccaacgccgggctccactagggagctgtgaccttgctggagggagggcaggacgcagactggcccgctaaactcggcgttggggtctgcaaactgctctgcagttcaagagctgctgggcgtcagttttgggggtgcggcggtccttaacaacgaaaaaaggaggccaaggaatctttcacaacgaaaacacccggtatctcggttcttcctccagtagttttcgccacctcccactcctagcacctttgaagagccgtcacacttctagatctgttaacgctccctaagtcccttgcaggtggaagttctcttacagttcaccccctcccctaggctcattcttgcaacccggctattttcattttggccccctgcagcctcagaatttcttagggtgatgagtttggggagaggcagaaatagggcagtggactcagcctgggccgtggcgaggtttgagagaatgcctgcaagcataagctgctgagcattgcagcgcggagcaacaagtgccttccagccccggccgtcccctgagcatgcacgtcctttccttgagcaaataaacaaatgccgcacgaatgtctccccaactccacccctaggcaggctggatatggaagtggggtgggggctggggtcatcggggcattgccccagaaggtctttcctcggtccctgcagaaatatttaaggcctctccaggtttccgctgcagccctggtggcccggacaccggactgctcttgccagggggatattctgtgttttagggtagttgtcgatctctgattcctagagtcaaggccccgcctgattgcactcccctggctgggtgtgagcccccagggagtggggaaaggctaagccccg

SEQ ID NO: 23354 - DNA, 843 bp, Artificial sequence
  DNA replication origin
aaggcaaagtgcgtcctggagggaacagggcccgagcctcctccattcttgcccaggcacagccctggggaaggagccactgtctgcgggcttgggagagcaaggagccggaggtccgagccttgctccagcgcccaaaccagacagtctcgccctccccgggcgtgtgtgtgtgcgcgcgcgcgggcgaacggggcatgtgcgcccccatctctgccacctgctaagcgccggcgtctggatttggcagcggggtcaagtgagagccgcatggtaccagggttccgagtccccgaggctgcagcccttgatggcgcggaggctgcacgcaggctgggtcctcggagtcccggattcagcacgcgactctgtgcggcagcctgggacagcgcgctttcctacccggcctgcaggtcccagagactcggaaaagtttgcaggggccgcccggcgcctcgggcctgggatttccaaagccgctcccgcccccgtccccagcgcgtcaccatggagactgctggaagttggtggtggaaaacagacctggcgcaaagcaaaatattatgagtgcagttggggtgacttcagggggcggggggaccggagggcaggagcgggagccagaggcagaggccgacaacaaagggcccagtgcgaggaagagagaggagtttgcacggggcctccccgccgctgtgtgagtgctggaccatcctgcttcccagaggctccgaggtctctaatttctctccagcagctataccttttctcagcccgccttggagcccttgctccctccctcctctccgggttctcttccagcctcccccctcacccgtccgg

SEQ ID NO: 23355 - DNA, 1412 bp, Artificial sequence
  DNA replication origin
acagccggctggggactgctgggagggccggaccctgcgagaacgggtgggcgtgtgcccggtgggcgcgggaggggcccgggctgcacgagcgcgcgtgcgcgtcggaactggagccgcgggaggaggcgggagctgaggaggcggcggagggggcgggtcgcgtcgggcgccacgtccgcagccagaggcctccgcctccaccaccgccgccacagtcttccagctccacatcctgagaggacgcctctggagccgcgactgcccggggttgtgccggccgccgctgccgcccaggccgcctcagctctcctctgcgccggcccgctcactccgcccggccccagccctagcgctggccgcgaccccggcggtgagtgagtcgggatgcgagggcaggggcgcagtcccggcttcctgccctcctccgtcgccctctgccgtcggcgcccctgcccctcacctcccagtgcccggcctggctgcccagcggggccttggcgaggccccagcgggaaagggggaggggcgggacgaagttgggggcggatggaggttcgcttctggggctactcctccttatacgtcgctgactgccccgccgcgattggagcttgcgcacccctggaaagcctccgcctgacttcttagcatctgggggttcggggttgggggcggaggaggaaggtgaggggcatcagcagcctgggagagggatgcagcggaggggcttgggtaccgggcttcctcgccctgccaactcctgacctgttgctaaacctcccttttgggttcaggcacacaagactttttcccagtggacacccccatagctcttcctgggtaggaaggctgtatctccacgcctaacctaaagtaaaagtgggaatggagagggtgctggccgcgcccaggggtgacagggagggctggagcacccatccgtgccgtcactgcctcccagtctaaataaaaactgcctgctctgcacacgcagcttcaagaccgaccccccagctcccacttccaatcagatcgcctgtcctaaacccttcttacatagaaattctggagcccttcgggagtggggggagtgctgggtgtacaacgtggagcggagggaggaggtgccaagctcagtgctagccacggcgcctccagggtcattttctgcctcctgccacgtcactcactgctaaagaaaaaaaaaagatttgctagtgcctaaagggatcagtagggagagaaggggccacccggaagggtttagaaacacctagagaaaagggaagggttcttaatttgatttttgcgtccttgtgaacactgtgctaattccaaatgaaaatatttgctatatgtgattatttgctgtatgctattgtttagcctttgaaacttctgctggtgtg

SEQ ID NO: 23356 - DNA, 1088 bp, Artificial sequence
  DNA replication origin
ttactgagcacttatactgtgccaggactatgcatgggaacccctagcccagtgtagaatccagacaagtaaccaggcttttgcaacctagtgttgcaagggcccagaaatcagcaaccacagaaggggatagaggcagtggaagcaccgaagccagtcttgaaacatctgggccagcttcctataggaggggattctaagctgagagacacagtgtgcggagctaggaatccccatgtgtgtaagatatggtttctgcctgggtgggtggggacagacaagtagatgacacgatgctatttgacacaggaatgcagctaagccatgcatatatatattatatctttctttagtcaggaaagaagattctcctttgagcaaatttactccttttaagaaggccgagctatttggaaagatgcccaccaggatggcaaagtggtgcttgagccctccctgcagcacacgcccaggactttgaagcagggacagggtcctcctggctactgaaaggaatcgagttaacgcgccctagtggcaggtggcgaatggccggagatccggcctcccagtggtgtccaccgccacgggcctccgctcgacaggcttatttccctccatgctggagcaaaccccggctgaaagagggccgcactaattggtttgcgtacccgaagtgggaatagagagggaggaaaaccatgtttcaggtgttacggggggaaaaaagtgaaatgcgaaccgcaggggagagagcgaccgtcaggcagacaccttgtgaaccgcggtggagagcacacctaggtggggaggtcaccggcccaacccaccaccctccgggagaatgcgggcagggacagcagcagggggcagcatccacgtctctacgcttgcaagggttccccaagtccctggccactgctccccacttcctgcagcctcggtgtccgccgggggcgtgtgtgaggggcggggccgcatggggaggagggatttaaaaaaaaaaaaaaaaagcgaggtaattagcattctccgattccactggctctccgccgcccctgctttgcatacgcccgtcccactggctg

SEQ ID NO: 23357 - DNA, 1949 bp, Artificial sequence
  DNA replication origin
gtctgcgcgggtgccactccctctcacctaacctggccaactcttggcgcaagtttgcctcgcgtccccctcccgcgtcttcccagccacgcgctgctgtcccaagccgctgaggaggcggccgggctggaggtagccagaacaagaggttgcctgtttgctcctgcactcgggtgcgcgtatttcacgctgctggtgctgtcccaggtccgggagcgcgaggttccgcccccggtgcggggcggggcgacagctgcctccagcaggcagtgagcaaaacccagcaccattttttggagcagggttgagatcatttgcgcttagtacatatactccacccctgcactgtttgttttgaccttgaagatgccacttccctgggcgcatgaattgggctccctaggacttgggaggaggcgcgttccgctctccgcaatccagtgctcccacttccccactccctcggggggcacgcagtgcacgggggaaggaggggcctggcggccgtaccggctgaatggttgaaagcttgcacggcctagacagtcgtaaaggtgtgtgtggtgagactggggtgcgggaagacttgtcggtgccaagtttttccagagcagtttttgagggctagagcacacagctggtgggggctgcgggatggacaaagcccccaattccagcctcccagctcttggcctctccattccctctggcagggagctgcagctctcaccacttggctgaaggagcgcctctggggatctgggcaggatggagctggcggggggcagttctggagggggttgttagtttagggcgtcgtttccagcaggttctatcatcgtctcttcatgccccactgttttgaaggcctgacttgggtaggtttgaacccgcagttctgtccttgaagggggtggggccggggcgcttgttttcgagagctcgcgctggcggtgctgcccgtctgcgaaagccggagctagacacttcaaagcttcaattttccacaggaaatggtagaaacgtaactggagactctaaaggcgaaataaaactttgttacatattcggcggtttggccagaggttgcgcggttggagctgaaatgcagtctttctgggcagatttcattcatgttgctgcctgtctgtttcccgggggctggaggagcactgcggtgggcggtgccaagggtgtgcatgtgcgtgtgagagtctgtgtgcgcgcgcgtctgtgcgtgtgtaagtgtgcttgtgagtgtgcgcaggaacaagcgggcgcgcagggcgcccggctccagccgaagcctttggaaaccgaccctgccgccctcggtcccttcacctggatttgatcgtcagtgggggaggggaaggaaggagcaaagcgggtgtgtgtttgtgtgtgttggggaggggaatccgcactgatctcggagactcttcgggatctctttgccagagcccttccccgtctgctgccagccagggcacaaccctcaaagagaggatatcttcgaggccacacacacacacacacacacacacacatcctgaaatatcgactaagatggaaacatctggggagaaggcattgggctttgtatgtgcttcttcagaatgcggggattcacctgcaaaacctgggagctttggactggattgctctttgtttgaaaccctacctccaccaaaaagcacagaggggcttaatttccttcctggtggctcccatgacaatcatcttttactctttgctgcccctgactcccagctccttacccaccttctgggcctggaacctcttcttttttctccctcagtatttcctttggaaggctctagtgtggaaatctggtcaccctgccctacttctgcctttgccattatcctgaagttgtgagtttggacaagtcactttacatctttgggcctcagttgcctcatctg

SEQ ID NO: 23358 - DNA, 1567 bp, Artificial sequence
  DNA replication origin
cagcccgcgtctgccacttcaaccagggagcctccaccccagcgccgccgaggtgtgcggggctcaggccgcccagcggggctctgattggaggggtggaggctgcgaggccggagccctccctcccctgccgccccccgcccgcccccgcgcctacctgagctggcgcggctcgcagtccacgccgggcagcagcagccgggccgcctggcggacgtcgtcgctgtccatggagaagctgcggcggtggccggcgtgcgccacggccacccggatccactccatcagcggcggcagcacgaggaagggcctgcggtgggaggagggacccggagacgcgcgttagggcctccccggaggcaggggctgccggcttggccccaccccctgctcgcggggatccccccatctcccgactccccagcccacaccccgctttccctggagaccctgcctctgaattccagagtagtgggagagcctttggagacatccggaccgcaccggtgaccccggggcaggctctctggaatccttgggcctcagtttcctcatctgtagcctggggataatgtgactaggaaaggctaggaggtaactgatctgggaatattatccctctcggcgatcatgtgaacataaggatgagtcacttgaagcaccaagcgcagggtctggagcggcggaaaaccaatcagcgccccgtgttatttctatttggggctccctgattgtggacccaagcctaaggtgtccgctagcactcccttcccatctgcagcctcgtccctgtcgtctttctggagctctttcaggcttcagctctgcccaggcaacatgctgccaaaaggctttggcacctagaaaaggctctctaaagagagccaggttaaccggcagccttcccccagacccaggctggctgggcagccacccagtggcgcccacaattcgaggccctttggaccttggtcacacccctgaaactctgagagcctcaagttccctgcctgctaatgggatcatggtaggctgttgcaagcttgttgcacgcattgagacaatgcctacaactgaagggcaactttctaagtgcaacgcatttgtgccatcttcctatttcttccagtgatgataaactctgtcctcacattaggattactggagaagattttggaaaaaataatgacacttgagtcctgtcccagggattctgatttaattggtatagggtgcagctggatacaggcagttttcaaaacctccccatgtgaatttaatgtgcatcagaattatctggagggtttgttaaaatacggactgctgggtctcattcccagagtttctgattccatagatcaggggaggtacccaggaaatgcattcctaaccagttcctgatacggatgctactggtctgcggacgacattctcaaagaacctctgctctaaagtcatcatgagagggcctgggaatcatctggctctatatccagagatggtgattgtgttagagtccaagaagataattctgataggcagcccctgggattctgatttaggtggg

SEQ ID NO: 23359 - DNA, 1839 bp, Artificial sequence
  DNA replication origin
cccaaggattccagagagcctgccccggggtcaccggtgcggtccggatgtctccaaaggctctcccactactctggaattcagaggcagggtctccagggaaagcggggtgtgggctggggagtcgggagatggggggatccccgcgagcagggggtggggccaagccggcagcccctgcctccggggaggccctaacgcgcgtctccgggtccctcctcccaccgcaggcccttcctcgtgctgccgccgctgatggagtggatccgggtggccgtggcgcacgccggccaccgccgcagcttctccatggacagcgacgacgtccgccaggcggcccggctgctgctgcccggcgtggactgcgagccgcgccagctcaggtaggcgcgggggcgggcggggggcggcaggggagggagggctccggcctcgcagcctccacccctccaatcagagccccgctgggcggcctgagccccgcacacctcggcggcgctggggtggaggctccctggttgaagtggcagacgcgggctgaacaataagcaggtccctggagttgcagggttgaaagaacgcggcgaggcccgtggaggacggtccgattcttagattacagatgtcggtgtggtttctctctggctgttctctctgcgcctagcttctccctctctttctctctcctcccccagtaaaatccggtcttcctgtagttttttaaccaaaccttacagagtgaaatttctggctgggtcagagagcgcctctgcgttttcacttgcgtgaggatggagtggtcttctctgcattcctcaggcctgtatccagggctctcctctgtcaaggtgggaattacccatgggccactcaggggcccccatgcgtgggtgctcattttgagccaaagcaagagaaataaaagaactcactcaggtgagtcataatctggctttaaatgcaaaaaaacacagaaacccagtggggcgtgtgtgtgtgcgtgcgcgtgcacgcacacgaacacacctaagagcatgcactttcccgactccccccactcccagctgtttcccaggtgtcattgtcatcattttcaaatcccttcctacccacttgatgggaaactgcctttcctccacagttcatccaaccaggccaagggcagagatttctgccctttcagatctgattggggttctgcaaggaaatggagggtttgtggtatgcagcagccccccgaaggcccagagctgtccctcagcccaagaacatgcagagagcgagtcaaagtcataattgctagcatttattggatgtttaccacatgccgagcactgttctaagtgctttacacagatgaatatttcccaaacagtgtaaagtaggtactgtgattatgctcacttcaaaggtaaggaaactgaggcacagataggttcaataccatgctcaaagtcactggagtagtaaataatagagtcaggatatgaattcaggcagtccagagccctgggatcatagttctaaccactgagcgctttcctgtcttcagatttttgtctgggcattttctggctgtgccaccatgccttgtaccttgtcacctacaataacagcccatctcagggagaggcgagggaacggtcattcactgagcacctaccatgtgacggttatcaattgcaacaaaagatttctctcttttaatccccgaagcggcatcatgaggttggcataatcttcccattttacagattgggaaccattggtggagcagcttgtaggtagaagtgccaaggaagaaattcttgtggtcctactctaagtccagcctctgcc

SEQ ID NO: 23360 - DNA, 969 bp, Artificial sequence
  DNA replication origin
tgaggatccggaaacgcgccgcagagggtgcggcccagaggaggccgcgggccgggaagggccgggcgggacgggaaacgttagggcagcggcccccggggtgagggggccgagcggacgggcagggccccgaggcgaactctgcccggatgaggaacaaagcagtggggcaggcgcgtgcgcccccagcgcagctggcaggtgggctgcgcgcgggcccggccggagcggggcggggcgcggcggcccggcctgcgggccgcgggcgggctaatccacagcccttgggtggcggtgtcggcagcgcctggggctttcgggtagctgggatgggggctgcgaccttgttgtggttttggtgaccgctcttgtccccactcccccaggttgggcagcccccttcccgaagcttctggacggaaggccccaggtgttccccgagatgccccaacccgtggcggggtgcacggccaccggccctcgggagaagttgggcggccccgggcgaccccggggacgagtggccgcgtcggtgcagcggttgtgagcaagatgtggtagcacgtgaccctggaacgcaaaccctgatgcctgttccccaccacccgagcgctcctttctctgatatttggccccaagccgatgcatcacaggtgagtagggaggtgggcttcagcactggtgacatcgttggaaactctggcgagtgagtgtccagggtcagtgccgttgtttttggtgccattgagaaggttacaggtgtgatttgcaaaggaaacaaatccagaaactagtgttgggtggaatgtaatctcatgcatcctaatttactccacatgtggaaagttgttcccagtagccacacgtttattgttggcttgttgacaccttttcctgtgtctttcagttatttgagcgtttaatatatttttccggattccaacgtgtattgttatcttattatgcttc

SEQ ID NO: 23361 - DNA, 929 bp, Artificial sequence
  DNA replication origin
tggcggaccacctggattggccgccaccacgttgtccacccagcgtctctgatgctgggagcctggccgggcagggtgtcctcgctgttgttgcccgcctggagtgcaggtgacgactgcaggtcaggggcaccgaggcaggcggggtaggagtaccctgggcggcctcaggatccggagtggacagcaacagccagcaacctcccaccccgccgggctcccagagacgcggacagagggacagatgcggcagctggggcagccaagctaggcgatctgccgggctgtggcggcacaggggtgggggtaaccagacccactcggccagatctctggtggctgcagagcgccaagaccccagcgctcccagcctgttctggcagtccggcactggaagcccagcgccagccgcgcgcagcctgggagcggcttcctgggcctcgggctggctgtggtgcccaggcgtgggcctaaaggctctgcctggctcactaggtccgagaggtcggaagcggcggtttcgctgctaaaggctttggtgccccgggcttagctaattgtgactggactccggattccgcgaaaaggcgaaggggagctgcagggtagctgaggcttctccgaagctgccgcgatgaagaagctgtttggctccaggaggaagaaggatgaggtggccctgggctccatccctgaccacttctactcggattcctggtagcaccgccgagattgagagctcggcaggatccacaagacggccagagagggagatacggccacagtgcagcagtgccttctgctcaagagccctgcattgaaggagggggacaacaggaacaggagatgggagctcccagccgagggtggcggcgggaagggtgggtctgggaggcgcccctgtccttccgtgcaggccccgcagcccc

SEQ ID NO: 23362 - DNA, 970 bp, Artificial sequence
  DNA replication origin
gagccagggaggcgggcggaagcgagaggaagtgaaagccgggctcctgtgagcctggcgctcgggcgggcggcactgcgggtgccccgagccgcggcgaggccccgcgcgggcacccgccccggggatggagatgcccgggcccggtgcgcgcagggcaccggctgcggctcggcgcggagctccggccgcctggctctctctcgctgcctcgccgctgcctccttggctgccttgctcgctcccctggacttcacgtctccagccctagctcccgcgccgctgccgccgccgccaccagcagcgcgcctcagcccggcgcgctcctcgcacggagccacagcactgcctaccgcttaactccttgcatgccacctggccctcccgcagcctcccggggagccgggcatagccggtgccaggccggctgagcatatcgggcaggggcctcagccttccggcctcagtgtcctcttctgtaaaatgggttcgagacccaagcccaaaccatagggtcgctggaaaaattcactgagcggattacgcaaagtgccaagctgcctgacatggggagtatgcaccccaaatggcagagtgcttgctgctgctgctactgttgtcgaccaagaagcttagcacggtgcctcacaaatagtaaacacccaataaagcgcagtttcggtttttggtatttagtttgtagttttaacaggtggtaagttttagctgtgtaacctctgggtgatcactcgccctctctgagcctgttgctttccaatctctgtgaccttgggcaagtcacagcacctctctgaacctttgtgtccccatctgtaaaatggggacagtaatgcccgtagtcaaagaattcccagagaagctctggcagaagagcccttctcatgacggggcagggcatctaacgggagctggacatcttttctttcttgatctggctggtggctgcaca

SEQ ID NO: 23363 - DNA, 2308 bp, Artificial sequence
  DNA replication origin
ctggcttctccggcttctctccagtgaattacctgtttctatctgtagtctatacttgcattggttgtgtatccagtgattttcaacttttttgaggcacagaaccctttgttcacataaaggaatcctaacatgtaagtcaaatgaaagtagagctacacccttgaaagggatgggataggctcacttccctttgcccccataggggcctcaggctcagtgaagcatagtttgcaaacagttgttctagtccctccactcaagctatggatgggaaactgagactcaagttgtccagaaaggtcatggccaaggccagtctctagtccaggtcacctgactctgtccagtgctcattcaagaatgaactctaggtagatgatcgaagcatccacagaaaagaagatttatcacttcctttctatgttcttcgcttcatttatttttttatgtgccttattgtaatcactaaaacatctaattcaatagagtgctggttgtggtggtggaggtggaggtagtgatgatgaaggggagggagacagtggtagtggaggtggagatagtaatggtggcggttgtggaggtggtgatggtggaggtgatgatgaaggtggtggtgatggtagaggtcttggtagtaggggtggagaagaggtggaggtggagatggtggttgtgatagtggtggtggtgtaggtggtaatggtggaagaggtggtcatggtgatcattgtggtaatggtgttaatggtggtggtggtagaggtgatagtgaaggtggaggtggtggtgagatgatggtgaaggaagtggtggtggtggaggcgatggtggatgtggagaaggaggtggttgtgatggtggcggtggaggtggtgacagtggaaatggttgtaatgttggtggacacaatgatgatggtgatggtggtggatgtggtggtagaggtggtggtaataatggtggtagaggtggtaatggtggaggtggtggtgatggtagaagttatggtggtgatggtgaaggtgaaacaggtggtggcagtggagatggagaaggaggtggtggtggtgatggaggtggtggtgatggtggtggtggttgtgatggtggtggtggtgatggtgatggtgatggtggtggtgatggtggtggtgatgataatggggctggtgataatggggctggtgataatgggagttgtgatgatgggggtggtgatgatagtggtgatgatggcaatggcgatgttcatgatgatggtgatgatgacgatgatgatgatgatactgatgatgatgataatgatgatggtgatgattgtattagtgttcaaggtgccataacaaaatactacaaactgagtagcttacacaacagagtccaaaatcaaggttctggcatgtctgatttctggtgaagggtcctcctctttcaggcatatagatggtcactttgtcctcacatgtcacatggcctttcatgtgagtgcacactgagagacttcctttttgttttgttttgctattttgagacaaggtctctgtcacccaggctggagtacagtggcataatcatagctcactacagccctgacctcctggactcaaacaatactcccacttcagcctcctgaatagctaggactaccagcttgtaccaccacacacagctattttcatttttagagatggggtcttgctatgttgcccaggctagtccttaactcatggcctcaagcgatcgtcccacctcagcctcccaaagtgttgggattacaggtgtgagccttataagaagagccaccagttctttcttataagaccaccagttctttcagattatgatgccacttttataaactcatgtaaccctaattacctcttgcagatcctctcttcaaatatagtcacattggggattaaagcttctacataagaattttgaggggatataccttagtccatagcagggattggtagcaataacaactacagcagagctgatgattttttatggtgatgatgatgatggtgatggtgatgatgatggtaatggtggtggtggtgatggtgaggatggtgatgatgatggtaatggtggtggtggtgatggtgaggatggtgatgatgatggtaatggtggtgatggtgatggtgaggatggtgatgatgaaggtaatggtggtggtggtgatggtgatggtgaggatggtgatgatagccaacatttattgaacacctactacatgcctggaactgtgcttttttcactttacatgggataatttatttaatcctcgcaa

SEQ ID NO: 23364 - DNA, 858 bp, Artificial sequence
  DNA replication origin
gctccgtccccaccgcccagtgcagccctggtgggggacttgaggttctgggtggcggccaagatgtcggcctggagctgccgggaggaatccagggcttcctcgggcctgctgtcgggggctctgtcggggacctcactgaaggcccgggggcccccggcccggtcactctggtccacgtacttcttcttggggaaggacgatgggtaataggccgaggccttctgcttctgccgggtgatgaccgcggcacagacgatgaacatcagcagaaaggccagggagcccaccacagcaatcagcatcacgtactggcggaagaagtccactatcccatccaggaagttggtggggggtgatgggccccccagggttatgggctggggccccatcgatgtggggctgagggccggggtccagggtggcgggaggctcggggaggaggccgacgagccctcggcctccccactacccgccacatcctccaggaacgtggccttcaggggcacagagcgggcgtcggtagcaggcacagaccccaggagcagcaacagaaggatgaggaggctgggggctgccgccgaaaccatggtgcccccaggacctgtgagacaggagggaggagagaagtcatggcggaactctagagtgtcaggattcagaaacaggctcaccagcccccaggaggaacagggagcatgaaacaccttctagcaagtcccttccattcccagggcctgagccccgctggttcagctgtggagtacagatgtgctcccccacttctctggaggtcccggaggtcaggggctgaatcttattcatctcggcctcctcagggtttggccccatatctgg

SEQ ID NO: 23365 - DNA, 808 bp, Artificial sequence
  DNA replication origin
tggctcctgcttggagcctgggggtgagggcagccacagggggctgtccatgcatgcccctggcatccatgacccctgcctagctcagagacctggaggcttcaaaccctacgaatctttttttttttttcttcttgagataggttctcgctctgtcacctaggctggagtgtgcagtggcgcgatctcggctcactgcaacctccgcctcccaggttcaagcgattttcctgcctcagcctcctaagtaggtgggattacaggggcacgacaccatgcctgcctgatttttgtatttttagtagagatggggtttcaccatgatggccaggctggtcttgagctcctgacctcaagtgatctgcccacctcggcctcccaaagtgctgggattacaggcgtgagccactgcgcctgccctgctaggaatcttttgcagaataaggtagagctgggctggcggaaggtttgagaaagcccctgaaccaccaggttgtggccgcgcggagccactttggccacccagtgcatgggggccagaccctgaggggaacgggaccacagagaggctggggactgaagggaagggtcccagagttgtgggtagggggtgaggtgtcactcagcaacctcagtcactcaatcggtttctcacttactcagccctactatcatttctccctctctgcttggatccagacccagctcttccctggcaagtcaccacgtccctctcagcctctgttttttcatctgcaaaatgggcctaatcatagaacttcccacactgggcagtgatcaggattca

SEQ ID NO: 23366 - DNA, 852 bp, Artificial sequence
  DNA replication origin
gccgggattcttgacccagccagaacttgagtgggtctccagccacccatggtcccagctgccctctgcagtgagaagtggtagttgttgccacaaaagctctctcctaggcttgactgggggtgggaggcagggaggtgactggcaggtcacagaccccaaagctcaaggttgtctgtaggaacctttgctaacaggtgccagagaggtgagggggtcctttcctcatttagcatctgacaggtgatgtccaccagcgggaacaagccattcctggctcagagtgtgtggtgtgtgcatgtgtgtgtggttgtgtaggtgagtgtgtgtggtgtatgtgtatggttgtgtgtatgtggagtgtatgcatatatgtgtggtgtgtgcatgtgtgtatgattgtgtgtagtatgtgaatgtgtgtataggggtgtgtgtggggcatgtgtgtacgtggttgtgtgtggggtgtatatgggtatgtgtggcgtgtgtgcatgtttgtgtgtggggtgtgtgtgcatgtgtgtagatgattgtgtgtgtagtatgtgcatgtgtgtatatgggtgtgtgagtgtgtgtgtggtatgtgtgtgcatggttgtgtgtggtgtgtgtgcatgtgtgtatgattgtgtagtctgtgcatgtgtgtatatgggtgtgtgtgtgtgtggcgtgtgtgcatgattatgtgtggggtgtgtatggggatgtgtgtgtgagtgtgtggcgtgtatgaatggttgtgtgtgtggtgagtgtgcatgtgtatgtatggctgtgtatgagtgtgagtgtggtttgtgtgaatgtgcgtgtaaactcctgggatcagacagaggaagg

SEQ ID NO: 23367 - DNA, 1023 bp, Artificial sequence
  DNA replication origin
aggcctctgaacctccctgagcttgtcccctttggagggtattgggcagcagcgtgggcagaaccccagctcactgtctgggggagcgctgcaggacagccttgtctgtctgtctcagcctgccctggggacccgaggtcagggaggaagtgccgcatctggtcttccccagagcgagagtgtgagcaagggtgggattgcgtgtggcccgagagtagcccctcccctccccctgtccccaccccaaaccctcttaatgaaatcaagctggccctgcggcccagccggggagggaggaaggaggagggacgggaggagggacgggaggagggagggcgggcaggcgccagcccagagcagccccgggcaccagcacggactctctcttccagcccaggtgccccccactctcgctccattcggcgggagcacccagtcctgtacgccaaggaactggtgagtcctggggtcccctcctctgtcctgagagcctggagctatcttggagcttagggactggggactgttggagcactctggggggcctctctaagtgtgtgtgggctttgagtgtgtgtttggtgttgtgtgcatgagtgtggtggaatctgagtcccgtgtgcggtgctggggtgggccagggtgggccggagtgttgtgtgtgtgcggctggggccttggtgtagggggtgtgttgcttccacttttctgcaagtggatgccaggctgttgcttccaggatctgtgtgagggtgatgtggacggtattgtcctgtgtgcagggatcggctgtgtgtcagggggttgtgtatgtatatgtgttgtgtgtccgtgtgtgttctctgtgtattgtgtgcatgggccatgagagtgctgttgggtgtctcagtgctgtgtgagtcggtgtgcctgtgttgtgtgtctttatattgtgtgtccatgctgctctgtgtgtgtgtgtgtgtgtggagggggattgtgcccccaggacccccctccccatccagacctccagggcccagg

SEQ ID NO: 23368 - DNA, 1363 bp, Artificial sequence
  DNA replication origin
atgtttgaaatggtgcagcaacatttggttagctgtgggggcagcagggacaccaatatacattcttaatggagtccacagttaaaataaaaccttttctttttctatttagaagaaagtaagtcccttttaatctacacttcagactagaaaaaatgtaagccctaaagcaatggaatacatcacaaaggaaaagacagattggctatataaaaattaaattacgtaagactttaatatggcagaaaacaaaggtcatcggaactgggaaatacgttttcttccaatatagtaagggctaagtatactttgatatgcttcatctcagctgcagctgctgcctctatttgaaacgtgacgtgtgaaatgttaagtcctaggcagctgatgtgcagatggcagctgtcctcatccctcctgtgggaaccgagtccaccagcaaatggcttattctcaacttcgaactttggggtgtggggtgggggggggtgtgttcgctaggcgacactggccgtggtgtgccggctgaaagttcccctgtggcgagtgtcaggagggctgggtgggagatgggaattactgcgcatcccaagatccttgaggataaggtgactgctgagttggttggattggctgaaatgtggaggggggtgagtttagagaggcagatgggatccttcaaattcattgtagttggagtttaattcatgtgaacgaaaatgggtaagagggcagattttaggatcctgagtttagtgaggggcagatagagggtgaggcacgcggctccctgacaggcttcatggtgaggggctagaaagcaacgtcagggccgttgcccagggagcctgagggcagaagtcagaggaggaagttacccacttcaggactcaacttggaaggcaagtagacaggtctattctgctgtcagaaaaaatctgcacacttgagcttgggcactcaccaccgggtgcttagttttgttcttagagtagcttcctcacactgatctcaaagagtaagtggacttttggggaaggacttcctggtgggtttggaacagaactggggagaagtggctcaaaggcccccaggcagttgtgggggcagagaaagctttgggctgccagagaggagcagtcatctgtgtctccgaggggaagagcagggagcaggcctggttacagtggaaagggatcacacacagggtgcctggcccccaaaatgctgcggaacgtggttggggctggttgccaagtttgtccaggctcctctccactgggtgtctctcaggcccccagcagcagggctcccttcccaagagccctgtgcctctcatcgcccatttcctaatctctacccc

SEQ ID NO: 23369 - DNA, 921 bp, Artificial sequence
  DNA replication origin
tgagtcgagatggcagcgtccagcttcggctcggcatcagagggagagcgtggaaagagagggagagggagaccgtggggagagggagagggggagggggagggggaaggggagagggaggggactatattttttaaaaagaatgaagaatctagtgttttggatttggaaaataagttcatatttcataaataatatgatcagttgtctaaatcaaaatagtcatgcttgggaaaatgttcataattagcttaagtggggaaaaatacaacatacattctatcatctcaatctctgtgtacatgtgtcggaaggaaatagatcaaaatgataatagcttctgtcacccactgggctgtaggattttgatggaatgatttttatgttcttttttatatctttcaactttttaaaagcacacatattttataattaaagaagtactttaaaaaaataaaatagggtaggcgcagtggccattcctgtaatcccagcactttgggaggctgaggtggctggatcacttgaggctgggagttggagaccagcctggccaacatggtgaaactctgtgtctactaaaaatacaaaaattagccacgggtggtggcatgtgcctatctataatcccagctcttgccaggctgaggcaggaaaatcgcttgaacttgggaggcggagattgcagtgagccgagatagcactactgcactccagcctgggcgacagagggagactcagtctttaaaaaaaaaaaaaagaaaaagaaaacagtaacaaaggagaagggctttctcatcattgtcatgaaatcacgctgatgtatgcgcgcattatgttgtcaaatcagtgaaattttgtgagttggatctcatttagcatccctgttgctgtttccatgtatgagtattgtatgtgcat

SEQ ID NO: 23370 - DNA, 1169 bp, Artificial sequence
  DNA replication origin
gttctcaatgagctgttgggtacacctcccagacaggatggtggccgggcagaggggctcctcaattcccagaaggggcggcagggcagaggcgccccccacctcccggatggggtggtggccgggtggaggctgaccccccacctccctcccggatggggctgctggccgggcgggggctgcccccccacctccctcccggacggggcggctggccgggtgggggctgaccccccacctccctcccggacggggcggctggccgggcgggggctgagcccccacctccctcccggacggggtggctgccgggcagagacgctcctcacttcccagacggggtggctgccgggcggaggggctcctcacttctcagacggggcggctgccgggcggaggggctcctcacttctcagacggggcggctgccgggtggaggggctcctcacttctcagacggggcggctgccgggcagaggggctcctcacttctcagacgggtcggccaggcagagacgctcctaacctcccagacggggtcccggccgggcagaggcgctcctcacatcccagacggggcggcggagcagaggcgctccccacatctcagacgatgggcggccgggcagagacgctcctcacttcctagacgggatggcggccgggaagaggcgctcctcacttcccagactgggcagccgggcagaggggctcctcacatcccagacgatgggcggccaggcagagatgcccctcacctcccagacagggtggtggccgggcagaggctgcaatctgggcactttgggaggccaaggcaggcggctgggaggtggaggttgtagctagccgagatcacaccactgcactccagcccgggcaacattgagcactgagtgaacgagactccgtttgcaatcccggcacctcgggaggccgaggctggcggattactcgtggtcaggagctggagaccagccccgccaacacagcgaaaccccgtctccaccaaaaaaatacgaaaaccagtcaggcgtggcggtgcgcgcttgcaatcgcaggcactcagcaggctgaggcaggagaatcaggcagggaggttgcagtgagtcgagatggcagcgtccagcttcggctcggcatcagagggagagcgtggaaagagaggg

SEQ ID NO: 23371 - DNA, 1073 bp, Artificial sequence
  DNA replication origin
aagtgaggagcccctctgcccggcagccgccccgtctgagaagtgaggagcccctccacccggcagccgccccgtctgagaagtgaggagcccctccgcccggcagccgccccgtctgagaagtgaggagcccctccgcccggcagccaccccgtctgggaagtgaggagcgtctctgcccggcagccaccccgtccgggagggaggtgggggctcagcccccgcccggccagccgccccgtccgggagggaggtggggggtcagcccccacccggccagccgccccgtccgggagggaggtgggggggcagcccccgcccggccagcagccccatccgggagggaggtggggggtcagcctccacccggccaccaccccatccgggaggtggggggcgcctctgccctgccgccccttctgggaattgaggagcccctctgcccggccaccatcctgtctgggaggtgtacccaacagctcattgagaacgggccatgatgacgatggcggttttgtggaatagaaaaggggaaaaggtggggaaaggatagagaaatcagattgttgctgtgtctgtgtagaaggaagtagacatgggagacttcattttgctgtgtactaagaaaaattcttctgccttgggatgttgttgatctatgaccttacccccaaccctgtgctctctgaaacatgtgctgtgtccactcagggttaaatggattaagggcggtgcaagatgtgctttgttgaacagatgcttgaaggcagcatgctcgttaagagtcatcaccgctccctaatctcaagtacccagggacacaaacactgcggaaggccgcagggtcctctccctaggaaaaccagagacctttgttcacttgtttaactgctgaccttccctccactattgtcctatgaccctgccaaatccccctctgcaagaaacacccaaaaatgaccaataaaattaaaattaaaaaaaattaaaaaaataaaaaatatatagtcaacagcctcttcaggagtatcaaaagtatgtctttgaaatacatttaccagtaagtctccaac

SEQ ID NO: 23372 - DNA, 2062 bp, Artificial sequence
  DNA replication origin
gcgggtcagtgggcggggctctaagaaccccgctccggggtctaaggagcagtgggcgttgctcggaggcgcctgtgggcgtggccctctaccactcagatgactggagagcggggcgtgcgcttgggcaccgcctgcatccctcggtgcgaccagagggggcgtagcgaggcgtggaacgtggggtgggaagcgggcttcccctccggaagtgggcgtggcgcacagcggcccggcagccctggttgggtcccgcgcggcgcgggggcggggcctacgcgcggtggcgggggcggtggcggctgcccgcgcccctcccccgcacggcgctcagtgccaggctggaggcggcagcggttggaggcttcgcccggctttgcagcggggacttcggcggcggcgcctcaggcacctcggcccgggtgagcggctcgcgcccggcgggggcagcctgagagcgagtcgggcgggcggacctgtcctctgagcatgtgcctgcgccgcctgacaggagccggcggggcgaggggcagggctaggtggaggggacagtgctgggtgggcgcgcggggcgcgggttcacgggctgggttgcaaggggttagggccgggggctgctgtcgggggctcggggaaagggagttggggaccgaaccaggtggcgtggggagcgtgaagcagggtccctgtggggaggaggctttcgaggtccggaacgctcctggccgggtgcggagccgcgggccgaggtgggacgaggctgcccagggaaggcttttaggggtcagggatcgcctgcttgggcgaggtgctgggagggaagggctgcttcgggcgaggcgtagagcccgggggctccaggcctggggactgggtttgggccgccccagggaacgagtgggtgggggcgggtaggggccgggctcacgtggggccggggcgagctgggccctgcgtcgggaggggcgagggcggccgcctggcctgcgggtttcctggctttgggtgcgagaccagctctgggccctgcagatctcggttgggggtcaggcggggcggggcagagctggagctggagtaatgtgggtgggggcggcttgggaagaggctgagcccggccaagggagcagagggctgggactggctgggggttgggaggggaggaacgaagcaggaaggctgtcggatcgggggcccagggtgtccgagtgaactgggtgattcagaggtgtgtttccctaatagcggggcagctggcgagggacgcagtaaaaaggagcgaggtgcaggtggggccccgctgcgccgaaatgactgaggatgaggtcagacgtggagggtgggaatgcagaaaccgagctctcccgcctgtccccaccggcgcacgctccccagctctccgtctctcaaatgatttgaatgtgttgggggaagtggcaggctgcggtgagagctgagaagaaaggggcttcctcttggagggaggcgctggccctggcatccttttttgggagtgttcaaaggattttgaacgctggaaaaggaatcgtaggctttactgcatcacgatttagaaacacatcctatatttggccgtaatgtaggctgcccttgttttgtggtgtctaaagtgcttgctctacatgttgcaaacgtgggattcagagtgcgaagcaaattgcaagttgttcatttcccccggcatggtaagatacaaaggcttttccctcctataagacatttgaaaagaattgaatgtagtgcgcgtttaataaactggtcctgggtggcgaatatatttacttttggaaatagttaccacaaaatattaggccctcttaccgcagcctttctgcctgggattacattctaaaacagtacttgtagggctcttagtcactctatataataatgcatctcattgtccttatctggcagaacgttctcctgacaccagggcctgctggaatagacagaaacatgattaagtataagcagttgctttgtaccgtctgttcagttgtgaaggcaaatagatacctgtttaatattaattcacttt

SEQ ID NO: 23373 - DNA, 788 bp, Artificial sequence
  DNA replication origin
tgtgtggatggtggtgtacactcatggcattcaaaatgttcccaatccgaatcgaaaacataatcctgctcgggtgtggtggctcatacctgtaatcccagcactttgggaggtggagacaagaggactgcttgagcccaggagtttgagaccagcctgggcaatagtgatttttttaaaaattatatataaaaaaaaattagctgggaatggtggcatgtgcctgtggcctcggctactcagggggctgaggtaggagaaatgattgattctgggaggttgaggctgcaatgagccttgatttcaccactccagcctgggtgacagagcgagatcctgtctccaaattaaaaaaaaaaaaaaaaaaggaaggaaagggaaggggaggggaggggaggggaggggaagggaagggaaggggaagggaaggtgaaagggaagggaagcgaaggggaaggggatagggaaaacaggaaaagaaagaagagaagagaatagaatccacgattgaaccctaaggtggcatggctgctctggtcttcccaggatgcgtatgcagatataagactctgagtgaggccgggtacagtggctcacgcctgtaatcccagcactatgggaggccgaggagggtggatcacttgaggtcagtagttcgagaccagcctggctaacatggtgaaaccctgtctctactaaaaatacaaaaactttccaggcatggtggtgcatgcctgtaatcccagctactcaggagactgaggcaggagaatcgcttgaacgcggga

SEQ ID NO: 23374 - DNA, 1261 bp, Artificial sequence
  DNA replication origin
aggggagcattggggaggggagatgggggaggggagctccaagagtgagctgggggaggggagatggggaggggagctccaggagggagctgggggaggggagatggggaggggagctccaggagggagctgggggagggaagatggggaggggagctccaggagggagctgggggagggcagatggggaggggagctccaggagggagctgggggaggggagatggggaggggagctccaggagggagctgggggaaaagggcttggggagggtagctcaatgacgggacgtggggatggggagctaaggaggagatctgggagaggggagcttggggaggggagatgggggaggggagatgggggaggaaagctggggaaggggatctgggagagggaagcttggggagaggatctagggaggggagctgggggtggggagatggggaggagaaatgggagaggagcttggggagggggatctagggaggaaatctggggcaagggagctgagggaggggaacttggggaggggatttagggaggggagctgggggaaggggagctcagagaggggacttcagggaggggagatgggagaggggattggggagggatggttagggatgggatctagggaggggatttgggggagggaagcttggggaggggatctgggggaggggagtggggaagagagatggggagtcgggggaggggaacctggagggagggatctggggaaggggattttggggaggagaacaggtggagagaggagctggtggggagggcagttgggggcaggcatctgggggagatttggggggaagggagctgggcgcccacaggagccgctgtgaggtgggcaagcccctctttcagttcctcctcgacagtcagtctccagacttccactccacccctccctgcttccacccagacagtctgatctgcaactcggcccatgactgcccccattgggaatccagctgcttctagcctgggaaccctgacgtgggccctgacctgaccaatcaaaaaccccagggtgatggagcaaatgtgtcctgtatcttgagcataacattaaaagtgaggacccagcagaagtcccccagcgaggacccagaaataaggaatctctttgattcttgcaggctagtgtttccctacccacataatctttagaaatcatgtgtgccgtaataaaagtgagtatttcccctcccttcactcaagcacacagaaacatcggag

SEQ ID NO: 23375 - DNA, 1408 bp, Artificial sequence
  DNA replication origin
tcgggcagccctcagggcccccgcgcacgcgcgcctcctcgtcccgccctgcccgcttccccgcccactccgcgcactgaggcctgcgcgcgccggcgcgggaggcgggagctgggggcgggggcggtggcgacgccgagggggaggggcgggcccggcccggctcggcccggccgcccgcgcgcggctccaggaggccccgggcccggcccgggcggcggtggcggtggcggctctagctcgagacgtctgtggcgccctcgcaccgcgccgcagccatggccctggtgaccctgcagcgctcgcccacgcccagcgccgcctcctcctcggccagcaacagcgaggtgagccccgggctcgccgcgcccggcctgggccgccggacgccgcgccgaggccgccggagctggggccgcgcgtgcggggcaggggggcggctgcgcgggctcctcggggccccgccgtaggaacagagccgggcagccggaccggggtgaccgtgcgaggactgtgtgcgatgtgaccctgtcttggggagctgtgcggggactttgtgtgcggtgtgacccctatcggggggcgactttgcagggactgtgtatgcagtgcgacccctctgggagtgtctgcaggatactgtgtgtgcgctgtgacccacatcagggggttacccccatcttggggtgacccctgttaggcggagactgtgtgcgttgtgacccctaagggtgactgtgcagagactgtgtgtgcagatgtgacctcgtgattgtgtggggactgtgatttcaggtgtgacccccatcttgggttgacctctgtctggggaggactgtgcgtctgtcgggactcccatttgtgagtgactctgcagtgtgaccagggtccaggggtgactggatgtgcaactgggacccttgattgggtgactgcgtgagccgctggttctgagacctgtggccggggtagttctaggccctttgcctgtatgcctggctgtgcgatgtgagatgtgactgttgctgacctgccgtccggggactgtgccagcgtgagacaggcatctgggagtgcccctacaaacgtgtgagattgtttccccgcctgccgcctctggagttctgtctgtaggcgtgcccgtgtcactgtgtgacggtgaccgagcgtgctgtgggctctgtgtggctgtgtttcacgtctgtgcgtgcagccttagtctggcttttcctttctgtaacatcactcaggcctgtgtgtttatgtgcatctatctttctgtgtggctgtgacccattctgggtgattgcataggtgcattcctgggttgcgtgtcctggcactgtgcgcgtttttgtgggtctgtgtgtggcccaggtccgtttgcctggccactttttcctctggg

SEQ ID NO: 23376 - DNA, 1011 bp, Artificial sequence
  DNA replication origin
agcgaccaggaaataaaagacgtcctggggccgggcgcggtggctcacgcctgtaatcccagcactttgggaggctgaggcgggcggattacgaggtcaagagatcgagaccatcctggccaacatggtgaaaccccgtctctactaaaaagacaaaaattagctgggcgcagtggtgcgcgcctgtagtcccagctactcgggaggctgaggcaagagaatcgcttgaatctgggaggcggaggttgcaatgagctgagatcgcgccactgcactccagcctgggcgacagagcgagactcggtctcaaaaaaacaaaaaacaaaaaacaaaaacagtaagcaaaatagattcgcctgattttgcagaggttaatcaagttattaggcacgtttttaaaaaagtattttgctaatctttttcaatgaattctttctgggtgttctgaaacccagccaactccttggaggtcagggaaggcttcccagaagagctttattctgaggcttgggcttgagcataagcaggattaacaggtgaaagaacagagagacagctctccaagcaggggggatcagcgtgccctgaagcaggaagaagtttgtcaaccggaggccagcactcagggaagggaagaggggaggaatggctggagtctccatcctctctggaaagatcgctccggctgctgcgtggatgagggaccacggggcagagggctgagggagaccagggaggaggctgctgctgttgtcccggggagaggtgaccagttatggggatggagaggggaacatggaataagataccaagaaggcaattctggcttgacttagtagtaggaaacttttcttttagccaaaatctcatctcccggctcccacccccaacctctgcatgttgcacaagcactcgcaaacgcagtggtcccagcctgccccgcagcttagcaaatttgtcttactgcccaacaggaaacccacgcagcctcctggattcttccccgtccct

SEQ ID NO: 23377 - DNA, 1746 bp, Artificial sequence
  DNA replication origin
ggtgtcctgggaacaatgacaggagggggagggactgacagacctggggagtgcagacagaattggtgttgccgaaggactggagcccgtcagtcctcccacctacgggcccaggcctccaaccctaaaggacgcagaaccttccagaatgcccgcgcgggccctggagaccccaactagggcatgaaaaagccgtcacgggcccaagctggggaccctggtcccggcctcttcggcagccccgccccccaaaatctcacctgacggccgccccggtccgcaggaagcgctggatggccctgtcggccgcggtcatcgccgcctcggcccgggagctcagcattgcagccgcaccggaggcctgaaaccgtctcctccgctaccgccgccgccgccgccggaccgagggatacgacggttcccgagacagcggaacctgcggccgcagtcccagcacctcgggggaacgtagaccgcaggacagctcccagggggaccggaagtagctgcccccggagagcaatagctgacggaccacgtcctttctttcttttcccttagcaacaggccccggcgtcggttgctacgctgggctcagttgcctggggctgcttggttttcagatttgcttaggctccattcataaatacagatggcacacttctaggatggaccctgggtcatgatttgaatttttcgatgtggggaagggaggccaacagccgaaagtcgggtcaggcctctgctataattagttattattgtggccagagtggaaataggtcgcagaggaaggaactttaatgagcatgaggcccatctctgacgatatcagtagagaaatcaacgtctttaatagccaacaaacttattgtttacttgggtgccaggtatagagctaagtatgttacattcattatttacatttaatattcacaccaactctaacattacccacattttacatcccagggaacccaggaaatttgaagaaatagtaagttttttgacgcagcttgtaagtggtgaaacagagattggcagttcggtctgtctgtctccagaatggcactctccaacagaaatatacaggagccacataggtaattttacattttccagtagccacattaaagtgaaaagcaggaggtaggccagacgccgtggctcacgcctgtaatcccagcactttgggagaacgaggctggtggatcacctgaggtcaagagttcgagaccagcttggccaacatggtgaaaccccatctctactaaaaatacaaaaattagccgggcgtggtggcaggctcctgtaattccagctactcaggaggctgaggcaggagaattgcttgaaccgtggtggtggaggttgcactgagccaagatcatgccactgcattccagcctgggtgacagaaccagactccatctcaaaaaaaaaaaaaaagaggtcaggtgcgatggctcatacttgtaatcccagcactttgggaggccggggggtgggggtggggggcacggattgcttgaggtcaggagttcgagaccagcatggccaatatggtgaaaccccgtctctactaaaaaatacaaaaatcagccaggtgtggtggcgcgtgcctgtaatcccagctactcgggaggctgaggcgggagaatcgctagaacctgggaggcggaggctgcagtgagctgagatcacaccactgcactccagcctgggcaacagagagagattcagcat

SEQ ID NO: 23378 - DNA, 982 bp, Artificial sequence
  DNA replication origin
gggaattcatttatataggcaacaagtatttattgaatgcctgcctggggtggggactgtcgagggcaatggagtcgtagcagcagacatgacttgcaggagtttcctgctctcttagagctggtattccagtgggggatgaggatagcaggcaggggtcggtgcagacagtaagcaggggatttcaggatatgctaacaagaaactagctggtgtaacatggcatggatagggagggcagaggaggaggagccaagctacagggggagactgctccaggtagggaggctcctctcaggaggtgaggtttcagcggagaccggaagtataaaagagagtgaagtgtgtggacacctgggtacagagcattccagacagatgaagaagctagggtataagtctggagatggttataaagctgccacctgtggagaatggcagggaggccagggcggggagggcggtggaggagaggggctggcgaagttggcagggagcagattgtgcagggactaggaggctgcgggcggcatcagcttctattgtgtttgcagcggggagccactagaggactttgaactggggactggtttgatctgacttgttagaaaaggaaggctggaggggcaagaatgcaagccgagaggaaaggtgggaggccgctgcagttatctggccgagatggtgtggctcagactggggtcgaagcagggtagctgagagtcctcaggaatttagggcgtattttggaggagggtccttttttcaggactgctgctgaattggctgagggtgggttagagttcagaggggtggaggcagctttggataattggttggggagtatgccctgtggaggagctcttttggcagagacctgaaggataggaggtagccgtgcgaaggtctgagcacagcccgaaatgggaataagctggatatgttcaaggaacagcaaagaggccaggggccgggacattgt

SEQ ID NO: 23379 - DNA, 969 bp, Artificial sequence
  DNA replication origin
cacattttaaatttcccatattttccaccgcttccctatcgtgtgtgtattcaagcatatcaattgctgccaatatgtaggggtgtcccatattggggagcaaagcagaagagaggctttaaaaatatatatctccgcagctcatttcggctgccgaagctcagcggcgggtcggaggtaggccggcccgggggcggggctccgtccggaaggcggggccctcctggggcggggtcggtgtgggggcggggcctgggtggggcctaggcgggcgcgatggcccgggactctggcgcgcagggtgcatttcgggatggagcaagcgcagcgcgaagttgggcgcccgccggctgcagcagaaccccgcccgcggcgctctaggactgcatctcggcctccgggtcgcgacctggctgtcctgctgggtcccgggcctcgggtcggcttcaggcggttaaggggtgcatgctctgcacccctgcgggagcccggtgggattggcctgcggggtggtcaacatgagtcctgccaagtgcaagatctgtttccctgatcgcgaagtaaagtaagtaagcctgcaattgtaatgaccatgatcttttacaaacttacgcagtcttccttccccttgaagtcaagctgtgtgtcctcttagcaccgccccctttacccccacccccatccaaagaaacacgggcttgagttggctgctggggagatgatgcccgccttggaaactctagctggccttggcgggaggggaggaaggaggctggacgttgggggtgacgttgcttggaggaggtcgcttcggagcacacaggtgcctaaagatcagcccttgcgcaggggcacgccttccccgctttctctccttcgcctccagaagctgatggttgtggaaggcaggtctcttttgaagctgaagcctgggcaaatcgacgtgaacttgagcaggctctcattgag

SEQ ID NO: 23380 - DNA, 761 bp, Artificial sequence
  DNA replication origin
ctcaaactccaagcctgaaccaacataaaagcccaccaaagcctcagttccgcccccaaagccatcgaaggattcccaggaaggaggaaaagggagcagagggaggcggccccgcagcccctgcgcccgggtctctaccctggaaatgcaatgcccggcattgcccgggaggagggagcaaagccgaccctgcaaggcggtacctggagccgatcctcgcggggccgccgctgccggcgctccgggggtgggcaggggttccggaggggggctccctcgcgctcgcccctcgcgttccgcaatttggccgccgtcgcagctcgaaccgtttttaaatttccctctctggagctgtccagctcagagcatgcgcagtagccgtgcggggggcttttccccaagggtcagttacagggcagggtcaaggggattgcagcgggcgtttcccagcagccgcgagccttgcacgccccggggttctggggggggggtgtgtgtgaggggggcggggcggaggagtgcaggggtagggacccctcttcaaactttgccaacagtgacaacaactgcatgcccgagagcatgcgttgaggagcagtgggagggtgatttcggccaagggaattaagttgcaaaaggaggctgggtgcattaaaacttgcaatcccgcctggggcaaaggacgtgggcgggcggagagatctgttgcaaccccctctctcccccaaagtggaggacgggccgggaggcagagacggggc

SEQ ID NO: 23381 - DNA, 1280 bp, Artificial sequence
  DNA replication origin
ggacgggccgggaggcagagacggggccccaggtggacgcggattcggtccacctgtccctttaagaaagttgcgcccgcgcgggctggcgcgcagcgggagggggctgcggagcggggcgcggggcgcctccacctgctggggccgcgagggggggcccgggcccagcgcggcggcgaggcgaggagggctccccgggactgcgcgctgcgcccccctgtcccgcgaggagggtgagcccgcccggagcgagtgcggcggggctcggcggccccggcagccgcgacgacggcgacggcggtggcggtggcggtggcggcggcggcggaggcggaggctgcggcgttcggggtacggcgccgcgagcccagcgcagccgttgggggcagtggcccgcgtgtgcaaccgcgctccctcccttccccgccgcccggcccgcgccgccgctgccccgccccgcctggagccagccgcgggaaaggtggcgcggaccgcggacggcggcggggcccagagcgggcagaggtctccacaggccccttaggaggcttggatgagtttggtcccctggaaagtttgcgtttctggcgccctaactctcaagcctccgttgcagtaattgccacggcagcaacgatattaggcacggctacccccattctttcgttacttattgacgcctgcttctgggttcttcttcgcatcagcccttgatgacatagcatggtcctccttttgcatggggggaacccaaagccccgagcggcagtgagtgggtcggcggcgcacgggcagagcgcgggctcccgcacctccccagctcgcgtactgcacgtggacctctgcgccgcccccaccgagtgaggctcaggcacccgaagcgtctggagttgttttgaggctgtcctcgcgttatctacttcgcagcaggcaggggaccagtgtccccgcacctgtgactgtttttttttttttaaacccagtgtttaagttcaggaagaactcagggctcccctggactgggtgtgcctggatttcaagttctattcaggtgggctgtgaccttggcactggtccatgtcctcacaaatggttttctggtagcacctggacgtccttcctcctttcttctctgccaggagtaaatagatcagctttcattctctagggaggaaaaagatgtagtttacagatgttagttgaggtcacagtcatgaaactttctcagttttcatctcccgcgaccagcatgtatttaaaatgtgtgttttgaccggtta

SEQ ID NO: 23382 - DNA, 1648 bp, Artificial sequence
  DNA replication origin
tctgccagacccggggcagcagccgacgcactaccgccatcttgccccgcggtgttcgctttcagaaccccgccaggaagcaagcatccagttccggaaaatgacagttccgcagagcttcttcgcccgggaaggaaaacttccccacaccttgcctcccctctggcagctgaaatagcggaggtgggataaatgccctccccagccgagaaaagctggaacccactccggccggggaggctggaaagaaaactggcccctaggcgcacaacggacggcttaagacgttgccctctgcggggcggaagtggggtgcggacagcggaagttatcgctccggccccgcctccgcccccggctggcgtgagctgggtgtttcctgcctctctcagtccgggtttggagactcctgcgtcctccgacttttcatggtagggagggcggtgcccatggactaggggttgagggcggccgagggagctgggcagcagcagagtataagaagggaccgagaggagggggtgtgatgaggggcagtcacgatagtggagaggcatttgggggattggttaggggaaaggcccggggtgggggaagggctttgggtggagaattaggggcgggggtggtggtagggaggctccctggcggttaggaatccgggaagcacatttgggcttgcggagtagatacgtgtgtgcgtgaggaaggggtgtctccaagtgagtcctgagtgctggttggagatgggagttggtgattgcgaggagaacaaagagatatcaattgaaaacggacatttgggggtggaaaatgaggatttggaggattatgaaggagaatgaatgggcaggttatgagaaggtgaggtaggattccttggggcggagcgtttggcgttttggaggttgtggctggagtcgctgagtttccaggaagtggggaaggggctcccaggtgcgtctgaacacacggcccagtgagggaaagaaatcgagagagcccagcaggctgatgtgcgttcagtgcttggaatcctggggagagatgccaggggcctgaggttaggatacctgcgccacggagttcagtgcctcagctggcgcctgggtacctatctgtaacttccattgaggccagaggtgaccacgcctaaggagcggaggatgtttcaagatctgtctctcagctgtggggtttgtctgcttgggatcctcaagggtctgttccctgagtagctcattgtccctgggtagagatgaccaaagattggcccagatcttctttctacttgcttgcttgtttgtcacgtccctggaaagtgcagtcttaagggaaaatcagtcccagtgacgctgctgaagaaaagtcagttatcctgtagctgacgttgactagtccgctccattttgtgcaaaataaggaccagcggatgggaagaaggcagcataaaccagtggttctcaaactctggtcccaccagcagcaacacctggtaacttattcaaaatggctgaaatttcaagccctgtcagagactactgaatcagacattcttggggtggagcccatctatcggttttaacaagccctgcaagggattagactaatgatttcttgatttggactgtgtaatgaaaggggcaaa

SEQ ID NO: 23383 - DNA, 1138 bp, Artificial sequence
  DNA replication origin
ggtggtgatggtgatggtgatgatggtggtggtggtggtggtgatggtggtggtggtggtgatgatggtggtaatggtggtgacggtggtggtggtgacagtggtggtgatgattgtggtggtgatcatgatggcgatggtggtggtggtggtggtgatggtggtgatggtggtggtgatgatgatgatgatgatggtggtggtgatggtggtggtggtggtggtggtgatggtgatggtggtggtggtggtgatggtggtggtggtgatggtgatggtggtggtggtgatgatggtgatgatggtggtggtggtgatggtgatgatggtggtggtggtgatggtgatgatggtgatggtggtgatggtggtgatggtagtgatggtggtggtgatgatggtggtggtagtggtggtggtgatggtgatgatggtggtggtggtgatggtgatgatggcagtggcggtgatggtgatgatggtgatggtggtgatggtggtggtggtgatgatggtggtaatggtggtggtgacggttgtggtggtgatgattgtggtggtgatcatgatggcgatggtggtggtgatggtggtggtggtgatggtgatgatggcggtggtggtgatggtgatgatggtgatggtggtgatggtggtggtggtgatgatggtggtaatggtggtggtgacggttgtggtggtgatgattgtggtggtgatcatgatggcgatggtggtggtgatggtggtggtggtagtggtggtggtggtggtggtgatggtggtggtggtgatagtgatggtggtggtgatggtggtgatggtggtgatggtgatagtgatggtggtggtgatggtggtggtggtggtgatggtgatggtgatggtagtggtggtgatggtgacggtgatggtgatggtggtggtggtggtagtggtggtggtggtgatggtggtggtggtgctgtggtgttggtggtggttctgtggtgatgacggtgatggtgctgtggtgatggtggtggtggtgatggtggtcacaatggtgataatggtggtggtggtggtggttatggggatggtgatgcttctgccaagagagcctctcaacacagacagtgtgattggtcaagctatg

SEQ ID NO: 23384 - DNA, 2112 bp, Artificial sequence
  DNA replication origin
ctaccctgttgacatcttgatttcagatttccggcctccagaactgggagaggataaacctctgttgtgttaagccacccagtttgtggtactttgttatggcggccctagcaaacatatagtggcaatgaggatgaggtgtccagatggccagcgtggccaagggtttctccttcaaggcccctgagtctccctccctatggcctcttccctaggtagggcggccaccatctcccatatggaggactgcaccagcccctcctgacatcctcgccttgggcttctccctccatctgttctccactcagcaaccaggagattctttccaaccagcaccctggtgccttcactccactcccacctcccattcactcctgcacccactgccatctgctctgaccctccaacccctgcgaatgctgcccccaagccctggacaggcatttgtcccacctcgcaggcctccctgggatgtcaaacactgttctaactccctctttgcaactctctttgccctctgattctgagacacgttctctcctgttctcctcttacctgtctgatgtgtgtgtgtgtgcagcctcctccctttctgctgcctcttgaatgcaggcatgccccagggctctgccttctctctgctgctactcccacacacggtggtggtgatggcagtcatgatggtgatgatggtggccttaatggtgatgataatgatggtggttatgatggtgacggtggtgatgacggtagtgatgatggtggtggtgatggtggtcatgctgctgctgctggtggtggtgataatgatggtgctgcttgtaatgatggtggtggtgatgatgatggtggtgctggtggtaatgatgatggtggtaatgatggtagtggtgataataatggtcatgctgctgcttgtggtagtggtgataatgatggtgctttttgtgatggtgctggagtggtagtggtgatggtggtattgatggtggttgtggtggtgataatggtggtggtgatggtggtcatgctgctactggtgatgtggtgataatgatggtgctggttgtgatggtgatgatggtggtggtgataatggtggtgctgatggtggtggtgatggtggtggtcgtggtggtagtgacggtggtggtgataatggtggtggtgatggtggtagcggtgatgatggtggtgatggtgatggtggtggtgctgtgatgatagtggtggtggtgatggtggtggtggcaatggtgatggaggtgattatcgtggtgatggtggtggtggtgatggtgatgatggtggtggcagtgatgatggtggtgatggtggtggtggtgatggtggtggtggcaatggtaatggaagtgatgatggtggtgatgatggtggtggtgatggtggtggtggtgatggtggtggtgatggtggtggtggtggtgatggtggtggtggtggtgatggtggtggtggtggtgatggtggtgatggtgataatggtggtggtgatcatggtggtgatggtgatggtgatgatggtggtggtggtggtggtgatggtggtggtggtggtgatggtggtggtggtggtgatggtggtggtggtggtgatggtggtgatggtgataatggtggtggtgatcatggtggtgatggtgatggtgatgatggtggtggtggtggtggtgatggtggtggtggtggtgatgatggtggtaatggtggtgacggtggtggtggtgacagtggtggtgatgattgtggtggtgatcatgatggcgatggtggtggtggtggtggtgatggtggtgatggtggtggtgatgatgatgatgatgatggtggtggtgatggtggtggtggtggtggtggtgatggtgatggtggtggtggtggtgatggtggtggtggtgatggtgatggtggtggtggtgatgatggtgatgatggtggtggtggtgatggtgatgatggtggtggtggtgatggtgatgatggtgatggtggtgatggtggtgatggtagtgatggtggtggtgatgatggtggtggtagtggtggtggtgatggtgatgatggtggtggtggtgatggtgatgatggcag

SEQ ID NO: 23385 - DNA, 1647 bp, Artificial sequence
  DNA replication origin
gaggaggaggggccggtgcattctcgccgctgttctttgcaacctgcaggggccggtgtatgtccggcgaggagccggggccgctgcgggtgcgtgcaacccccgaaggagacaatccctccacctcggggcgaacccgggggctgcaagccgcgggcgggcgggcgagcgagaggaagcaacaaagacaggctgcagctggggctggcgaaaggggccgcggccgccgggctcccagcgcgggcggagagggcgccctgggagcggcgcgggccgagctgcagccttgagcggggccccgaggggaggcgcagcgccgcccgccggacgtggcgatcacgggccccggcgaagatgcgtcgcctgagcgcccgcgcggcccccgtccggggcgggcgtgacccctgctgaacggagacctcccctcccccccgacttcggacggcgcaggccggcgccaggatagccctcaccgacagcgccccttcccacccggagagaggcatcgacccccaaggagggcttcgtcaggcagcctctgccactcctgcatggctgcgacccgtcgagcggagcgtcgtggtagctgagacctggtgcccttcgacggcctggctgatccggtgagttgtgcggggcggggttctgcgctggagctgggggcaccccctggcgtccgggcagccaggattggacagaaggggtcctaggctgttgggggtcctgaagcagagataacccttgtccgcccctttcctccctccaaacacaacttgttcagatgggccagccgatgggagtggaggttggggggcccattcggattccgcgggaccctgggcgggttggttgccagagaggaaaggtcaccccacccgtaaagctaacaaaggtattggctgtgtcatccgaaaattccccgggaactccagtgtcttggaagggctggggggtggggggcacccaggatgggaaaacgttgagggtctcccgagcagcctctgagatcttcaagggaaatcacctcagagggggatttggggttccagaaacgcaggtggccacgtttgagaattgtgccccatggggctagaccttagagccctcgttcaaaccacgttcccacaaataactcgcagggacggtaggttccccagtgggggcacgacatgacgtcaaaccttagcctctgatgtcactggggttgccgtggcaacaccacttgccttgacccaaggccggagggggcggggtcgtggtaacaaggggcggggctggatgcctttgggtagtggaggggtgaaggcggactccccccacccctaccattgcagtcctctgacctaaatccttagcgccccataaggtgggggagggaggcagtgccagctgtccctgttgatgctcctccccgcaaggacaggtgttcagagctttgcccatgtagcctggcctgtgcctcggggctcaggcctcccagacagagcaactttctgttttgaaaagagatgctatagaagagacctccctgaaccccaccatgtacccagctggcaggctgaagttcccagggtccccagagagatgtgggcctccggccctccaataggctacttctgctggggaaaatgtgggtgcccctccccc

SEQ ID NO: 23386 - DNA, 1206 bp, Artificial sequence
  DNA replication origin
taacaaggggcggggctggatgcctttgggtagtggaggggtgaaggcggactccccccacccctaccattgcagtcctctgacctaaatccttagcgccccataaggtgggggagggaggcagtgccagctgtccctgttgatgctcctccccgcaaggacaggtgttcagagctttgcccatgtagcctggcctgtgcctcggggctcaggcctcccagacagagcaactttctgttttgaaaagagatgctatagaagagacctccctgaaccccaccatgtacccagctggcaggctgaagttcccagggtccccagagagatgtgggcctccggccctccaataggctacttctgctggggaaaatgtgggtgcccctcccccagccaaggaaggtgcagaggagctgctgcctgctgcacccctagtccaggggctccccatgctgttctaccccaaggtcaggggccttggccaacctggaactcctgattgccccctgctccttctggtgtttaagaggatttcaacgagcatattgtgaggctgcttaagtgaatggcgggcaagtgaggcccatcagtgccaaggtctgaataaactgtgtctctgtcagggcacccccaaccaacacacaccccagtactggcacgcttccctgcaaaggcccagagaacccccagcaagcatcctgctgctggctctgggattcgtctaggtcccttccagcaattattgccagtgtcgggtgctggtgaaactgctgtgatcacatttctaggaaaaggttcgaaaactgtcattgcctcagcagcgtggggcggggtaagagcagagaaagtgtgtgttcgggtcattaggagaagccaggccccagtctatgcagcgagcattttccctgctcttctaccaagctctctagctagattaacaggtcaataaatatcggtggagctgcttttgggggcttggcagggagatggtatttccagctgaaatggtgtcgttaaacacacaagcttccaaggacagaggagcaacagcagattgggggagagccgggagaggtgggcagaagggctgtttgcgctgcctctcgaagcttcccagtttagaaacaaactcggagtgcgcgccagagattcacaaacacaggcagttggaggccctctgccgagtatttacacttccacagccaaggc

SEQ ID NO: 23387 - DNA, 1373 bp, Artificial sequence
  DNA replication origin
ggtgggcagccccacgccacagttgaggggtgacccgctggcccgctcgtatgcccggcccccgcaagcctcaggggacttgctggccaccgtgctcccactgtaggcacgcagtggctggggcggcggtgggggcggtttctgcggccacagcaggtaatccaggccgctgtctgcgtaccctgcaggcttggcggccccagccaacgtcaaggcttgggtggctccctggcccagctcagtgcctttccggcagtcgggcagaccggctgcagccgagtaggccatgctggggaagctgggcactgggccgtgcttggcagggctgggatggggaatagccatgccctggcaggcagggggtgcggcgcccggggcctggcactgctggttgagctggtacaggaggctgtggatggagggcaggttggaaggtggcaggggcaggccccggcccggcagggggatgacggaggcggcagtggcggctgcgggcaggccgggtggtggagcaggcgcctcaggtggcttggggtaggccaagggacccagagtgctgggcactgggtagggcgcaatgcccacctgcacggcggccggtgacagcttggtccgcttgccctcggcgctcttgagcacacttttggcgggcccagctggtgcggccgtgctggaggaggaaaccgcggccttgacaatggccagaaggccctggtagccagcggtgtgctgtgggtaggggctgtagcgctggccactggtgtcatagccattgactgtgcggctgaggtgcttgtgctggggcacacggatgttggtggggaagatcttgatggacagcgggctgttggccaccttctcggcataggcgtccagttctgctgggctcgggtagcgggaggaatgcatggcgctggccaccgcctcgcctgtgggaggaaagcaggtgtgagggcccatcaggaggccatgccaacctctccccacagggctcacgagtcccgccccctccactcatttcccattcattttactccttattccttctacatttttaaacttcgaatttcagtgtaaagtgcagggaactgcctgcatcataagcttgatggactttcacaaaaggaacacacctgttttatggtacccaggccaggagacaggacattgctaatcccctgtagggtccctgggcccctcccagtctctaaccacaccacgctaaccactatcctgacttctaacatggactggttgtgcctggtttgtgtatgtggtaagatggaattctacagtatgtactcatttgcacctggcttctgtcacttcatactatgtgagagtcatccaggtggctgtgtggggagtagtct

SEQ ID NO: 23388 - DNA, 1248 bp, Artificial sequence
  DNA replication origin
ggaggggagatgcccccgccgagaccaccatgaagggaatgaggaagagggcccccgtttggttctgtctctgctgctctagggatcgactgatggccgtgacctagcagccatcagcctgtgtgctaaatgacaatgtccatcttgaaagagctggaataggggaagcactgagggcaggatgctccacgcacaggaggtacccggaggttcctggcctgcttccctcccgggctgcaagcctggtcagctgggaggagacagcccctttcactcctaaggggaggaagaaagaaaacgaaaacaagagctacaaaagcaacccgacagctgagacaccatctgtgttttcctttttcttctttctcttcgtttttaaaacaatatagtgcagactgcacttctcacagtagaatataatggtcaattttagtataaaaaaaacattctcagagatttgtaaatgcacttagtgcttgaccaggccttggagagagatacagtaccgcttccagagcgccagaggggccaggacttgaggacttcgtgaggggactcctgcctatctttccctgccttgatcgtgtgggacaggccttggagggtggtttgcaggaaaggagttggtctgggcctcccagttaaaaccaggagggtcccaagagatccctcgaagaaggcaaggatgggatctaagattgcaggcccactgttagcccctgtggtgcctttgtgcgaacaggaaaatgacgccccttcctcaagatgcagaaaattgtaataaatatacaagtttgggtgaaagtggtgtctccttggacaaggtgcccttgtgcagtgcacagcctgaacaactgtacccagcagccctataagatgtattggagggaagggggaatatggtagtccagggtttggagaatggggatgggggtgcaactctgtgttaggaaggaatggtgggggtaggggaaggaggaacagggggactggtatagtccctggagcctctgtcagagtggtcttcacctggctggtggggagacactttgggcccagtgacttcctatcggcctcctgtaccccttttccagaatactggggagccagtgtggggagacacagctgcctgacccctgggggggctgccctgcccccaccctgactctggtgcgcctgtttcctcctgcaccccaccttggcctgggcccctgtcccaggaggcccagaaagaaccattcctgtttt

SEQ ID NO: 23389 - DNA, 1497 bp, Artificial sequence
  DNA replication origin
ccgcatttcagcagtgccttctggggtgtccccccacaccctgctttggccccagaggcgagggaccagtggaggtgccagggaggccccaggaccctgtggtcccctggctctgcctccccaccctggggtgggggctcccggccacctgtcttgctcctatggagtcacataagccaacgccagagcccctccacctcaggccccagcccctgcctctccattatttatttgctctgctctcaggaagcgacgtgacccctgccccagctggaacctggcagaggccttaggaccccgttccaagtgcactgcccggccaagccccagcctcagcctgcgcctgagctgcatgcgccaccatttttggcagcgtggcagctttgcaaggggctggggccctcggcgtggggccatgccttctgtgtgttctgtagtgtctgggatttgccggtgctcaataaatgtttattcattgacggtggagatggcaggatgatggcaggggtgggagggatggtaacaggcatgagactgcagcgagggagatgggagagctaggaaatgcctggggggagccaggggcaggggtgagagtgagggcagaagtcctgaccgggaggcatttagagtgttggtggttgggggctggactgggtggttgtgatggtggtggtggtggcctgagaggtggctgaggttggtgtggctgtggggaaggtgggggtggagggaggagagcagagtgatgctggtgggggtaataatgctggccagggagagtcatgttggcagggcgagagtgatgctggtgggggtgacagtagtgctggctgggggataatgatccccatggagacagtacatttgggcaggggagagtaacgctggccaggggttgacagtgcaggtgcggggactctggtgctcatcaggggacaattatactgggagggctgtcctgctaggcgggaggatggttgccaggcagcacggagcaggcgtggcagtgggtgagcctggagtgtcagcagggtgctgggtgtgcatgcgggtcgctgtggtgaggaccatggtggcaggggcgattggcagtgcttgtggagctgggatgggtgggggtcatggtgctcctggctaagtgggatggtgcctccttgaggactgcctgcctgtgtctgtccacagggccacatgccacctggagctgtgagccatgagccggaggtgaggctgaccctcttctcttctgtattagtctgttctcacgctgctgataaaggcatacccgagactgggtaatttataaagaaaaagaggtttaatggattcatagttccatgtggctggggaggcctcacaatcatggcagaaagcgagaggcacgtcttacatggcagcaggcaagagagaagagagcttgtgcagggaaactcccctttataaaaccaccagctcttgtgacactatcacgagaacagcacaggaaagacctgc

SEQ ID NO: 23390 - DNA, 1762 bp, Artificial sequence
  DNA replication origin
ggagccgattccaactagagccctctccaaagaccgtctgccgctctatccggggatcgcgacacccattttccaggcgaggaaactgaggccctggccctgcacctcccccgcaggggaggccctcgctgggcgggcggggtgcgagtaggggccgccccttctagggcctgcgctcggcggggtccgcgagccggcgggtgggcggggagctggccgggggcggcgcgcggctggaacctgagccggcggaggagggacccgcgggcggacgggcgccgggcgggccggccgggattcaggaagcgcggatctcccggccgccggcgcccagccgtcccggaggtaagtggggcccgggcccgggaggggcggctcagccgaggtcccctcgcgcccctggggacatctccgtggcccgtccggctccggggggtcccgaggctccaaaatgcgggccaggggcgcgggagacggaaggcaccaggttccgcaggcgccagcctctcagctaagtgcccttgggccggacaccggctctttgggtctcggttttatcacctgtgaaatgggcaccaacgtggggcctggggtagcaggtctggggggagggcggttcggttccctgagaccccaagccagggaaccaaaggcccggagccttgcagcccaccttaggagacttggaagagggatttcgggggacctaaggtttgcccttggcccctgagcatgtcggagggaatttggagtctggagcttccaaaggcttcttcttggttactgagtcccggagagacggctgtttcctccaagaggcatgaaaatctttaacctctagttctgccctggactctcaggacgtcccgggggcgggtggctcctgggggtgggtagcgggggtgggggtgggggagagagagactcccacactccccgcttgcctggaaacaccaaccacagatgcattcatcgagccacccactgctccagcctgccccagctgttccctctgtctgtcctctctgttttgcagatggggaaactgaggcttaggtcggggatctagacaattgggatttaaacccagggactatccagccccaaagcccttcccaccacaccaggtggcctgtcctggggccagctctgcacacagggcctggtgcccccggggtgcttgggaagtggcagggcagaggtgggccctgtggctgttctggctcagcttctaaaacaagagcctctgctgggggcagaggggccgtgaacccctgaaatgttaggcagataccctgtgggagctttgttctgggatgctaagaaccgcttgaggatttaagctttgccactttggctccggagcaagggcagagggtaagtcgggactccccgggctcctgaggagggtgacgaggtgggcttttgggggaacaagggtagaaaggtcaggcctgggttatctgcggggctaagagcgggcctgtgtggggcccggggtgtgctctgcagtcccctgctgtgtgaccttggcctggtcccttagctgtctgagcctttgtgttctctcctctgtaatactggggtgcctgagggcaagcccccagggctgtcgtgaggaccgatgaccttccaggaacctggcacagccactgttggctgccatcaatgtttaaccagttgtcgttgccccaaacattttcttaacaaagagggtgaaaaaagtcaattggccatttccacatttctctagttcattctg

SEQ ID NO: 23391 - DNA, 1051 bp, Artificial sequence
  DNA replication origin
cggtgtccggcccaagggcacttagctgagaggctggcgcctgcggaacctggtgccttccgtctcccgcgcccctggcccgcattttggagcctcgggaccccccggagccggacgggccacggagatgtccccaggggcgcgaggggacctcggctgagccgcccctcccgggcccgggccccacttacctccgggacggctgggcgccggcggccgggagatccgcgcttcctgaatcccggccggcccgcccggcgcccgtccgcccgcgggtccctcctccgccggctcaggttccagccgcgcgccgcccccggccagctccccgcccacccgccggctcgcggaccccgccgagcgcaggccctagaaggggcggcccctactcgcaccccgcccgcccagcgagggcctcccctgcgggggaggtgcagggccagggcctcagtttcctcgcctggaaaatgggtgtcgcgatccccggatagagcggcagacggtctttggagagggctctagttggaatcggctccgattcgatcttgctccgtgacttcgggccgccctgggactgtgtcctagtctctaaatgggcgtcccggcccagtcctccacgtgtttgctcattcattcattcagcagacaatttcctccgaggcgttgaaggaggtccctaccctcgggtatggcccatagagatggttcaggggtaaataaatgtgagctgctctccttggtcttcacccagtgcttactgcgaagcctgcctcggagtaggccatcaatgttttgttgctgttgtttttgagacagggtctcactctgttgcccaggctggagtgcggtggcgtgatcaggaatcactgcagcctcaaccaccagcgttcaagcaatcctcccgtatcagcctccctagtaactgagaccacagacgcctaccaccatgcttggctaattttatttaaattttttgcagagatagggtctcactatgttgcctaggctggtctcaaactccaggctcaagcgatctacccacctcggcctc

SEQ ID NO: 23392 - DNA, 667 bp, Artificial sequence
  DNA replication origin
atccctgatctcatcctagggggtgtgaacagggacccccctcggtgggtcctgaggcacacaggacagtgggaagcggttgcttagtggctgaaaggtgcagttggaattcagaatatcctggatttgaatcctgatggcaccattggcaggtatctatctcctcgggtaaaaggctttcactgtgtgtggagcctcagtctgtcggtctgcaaaaggtaggggagaagacctgcccatgggaggggtggttgagatgaagatgatggggaggagggaagaggggctgagaggctggtgcaggaggggctgagaggctgggatttgcaggggtccaaccccacatggtggccttggctacatccatacctcagagacccattccaggcccccagggaccccgacattaactcttggcctaaaccaacccccagctgggctaaggggagggggcggggttggggaggggtcatggaatgaaggaagggagagagcaggggcaggacagcagggagtgtggggaaggagaggaaagaagtttctgcctggggagtgaggaggagagctatgcttgctgtcttttggactcagtagttcccattcgtaaaatgggcacaatcaaatggggaaactgatgcccacttcacagggttgctgggaagggaga

SEQ ID NO: 23393 - DNA, 1323 bp, Artificial sequence
  DNA replication origin
cccctacagcgaagacctatttggcacttacggcctcggtactttacacacaccacctcatcgactcctcacagctgccctaggagatcagcatccccgtttcacagctggggacactgaggctcacgaggtgaaggaggggaactatagcctccaggtaaccacaaccatcccagagctcaggacactgtgggaactaccacccctaacaagccttctttgcccactaagtcggactgtcttaagatctcctgtctttgggtttcaggtggactctgccctgggggctggtattttcctgcaaggccaccaagtgaaccagcaggacaggacagagcccacatggagaaggagaatagaggctcaggttgcaccctttacccgggacccaaaaggcaaagggcaggggcagtggtgctggcttctagttcccattttccatctggggccttggctggactgggctaggctgagggagtgcgggaagagggtctgaaagtggaccgccttcccaatgcgcccaggaacttccacacgacatacaggggaggggcttcctctcgtagagcccaaactgagggaggaattggtgccaagctctgtatgtctgatgtcacctcacaaaacagctcccccgacaaccctcacccctgtcctaaaaggaggaaaaactttaggtggtttcccctagaaagaggccctggaattttgcaactccatcttcaaaaccctctccttgtccccgcctcaccaggcttcctacccttggagggggagatgggagtctttgatctggaatgggcgaattctgagggaagaaggaagggtttgtaggtcccatgagggagaggctggaagcgttcaaagagaaggcttatgaaatggggggattcattgtaaggggagcgagttgagagccatcagaaagcgccagggatgaaggactttggggaagaaggggcaggaggctttgggggagatggtggattacagaatgcctaagggagatggaagatcatccgtgttgggggcacggatgatcagggggcatttgggggatatgtaggactgtgaggtgtctagggagagggaggatttggggaggacaggcaggatgtgacatgtttagagcggagaggacttgggagtggtccgggaaagggagaatttagggtgagtggagggaaagaggatcttgggtgcctggggaaacagtacttaggggtgtctagggcagagatggttaggggatgctcgggggaaggaggattcgggtgcgcgtggggctgcgggccgcctcccccctccattccggctcaccga

SEQ ID NO: 23394 - DNA, 1063 bp, Artificial sequence
  DNA replication origin
ggtggagggtgggggaggggtgggaaggatggcaaatgtttattctggaatgaataagaggctctcaacaatggtgtgttagatttttgcataagctgggcattgggtttaggacataagcatctaggtgggttgtggctgagatgacttgtgattcaaggtgtgagaagctggaccctgggctgttggagagacattaggtttgggaaacaagtgtccaggttgtgggtgaattggtataaactgggctggctccagctgttaccagtagaaggtgtccaggtacttggcatcttggagaaaacacacaaacgaagcaaggaaagcaaaagcaaggatttactgagaacgaaaagtccaccccacagtttgggagcaggcttgagcgtagaggctcaagagctctgcttacagaattttctagggtctcaatactctagaggtttcccattggttacttggtgaatattctatgtaaatgaagagaatgaagtgaagtcacagagtcatttactcagaatgtgccctattgcaaatggagaggatgtgcaaatggagaggatgttacttggtgggagaggatgaatgtgaagttacaaagtataaatggagaggatgtttcttggagtgtgtggtctgtgtaaatggagaggatgaatgtgaagttacaaagtgtaaagggcgtgaatggagaggatgaagtgaagttgcaaagccgtttacattcctgtcattgctaaggtgctttttgatttaggtctaggaagtcagccttatgttccctgcctccaggccctatttttctgcctcacaacaggtaacatcagactgttgagggcagactggaccccagatttcgggaagcaggagttgtccagcagggcagtggctgagttagactgtgacttcagcagtgttcaacaggtataaggtcattgaagaccaagaatcaagcaatcgagcgtcctcgtcggttgtagcgaaagagaaccgtgaccaacaggagagcagtgtccacccaggtcacttggggttactggggtacaattttgggggaaacggg

SEQ ID NO: 23395 - DNA, 1231 bp, Artificial sequence
  DNA replication origin
gctcctcacttcccagtaggggcggccgggcagaggcgcccctcacctcccggacgaggcggctggccgggcggggggctgacccccccacctccctcccggacggggtggctggccgggcagagaggctcctcacttcccagtaggggcggccgggcagaggcgcccctcacctcccggacggggcggctggccgggtggggggctgaacccccacctccctcccggacggggcggctggctgggcggggggctgacccccccacctccctcctggacggggcggctggccgggcggggggctgacccccccacctccctcccggatggggcggctggtcgggcagaggggctcctcacttcccagtaggggcagctgggcagaggcgcccctcacctcctggacggggcggctggccgggtggggggctgacccccccacctccctcctggacagggcggctggcctggcgggggctgacccccacctccctcccggacggggcggctgccgggcggagacgctcctcactttccagactgggcagccaggcagaggggctcctcacatcccagacgatgggcggccaggcagagacgctcctcacttcctagacggggtggcggccgggcagaggctgcactctgggcactttgggaggccaaggcaggcggctggggggtggaggttgtagcgacacgagatcacgccactgcactccagcctgggcaccattgagcactgagtgaaccagacaccatctgcaatcccggcacctccggaggccgaggctggcggatcactcgcggttaggagctggagaccagcccggccaacacagcgaaaccctgtctccaccaaaaaaatacgaaaaccagtcaggcgtggcggcgcgcgcctgcaattgcaggcactcggcaggctgaggcaggagaatcaggcagggaggttgcagtgagccgagatggcagcagtacagtccagcttcagctcggcatcagagggagaccgtggaaagagagggagagggagaccgtggggagagggagaccgtggggagagggagaccatggggagaggcagaggcagaggcagaggaggcagaggaggcagaggaggcagaggcagaggcagaggcagaggcaaatttttctatttttagtggagacagggtttcatcacgttggccaggctggtctagaacgcctgacctcaggtgatcctcctgcc

SEQ ID NO: 23396 - DNA, 1072 bp, Artificial sequence
  DNA replication origin
agggaggtgggggtcagcccccgccaggccagccgccctgtccaggagggaggtgggggggtcagccccccacccggccagccgccccgtccaggaggtgaggggcgcctctgcccagctgcccctactgggaagtgaggagcccctctgcccgaccagccgccccatccgggagggaggtgggggggtcagccccccgcccggccagccgccccgtccaggagggaggtgggggggtcagccccccgcccagccagccgccccgtccgggagggaggtgggggttcagccccccacccggccagccgccccgtccgggaggtgaggggcgcctctgcccggccgcccctactgggaagtgaggagcctctctgcccggccagccaccccgtccgggagggaggtgggggggtcagccccccgcccggccagccgcctcgtccgggaggtgaggggcgcctctgcccggccgcccctactgggaagtgaggagcccctctgcccggccaccatcccgtctgggaggtgtgcccaacagctcattgagaacaggccatgatgacaatggtggttttgtggaatagaaagcggggaaaggtggggaaaagattgagaaataggatggttgccgtgtctgtgtggaaagaagtagacatgggagacttttcattttgttctgtactaagaaaaattcttctgccttgggatcctgttgatctgtgaccttatcccccaaccctgtgctctctgaaacatgtgctgtgtccactcagggttaaatggattaagggcagtgcaagatgtgctttgttaaacagatgcttgaaggcagcatgctggttaagagtcatcaccactccctaatctcaagtacccagggacacaaacactgcggaaggcctcagggtcctctgcctaggaaaaccagagacctttgttcacttgtttatctgctgaccttccctccactattgtcctatgaccctgccaaatccccctctgtgagaaacacccaagaatgatcaataaaaaaaaaaagaaagaaaaaaaaagaaaaattaggccgggcacg

SEQ ID NO: 23397 - DNA, 1354 bp, Artificial sequence
  DNA replication origin
tccctcgccctcagccgcccgccgggagggcaggccgcggcccccgagccccctccccgctctcttgaggcgatcagaggccccgcccgggccggaggagggggcgcccggcagaccactgagggcggaacgcggcgagggaggcgagccggcggggcggtgcgcggcgcgctcgcccgggtccctcagcgccgcacgcccgacagcggcggaggaaactgcggcgaaggaaaaggaggtggcgtcggggacggctccgcggcggctgctctaatagcatttatcggccgctgcctcccctttcgccgccgccgcggcatgtggacgccgctcattggccgagagcgcccagcgcggcgcgggcggcgcggccccgccccctcctcccggctccctcctcccgcgcgcctggcgcccacgctgccgcgcaggccccgccccctcccgcgcgccgcccctaggaacccggatcgaggccgcgcgcgccgcggtcgcggggctggcggaggggaagctgggtaccctcttctgtgcctgcggttctctgacccacccacctgcagacgcagggtggggcgctcacagtgggcacgctgctctggggccggtgggcggatggttggaaggcgaggccgaggagctgggagcgcggtccacgcggggcgtctcgaggcgccctcgggctgatgtccttggctcgcctcctcgccctcggtcgcccgggctgcgctctgcatcctaatctggctccttcagagcccccctcagaaaccaaggggaggaattccgcagttcacttcccacacaacccaaatccttcatctgtcgcctcgggaacaccgcatcctacaccccctgccgccagctccttcgcacgccagccccgattcttccccagcgggttctgggccctgacgagggaacccccctcgcgggggggagggagaagagttgattttattattaatagctgacgcagcgcttgataggtgtctgcagggcagtcacagttcacgccgctggagctgccacacagcagctagacttgggctaggaggtgcttcgctgtggctttcagatgaaggccatttcatagactcacttccctcgacaggagaaaaggggacttgaatccaaagctgctcttaaaccacagatgatttgctctgctcgggaggacaaagcgcaggtcacagcaagataaagggaattttgccaatataaagaagctacattacttaacaaggggatgggaaattgcatggaattcatgaacaaaacatgaacatattctcttcacaaagaagagcagctttcttcacggagtaggttgcagaatgaagcaattagtcca

SEQ ID NO: 23398 - DNA, 710 bp, Artificial sequence
  DNA replication origin
ccgccgcggagccgtccccgacgccacctccttttccttcgccgcagtttcctccgccgctgtcgggcgtgcggcgctgagggacccgggcgagcgcgccgcgcaccgccccgccggctcgcctccctcgccgcgttccgccctcagtggtctgccgggcgccccctcctccggcccgggcggggcctctgatcgcctcaagagagcggggagggggctcgggggccgcggcctgccctcccggcgggcggctgagggcgagggaggccctcccttctggcgaggggagggagggtgggtcaggagcccccaacccgccctgcggagctcggggccgcgcgaggggcggttgtctgggggagggggcgcggggtgattcagcgcccggcgaggcggaagcggccgcaagaggaggaggggagagcccgtccgcgcctgggctcccggggtggcacgagcccgcggccggagtgcgaggcggaggcgaggaggccgcggggacgggaggcgaggccggccgggcccccgaagccatggagaacgcgcacaccaagacggtggaggaggtgctgggccacttcggcgtcaacgagagtacggggctgagcctggaacaggtcaagaagcttaaggagagatggggctccaacggtaggtgcagggcgctccgctgcaggggcccggcgcggccgggagagccagggaagatg

SEQ ID NO: 23399 - DNA, 841 bp, Artificial sequence
  DNA replication origin
gcccccaacccgccctgcggagctcggggccgcgcgaggggcggttgtctgggggagggggcgcggggtgattcagcgcccggcgaggcggaagcggccgcaagaggaggaggggagagcccgtccgcgcctgggctcccggggtggcacgagcccgcggccggagtgcgaggcggaggcgaggaggccgcggggacgggaggcgaggccggccgggcccccgaagccatggagaacgcgcacaccaagacggtggaggaggtgctgggccacttcggcgtcaacgagagtacggggctgagcctggaacaggtcaagaagcttaaggagagatggggctccaacggtaggtgcagggcgctccgctgcaggggcccggcgcggccgggagagccagggaagatggctgaccgggctccacctcgtgggcttcggctccgcgcccgccgacagctgcgggcggagggtcgggccagcgcgccggccccgcgggagagaaaggggctgcggtcctcgcctcgccttccctggacctcttcgcttctcgggccctcgaccttttcggcgcgcaaggctcggaggcttctctccagcagcagccggccccggtggagggagggacgtggcttctgcagctaggttgagcccggcaagacgttttctcgtcccctgccgatttatgaggagtcgaggtcgttggaaggcctctgaccgttcttgtcctacccaaagttacacatctggcagaagtgatgacatcgctgaaaccactcctaggttcaggagcccgaagtgatttcacgcttagggctagacctcaggccattgattacaaagagtg

SEQ ID NO: 23400 - DNA, 1815 bp, Artificial sequence
  DNA replication origin
ctcctgacctcatgatccacctgcctcggcttcccaaagtgctgggattacaggcgtgagccacctcacctggtcgtcttctactttatttaaaactcaataatgtattctaagatatcttaccatgacaggataggtagaactgaaccatatttaattttatggatggaccataatttagttatccaattccctattgagagatggctgaactattttctttctttttttttccagaaaaggatttttttttattcaagtaactgcaaataggaaaccagagggggagccccaggctgggacaaatcatggtcacccctccccaacagaacagggggaggaggtggcccctacgccctttatggttgattcgggaccccttgctcactctgctgcagcatcctaggggcagggccccaccttccctgggactggggtaggcggtcacccagcctgccatgccccagcccctcttccctacaaagagtatcttgcgggaggggatcgtgggcagaacaggaggcagtgaggatgaatatttggcgctggtagcagcagcaatgacggatgtggaagaatggaacattgaacaaaaaacaacacaactgttcagaggtagtttgtggacagaggaaaaatggaaccagaaccttgaggggcagggaagagcaggagcggggttgggagcgggcagggtgagctccttgctattggtgccccatctgaggagggggaaatggctgagtggcggaagcaaagtagggttaggggagcagccccagcccacctcaggcggcggacacagggctcgtgggcctcacctggacaataagtgactgcatctccatcaccacaatatgtactcgatcccaggcggagggcaagggggctgcggccacagtgaagagggagtaggggactcacccctcctgccttcctgtagccgaagggggctgtccaacctagtgcagggactagggaaggtggggaaggatgaaaagtgtgagccccacgtggtgacaaagacagtttggctgggggaatcctgggggccagcacccccctccattggccacacctgctgctgccagggcagtggagtagggcgtgccaggatgagatggggcttgggccccttttaaggccaggggaaccctcccaggccccactatgggaggccagagggaacagtgaagcagagagggcgcccccaaaccaaaagcccagagagcaatgtccccaccaccaacggagtggggacgcagcaggtgcagggtgcggctaagtgagatgctagccttgtccaggagggcatgtgtgtatgcgtgggtgggcggggggagctgggaactgaggccaggggaaaactgctccccactcagcccatgggagccctgcagtggctggtgtgctgcgtagtgtggtggtgtgggcacaggtggaagatgggggtggcggccagaggcggtggtgatggtgggcctgcggaaggggcgagggcggtgggagcggagcaaagctgtccagtcccagaaggcagctgctcctccagtgaggagcaggcggcacgcacggttcactgctcctcctccgaggactcttgcgagatgccctcctcttcctacttctccagttttttgggtctgccccttggtttccttcctggagttatggtggttttccgggtcttggcggcacccttgtttttgcttccctttggttggccccgaggtctcttaggtgttggcacttcgctgggctccttctgactccctacaagcgctgtcccaggactcatcggaggctgcttgcgcg

SEQ ID NO: 23401 - DNA, 977 bp, Artificial sequence
  DNA replication origin
cgattctccggcctcagcctcccgagtagctgggatgctaccacgaccagctaatttttgtatttttagtagagacggggtttcaccatccaggctggtctcgaactcctgacctcaggtgatccacccgcctcgacctcccaaagtgctgggattacaggcgtgagccactatgcccggccctgaaaaggtgacatttgaaaaaaatacaaaagaggtgattgatctcagattctggaacctcaagacccatctccattctgggcgctgcctcacgctgcaccactcaaggcccctgcctagtgctctggcgcctccttcagatccgcgcggccgctgcaaccagaagcggaactgcaaggccggaagctccacgtccgcacccgccccttccgtttcgcttccgcctacctcgcccaggctgccagaccggaagcgctccgctgtacctggatcctgctcctctgggttgaaacccgggcgccgccaagatgccggtgagggttcgatccacggtgtggggagacagcggggattgcgaagagcagagagaaaccgtgtgtgtgccgagagaagcgggcggcggaaggcagagaggaagctggggcccgagaaggagggaggcgaggggaggggaccggttgctgaaggattggggcggcccgggggtgccagtcgtgggaggcgggggcgcggcaggagtgggccaagggtccagggtgtgtgaggaggcccttttctctctccgtctactccttccgactccggcagggttcccaaagcctcactagagagcgaagccaagggctgcgctttttatttttcatatttcaagtccaggggtctagcttctcctttttctgtcaggcccacttcctcctccgccccggggtcaggctccctctgctgtttgtcatttgtcagaacccacttcccggcagcggcggccatcccggagccagctgggtttagggccc

SEQ ID NO: 23402 - DNA, 877 bp, Artificial sequence
  DNA replication origin
gcaggagaattgcttgaacacaggaggcggaggttgcagttagctgagatcgtgacactgcactccagcctgggtgacagagggagactctgtctcaataaaaaaaaaaaaaaaaattcacgtatctcctgatacaccaggatcctgcagtcggccaaggactgtgaagaacagaaaagaaacccaagactccatcccatctttaagaagtcttcagtagcaccagagacaaaaaggacggccatgcgggcggatcacgaggtcaggagatcgagaccatcctggctaacacggtgaagccccgtctctactaaaaatacaaaaaagtagccgggcgtggtggcaggcgcttgtaatcccagctactccagaggctgagggaggagaatggcgtgaacccgggaggcggagcttgcagtgagctgagatggcaccactgcactccagcctgggcaacagaacgagactctgtctcaaaaaaaaaaaaacaaaaaggatggccatgggtgcaacaggggccctgactgcgggttgtactgaacggcaaacatatcgcagttcttgcttttagggaataaagtagggagaggaagaggaggtagagtctccagcagtgacttcaacagctcgctgtcttcactatctaggaaataggtgtaaaaacctgctcaaaacgaaatagatttgtgaaaaaaggaacttcagtgtgaagaaaatgtcaagatcaaggcacctcggatattcagtcattggtctcattggcgattagaaatcctcgtttgaggtcgggcgcaatggttcaccccgtaatcccagcaatttgggaggccgaggcgggcggctcacttgaggtcaggggttcgacacaagcctagcc

SEQ ID NO: 23403 - DNA, 1314 bp, Artificial sequence
  DNA replication origin
ggcggcggccactgcgcgccgccctgaggagcgccccagcggcggcgcgactgcggctgaggagagagccggctccgggcctccgcgtcctcctgctcccccggccccccgcctcctcgggggggcggcggcggcgatgttctcggtcctctcgtacgggcggctggtggcccgcgccgtgctcggcggcctctcgcagaccgaccccagggccggcggcggcggcggcggcgactacggactggtgacggccggctgcggcttcgggaaggacttccgtaagggcctcctcaagaagggcgcgtgctacggggacgacgcgtgcttcgtggcccggcaccgttccgcggacgtgctcggtgagtccccgacccggttcccttgccccagcctcggatccgcctcccggggactccccgcgcggggcttccccagttcctcccggcggcgaaaggagccagagcgctcacatggagggagcgcttactatgcgccaggcgccgtgccaagcgctccgaggcgcgttttccgcttgaacgacccccattttagagaggaggaaactaaggcgcacagcggtcaagtcgtgtgctcaaggtcacaacccgagagtgtgaccggtctgtccgagtccagagccacactctcggtctcactcggccgtgccagccctgggcgacctcgtcccctccctgggcgacacctgcaggctcctaacctcgttctggttccctctccgcatgccccggggatccctgcctcttcgcgtgctcccgacaccacagcccggcccaggctgcgggatcgccggccgacaggcagtcgtgagcccccagacagcccggccgtattctttcgccgcctggatggtaaccaaatcttcacccttttcggagtgtggcggtgggggctgctggcttggcgaaaaaaccctcacagcgttttctcccaaattgatcttgtccacttgcggtcacttgggggttggcagagtctccttgatccaaaatagaatggtcgagcctacttgtagattgcagccggtaaagctctgaggattggtcacagccttttcaggccacaggtgctccctgaggcctattccagttataccttttgggggtgggagactacggagagagctggcagaaagggctaaatatagttcacaagcagtcagaaactttaccataatgtacgccttaggagattttgtgtatgctatgggatattgtgccgttaaaactctttgaatgaataaagcaatgcgctcgctttgaaattgaaggacgtgttgtcattgaacttgggttc

SEQ ID NO: 23404 - DNA, 1329 bp, Artificial sequence
  DNA replication origin
cccttcttgaggaggcccttacggaagtccttcccgaagccgcagccggccgtcaccagtccgtagtcgccgccgccgccgccgccggccctggggtcggtctgcgagaggccgccgagcacggcgcgggccaccagccgcccgtacgagaggaccgagaacatcgccgccgccgcccccccgaggaggcggggggccgggggagcaggaggacgcggaggcccggagccggctctctcctcagccgcagtcgcgccgccgctggggcgctcctcagggcggcgcgcagtggccgccgccgcccctgcccgacgcgcggggcctcgcacgcgctcagccgcgcgcaccggagccagagcgaggtcagaagcggcggctcctccgcctcagcccaactgaagtcccggctgcagcggccgccgccgccgccgccatcttccgctccactagcgtgttccgggcggtgccggcagcaccgccccctccctggccctgcccctagccccgccccgattcaccgctcaggcccaagcccagccccttgggctcgctgccttatgcagtcaccaaggttgaacatgcgcagagggtgcggacgcagtgtctcttgggaattatagtcccggagtcgtagtcacttttgacttggctgccaaagatttaggacctagggggattcctcagacgcgggacctatgttaagttagtaggaattgcaggtgggccacgtgagggttttctaccctgttttaaccgtatcttttaaagcctgttttaaataaataacgccaccattcctttaaacaaaaacctgcaagaaaccagaatggagtcacataatgagaaacagaggtacacagatctagtgacacctccccaagtaatatactggaaggatttagggcggcaaactgtttggaaagaagagactttttgtagtcttttaggaaaaattgagaaaatgttatgtgtccctatcagagtgggaggggacacagatggtgtcatgtcccttttgctaactggcctctagccatgctcacagctgtctcaagacctttgcccttgctttcgcttctaccctttggaatgtaattcgtttacctgagggtcctgtgttttctgttgctgtatccccagaacacgtgagcacccagtaaatatgtgaatgaatgaaagaatgaatgaatatttcactagattctaagtttcccaaggacaaggatcatttgctgctcaattattagaatctaaagcaatgcctggcacacagtaggagagtgtgtaaatgtctgtggaataaaagaaggaataatgggctgggcgtgg

SEQ ID NO: 23405 - DNA, 848 bp, Artificial sequence
  DNA replication origin
gagggataattctgaagtctatgtagaaacgggagaaaaaatgctgtcaagcagtgagaagaaaaataggctgatggctgacacattgcctgcaactgtacaaaactatctgagccattcctaggtgccaggcactgatttcccaggttctgggaaatccaaggtgaagaggaaagggcaagatcacgatcctggtagactgacatgttacctggggagacaaacaaggaagcaaggaaatatacaagacagaccacaccccccccccccagctaagcactgggaagccagccagccagagtaaggggccagggagcaggcggggtctccttaagtggggtggtcagggacaactcgacatttatggtgtgccctgaattacaagggagtatgtcacagattgcagagaagagcattcccgggaaaaggaagaacacgtgtgctgtgcacagcccctgagagagcggagtacttaggaggtggcggctggggacagcagtggacaggacagtggccagagagaaaaattgagaataatcacacagggcctgatcatggagagggcttggcaggcgatgctggggatttggatggaagtgaggggtccagcgtgatgaggcggcaagagatgctggcggcctggtctcagggtggaagtagggggtggaggggtggccggattcaggatatgctttgggttagaacttgtcgctagcctagactgtggggaagggacgaggagcggggtggtggatgacagctcccagggcccaagccccaatgactagcaaaggatcaagtctggggacaagaacactctggctttctccttcttgctaaacctgtgt

SEQ ID NO: 23406 - DNA, 1505 bp, Artificial sequence
  DNA replication origin
aggaatcaggagacccagaggcaggggtggcccggagacggtgggatggagcagaagctccccgaaaggggttggcggggtggattcgccccgctccagccggcggaggaaggaagtggttcccccgcccacccttcccttaggctggcccggggcaggatttttgtgatccgcgattcgctcccacgggcgggacctttgtaactgcgggaggcccaggacaggcccaccctgcggggcgggaggcagccggggtgagggaggtagggacgaacgggtggactgaccacaggcagggacaaggggactaagacccgggccgaggcctagaagcccgccgaccgttgggggtctgcgggctgtgggggcggggacgggggcgggggcggcccgggcgggggcggggcctggtacggtacggggcgggacgggctgggccggacctgctctgaggctcccagtcgcagcggtgaccgcgggcgggtggggcgccgggtaagtgctcgggccgggcggggggcgtaccccgtttggcgtgcagccctttctacaagacccccagtgcccgatccttccgagaagaggggacccccccccgcatctccgctgtccaggcctcgccgtggagccccagcaggaccccagccctcggttgccctcggctctggcgtgtcccggcgcgggcgggcagtgcttcccctcggcagggactggagtccaggggaggggaacgcgggagacgctggccctagtgaccccccgatcccggagagttggtggtgcgcgccgccctgggccaggtgccttcagttcttcacactccgcgcagcagccacaggtgaccatcgtcgtctccctcttaacaggtgaagaaaccaagacgcagagaggccaagccccttgccttgggtcacacagccaaaggaggcagagccagaactcacaaccaggtctgtgtcccctaagtcctcggatgcatcgtccctgccccgctgccctcccgggagattgtaggagagaagcaggggcagaggcagtgctggatgtcccgggagaaggctgcaatgagcaggcccagccatccctgaaggaggagccccggggaagcaaactcttccctagaaacactttaaaagcacccacctgttggagacagagatgctgaggaacaagagtgattggggccagggtaaacgccaagacagagaggggagagcagttcctcagtggaactccctccaacattgcccccaccacttttaccagtgctgggtgtgggggatcttgcaggctcagcttcgtgacttggcctgtctctgcctcagtttccgcatctgtcccatgaggttaagcatgtacctacctcgcaggattgctgagaagatgatataagatgcttggtgtacaggcttagcccctggcaccaggttactaccaaaagttcatggttccagtgcttcctccaccctccgtcctgcccctctgagagtacttctctgtcctgg

SEQ ID NO: 23407 - DNA, 1563 bp, Artificial sequence
  DNA replication origin
gcgcgactccacctcaaaaagaaaaaagaaagcctgctgcagtccaggcatggtgtttcacgcctgtaatcccagcactttgggaggccgaggcaggcggatcacttgaggtcagaagttcgagaccagcctgaccagcatggagaaaccctgtctctactaaaaaaacaaaaattagccaggcgtggtggcaggcacctgtaatcccagctactcaggaagctgaggcaggagaattgcttgaactcaggaggcagaggttgcactgagccaagatcatgccattgcaccccagcctgggccacagagtgagactgttgccgggtggagtggctcacacctgtaatcccagcaccttcggaggccaaggcaggcagatcacttgaggtcaggagttcgagaccagtctgacccacatggtaaaaccccgtctctactaaaaatacaaaaattagtcaggcatggtgatgctggcctgtaatcatagctactcgggaggcttgaggcaggagaattgcttgaacccaggaggcggaggttgcagtaagccaagatcgcaccactgcactccaggctggacgacagtgagactccgttccaaaaaaaagaaaaaagaaaagaaagccagctgcccagcagaattggggaaagccgagtcagttgaagcagacaatacccctatgggaggcagaagaatgcacccccctaccaagatatccacatcctaacccctccaaacctgtatgttgccttaagtggcaaaggggactttgcacatgtggctatgtgaaggatcctgagctggagagattagcctggattatccaggtggatcccatataatcacagggctccttagaagggagaagacgctgtgaccatggaggcagaggtcggattgagacagccaaggatcacaggcacctctccagccgggaaaagcaaggaacacactaccctggcgcctccagaaggcacagccccacccacaccttgattctggccctgtaggacccatctgagacttctggcctccagggctgtaagataacacatttgtgttaagccactaggtttgtggtgatctgttaacagcggcatgaggaaactaacacaaccccaaggaggtgagcctctccccacagccccgactcaaccggaagggagaggtgtgcagaagacggctttgcaggatgtttgggacaaatggtctctgggggaagacagaagctaacagaactgattcgactgtgtgaacagggtgctgggagggcccacaggggagggacttcagagctgggcctgcgcctgcggggccgtacgagttggcccggagcaaggcggcccaggacaggcaggggctgcacgcggtaaggctccctcttgccagtaccatcccatgagcagcctcagagccctcgaccaagggaagttctgagggctgagaggttgctcattcgtcagagcgtgctgcccaccctccacccctgcatggcagaaactgtgcaggggacgaggccaaggaatcaggagacccagaggcaggggtggcccggagacggt

SEQ ID NO: 23408 - DNA, 1065 bp, Artificial sequence
  DNA replication origin
aggatcccatgcggggacgcggttgcgctcagccatctgcgccccgcccagcgcccgggccccgccccctccagcgcccgggccccgccccctcccgcgccccctatggcccataaagaagtcccggccgggccgctgcactccccgcgcgcatccgtgcgccgcccgaggctgtctaaggagtcggcggccattttgttcttctcgtggttccagtggggagagaaggaggaagtagggagcggggtggcaggggggggacccgccgcggctgctgccaccgccgccaccaccgcctctgctcgtggcgtgggaaaggaggtgtgagtcccgggcgcgagccggcggcggcgccgctgcgggagggtcggcggtgggaaggcgatggcggatttagataaactcaacatcgacagcattatccaacggctgctggaaggtaaggggggcggcgggcggctgaagggggaggcgggcctgagggcggcaggcggccccgggggctcgagggaggggagttgggaggccggttgggcttgcagcaccgtggggagtgagctcctcgagttggcccacgggccggggactgcagccggagggaggccagcccgggattcccaacttgtcgccagctgcggaccctccaggctccgctcattcattgcacgaggatgcaggcttcctcccggccgtggaatttgaaaactccgctccccacccccacgtttcccgcccctacccgtttgcccccgcgcactggacgggtctttggagcgatggttggggatcccagtccagcctcctggacgacgtgtgccgtgctgtgcgagatggacttttcggtgctcgtcctctcggaaggcagtttgatgagggcatgagttccgccgggtttgggggctcttttcctgcttgcttttatttttatttttcgtggttctggggtcttggggggcccatttcttgttacttggtaacaagcgttcatgtctcaagaggtgtgagaacctgtcttcgcctgccctccaaatccttttaagttgttctaatcttggagaggtctcc

SEQ ID NO: 23409 - DNA, 1228 bp, Artificial sequence
  DNA replication origin
tggtctcaaactcctgacctcaggtggtcacctgctgtggtctcccaaagtgctaggattacaggcatgagccactatgcctggctggtgctagacctgagctcatggctccagggcccatgttttcaatcagtagtccctgaatgaaagtaagaaaggaaggaaggaagaaagagaggaaggaggtagggaaggagggagggaaggaaggaaggagggagggaaggaaggaaggagggaaggaaggaagaaaggaaggaaggagggagggaggaaagaaggaagggagggagggaagaaaggaaagaaggaaggacggaagggagggagggaagaaaggaaggaagaaagggagggaaggaagaaagggaggaaggagggaaggaagaaacagaggaagagggaaggaaggaaggaagggaaggagggagggagggacggagggagggaatggaaggaaggaagaaaggaaagaaggatggaagggagggagggaaggaaggaaggaaggaaggagggaaggaaggaagaaaggaaggaaagaaggaaggaaggaaagaagtgagggaaatgaaggaagggaagggaactaggtgcggtagcccatcaagtggtcatgcctgtagccagccaggtttggagggaagttgtcatctttttcagagctgggagcccagcctcctgggtccctgccttccctcctgctgtgtggcaaccagggttatacaacagcttggggaaacttttaataatagaacgtgcccaccagcttgctttgggccactgcaaagcagggagggagccaggagggagccaggtttgaatgtgagaggggcctttgggatggtctttgcaacttctgcttctcaactgggaaagccaggatctcgaaaatctgatctcatagctcctgaatccagcccagagttctagaaagtactcggctactccgtgccagtattccagagtgcattctctcaaatctctgagccaatgggctttctggggccttctacgttgtcataccaaggaaagattctggccagagagccccagagaacagttttatgaaaggctggggtcagagcacggaaccaatcctgttttatacaaaagaagcctggtgatgttgagtatgtgccatgtgccaggcagtatgctaagaattctacatagacccacaccttcaacagcccttcttgtctctgttggacataattttgttccc

SEQ ID NO: 23410 - DNA, 988 bp, Artificial sequence
  DNA replication origin
gccagccgccccgtctgggaggtgaggggcgcctctgcccggccgcccctactgggaagtgaggagcccctctgcccggccagccgccccgtccgggagggaggtgggggggtcggccccccgcccggccagccgccccgtccgggagggaggtgggggtgtcagccccccgcccggccagccgccccctccgggagggaggtggggggggtcagcccccctgcccggccagccgccccgtctgggaggtgaggggtgcctctgcccggccgcccctactgggaggtgaggagcccctctgcccggccagccgccccgtccgggagggaggtgggggggtcagccccccgcccggccagccgccccgtccgggagggaggtgggggggtcagccccccgcccggccagccgccccgtcccggaggtgaggggcgcctctgcccggccgcccctactgggaagtgaggagcccctctgcccggccaccaccccgtctgggaggtgtgcccaacagctcattgagaacgggccaggatgacaatggcggctttgtggaatagaaaggcgggaaaggtggggaaaagattgagaaatcggatggttgccgtgtctgtgtagaaagaagtagacatgggagacttttcattttgttctgcactaagaaaaattcctctgccttgggatactgttgatctgtgaccttacccccaaccctgtgctccctgaaacatgtgctgtgtccactcagggttaaatggattaagggcggtgcaagatgtgctttgttaaacagatgcttgaaggcagcatgctcgttaagagtcatcaccaatccctaatctcaagtaatcagggacacaaacactgcggaaggccgcagggtcctctgcctaggaaaaccagagacctttgttcacttgtttatctgctgaccttccctccactatggtcccatgaccctgccaaatccccctctgtgagaaacacc

SEQ ID NO: 23411 - DNA, 1335 bp, Artificial sequence
  DNA replication origin
cgggcggggggctgacccccccatctccctcccggacggggtggctggccgggctgaggggctcctcacttcccagtaggggcggccgggcagaggcgcccctcacctccgggatggggcggctggccgggcggggggctgacccccccacctccctcccggacggggcggctggccgggcggggggctgacccccccacctccctcccagacggggcggctggccgggcagaggggctcctcacttcccagtaggggcggccgggcagaggcgcccctcacctcccagacggggcggctggccgggcggagggctgacccccccacctccctcccggacagggcggctggccaggcggggggctgacccccccatctccctcccggacggggtggctggccgggctgaggggctcctcacttcccagtaggggcggccgggcagaggcgcccctcacctcccggacggggtggctgccaggtggagacgctcctcacttcccagatggggtggctgccaggcggagaggctcctcacttctcagacggggcagctgccgggcggaggggctcctcacttctcagacggggcggttgccaggcagagggtctcctcacttctcagacggggcggccgggcagagacgctcctcacctcccagacggggtctcggccgggcagaggtgctcctcacatcccagatggggcggcggggcagaggcgctccccacatttcagacgatgggcggccgggcagagacgctcctcacttcctagatgtgatggcggctgggaagaggcgctcctcacttcctagatgggatggcggccgggcggagacgctcctcactttccagactgggcagccaggcagaggggctcctcacatcccagacgatgggcagccaggcagagacgctcctcacttcccagacggggtggcggctgggcagaggctgcaatctcggcactttgggaggccaaggcaggcggctgggaggtgtaggttgtagcgagccgagatcacgccactgcactccagtctgggcaccattgagcactgagtgaacgagactccgtctgcaatcccggcacctcgggaggccgaggttggcggatcactcgcggttaggggctggagaccggcccggccaacacagcgaaaccccgtctccaccaaaaccagtcaggtgtggcggcgcgtgcctgcaatcgcaggcattcggcagactgaggcaggagaatcatgcagggaggttgcagtgagccgagatggcagcagtacagtccagcttcggctccgcatgagagggagaccgtggggagagggagag

SEQ ID NO: 23412 - DNA, 1077 bp, Artificial sequence
  DNA replication origin
gggtggcggctgggcagaggctgcaatctcggcactttgggaggccaaggcaggcggctgggaggtgtaggttgtagcgagccgagatcacgccactgcactccagtctgggcaccattgagcactgagtgaacgagactccgtctgcaatcccggcacctcgggaggccgaggttggcggatcactcgcggttaggggctggagaccggcccggccaacacagcgaaaccccgtctccaccaaaaccagtcaggtgtggcggcgcgtgcctgcaatcgcaggcattcggcagactgaggcaggagaatcatgcagggaggttgcagtgagccgagatggcagcagtacagtccagcttcggctccgcatgagagggagaccgtggggagagggagagggagagggagggagagggagagggggaggggaagggggagggggagggagagggagagggagagggagagggagagggagagcttaagccactctttagttgggctttctgtaacttacattttttcttaactgataacaagctggtgccccttaagatagggtgcacacattctagtttgctatcatctctgccatcctgtcatgtctatttgctggaccactttacttttgtatgccaccctcctgcccactttttgcagcccactagtgtagatttttctctcagcttcccatgaagatagctgagactgtgctgtgtagactttctgaagacttggggataaccaaagggaattaaaactcagggatgctaacacggaatcccagatgcaactgcttgcagaattcaccagcccaggctctgcacggggcccctgattcccagctggaggctgacaaactttatatttcacaacactgagcacttaagccttcctcatctagaacttctcaattccagaacaggaactgagctttagactatcctcatcaagccaccatctcgacacaaacaggaacaaaccaagttgctttgaatgtcattgtcctcttcattccctgttgcctttacctaccagggttccaaaaagacatctcagagcttagtctcagcccag

SEQ ID NO: 23413 - DNA, 949 bp, Artificial sequence
  DNA replication origin
gccgccccgtctgggaggcaggtgggggggtcagccccctgcccggccagccgccccgtccgggaggtgaggggcgcctctgcccggccgcccctactgggaagtgaggagcccctctgcccggccagccgccccgtctgggagggaggtgggggggtcagccccctgcccggccagccgccccgtccgggagggaggtggtgggggtcagcccccccgcccggccagccgccccatccgggagggaggtggggagctcagccccccacccagccagcgccctgtccgggagggaggtgggggggtcagccccccgcccggccagccgccccgtccgggagggaggtggggagctcagccccccgcccagccagcgccccgtctgggagggaggttggggggtcagccccccgcccggccagccgccccgtcccggaggtgaggggcgcctctgcccggccgcccctactgggaagtgaggagccccctctgcccggccaccagcccgtctgggaggtgtacccaacagctcattgagaacgggccatgatgacaatggcggttttgtggaatagaaaagggggcaaggtgggtaaaagattgagaaatcggatggttgctgtgtctgtgtagaaagaagtagacatgggagacttttcattttgttctgtactaagaaaaattcttctgccttgggatcctgttgatctatgaccttacccccaaccctgtgctctctgaaacatgtgctgtgtccactcagggttaaatggattaagggcggtgcaagatgtgctttgttaaacagatgcttgaaggcagcatgctcgctaagagtcatcgccactccctaatctcaagtacccagggacacaaacactctgcctaggaaaaccagagacctttgttcacttgtttgtctgctgaccttccctccactattgtccta

SEQ ID NO: 23414 - DNA, 1386 bp, Artificial sequence
  DNA replication origin
cggccgggcagaggcgcccctcacctccgggacggggcggctggccgggcggggggctgaccccccaacctccctcccagacggggcgctggctgggcggggggctgagctccccacctccctcccggacggggcggctggccgggcggggggctgacccccccacctccctcccggacagggcgctggctgggtggggggctgagctccccacctccctcccggatggggcggctggccgggcgggggggctgacccccaccacctccctcccggacggggcggctggccgggcagggggctgacccccccacctccctcccagacggggcggctggccgggcagaggggctcctcacttcccagtaggggcggccgggcagaggcgcccctcacctcccggacggggcggctggccgggcagggggctgacccccccacctgcctcccagacggggcggctggccgggcggggggctgacccccccacctccctcccggaaggggtggctgctgggtggagaccctcctcacttcccagacggggtggcagcggggcggaggggctcctcacttctcagacggggcagttgccaggcagagggtctcctcacttctcagacgggcggccgggcagagacgctcctcacctcccagacggggtcgcggccgggcccaggcgctcctcacatcccagacggggtggcggggcagaggcgctccccacatctcagacgatgggcggccgggcagagatgctcctcacttcctagatgggatggcggctgggaagaggcactcctcacttcccaggtgggatggcggccgggcagagacgctcctcactttccagactgggcagccaggcagaggggctcctcacatcccagacgatgggcggccaggcagagacgctcctcacttcccagacggggtggcggccgggcagaggctgcactctccgcactttggggggccaaggcaggcggctgggaggtggagattgtagcgagccgagatcacgccactgcactccagcctgggcaccattgagcactgagttaacgagactccgtctgcaatcccggcacctcgggaggccgaggctggtggatcactcgcggttaggagctggagaccagcccggccaacacagcgaaaccccgtctccaccaaaaaaacacgaaaaccagtcaggtgtggtggcgcgcgcctgcagtcgcaggcactcggcaggctgaggcaggagaatcaggcagggaggttgcagtgagccgagatggcagcagcacagtccaggtttggctcagcatgagagggagaccctggaaagagggagagggagagggagtggctcggcatgacagcgagaccgtggaaagaggg

SEQ ID NO: 23415 - DNA, 972 bp, Artificial sequence
  DNA replication origin
cagcctgggcaccattgagcactgagttaacgagactccgtctgcaatcccggcacctcgggaggccgaggctggtggatcactcgcggttaggagctggagaccagcccggccaacacagcgaaaccccgtctccaccaaaaaaacacgaaaaccagtcaggtgtggtggcgcgcgcctgcagtcgcaggcactcggcaggctgaggcaggagaatcaggcagggaggttgcagtgagccgagatggcagcagcacagtccaggtttggctcagcatgagagggagaccctggaaagagggagagggagagggagtggctcggcatgacagcgagaccgtggaaagagggagacagagggagagggagggggggagggggagggggagggggagggagagggagagggagagggagaggacaaaaattttctttcttcaggaatctttgtagtgttgtatctttacatttagatctataagctgttttgagttaatttttacatataagatgtagaatgcctgctctcacccattcctattcaacactgcagtcggtgttacagccattttgataatgcaaggcaaagacataaaaggcattaacattggaaaaaaggaagtaaaatttgcacatgatatgataatctttatataaaatctgatgattttctagtaattgagaactagtaattgagtttagcaaggttgcaggatacaagatcattatacaaaaatcaatcacacttctaaatccagtcaaaaacaactagaaattggaatattaaaacacaatactatttacaatagcatcaaaagtaaaaagtgttacgggataaatctgacaaaaaagtgatgaaatacttctagagtaaaaactacaaaacactgctgaaggaaatttaaaaagagctaaataggtggagagatatatcctgttcatgagttggaagacttggtattgttgtgatgg

SEQ ID NO: 23416 - DNA, 832 bp, Artificial sequence
  DNA replication origin
cgccgctccatcgccagatatgcttgggatccgagggtcgcagccagcacttggggctgcgtagacgcgccggccggagggagggtgggagccgcccgggggcgccactgagtcgtgggaaatgtcaccaccaccgcccacagtttccgcgccattatattattattattggcggggaggggggcttcgtctgagtagtagctcagggttctttacgggcgggggccgagggcggggcctcaggtcctttggaatagggatttctgttgttattatctggggggtctttaacccaattatagggactcccccacagctttgcaaggtgaaacccttttactgtgatgatgattattggaggttttgttatttggttctgaaccaaacctctggagggccttttcccccagtgggcttgttttattgttatgactgttgagggtgccctacccctgctgtgggggctccggatccttaaaaacctcggaggtttctgctgttgttatcatcattattatccggggctccgttctttgcaacatgacattcctttattgtgattgtctttggggagagggtcttcagcatggctagagggaggttccggtcctttgcaattcttcggactcttgacaaccggggtgactggatttcttgttttacatttttctgtctgcttttttgtttgtttgtttgtttgtttgtttgtttgtttttgcctctgtgcaagctcgaggtcctctgtttccacttcccctggaggtgagatgtcacctccagggggaactcatactcccagccccctccatcaccaacccccttgcctatccct

SEQ ID NO: 23417 - DNA, 793 bp, Artificial sequence
  DNA replication origin
tttgcgcgcctcccaacttcgcggcgcccggggaggccgcggagcgcgccgcttgccagtccgcacccggctggggctccggcgagggagggagggagctggcgggcagggaggaggaggaggagaggaggaggaggaggagagaggaggagggagccggggttggcgaggaggcggctccgcgccccgccgctcgccggcacctcagccttcgccgcccgcctggctgcgcagcccggacgcgccgccacccgggggccgccgccgccgccgccagagccgccgccgccggactggccgcaagcgccggcagacctcttctcctcgggccggggtcttggggttcgtcttgcttcttgcctttacccccccgccccttccatccccttcccaagtctagatgcagacgggcggtggaggtgggcccgggcgctcgcaagtttgcgctcctgcctccagggcggtggagagccgggagcggcgcagagcaggtgactcccagccctcgggcccaagggaacttttaaatgagagatttccttgcttgttctgcctcctgcgtttctccccgctgctcccctcgtctcctctctcccgtctctgcttttcttctgtttctttcctctcttccctgctctttctctctccttccctagggcgactcttcgaaaccccatcactttctccccatcctccctttgtgggagtctgtgtgcctcccctagatttggaggtgttctctgcggaccccgtaggagccggggctgggaggtggaatctcagagaacgcacc

SEQ ID NO: 23418 - DNA, 1017 bp, Artificial sequence
  DNA replication origin
ccagggcggtggagagccgggagcggcgcagagcaggtgactcccagccctcgggcccaagggaacttttaaatgagagatttccttgcttgttctgcctcctgcgtttctccccgctgctcccctcgtctcctctctcccgtctctgcttttcttctgtttctttcctctcttccctgctctttctctctccttccctagggcgactcttcgaaaccccatcactttctccccatcctccctttgtgggagtctgtgtgcctcccctagatttggaggtgttctctgcggaccccgtaggagccggggctgggaggtggaatctcagagaacgcaccgtggaggcgcggctccggcctctgttctttcccggagtgccccggacgcgcctggcaaggccccccagccttggagtctcgcaaagtctcggcgggtgcggcggggatcaggggcgggaaaatggtgcggataacagggcggttagagcatcctgccttgaccgtgacattcgcggaagacgcgagatcatcagtctggagataaaaagggacccacttttttttttttttttaatccgccggcaaatctcgttaagtttcttctgataagtggttccagcacccgcgccttctccccgtcctggccgcttcccagtccccgtccttccgaacgccccactcctcgctctccccctcccccaaagccattgagctggggagaaaatcggggcactgaggcatgcagttaataactgccgagtgccttgcaattccgggtccgcactcgagttggggctacagtttggtggccaactgagacgggcagggctgcgagctgtgcctgccggcttaaatgatgctaaagtggcctttctggaagagtgggggttatggaggcagagagagagagagagagggagaattgggcagccacattgggcttggcacgaaggccaatggtaatcgtattccctgctaatgtttgtaaatgagacccgggcacggctgggggacagcg

SEQ ID NO: 23419 - DNA, 1142 bp, Artificial sequence
  DNA replication origin
cagcttgtccccactccatgatagctgtggcttcatctgggcagattcaacatttgcgggtaatttgacaactcccacatctggcaattgatgctggctgttggctggaacctcagctacctgtgggaaccccagtttatggcctctctgcagggtctctctgtgtgttctcctttgggcttcctcacagcatggtggctgggttccgagaggcaacatcctgagagagccaggtggaagtgcaggtgttttcatgctcttgccttgcaagttgctagtatcacttccatctactctgctgattggggcagtaacaaaggtgggcccaggttcaaagggaggaggacgtagatcccaccactgggtggaaggagtgtcaaggtcaccttgcaggaagccttggtggcgagggatattatggcagccatctttagaaaagacagttggctacagtgagggcgatggtggtggtgattcaggtgactcaggctggttgtgacaggctgtaaagggagccagtgcggcaggaagtggctgagcaggagagtagatgtgacaggaggttgtgtgaggtgagttggtgtgacaggaagtagccaagtagggagtgggtgtgacaggaggatgtgtgggggacagagtgtaacaagcggtggccaagctggaatggttgtgacaagaggttgtgtgagggaattcagtgtgacaggagattgtgtgggggagtgtgacaggaagtggccaagtagggagtgagtgtgacagaaaatggccaagctgcaatggttgtgacgggaggttgtgtgacgagagtgagtatgacaggaaatggcctgagctgcagtgggtgtgataggaagtggcccagtagcaagtaagtgtgacaagaaattgtgtgggggagtcagtatgacaggaagttaccaagctggagtggatgttacaggaagctgtgtgagggcaatgggtgtggcaggagattatgtgagggaagttagtgggacagagacggctatgtgagtggagtggagtgggtgtgacaggaagtggccactggagatctggctttgtctgccatgatggaagtgggcctgccagtgacagggccctagatgctgacagcaccacctttccttgctttc

SEQ ID NO: 23420 - DNA, 922 bp, Artificial sequence
  DNA replication origin
tctctctgatcacctattgggtttattgggcgccgaaactggggcctgcacggatggtgtaaaatcagacccaggcagcctgggtcagtgcccatcattcagagtgaccctctgtcccctccatgcccagcggggccgatgggcagctaggaggcgagggaccgtctggctcaatcgagagccaaagaggtaatgctaatgtcttttaaaattagaatgaaaatgtttattgcagagcagaacctgcgtcagctcagagtcctgtgggaagggaacggctttatcgcagcctttcgcttttatttttgcacattcgctttttatttgccggtggtgctgctgacgggccctcggagcggggctgtgtctggacacttctgggagccttggacggctctggagaggaggcaggagctgcccagggtgagtgcaaggacccgccgagggttgagaggacttgggggatgtgagagcaggagcctgtgactgtgtgtgtgtgtgtgtgtgtatgtgtgtgtgtgcttgtgtctgtgtgtgtccttgtgcctgtgtgtgtccttgtgcccctttgtgtgtccagctcgatgtatgcgtggcctgtgtggctctccgtgtgtctttctctgcgtgtgtggtggccgcgagagccgtccatgcatgagattgagtgtggatctctgcctatctctgtgtgtgcactcatgagttgtgtgtgtgtctgtgtgtctttggaggtggccatgggtgtggctgggtgtgggtcttggccctctgtgtctttctgtttgtgcggatgtgtgtgtgtatcttaaggagacacatgggtgcgtgactggtgggtctgtgtgggtgcagacacccatgtgtgcaagtcagaggggtatgcatgcgtgtgtgtaagcatgagtgtacacccacaagt

SEQ ID NO: 23421 - DNA, 1637 bp, Artificial sequence
  DNA replication origin
aggaggaggaagagggaggaggaagagcagggaggaggaagagtgaggaggagaaggaggagggagaggaaagaggaggaggaggaagagtgaaggggaggaggaggaagaggaaagaggaggagaaggagggaggaggaagaagagggagggggaggaagaagtgggagggggaggaagaagtgggagggggaggaagaagtgggagggggaggaagaagtgggagggggaggaagaagtgggagggggaggaagaagtgggagggggaggaagaagtgggaggaggaggaggaagcggaggaggaagaggaggaaggggaggaagagggaggaggaggaagaagtgggaggaagagggaggaggaggaggaagaggaaaagggaggaggagggggaaaagggaaggggaggaagaagtgggagggggaggaaggagagggaggaggagggaagagggaggaggtggagaccatccacagacaccctcaagaaggtcactgtcaggaatagctcagcatctgtggaagcacatggcatttacgcagcccactgtgatacgaggggtgacaatgtgtttagtcccccgaggatgaacgcagcaggtgtagaactgcttctgccaggggcgagtcaagcctgttctagccacatagctcttttcagccaggtggttaaaaacagaaaatttgggccccctcccctaggctgagctccaccaagctgtctgaggtcgcagggacatctgggagccactgagaaccactctgtgccaagttctaagccttactatgtgctccaggcatcttctttgaaatccccgccttcccccaagcacacctttaggatgtgagcattgtgaccggccctgttctacagaggaagaaagaaactaaggggcagggatgttaagtcacttggctaagatgagagcactagttagtggcagaggtggtatcggtgcccaggtgcctctcactccagggcccagacttgcagctgcaaactgtgcttctccaagtgctgtgggcatgaaaagggggacctgccatcgagactgcacaactccttccctgggttccgtggaacatactttgagagcagcctccctctaccactgggtcctgggctctggagagggtagggtgattctgagagatgatggggggtggacgtctgatgtggcaggaattccagaagaagctgaagactggtggacaagcgagaggaggcaggtgcttggagggtctcagaatgaactcgggcaatggaaaggcaacccagagatcggggaatgaaggaatgagctgggttcagaggggaaggggtgtcccttgatggcctctgaaggctggttgttcctttagggcatgcagatcagggggccacacagaaggcaaagagaggcaagagtacgaggggggctcagagaagaaaggagggccatggagagctaggggggctgtggtgggagataggtttggtgcggtgggtaggggccgatgggccgtggagaggagcgatgagaacccctggaagccatgaagcagggccgagacttgctcagatgtaccagagggggaggggctcctgttgaccactcaggggtgctttggggtctgggtgggaggtactgag

SEQ ID NO: 23422 - DNA, 1289 bp, Artificial sequence
  DNA replication origin
ccccagttcttccctttgtagcatttgccatgtgccaagaacagtgctgggcataccgtaagtgctcaatatgtgtgaatgaacaaatgtatcactgcacatcagtttttgtctcctctccttgactgaggaccgggtcatgttctcatgtttcctccaaggacccagaacagcactggataaacagcaggtgctcaataagtgtttgcagaatgaatgatttcttaaagcctaaagaaacgcttgagtccagagtaatttaggtgaatgcctctcagcccctgaggattggagtgtggagctggggagcggggacagtcccaggggcccagagcaaagggggaggcccccaccaagcagcccctcactcagcccaggtcccaggacattatttatggctgtggtgtgtgagtggcacagcaaatgacagctgtgtgcctttgggggtgaggagcagaggtgcttaatgaaacgggggcctccagccgagactcagaggaaggagaagagtcagaaagaggaggcatgtctgagaggtcagagggaagagacatgtctggagggacagagggaggatgtaagtcctggaggatcagaaggaggaggcaagtactggagggccagagggtggaggcgtgtctgggatgatcagagggaggaggcgtgtttgggagggtcagagagaggaggcgtgtctgggagggtcagagggagaaggcctgtctgggagggccagagggtggaggcatatctgggagggtcagagggaggaggcaagtactggagggtcagagagaggaggcctgtctggaagggtcagagggaggaggcgtgtctgggagggtcagagggagaaggcctgagagggccagagggtggaagcaagtactggagggtcagagggaggaggcctctctgggacggccagagggtggaggcaagtactggagggtcagaggtaggaggcctctctgggagggccagagggtggaggcgtgtctgggatggccagagggtggaggcaagtactggagggtcagagggaggaggcctctctgggagggccagagggtggaggcgtgtctgggatggccagagggtggaggcaagtactggagggtcagagggaggaggcctctctgggagggccagagggtggaggcgtgtctgggatggccagagggtggaggcaagtactggagggtcagagggaggaggtgtgtctgggagggtcagagggaggaggcaagtactggagggtcagaaggaggaggcctgtctgggaggcc

SEQ ID NO: 23423 - DNA, 1031 bp, Artificial sequence
  DNA replication origin
ttctgctcatccgacaggaactgcttcatcttgatgaagggctccttgcccttcaccgtgagcttgcgccagggcttgggccgggctaggatctcgctgaccgagccctgcgacagccccagcacgtaatgcccaaacacccgctgcccgatgttgtgtttcagcagctgctccttcacctggaaggcgatctctgccgtgtccagctgctcctcctctgccccgggccccgccgctccgcccccaccaccatccgcgggctcaggaccgcccagtggctcagggccaggggccggggtggcaggggctgtggggggcttggcgccatagaaggctggggggaacaccagcaggccgcccgcctctcccttgaaggcggctgggggcatcatcagtctctcccctgatgccaggctggggaagggggacagcgagaaagtccgagtgccgtcaggccccaagctggggcccagcaggggctgcccggggctgggagacagggggtcttctggccctggtggaggtgggagctgctgaggggaggggtaggactgctccgtgcccagtgaatccttgatggaatcgtcctctgatgggtcttcctctagaacacccagacagacagacagacagacagacggggaagacgatgatgaggggagagagagacagggagaaaaagaaccagagggggagagagacagagagagacaacgagaaagagagacagagagagaaaccacatcagagagacagagagagagagggagagcgagacagagaccacatgtgagagaaagaaagagacaatgagagagacagagagagaaatcacatgagagggacagagagagagagagggagagcaagacagagagaccacatgagagagagagagagagataaagagacaaagagacagagtgaaaaaccacatgacagagagaggcagggagagggtcgggggggaagagacagagagagacagagacatatatagagacagaaagtcagaaatagaggaaggaagg

SEQ ID NO: 23424 - DNA, 1533 bp, Artificial sequence
  DNA replication origin
gtctgtctgtctgtctgtctgggtgttctagaggaagacccatcagaggacgattccatcaaggattcactgggcacggagcagtcctacccctcccctcagcagctcccacctccaccagggccagaagaccccctgtctcccagccccgggcagcccctgctgggccccagcttggggcctgacggcactcggactttctcgctgtcccccttccccagcctggcatcaggggagagactgatgatgcccccagccgccttcaagggagaggcgggcggcctgctggtgttccccccagccttctatggcgccaagccccccacagcccctgccaccccggcccctggccctgagccactgggcggtcctgagcccgcggatggtggtgggggcggagcggcggggcccggggcagaggaggagcagctggacacggcagagatcgccttccaggtgaaggagcagctgctgaaacacaacatcgggcagcgggtgtttgggcattacgtgctggggctgtcgcagggctcggtcagcgagatcctagcccggcccaagccctggcgcaagctcacggtgaagggcaaggagcccttcatcaagatgaagcagttcctgtcggatgagcagaatgtactggcgctcaggaccatccaagtgcggcagcgaggtgagtgcccaagagggcccgtccccgctggccaccacgccaggtccagggcatcagggctgggggctgaggacacgcgctctgggttcaaagcccagctctaccaccacctggctgtgtgacccagggccagtggctttgcctgtctgtgcctcagtttcccctctgtaaaagcaggaaatacatcctcgctctctccttcctggccctggccagagacagtctgcccttcctggggcactcagggtaagggtggcgggaaaaggctccaggcgctgccctggcaggtattcatccagcacttccaagcctcagtttatacatttgtaagaccgccaaccttaccagacttgatttttcaggtaatcagtatgaagggtcccagctgtggcctcacaaatgcctgagtttgagtcccagctctgctgttcacccactgggtgacctcagacaactcctttcacctgtgccccggtttctgcatctgtcagcctccaggaggcaccatgaggattaaacgggcatcaagcactgaccacagcacctggcatgcagtgctgcttgagaactgttaggggtggtggttgccatagtcattgtcgtcatcatttctttttttttttgagatggaatctcactctgtcacccaggctggagtgtagtggcacaagctcagctcactgcaacctctgcctcctgggttaaagcaattctgctgtctcagcctccctagtagctgggattacagtcacaacgccaccatgcctggctaatttttacatttttagtagagacagggtctcaccatagtgatcaggctggtctcaaactcctgatctcaggtaatccacccgccttgg

SEQ ID NO: 23425 - DNA, 1023 bp, Artificial sequence
  DNA replication origin
gtcctcggggggcacaggggcctcgtccccgcggggccaggcgcggccgttgggctggccagagtagccagaggaggaggaggaggacagcgagggcgacacggaggcgtaggggcggctgagcaggccgcggtcggaggcccagtggtggtcgaagtagccggcgtcgccgatctcggacttgaccttgcggatgatgctctgcacgaaggcggcgggggacaggaccgggagcggcgcctgcgcggggcccccgctgccctcctcctgcttcaccaaggccggggccccgttctggctcgcggtggccagtgatggccgctccgggggcgaggggggcaccgagcggcccctgggcgccacctccatctccagcagcgcctgctgttgcgcctgcatctcacggcgtgcctgctccaggatgctcttgatggcgtcctccgaggtgctggcgggggtcgtgccgttggcgatgctcagcggggccaccgaggtcttgggctcgcctgcggggagggggacaggacggcccgaggcccagggtcagggctcggcatgcaggggacgatgttcacagcatccctgttgatgccagcacggtgtccaggcaacctctgtgtccagcaactggggattggctaactaaattatgatccctccctgtggcagaatattaggcagccacccaaaattcggttgacagtgaggttttggcatatgcagagaacatgctcatgcggataatgcaatgcaaacacagacctgacttttgttttgttttgttttgagatggagtctcactctggtgctcaggatggagtgcaatggcacgatctcagctcactgcaacctctgcctccccacttccagcaattctcctacctcagcctcctgagtagctgggattacaggtgtgcaccaccatgcccagctatttagctttagtagagacagggttttgccatgttggccaggctggtcttgaactcctgagctcaagtgatctacacctcagcctcccaa

SEQ ID NO: 23426 - DNA, 2052 bp, Artificial sequence
  DNA replication origin
ggaggtggcgcccaggggccgctcggtgcccccctcgcccccggagcggccatcactggccaccgcgagccagaacggggccccggccttggtgaagcaggaggagggcagcgggggccccgcgcaggcgccgctcccggtcctgtcccccgccgccttcgtgcagagcatcatccgcaaggtcaagtccgagatcggcgacgccggctacttcgaccaccactgggcctccgaccgcggcctgctcagccgcccctacgcctccgtgtcgccctcgctgtcctcctcctcctcctctggctactctggccagcccaacggccgcgcctggccccgcggggacgaggcccctgtgccccccgaggacgaggcggcggcaggggcggaggacgaaccccccaggacgggcgagctcaaggctgagggcgcgacggccgaggcgggcgcgcggctgccctactacccggcctacgtgccgcgcaccctgaagcccaccgtgccgccgctgacccccgagcagtacgagctgtacatgtaccgtgaggtagacacgctggagctcacccgccaggtcaaggagaagctggccaagaacggcatctgccagaggatcttcggggagaaggtgagtgcagggcgggcccccggtgtctgggctctgggagaagatgtcggagaagtaggatgcccacccaagcaggctggcgggaccccaggggcccaggcccttcattcctgagtcctgctgtccctgggtcccgcaggaaggagggccactgttctgctccgtggttgttaaaaccaggaaatgcttccatcctggccagcaaacagccacttaactcccctcctccaggcccctccagatcgcctgaggtccagccactaaagggttaagtggcaggacttggtggctcacgcctgtaatcccagcactttgggagacggaggtgggaagatctcttgagcccagaagtttgagaccagcctggccaacgtggtgaaaccccgtctctactaaaaaatacaaaaattaagctgggcacggtggctcacacctgtaatcccagcactttgggaggctgaggcgggcagatcatgagatcaagagatcaagaccatcctggccaacatggtgaaaccccatctctactaaaaatataaaaattagctgggcttggtgtcctgtgccggtatagtcatggctacttaggagactgaggcaggagcatcacttgaacctgggaggcaggggttgcagcgagccaagatctcgctactgtgctccagcctgggtgacagaacgatactccatctcaaaagaaaaaaaaaaaagtgtttgggatcagcctgggcaatgtagcaagacccccatctctacaaaataaaaaaaattagccaagtgtggtggtgcacagctactcaggaggctgaggtgggagaattgcttgaacccaggtggtcgaggctacagtgagccatgatcacaccagtgcactccagcctgggcaacagagcaagacctcatccccccaaaaataaataaaaatttaaaaagaaagggttaaataaagctcaccctagccaggggacctcagtgtttcctgattggttggtgcccctgcaatgccagttttaagtgtcacctctacctttagcaagggaataggcaaagggccaggcaagctcggaggagggagaaatgacttaagtgggaggtcagggaaggcttcctggaggaggggggcactgaaggatttttacatgtagggacattagggagggtactggaggggaagggcacagcaacagcacatggcaggcacctatgaggaacaaatgaaggccgcctggactccaacagaggggaggggaggggatgggaggctgggcatggtggctcacacctataatcccaacactgtgggaggctgagttgggtggatcacttgaggtcaggagttcgaaaccagcctggccaatgtggcaaaaccccatctctactaaaaatacaaaaattagccagacgtgcaccagcctggtacaagtccc

SEQ ID NO: 23427 - DNA, 1103 bp, Artificial sequence
  DNA replication origin
tgccttgctgggcttgtgggtggggtgccagacagggctgtgggcagctggggacaggagagagagcagagtgaccaacccatcccagtctgcccgcgactttccttattttactacagaaagttccagatcctgggaaatctctctctcctggagagataaggatggtgcaagagagatgaaaagagagcactggagggacagggagggtcagggaggaagagacagagcaaacagagggggagagagatggtgagagaggcagggggagagagagagtggggtggggggaggagagggagagggagagagggagagagggggagagagagagagagagagagagagagagagagataggtgaatcaaaaaaatgcagagtgagaaaaacagaaagaagacaatggaggtgactgggtgcagtagctcatgcctgtaatcccagcactttgggaggccaaggtgggtggatcacctgaggtcaggagttcaagaccagcctggccaacatggcaaaacctgtctcttctaaaaatacaaaaaattagttgggtgcctgtaatcccagctacttcggagactgaggcaggagaattgcttgaacccaggagccggaggttacagtgagccgagatcacaccattgcactccagcctgggcgacagagtgagactctgtcacacacacacacacacacacacacacacacacacacacaaaagaaattggaggagagagacagagatcaggagagagacagagggaagacagggactgtgtatggggacaggacagggcttccttgactgcttgagaattctgagaaacctcggatggaagggtctggaatactgatgctgccacggtaggtagcgccgattatacccggggctgcgcctggcagtggacgtggggataagggcgtgctttataaccctcccgtggcatctggctcaacttcagtaacaggtatggtcagggttccagtgccggtccctgcccgccccagtggccagggcatacacaagcggggcttggacaggtcctgacacccagccccacagccagactctgtgggactttgtgggcaatggatacaccct

SEQ ID NO: 23428 - DNA, 1841 bp, Artificial sequence
  DNA replication origin
tacgtgctggccgctgagagtcaggatgccatggagggctgggtcaaggccctgtcgcgtgccagcttcgactacctgcggctggtggtgcgcgagctggagcagcagctggcggctgtacgtggcgggggtggcatggccctgccccagccccagccccagtccctgcccttgcccccgtccctgccctctgccctggccccagtcccatccctgccttctgccccagccccggtcccagccctgcccctgccccgccggcccagtgccctcccgcccaaggagaatggctgcgctgtctggagcactgaggccaccttcaggcctggacccgagccccctccaccaccgcctcgccgccgggcctcggcaccccacgggcccctggacatggcccccttcgcccggctgcacgagtgctatggccaggagatccgggccctgcgtggccagtggctcagcagccgggtccagccctgaggccaccagggcgcctgttttagggggacacaagctctatgccctctgggacaggccgggtcctggagagactgggggagcagatcctgagggaaatcatgggcaaggctggcccccaggccctgagtggcctggttttgggggatgcaggctctgagaaggtgctggattctgagtgggcctttaggaccatgtgacccagaaggcctacccttgaggggaacgtcacgtgcaacactaaggagaatccagggcctgagggggaggtttcctgagaactccggccccaggctggcctgagctgccgggcagaggcctgtgctggcaacaggcattgccgggcctgcagctcagagggtcactgggactgagggcgatctgtggcctgaaaagcaaatgcacagttagtgcagctcctgaccaggccttcagggtggacagagggaggatcggtcatggcagccacacctgggcctggccttgctccgggacctgccagaggagctggcctggctctgtgcctgcctgcctccaggagcaggacggtggctgggagggtagtgactggggacacaggtgcaggtgttagtgcaggaccggaagggtgaggtggcctggtcctcggggctcctggcctgggctggctgaggcaggactctgccaaaagtcccctgccaggcctcatggtggtgctcctggtggcagtggctctctggccgcgggccctgtctgtgtctccgtggtggctctcacagggctctccagacactccttgactgcatccttcagtcttggcccctaggcctggggccccttgggagcttgcctgacctcccttcctgggctgggtagccatggcccgaggtgaccttctagcaggttcccccagggaggggaggccaccagctgactcaccgcctaggaaggcccaggtgctgacctagtggcggagaaaaagccgcacaccgagtgtggcttccagagcccctcttcagctccaggcagccccctctaacatgtcccctcctgagctcagcccccacccccatactcctggtggggaccaggtcttgcttggcttcggggctgaccgccggtcccctttcttctcaccacagtgcccatttttcatccagggagaacctcggggctgggacacctcctggccctcaccctgggtcatgtttacagtcctcagtgccccacaccggtggccccctgaggacacctccaccctgaccttgattttcccaaacgctgcctcttggtgacagactcagcccaaaaccccttccttctgtctctggagacccttgagcttggggaaatatggaggggtgtgtgtctgcaatcaaggcctc

SEQ ID NO: 23429 - DNA, 1678 bp, Artificial sequence
  DNA replication origin
atttgcttttcaggccacagatcgccctcagtcccagtgaccctctgagctgcaggcccggcaatgcctgttgccagcacaggcctctgcccggcagctcaggccagcctggggccggagttctcaggaaacctccccctcaggccctggattctccttagtgttgcacgtgacgttcccctcaagggtaggccttctgggtcacatggtcctaaaggcccactcagaatccagcaccttctcagagcctgcatcccccaaaaccaggccactcagggcctgggggccagccttgcccatgatttccctcaggatctgctcccccagtctctccaggacccggcctgtcccagagggcatagagcttgtgtccccctaaaacaggcgccctggtggcctcagggctggacccggctgctgagccactggccacgcagggcccggatctcctggccatagcactcgtgcagccgggcgaagggggccatgtccaggggcccgtggggtgccgaggcccggcggcgaggcggtggtggagggggctcgggtccaggcctgaaggtggcctcagtgctccagacagcgcagccattctccttgggcgggagggcactgggccggcggggcaggggcagggctgggaccggggctggggcagaaggcagggatgggactggggccagggcagagggcagggacgggggcaagggcagggactggggctggggctggggcagggccatgccacccccgccacgtacagccgccagctgctgctccagctcgcgcaccaccagccgcaggtagtcgaagctggcacgcgacagggccttgacccagccctccatggcatcctgactctcagcggccagcacgtaggtgcgcgcccgggtccccgcaaagcgcacagcgaaggcgaactcctcggcggcctccaccagctccacagtgcagccctccaggatgatgacgcccacgggctcacggctggcagcgtcctcgaagtagaagagcatgttcccgcgcagcacgaaccagcgccggtggtaggccgcgtgccgcccacccttcttgtacaggaagcctgcattgtccaccggggcgtcacaggtggcgtagaaggccaggctgcgctcgttcagcttcatggtggcaatcgcggggcctggaggggagcctggggcctggaccccatagaagggctgttatgcacaaggccactgacgctaggtcacccagtgccccaaggggaccttgcagccactctacatccccgtttcacagatgaggaaactgacgctcatagggtggaagcagctggcctatgcgcccacaactcctaagaagcagagacaggactggaacctgggtctcacgggcctccccagacagcctcataacctcctaccctcctgtatccctgaaataatgttgtgagttcctgctgcatgccagacatttcagaggaatgaactcactttatctcacaatagaccttaggtcacagggactggcctggcaccagtgcaacagatgaggaaacagaggcacagagaggttaactgcttccctggtgtcacaaagcaggttgggcagggctgaaatccaaacccaggcctcatttcaggcgctgctgtttccatcatcccaagaacaagaccagctggccttctgcagt

SEQ ID NO: 23430 - DNA, 1290 bp, Artificial sequence
  DNA replication origin
ccgggctccaatccgcttttctgggctagggaactggggagtcgcgagccaggagcggaccctttaagagtgatttcgagggcgggctcacgggggcgtgccggttcggggcctgccaatcgggaggtgggaagaacgcgggggcgggcccggcgcgagcaggctgggaagggttaaaggggcgcgcccgtgggtcgcggactgtccggttgctcccgcctccttccgtcggatccgcgctctcccgcggctgcgccggcccggccgcccaggagacaaagcgctgccgccgccgtcgccgccaccgggccagtcccgaaccatggccgggccaccccgcaacctcgcgcctcccgtcccgtcgccgccctaggcctgcgctgcgaggtaaggcgggcctggcggggggacatgcacgaggacatgggacccgggtcgggccgccctgggcctcggggtcccccggccacctggagagcgcgttgcggggatcttccccgctgggactccgcaccagtggtgacttctccagctgccgaggcgaacttggccaatgaccaccctcccctctctcagcccatagggacgtctgccgctggtggggactgcggataagccccccattctgccgctgatcacccatctggggctctggctgtcctttaaggaacttaagagagctcccacgcacaacacacaaagggacagagagcagccgggagcagggccacacctggagcagcagcccctgccgtggacaagggggctgcctgtgtctggacggcggtgctggcgtgtctctggggtccctgctggggcggtgacggccaggctgctctttagtgttcttggcacacatgtttttcagcctgtgcctgccacaccctcttccccacgcccgctgctgggggacactgagggcagctggattcaaccccaggacctgcggtactggcttcttttcgttgatgtgagtgccaaaatgccatgcttcagtctcccaggagacctgggttccggggccagctgtgcccctggagatcttggatgaattatttgcctttttgacagctctttccctgaaagctcactacccaccaagtattttgcaaaatgactcttcaggagtcaattcactcagcccttagagggatggaagttaacgtcaccattttgcagatgaggctgagaaaaaactccgactcacagcagctaatatttgcaatccatttcccatagtttgccagtgggttttccttcttttagctcatgaaccctcgccacacagcc

SEQ ID NO: 23431 - DNA, 2257 bp, Artificial sequence
  DNA replication origin
tcgcgcgcccccgggccctcgaaatcccgagggggcgggcgggcccccgccctgggcgcgtcctctcccgcccgccggctcctcgctcgcggctcgctcgagcggggctcaggcaggaaacccgggctcggaaaatggccagcgcctcatcatttccgccgccagcgcttgacagttgcgggaggatgcgcccccgggccgccgccgccggggaaactttgcagcggccgccgtcgccaccgcgggccgcgacagtccgggcgggcagccgggcggaggcggtggcccgggcccatgccgccccgcgccgttatgtaaagaggaaccggccgtgcgagcggagcccggcgggggaggccggccgcgacaggggcggggcaggggcggggccaccaggagccacgcctcaggccgcgcgcgagtcggagattcggctggaggggcgggccatgagggcggagcccggactggccccgcctaccaatcccgctagtccgcggctgccagggtcggagggctctcctggcgcgggtccggaaaaaggcgaggccttgcgaagccacgcccaccacgtgcccacccgatttcgcgtcccacagtctgaagatagaagtgaggatcggaggggcggggcgactttagccccacccactcaacgccggcaggtcaccaggtgcctcagcgcctggaggcggggccagatgaaggggcggggcctagggcgggcagggtcgaggggcctggcctccagggggcgcgcccttgctgactccctcctgcagggccttatcagtgcccgcagggctgggcggtgcaatagcgaccacggctttcatcatcgccccagggagggagcccagccctgcccgaccctgactatctgcgatcatgctgacccgacccgccacggccccaggcccccgatttgggttctggccccagccctcagctttgcctttgctacagccggtgcccgtatagcccagcctcgctccggccgcccgtcctgtcccccaattctaggaggggtgcatctttctccaggaagccctctccgaccgctggcttccgtggcctctgcgcccacccccctgcccgcccccgggctacttacattttctccacggcctcatggggagctgagacggacagtggggttccccctagtccggagtgggacatgctctcagccagcctctcccccaacatgtgggagggcggggagggaggaatgtactcttctccccctcccccaacaggaaacaagtcgcccacgcccccagcttggaggggccacctcgagtcttcccaggcagcaagtgtctccattccactgcctccccctcttcctacccgggcaaatgacttgacttctccgtacctctccacttccttgcctatgaaatggaaataatgtgtacccactctcctggcagtgagaattaagtgagttaatgcattaaagcagttagctcgaggcttggctccaggaagctctctgtgttaaacaaatcggccccagtcctgaccttagaactacaggaaggggttccccagaaggtggggatttccagactccgagtagatgggggaagggagcggtctgctacaggattcctggtgtccaatgaccttgaagaaaaaggccacaaaaatctgctttccgcacatttccaggcactgttctaggcgctgggaacacagcagtgaacaacacagatatccctgcctgcgtggagctgatattctagtggggggacataaggcacgaataagcaagtgggatcagctatgacaatgacaaaacagttacgggatggagagctggaaggggatgtcttagatccagggctcaggaaggacacctctgcggaactaacatgtgagcttagaaccctccatgacaagaaggatccaggtgctataacgtctgagggaagagcattccaggccaaaggaacagcatgtgcaaaggtgctgaggtgggaatacatgtggtgctttggaataaagtcataaaggcagtggtgacacctatactggtaagagatgatgtttcaaaggtgggcccatcacatggtgtcttgaaggtcttggtggggactttgggaattattttgaaggcagtagggtgccatggagggttgtgaggagaaggacctgtggagtgtgggattcaagctgttcacacggcatctgaggatgtgggaagaggggtggggtgggggaatgtcaatgaagtctaaacgaggccggg

SEQ ID NO: 23432 - DNA, 1670 bp, Artificial sequence
  DNA replication origin
atggcccgcccctccagccgaatctccgactcgcgcgcggcctgaggcgtggctcctggtggccccgcccctgccccgcccctgtcgcggccggcctcccccgccgggctccgctcgcacggccggttcctctttacataacggcgcggggcggcatgggcccgggccaccgcctccgcccggctgcccgcccggactgtcgcggcccgcggtggcgacggcggccgctgcaaagtttccccggcggcggcggcccgggggcgcatcctcccgcaactgtcaagcgctggcggcggaaatgatgaggcgctggccattttccgagcccgggtttcctgcctgagccccgctcgagcgagccgcgagcgaggagccggcgggcgggagaggacgcgcccagggcgggggcccgcccgccccctcgggatttcgagggcccgggggcgcgcgacgccatgggccggccgggcccagagctcctgtctctcaggtgagcccgcgtttgcccgcgctcccctcctccggggccgggagggcttttgtggggaaagaggaggccccgtgtccagttctgcccgggctctgcgcgtcacccccagcccaaaatactgccctgcagccaactcggatggaggcgttccggggtgacggctcccagcgcctacgaccccccactcagccactacccccacccacacacgtgttagggagagcgttggggtaactgaggccgtgggatgggggagagggcatcgctgacgcccccagcccaccctacggtagcctcgccggttgggggcggccctcccctcaacttgtgcctggggaggagcggtcaggggtcacccattgctaccctgaaagtgaaagtagtcaaactgaggctgtgagcacagatgagcccttgggtgtgggggcagcgggggaggatgcgccggcccctccccactccccattccgggccatgtggctaagagggtagcgccctgattcaggaagcccctctccccagttcctgcactgccgaggtcgaccgggccaggcccccgcatgctgctgaattgggcggttcaccagggctaggcgtcccagagacaggtttctggtattgatcctctcacacctcttgcctggggttccctgggaatcccccgaccaaaaaacgtctggagtgggtgttggtcttctagatccgcacggtagggatggtatttcagaggtctctgatgcctggtgcagaaatccccttccctcccttccctccctccggccaggggagctttgttttgagggagggggactgcatttgaggaactggagaggagggtctgcctgcctgtcccgcttctttttttctttagtttcctcattctcctgtttctcttccccattcccagccacaatgatgtaggtgaggaggtcactgcctgcagctgggggcctccagggaggggcacggccaggctgggctgagtgggaggaagtgaaatctggtggggggttcagagcagaggccccggcaaggcaatgtcggcaaggccagctttggtggcaggagggaccgagatctgacccgcagcccctcgccggggagatgacagttccctaacaccggctagcagccaggcctcagggcccctgccagggcagtgggcctgtgggtctccagg

SEQ ID NO: 23433 - DNA, 1122 bp, Artificial sequence
  DNA replication origin
gcgctcagtgccttatgtgccatgtcacagcaagtgcacagctgttaaagcctttcacagatgttgtctcaattgcctcagagagcttaagtgatcaacccaaggatccccagcaatgggagaccctcatgaacaccagccctcagaagggtgtggggtcatgtaaactgggtcccaaaggtgtttccagcaaaaggagctgtattggcccagactgtgggacagctccctactatgtccctgagacccccttcactgaccctccccaccttggctggggagggcacccggtctcccctcaccacagacaggtggcactgagactggcagcgaggaggtccctccaagtgcctccagctctgctccacctgggatatggagaatgtctgggggtggcacagcgggagccagaaatccaagggcccagcagtcctgtgggatctgatttgtactcaaaagttctatttatcggagaaggaggatcaggcccaggtttgagaggcatgggggtgggggtggggggatgaggaaagaaagccagcagagctaacacccacaacaaaaaagatcattccggccccaaggctacttcttctcttcctcctgaccaagccactctggacactgtgaattcactcattcatggttcccatgactctaggaagtaggtactattagcacacccatttcacagatgaggaaactgaggtggggcagttaagcaaggccttatagctaaggaagtgcccagatcttcaaaattctgctcccaaagacccaggaaattccagtgctatgtatgcaagagatgctcaagggagactactgaaggaacacctcatagccaataacagtaacactaatgaaggcaatgataaaatcaccactaccaccaccaccacctgcaactgaacctctctttgccaggcagcaggtgctcattacacactggctcattaaatctccactgcaaacctgttactcccccattttacacagagggaaactgagggcagagtcacttgcccacgccttcagctgaacgaaggcaataggagtagcaaagcacagtctccaggaccctcctcactatcctcctccacttcctgctgagcccctgca

SEQ ID NO: 23434 - DNA, 831 bp, Artificial sequence
  DNA replication origin
aggaacttcttggccaggccaggccgggcgggggtctcagcagcctctccgggggtcccgggggcggcagcggtgtgggccgctggcagctccccggccgagcggcggcggaagatgtggcggaggctgcggcgaaagtgctggaaggagcagggcccgggcggccgcggcggggccagctcctcagagctgcgggccttgggcaggccaggggcggcggggccggggcctggctccggggacgcctcggccttggctgggggcccacggcctgtgtcccggtagtcgcggcccggcgcccgtccgtcgcgcacctcgcggcagaagtagcgctggaagaggtcggtgaactgcagcgacaccagctcggcgcgcagcggcgcgtgctgcggatgctcccgggcgaacagccagtactggcgggccagctcccgggccgccgctacggcgtgcaactcacagaactcgctccagccccgcggggccgccgccggggaggctgagggcgcggaagagggcgaggagggctgcagggcaggcccgttcatggcggagacccaggtggtgcggccgggctgaaagacacgtgggtgggggggcgacaaggagtaagcaggtgggcaagcaggtgtaggccccattacacaccgggcaccacagcagaaatccaacgcgaccataacacccagtgctggtgaagatgcagggaaacatgcactcccctaccaagtggcattctgtaaggggcatggccaatttggcagaattgattctagactctggaatcctgcttttgaagtacaaaaaccatatgatcatttcgatagatgc

SEQ ID NO: 23435 - DNA, 1035 bp, Artificial sequence
  DNA replication origin
gccaaggccgaggcgtccccggagccaggccccggccccgccgcccctggcctgcccaaggcccgcagctctgaggagctggccccgccgcggccgcccgggccctgctccttccagcactttcgccgcagcctccgccacatcttccgccgccgctcggccggggagctgccagcggcccacaccgctgccgcccccgggacccccggagaggctgctgagacccccgcccggcctggcctggccaagaagttcctgccctggagcctggcccgggagccgccacccgaggcgctgaaggaggcggtgctgcgctacagcctggccgacgaggcctccatggacagcggggcacgctggcagcgcgggaggctggcgctgcgccgggccccgggccccgatggccccgaccgcgtgctggagctcttcgacccacccaaggtaagtaagccctgcccgcggggttgcgcactgcactgcgcccttcgccttcaccctggggagagcgcgggctggggaggtgtgatggctttccagctggtggccacagagtgtccagagggaactaggccctcttaaaaaagaacttttaggccgagtgcaatggcttatgcctgtaatcccagcactttgggaggccgaggcaggaggatcgcttgagcccaggacttcgagaccagcttgggcaacttagcgagaccctatctctataaaaaattagccaggtgtggtggtacgtgcctgtggtcccagctgttcgggagactgagaagggaggatgacttgagcccaggaggtggaggctacagtgagccgtgatcatgccaacacactccaggcctgggtgacggagtaagaccctgtctctaaataaatacaataaaaaagaactttttattttagaattttagatttacaggccaggtgcagtgggtcacgcctgtaaccccagcactttgggaggccaaggtgggcagatcatttgaggccaggggttcaagaccagtctggccaacatagtgaaaccctgtctct

SEQ ID NO: 23436 - DNA, 1191 bp, Artificial sequence
  DNA replication origin
tcaacagcctccactaggcccgcctggtcccccagaacctagcatgtgcctaacacatagtaggtgctccataaatatctgtcgaatgaatgaaagagtaaccataggtttcctccacccacatcgtgagcccctcagggccagtatcacatcggttttgctcatgctctagagtaaggccctaccacgtaacaggatcccaaagagagagcaattagatgaaagccatatggtcctgtcatgcatacctgagtcaaagatggagcctggcaggtgagtagaacacagtgacctttcagcctcaacagcacagtaggaattaagccagctgtgaaggaaaagaacttttttttttttttttttttttttgagacagggtctcgctctgtcacccaggctgtagtgctgtggtgcgatcttggcttactgcagccttggtcttctgggctcaagcgatcttcccaccatagcctccagagtagctgggaccacaggcgtacaccaccacgcccagctaattttggtattttttgtagcaatggggttttgccaaaggacaaattctttttaacttgcaaaatatcaccaaggcacaggaggtgcagagaaattctctgaaggttttgagccctctggaaataaaacaccaatctgtcaatgccagtctgagtcagagttttcaaggatctcagagtgacctgctaccagcccacatgacacccaaatgtgaaggcaaaaaggtgtccctggacattgtacaaaatccttgactggtactcctcaaaactgccaaggctatcagcaatagagggttggaaactgttacagccaagaggcgcctaaggagacgtaacgactaaacctcatgtggtatcctggggggcgagctggaacagaaaagggacattagaggaaaactggcaaagccaaaggaacagtggcgtttagctaatagtgatgtacccgtgctggttccttagctacaaccaatgtacacagcagcgtaagatgtgaaccttcggtgaagctgggtaccatgtgtaaaggaacactactatctttgcaactttcctgtaagtctaaacattttttttttttttgagacagagtctcactctgtcaccaaggctggaatacagtggtgcaatcttagttcactgtaactttccctcccaggttcaagtgattctc

SEQ ID NO: 23437 - DNA, 993 bp, Artificial sequence
  DNA replication origin
gctgacggcagctggcatgcagcaggggaggtgtgctgggaccaggcctggagtggggtctggtggccctgccgtgtatggagctgagtgccgcccagagatgccatcttgtcctcagaagtggctcaggcctgctggggacagggcaggtggatggaagctgctgcatgccctgtgccatgtgctggtccgctggctgtcactgcagcgcagctcccggtgcctgacagttgtttgtccttatttggcacttgagagcccagcggtttggccagaatggtgccctgtgcggagggcacagcttgagtgaaggtgtggagggaaaaggccctgggggtgtggctcccctccttccatcctgctccttgcaaggcccatcccaggacattcctcctagccaggtgggctggatggggcctggacttcctgtccatgttttgggatgagagcgctggggaaggtgcccactgcggggtagggagtgtagggctttccaggcatcatccctcataagccactgtccccaggccttgcgcatagccccaccatagccgactcgagagtagaagcgtcccaccatcctcacagcaggctgcaggggccatgtgtaactggcccctccacccttggccacctggtggagtcggcacccatatctgaggaggggaccatgttgctgctggggactctgggctggtctggaagcaggtgtggtgggggctgtctttccctgtgtgaaggtcttcctctgggtgtctgtcgctgtagggaggccactctagcatctgaaaggggctctgtgtccttgccatcatgattctgtcttgggggtggttgctgtctctctgagagggggctttgtgtctgtgtccctgtgattctctgacatgcaggaggaccatgatgggaactgaggggaattcactctgggtggggttttagacaggtccccaagtcctgtctgtcccagcatctctggctaatcacttcccc

SEQ ID NO: 23438 - DNA, 1245 bp, Artificial sequence
  DNA replication origin
tttaaccctgagtgacacagcacatgtttcagagagcacagggttgggggtaaggtcatagatcaacaggatcccaaggcagaagaatctttcttagtacagaacaaaatgaaaagtctaccatgtctacttctttctccacagacgcagcaaccatccgatttctcaatcttttccccacctttcccccttttctattccacaaagccgccattgtcatcatggcccgttctcaataagctgttgggtacacctcccagacggggtggtggccgggcagaggggctcctcacttcccagaaggggcggccgggcagaggtgccccccacctcccggacggggcggctggctgggcgggggctgaccccccacctccctcccggatggggcggctggccgggcgggggctgacccccacctccctcccggacgggttggctgccgggtggagatgctcctcacttcccagacggggtggctgccaggcggaggggcttctcacttctcagacggggcggctgccgggcagaggggctcctcacttctcagacggggcggccaggcagagacgctcctcacctcccagacggggtcgcggccgggcagaggcgctcctcacatcccagacggggcagcggggcagaggcgctccccacatctcagacgacgggtggccgggcagagacgctcctcacttcctagacgggatggcggccgggaagaggtgctcctcacttcccagactgggcagccgggcagaggggctcctcacatcccagacgatgggtggccaggcagagacgctcctcacttcccagacggggtggcggccgggcagaggctgcaatctcggcactttgggaggccaaggcaggtggctgggaggtggaggttgtagcgagccgagatcacgccactgcactccagcctgggcaccattgagcactgagtgaacgagactccgtctgcaatcccggcacctcgggaggccgaggctggcagatcactcgcggttaggagctggagaccagcccggccaacacagcgaaaccccgtctccaccaaaaaaatacgaaaaccagtcaggcgtggcggcgcgggcctgcaatcacaggcactaggcaggctgaggcaggagaatcaggcagggaggttgcagtgagccgagatggcagcagtacagtctagcttcggctcggcatcagagggagaccgtggaaagagagggagagggagaccgtggg

SEQ ID NO: 23439 - DNA, 836 bp, Artificial sequence
  DNA replication origin
tctgcccggccacccgtcgtctgagatgtggggagcgcctctgccccgctgccccgtctgggatgtgaggagcgcctctgcccggccgcgaccccgtctgggaggtgaggagcgtctctgcctggccgccccgtctgagaagtgaggagcccctctgcccggcagccgccccgtctgagaagtgagaagcccctccgcctggcagccaccccgtctgggaagtgaggagcatctccacccggcagccaacccgtccgggagggaggtgggggtcagcccccgcccggccagccgccccatccgggagggaggtggggggtcagcccccgcccagccagccgccccgtccgggaggtggggggcacctctgcccggccgccccttctgggaagtgaggagcccctctgcccggccaccaccccgtctgggaggtgtacccaacagcttattgagaacgggccatgatgacaatggcggctttgtggaatagaaaagggggaaaggtggggaaaagattgagaaatcggatggttgctgcgtctgtggagaaagaagtagacatggtagacttttcattttgttctgtactaagaaagattcttctgccttgggatcctgttgatctatgaccttacccccaaccctgtgctctctgaaacatgtgctgtgtcactcagggttaaatggattaagggcggtgcaagatgtgctttgttaaacagatgcttgaaggcagcatgctcgttaagagtcatcaccactccctaatctcaagtacccagggacacaaacactgcggaaggccgcagggtcctctgcctaggaaaaccagagac

SEQ ID NO: 23440 - DNA, 1052 bp, Artificial sequence
  DNA replication origin
gcagctcctccactcccggtttaggtgtgaacgttggaggggtctggaggctgtggtggcgttttccggaacatgtccccctccatgggggacatctctggaggggagaagttagggccgcgtcccccgtgccggttaaaggggtaggcaccgggctcctccggaatcatcagggtctgtcggggctctctccccgccccctccgagtcctgggaaagatcggaggacggggtggagacaagtgggccttggcccccgcacccctctgcgttcgtgtccgaggcggcggcgggggctcccgaactcccctgaaatcgtggggctccatgtggcctccggcagcgttccaccctcccccacctggggaagggaaggggtggggagtgcccggccccgtcccggccttcctccttcccccgccagacctctccggcgcgcgggtggtggccgatccgcattgctgttcgaggccgcagtggagaaggcgcctgtggaacatcggtgggtgagggctggacccaggctggaccctggagatccggggtggcggtgctggtggcagggggcgggcaccctgcgcacttatcccaacccccgccccaatttcggaaatgctaggagagagagattgcagcaggggacgtggtcgggttcctgaaggcagaaaggcgggtgtttactagcgtctttttccctcctaagccggggttgtagtaggggctgggggctcagtgttgtcccggctaactgggtttgactcgagggtgtgtttgtgcaggagggcctgttgggggtggcgggcggttgtcagttcgtatttcacgaactaagaaaatgcttagtgttcaaagggagaaggaaacgtcaatagactccattccattgtggccggtgtccttaacttcgggagtgccgccagagcttaccaagggcacgcaagtccatttcccttgtgcctcaagtccatccgtgttgtaggcactactgtgccttctttaggcctaggccgccggcttgacggcgggtgaccggcgtcctccttaaataggcat

SEQ ID NO: 23441 - DNA, 1020 bp, Artificial sequence
  DNA replication origin
tgaagccccagcagcagcagcagcagcagcagcagcagcagcagcagcaacagcagcagcagcagcagcagcagcagccgccgcccgcggctgccaatgtccgcaagcccggcggcagcggccttctagcgtcgcccgccgccgcgccttcgccgtcctcgtcctcggtctcctcgtcctcggccacggctccctcctcggtggtcgcggcgacctccggcggcgggaggcccggcctgggcaggtgggtgtcggcaccccagccccctccgctccgggcccggcgtcccctcccccgcggcccgcgccgccgtccccgccccgtgacccgccgggctacccggggtgggctgggggccggcagcgcgggggagactcgctcgggcctgagccccgaggctcggccggtgggcgcagccggggtcctctgggattgtcaggcctgtccagcctcccgcagcatccccgccccctcccccggcggtcaagatggagggagcgggcggcctcccctccccacgcgtgttgggaggggttctcgggtagcggcgatggtcagccccggctcccccttccgcacgatcctccgcccgcagcgtggggatgctcgggcagctcctccactcccggtttaggtgtgaacgttggaggggtctggaggctgtggtggcgttttccggaacatgtccccctccatgggggacatctctggaggggagaagttagggccgcgtcccccgtgccggttaaaggggtaggcaccgggctcctccggaatcatcagggtctgtcggggctctctccccgccccctccgagtcctgggaaagatcggaggacggggtggagacaagtgggccttggcccccgcacccctctgcgttcgtgtccgaggcggcggcgggggctcccgaactcccctgaaatcgtggggctccatgtggcctccggcagcgttccaccctcccccacctggggaagggaaggggtggggagtgcccggccccgtcccggccttcct

SEQ ID NO: 23442 - DNA, 1484 bp, Artificial sequence
  DNA replication origin
atacaccggctcgcacgccgggcggggacagccgggagccgggcgcgccaaggagacgccggaacgcggcggggacgcgcgggcgccgagcggggaggcgcgggttggcgcggccggaggggcgcccgggctggcgagggggagaaggaggacgacgaaggggcggggaggcccgccgagaccaaggagccgccgggagccgggccgaaacgcgccgccgccgttgccgttgctaccaaaacagtctgaggcggagggaggcgagctctgccgggagggaggggggccggggccgggcgggggaggggcggcggagggatacggtcccggggccgcgccaccgccgccccgcccgctccgccgcgccggccgctggagcgagcgccacccgggccacctggctgcggcgaagcggcgagactcggtggccaccgcgggactccgaggagctgcggccgctgagcgcatcggagggcgggcgcgccgaggcgccgggtgggagcggaggtgcggatagggactctttaccggaagtcggaggggtcagacggaagcagaacgtgaggtggccccggggccgggagggacacgtgaggagcgggcggcgcgctgggttgctttctcgggggtcgggtgagggccaggcggcggtccctacccggatccgccttcctcaaggcgggtctgcccttcggggagggcgtgtcggtctcagcctctggggcctgcctggtgtggaggacaggagagaagcatttcttctcctactgtattccttcagcatcttcacttctgcggggacctagtttgcccccacctgatgcaacccagaaaatggactgactgcgagtgccttggggcggagaatgtgtcttgctacgtgtaaagcacctagaaccctgccagattcaggggacacagcatcctgccgttttcctgccgtcccccgcccgccacacagtaggcgctccagtggctcggggcatctaccaggcaggccgcgctgtcctgccctgccggggctggagtggagcaaccctccggggccacccacatctgggtaccttttccccactttttccaccccagccgcgcacagtcaccagaaaactcttttaggtatctgaccttcatttgaacctatgttccctcacttgaacttctttttcctcattcatgagattctaaaggaaatatatgggattgggactggtagaactacggataatgggatctccctcggtagagacagagccgacctcaaaacaatgtgcgaactttagaccttggaccctttagaagttttaatttaacttacccagccagcacagtagactctttttaaaatgtgttgcagttaaactggaagcaagtagaaagtaggtaacttttttttttttttttgagcagtgaatctattgttttttaaagtgaaatgacttcaggaaataataggggaagaaacaccaaaattcccctcaatg

SEQ ID NO: 23443 - DNA, 960 bp, Artificial sequence
  DNA replication origin
gtccgggagggaggtgggggggtcagccccccgcctggacagccgccccgtctgggagggaggtgggggggtcagcccccccgcccggccagccgccccgtctgggaggtgaggggcgcctctgcccggccgcccctactgggaagtgaggagcccctctgcccggccagccgccccgtccgggagggaggagggggggtcagccccccacccggccagccgccccgtccgggagggaggtgggggggtcagccccccgcccggctagccgccccgtctgggaggtgaggggcgcctctgcccggccgcccctactgggaagtgaggagcccctctgcccggccagccgccccgtccgggagggaggtgggggggggtcagccccccgcccggccacccgccccgtccgggaggtgaggggcgcctctgcccggccacccctactgggaagtgaggagcccctctgcccggccaccaccccgtctgggaggtgtgcccaacagctcattgagaacgggccaggatgacaatggcggctttgtggaatagaaaggcaggaaaggtggggaaaagattgagaaatcggatggttgccgtgtctgtgtagaaagaagtagacatgggagacttttcattttgttctgtactaagaaaacttcttctgccttgggatcctgttgatctgtgaccttgcccccaaccctgtgctctctgaaacatgtgctgtgtccactcagggttaaatggattaagggcggtgcaagatgtgctttgttaaacagaagcttgaaggcagcatgctcgttaagagtcatcaccactccctaatctcaagtacccagggacacaaacactgcggaaggccgcagggtcctctgctaggaaaaccagagacctttgttcacttgtttatctgctgaccttccctccactattgtcctatgacccagccaaatcccc

SEQ ID NO: 23444 - DNA, 1649 bp, Artificial sequence
  DNA replication origin
aggggcggccgggcagaggcgcccctcacctcccagacggggcggctggccgggcgggggggctgacccccccacctccctcccagacggggcggctgtccaggcggggggctgacccccccacctccctcccggacggggcggctggccgggcggggggctgacccccccgcctccctcctggacggggcagctggccgggcggggggctgacccccccgcctccctcccggacggggcggctggccgggcagaggggctcctcacttcccagtaggggcggccaggcagaggcgcccctcacctcccggacggggtggctggccgggtggggggctgacccccccacctccctcccggacggggcggctggccgggcggggggctgaccccccgacctccctcccggacggggcggggggctgacccccccccccacctccctcccggacggggtggctgcccggcggagacgctcctcacttcccagatggggtggctgccgggcagagaggctcctcacttctcagatggggcggctgccgggcggagggcctcctcacttctcagacggggcggttgccaggcagagggtctcctcacttctcagacagggcggccgggcagggacgctcctcacctcccagacggggtctcggccgggcagaggcgctcctcacatcccagacggggcggcggggcagaggcgctccccacatctcagatgatgggcggccaggcagagacgctcctcacttcctagatgtgatggcggccgggaagaggtgctcctcacttcctagatgtgatggcggccgggaagaggtgctcctcacttcctagatgggatggcgtctgggcggatacgctcctcactttccagactgggcagccaggcagaggggctcctcacatctcagacgatgggtggccgggcagagacgctcctcacttcctagatgtgatggcgtcacttcctagatgtgatggcggccgggaagaggtgctcctcacttcctagatgggatggcggcggggcggagacgctcctcactttccagactgggcagccaggcagaggggctcctcacatcccagacgatgggcagccaggcagagacactcctcacttcccagacggggtggcggccgggcagaggctgcaatctcagcactttgggaggccaaggcaggcggctgggaggtggaggttgtagcgagccaagatcacgccactgcactccagcctgggcaccattgagcactgagtgaacgagactccatctgcaatcccggcacctcgggaggctgaggctggcggatcactcgcggttaggggctggagaccggcctggccaacacagcgaaaccccgtctccaccaaaaccagtcaggcgtggcggcgcgtgcctgcaattgcaggcactcggcaggctgaggcaggagaatcaggcagggaggttgcagtgagctgagatggcagcagtacagtccagcttcggctcggcatgagagggagaccgtggaaagagagggaggggagaccgtggaaagagagggagagggagaccgtggaaagagagggagagggagaccgtggaaagagagggagagggagaccgtggaaagagagggagagggagaccgtg

SEQ ID NO: 23445 - DNA, 967 bp, Artificial sequence
  DNA replication origin
aaggcccacggcggcgcggggccttcctaggggcctgcgggggactcgggccggaaaacaaagcgcgagcccggccggtgggctcacctggttgcagaagacctcgggctgctggttgggggcaggcacggcctgggtggcggcggctgacaagaggcggcggcccaggcggggcccgaagcgggcggcagcgcgcaacatcgcagcgggctagcggacagcgagcggaccgagagcagagctagggtctcagggccactgagccgaccccgctccccgccccgcgcggcagccaatggaaaggcgggggcgggccgggggcggggctgcctctaccattcctcgggatggggcgcgcagctgatgcaagcgaagcgggtggcgctaggtacccccggcccgtggctgccccctggctcgcgcgacgcctccgcgcccgccaccgccctccgcctgtgcggaaagacccggccccgcgaacgcagctcgccttggttgagcccccaatgtgtgcctttgaccccaatgtgaacaggcccgagccagggcgaccctgaccttcccggctgatgctccaggtgaagagaccggccgtaaacccaaaagcgagatcatttcggaggtgaaggagatgaacgaggtgacatggatggggcagacggcactgcttttataagtaccatggtcaggaaatgacaagtgagacctgaatgatgacagggaacagcaagggcaaaggccaggagatgagaccacctggcacgtgttagagaaatggaaagaatgaatggagcccagttaacaaggagagaggcggccagggcaagggcagggacggtcttggaagcagcggttcagagtttagaacaggatgatttgcatgatttgcttattcttttttttttttttttttttgagacggagtctcactgtgtcgcctaggctggagtgcagtggcacgatctcg

SEQ ID NO: 23446 - DNA, 912 bp, Artificial sequence
  DNA replication origin
ttcctactgaggctgttgtaaaaattaccttaaattgcaaaacaggtagacgcttagaacagtgctgcacaaaggctgtgcagacaggacaggagctgtgattaactatgaagtgactggttgatgagggcctgtgtgaacctaaccctcagagcgcctttccatttataggagaaaaagcttaagtcagagaaggcagccaacatgcactggcacaaacaaaacaaactctttcataaccaatttcagcctctgtgaagtctagaactttaaccaaactcaaagatcaaaacaaaaaatattccaaagtattactgattgagcaatcaataaatggaccacaggaatcagttttatcctggaaagctcctccttggtttggtcgaagccggcgttggaagccgcagacaccccttggggtcggccccctggggccgaaggtcctccaggattccctactcccagcaatggaagcagccgagcgtggcctcgcccatggtgaactggagaacgtggctgcaaatcacctctttcctggtttttccttttgaactccttggatgagggcatgagtcagggggtaaaggggatgactaaggaaaagacaggaaagttcctgcaaagagggacttggtcgcgtcttctgagtgggtgagggtggggaccctgcggagacccgaaagcaaggaccatggggagaacggaaccccgagagttggccctggaaaacagaccgaggctgggcgaagacggagagggggcccaagtcacggggaaatgggacggggactgtcagaggcggcgaaggggctaaaatgcttgcaggagaggagggggcagatgtgcttccaggtcagcctctgcaaacccctcgagccccagatgagtacactaaggcccacggcggcgcgg

SEQ ID NO: 23447 - DNA, 988 bp, Artificial sequence
  DNA replication origin
ccggcgatgtgtggcgctgaggcggcggcgggagcagcggcgccgagctctgcttcggcttcggcttcggcttcgcggcggtgcaggcggcggaggcggaggcgcaggctcttctttaggacctggcgagcccaggtctaagcggcggccccgcgaggcccttgcacggcgccccgggtcgaggccctccccgcctcgccctaccccaggagcctgcctccccagctggggatgaggctaggaggcggccgcgtggggcccagcacaaagacctgtccccaggggccgccgcctccgccgctgctgctgccgccagcctagagccgcccgccgaagcagagccggcgccggggtcctcatccccaccggtcccgaggggcggctgctgcccgtcgccacgaggcccaggggcccgagtgccgagccctttgctccctcggccgcgcggggacagggctgctgagcagcctccgcctctcccggctgtgggggccccactgagtatgtcggaggagagcgacatggacaaagccatcaaggtaagggggaggtgccccctcttcccccgcgttgtcctgtggcgttcttctcggctctagcctcaaaaagcagggagattttgcagtgagaggttccatcgactaccgggtttcggcctcccccggattccgtggatcgcgctttacagccctggggccaagggttatgggtgtgggtgtaggtgtgtgtccgactcccgccagcttccctggtgagtgtgatttgtgctcagctggaacagaggtgagtggcctggagacactattaagtgtcaatgaatgggacgaagagagccctactactactactacacgtttcgatcactccccaaggccgccagcatttgcttccggatggtctacagaacttggagagttggaatttatccatccctcccgatttgtttgaaatcagccttctggaaatctgcagttggaaaaaggtggtt

SEQ ID NO: 23448 - DNA, 1473 bp, Artificial sequence
  DNA replication origin
tctctctttcttttccccacatttcccccttttctattcaacaaaaccgccattgtcatcatggcccgttctcaatgagctgttgggtacacctcccagacggggtggtggccgggcagaggggctcctcccttcccagacggggctgccaggcagaggggcccccccacctcccagacgggacggcggccaggcagaggggctcctcacttcccagacggggcagccgggcagaggggccccccacctcccggacggggcggctggccgggcgggggctggcccccacctcccagacggggcggctggctgggcgggggctgccccccacctcccggacggggcggctggccaggggggcgctgccccccacctcctggacggggcggctgccgggcgtagacgctcctcacttcccagacggggtggctgccgggcggaggggctccccacttcccagatggggcggctgccgggcggaggggctcctcacttctcagacagggcggccagtcagagatgctcctcacctcccagacggggtggcggcggggcagagacactcctcagttcccagacgggatcatggccgggcagaggcactcttcacatctcagatggggcggcggggcagaggtgctccccacatcccagatgatgggcggccaggcagagacactcctcacttcctagacgggatgacggccaggaagaggcactcctcacttcccagactgggcggccgggcagaggggctcctcacatcccagacgatgggtggccaggcagagacgctcctcacttcctagacggggtggtggccgggaagaggcgctcctcacttcccggactgggcggccaggcagaggggctcctcacatcacagacgatgggcggccaggcagagacgctcctcacttcctatacggggtggcggccaggcagaggctgcaatcttgggactttgggaggccaaggcaggtggctgggaggtggaggttgtagcgatccgagatcacgccactcactccagcctgggcaacattgagcactgagtgagcgagactccgtctgcaatcccagcacttcaggaggccgaggctggcagaccactcgcggtcaggagctggagaccagcccagccaacacggcgaaaccccgtctccaccaaaaaatacgaaaaccagtcaggtgtggcggcgcgcacctgcagtcccaggcactcggcaggctgaggcaggagaatcaggcagggaggctgcagtgagccgagatggcggcagtatagtccagcctcggctcggcattagagggagaccgtgcaaaggggagacgaggaccatgcaaaggggagagggagagggaggggtcctattttttgatgttgatgctattcttctgtttgttggttcttagagcaatgtcagggatcagcattaatttctgaactggcatttggaaattattacatta

SEQ ID NO: 23449 - DNA, 1159 bp, Artificial sequence
  DNA replication origin
tctccccacgggcgcgcgctcttccgggcgccccggcggcacctgcgcgcgacgtcccccgccccggttaccttgtagaaagtgaccgtatccaggggaagggcgcccttggtgtgcaggccgctgccgccatgcggagcggagaggagcaggaagcccaggagaaggggaagcagcggggagagaaatgcggcgcggggcacagcggcagccatatcgccgggttcctgcagagggaggtaggtaagcgatagtggagaacgccccgagtcagcggtcacgtgactgggggggcggactcacgcgcgctcacgtggacaccccaggaggctcccatctgtctagggtgagagggtggggccacgtgaggggcggggcgagggaggggaagctgctgcgcacgcgtactcggcgaagctcgcgtagggcctgggtaaaagggcggggccacgttgcgggcgggaaaatgggctcctgcgcgcgcgcactcgccgagtcttccggcgggtccgcccagttccgttcctgctccgcttgaggagaagcgccaagtgcgcatggggacgctatagcaattcgtttgctgtccttcctctccttcgaagatgacaaggcctaccatcgtttcttcctgcctttgggccgtcaggcagttggttgggacccgctccaaccctcggtcagtctattagtcaagttcagccgttattctcagtcaggctccgtcaccaccctgacccaggcgggcagtggctccgcggcttccctgagctttttggccaggcttggcggtcagtgtggcaagcagggccctcttaggcccgatctgaggtgagcgcctcccctgggagacgccaggctcctgggatccgcccagccaaggcccaccctccaggaaccccagacgcaattctaatcattctgttccgcaggtagtcactcggtccctggcttgtgccagactctggctttgcctgcggggctacggaataagcagaaacaagaccgttgtgtgctgaaggcacgcactttgttgggggaggaggcggcataggaataatgatctaaacagtgcagtgtaattgctgtaaaatattattccggctgggcgcgttgactcacgtctgtaatcccagcactttgggaggccgaggcaggt

SEQ ID NO: 23450 - DNA, 986 bp, Artificial sequence
  DNA replication origin
tcgacgctggccctttaatagccctttcccggggtcctgccccgcgcgtgcgcactgtggttctgcgcttgtcatcatggcgacgcggggccatgtgcaggaccctaacgacaggcgcctccggcccatttacggtgagtgtcttggaccagcccgctcgccagcccgacgcgccgagggctgccgaggctggggcgaaagcccaggaggggtgctgagggccggcgcgcgggccgggcaggcgcaggggggcgggccgcgcgggccactaggccgcagccgcgggcctcgcgtaggcgccggcccaaccttcctcagccttggggtggtagtggcgcggtctgggcagcagctggtcggcagagctggcctgcttggcaggccccgtgggacgcgtggttctgcagacacctgcgctacccgcaggctgcatcgttaccgccgctcctagggagaccggagatctccccgaaggtggaagccggctccggcacgagggtgggacgccctgcctgagggaagattccctaccagagatttttttttatttacgggaattgggcctagagggttgtctgactaggtgggcttcggtgcataggagaaactgaggtccggagtggggaaggggctgacgcaaggtcacccagatcgagtcaggagcaggcccgagattccaggctcccaatccagagctgttgggtggagaagcagctactctggtcacacgtgggaggcggggggagggggtcttgggcctaaaatagcggtgaagagattgtgatagctcgtgtcagaggggcatgcagagctactggagggcttctcctttctgcagcttctctgtggttttctctgcagctttccttccctgtgctaagcagatccctctccacaactcttacctcaacccgcagacttgaagaccttgatgtcatctcatccatttaccctggtagtgaaaaatcacagattttgagtttggg

SEQ ID NO: 23451 - DNA, 1954 bp, Artificial sequence
  DNA replication origin
gccgggcgcggtggctcacgcctgtaatcccagcacttcgggaggccaaggtgggcagatcacgaggtcaggagattgagaccatcctggctaacacagtgaaaccccgtctctactaaaaatacaaaaaattagccaggcatggtggcgggcgcctgtagtcccagctacttgggaggctgaggcaggagaatggtgtgaactcgagaggcggagcttgcagtgagctgatatcgcgccactgcactccagcctgggcgacagagcaagacttcatctcaaaaaaaaaaaaaaaaaaaattagttgctcttaaaacaaaaagcatgatgggtttgacttcaggcagggccaaatccaggtgttcaaacagtatcatctggtattggtctcaggcctctgatccagattgctttaaaaaaaaaaaaagaaagaggacaggcgcggtggctcagctgtaatcccagcactttgggaggctgaggcgggtagatcacgaggtcaggagttcaagaccagcctggccaaggtggtgaaaccccgtctctactaaaaatacaaaaattagccaggcatggtggcgggtgcctgtaatcccagctactcgggagcctgaggcagagaattgcttgaacccaggaggcagaggttgcagtgagctgagattgcgccactgcactccagctgacagagcgagaatctgtctcaaaaaaaaaaaaaagaaaaagcggtctgggtgcagtggctcacacctgtaatcccagcgctttggaaggctgaggcaggtagatcacctgaggtcaggagttagagaccagcctggccaacatagtgaaacccagtctctactaaaaatacaaaaattgaccaggcatggtggtgggcgcctgtaatcccagctactcgggaggctgaggcaggataattgcttgcacccaggaggcgaggggttgcagcgagccaagattgcgccattgcactccagcctgggcaacaagagcaaaactccgtctcaaaaaaaaaaaaaagcaagcataattagcctcaagcagtctctcccagcgcacgggcagaggtggcctccagtggtaaagggtttcccatcatagtcggtccatgccagtgagagaggatcgctgcctccaaacagacgtgggaagaggcctggaatgtgggtctctttagcctggcctgggtcacacgcccggccctgaactgatggcaggttctgattggcgaaagctgtgtcacatgctcatctacacggccgagggtagaccccaccagctgcgcttggggtttacccagccacctggggatcagggttccacctcccatggcctcataatgagcctcgctctgcctccaccctccagatcaatgatgagaccgagctggaggccctgtgcgctgagatcgcctcccagcacctggccacggagagccctgacagccccaacaagccctgctgcaggttcacctacctgaccatgacgggcgaggaggtggagctgtgcagccggggccggcacatccttgtggcgtgagtgtgtgcgcgtgtcaggggctggcaggggctggcccggccagccagccagggtatgacagcagcatctgttcctgggcaatgacacgaggacctaggtcaggtgacaggtggatttcaccaggagagggagatgaggcaggatggtgggtgccaagaaagagggtcctcagcagaaggggtttactaagaaaacagcagctctgaggcggcggcaccagaggcaggaaaggactgggatgaccagggcggctgggccccaggcctctcccaagagaggatccgggacctccagctgagtgggtgtggcccccagacccagcctcttcggcggtgttctccctcacctgtgctcctcacccgggcaggtgggagaacaaggacatctacgcggcagccatccggagcct

SEQ ID NO: 23452 - DNA, 1958 bp, Artificial sequence
  DNA replication origin
ctcagcaactggctaatattaattttttttttttttttttagtagagacagggcctcactttgttgcccaggctcatcttgaactcctggcttcaagtgatcctcctgcttcagcctcccaaagtgctgggattacaggcatgagccactgtacctggccctttttttctttttttgagacagggtctgtctcactccgctgcccaggctgcagtgcagtggtgtgattgtacttctctgcagccttaaactcctgggctcaagcaatcctcccaccttagccctccaaatagctgggactacggacatgcaccattaaattaaaaaaaaaatatatatatatatacacacacacacacacacatagtgatgtggtctcactctgttgcccaggctggtctcaaatccttggccttaagctatcctcccaccttggcctcccaaagtgctgggattacaggtgtgagccactgtgcctggcctgataaggtgatatttgagcagagacatttaaaaagtgagagaagcagccatgtggttatctacagtccaatattccagcacaagggacagagggggaacatacttggtgtgtgtgagtaacatggaggaagcatggctaagtggcatgaacaagaaggtatggtaggtgcagagggtgtaggtgcagcaggtggtaggtgcacagggtgtaggtgcagtggatgtaggttcagtggatgtaggtgcagacagtggtaggtgcagacagtggtaggtgcagagcgtgtagatgcagtggatgtaggtacagagggtgtaggtgcagtggatgtaggtgcagtggatgtgggtgcagagggtgtaggtgcagtggatgtgggtgcagagggtataggcgcagcaagtggtaagtacagaaggtgtaggtggagtggatgtgggtgcagaggatgtaggtgcagagggtgtaggtgcagtggatgtagatgcagatggtgtaggtgcagaggatgtaggcacacaaggtgtaggtgcagtagatataggtgcagagggtgtaggtgcagtggatgtaggtgcattggacgtaggtgcaaagggtgtaagtacagtggatgtaggtgcagatggtgtaggtgcagaggaagtaggtgcattggatgtaggtgcaaagggtgtgagtacagtggatgtaggtgcagagggtgtaggtgcagcaagtggtaactacagagggtgtaggtgcagtggatctaggtgcagatggtgtaggtgcagagggtatagatgcagtggatgtaggtgcagatggtgtaggtgcagatggtgtaggtgcagagggtgtaggtgcagtggatgtaggtgcagaaggtggaggtgcagtggatgtaggtgcagatggtgtaggtgcagaaggtggaggtgcagtggatgtaggtgcagatggtgtaggtgcagagggtgtaggtgcagtggatctaggtgcagattgtgtaggtgcagagggtataggtgcagtggatgtaggtgcagatggtgtaggtgcagaggatgcaggtgcagaaggtgtaggtgcagtggatataggtgcagatggtgtaggtgtagatggtgtaggtgtatggatgtaggtgcagagggtgtaggtgctgtggatgtaggtgcagagggtgtaggtacagtggatgtagatgcagaaggtgtaggtgcagagggtgtaggtgcagtgaatgtaggtgcagagggtgtagatgcagtggatgtaggtgcagaggatgtaagtgcagcaagtggtaagtgcagaaggtgtaggtgcagtgaatgtaggtgcagagggtgtaggtgcagtggatgtaggtgcagagggtgtaaatgcagcaagtggtaagtgcagaaggtgtaagttcagtggatgtaggtgcagaaggtataggtgcaacaggttgtaggtgcagtggatggcagtacagagggtg

SEQ ID NO: 23453 - DNA, 1240 bp, Artificial sequence
  DNA replication origin
gccgctggcgggcgcggcggccgctgccatggactggtgatcgcggcggctcctgctccgtttcccccggccgggcgtctgctcctcagcgccaagccttcagccggggccatgggctcgtcggcggccgcggcggcggcggcggcggcggccgctgactcggcgcagtggctctcggtgaaggaagagaccatcttcctgcacgacgggctgatccgggtcaccgacctggccgagctgcccagcgagatcctcggggccccagaggccgcggacaccgacctggaggtgagcgaggcggcccccggcccccgccatcggactgacccactcgcccggcacccccgggtcgggccccctcctcgcctcagccgcggcctcgcctcccggcggctgccggggcaggtgtgtgtgggcgcggggcgggcaggtggggccgcggccgcaggtctgcggaccgcccgccccgctctccctccctccctcctcggggcctggcgcccgcaggggatttcatttgtggttttcttttgagcgttccgacacccggcattttattaggctagcgcctggctcggccttcatgccccagaggagccaccgccaccacccgggccctccctcccctcccccacgggcccccaggacccacttccagggcacacccaggttgcttagctttgggaacattttgattttcacgctgtgtaccctcccatccttttcttccctagttctgttttttttgtttggtttggtttggtttttttccgggagagggtagtggcagctgcgggtccgcgatgggcaatccagcaacttctctgtgttgtgtctcggatggattgacacggggcctttgtcagggaagcgggcgctgtggacagcgagagggatgctccagcggccctccatgcactctcggggaagggtcactggcgcgttaggccgcagggcctttttgtgtgccccgggggtcgccaagcatcccgggttcagagccgtggcaggtgcaacagcagatctcatcagttgagctgcttggccttgggggcagaagggaaccaaatatgcctggttggtgggaactttccatcgacttcacttgggttcgtgtttgcctagaggtgggaatactggcagtgtcgtttcatggaggccaacggatgctgacactgctccccttccactttgtgggatgacattttgatgtgtaggtagcatggggtgtcatcaaatt

SEQ ID NO: 23454 - DNA, 1319 bp, Artificial sequence
  DNA replication origin
ccgacgagcccatggccccggctgaaggcttggcgctgaggagcagacgcccggccgggggaaacggagcaggagccgccgcgatcaccagtccatggcagcggccgccgcgcccgccagcggcgccccacttgctgcctcgcccgtgcaactccgccctaggcggtccgagtcgccatacccccgaccccggcccgggagaccccggccctgccgccgccgccgccgccgccgccgccgccgccctcaggagcaggatccgcctctgccgctcggcaaccaactgtcagtgagacgccatgttgggggcggggctcccggcatgcctcgcggagcggacaatacaggccccgcccgccgctccgcccaccgctccgcggacgaggccacccgggtggcctggacgtccgcctagcccttcgctgccgcctgccctcggcctgacctccgccggccccttctccccctggccattcagggtagccctggctttgcagcgcgccagggaagaggacgccgcttcccccgtcctgtccctactcaggtgtgcaccccttgctcgggcccgcgcccccaccctgggcagagcatagagatcactccttgttttcacgtttaaatgagatgcaagcaaaaggctggcgcagaataggcgctgcacacttgttcataagcacttggtagaatcacatagtagatgattaatattgactgaaaagtctagtacccagtaagcactcaaaacctggtgaaaataaagcgtctgtccacaatgcttggtgctcaatgcccgacacttaatatgtgctccatgagtggcaattctaattattgctatgttcgttccatcagtgttccacactaattgacatacaccttaaaaatatgctcactaggccgggtgcggtggctcacacctgtaatcccagcacggaggtcaaggcagaaggactgcttgagcccagaagtttgaggccagcctgggcaacatagggagaccccatctctacaaaaaataaaaattagcggggcagggtggcaagcgtctgtagtcctgctactcgggaggctgaggcaagaggatctcttgaactcaggaggtggaggctgcagtgagctattatcttgccactgcactccagcccgggcgacagagggagaccccatccctccctccccaccaaaaatatatatatgcccaccagtgccattttataaaaacaagaaaggaaaactatatgtataaagaacaatgcatgaacaaatacacaccagatgtttaaggtgagttgccatgggagtgtggggctggtctggaa

SEQ ID NO: 23455 - DNA, 1492 bp, Artificial sequence
  DNA replication origin
cccccggcccctggagggcgaggggacgaggagggaaccggcccccaaccccgacccggggcgggagcccgaagcccggccggggcgcccccttccggacggggctaaccgaacgcggcggtggccgggccgaggcccgcgccgggcccctcggggctcctcacctccgcgatgtcatgttcctcccgccctccggctccgcgacggacccgctccttgctcaggctccgctgggctcggtcacatcgggctggcccgagggaggcccgctcgggaccggacgcggggcagagccagccggccgcgcacagacccccctccaggcctggggatcccggagactgtgcagctgccccccggcccggctcgctcctcctccgcccccgcccttcgccgccgtcgcccccgtgatgtcaccgctcgcgacgcccgccgccacttcctgcttcccgtcagcggaggaccgagcgacggccgggaatggcagcgcgggggctccgcggaggcgccacgcacagtgtccaaagcatccttgcttcctcctggaaaccgcggccgccaggtgtgagctgcgcgctccgcgtctacgccaccgacccgtccgggcccgctgccacatcgatttcattcatttcgttccacaaatcgccgctccactcattagctgtggaaccttggggaaattacctactgtctccgagcctcggtttcctccattcttttctttctgtaagataaagatagtaggctgggcgcggtggttcacgcccgtaatcccaacactttgggaggctgcggcaagaggttcgcttaagccaaggagttcgaggccagcctgggcaaaaaagcaagacctcatctctacaaaaaatgcaaaaaactaaccgggcgtggaggctgcggcgggaagataacttaagcccgagaagtcggggctgcagtgagtcgtgatcacgccactgcactacaccctgagcgacagggcaagacactgcctaaaaaaataataataggctgggcgcggtggctcacgcctgtaatcccagcactttgggaggccgaggtgggcggatcacgaggtcaagagatcgagaccatcctggccaacatggtgaaaccccgtctccactaaaaattcaagaattagcctggcgtggtggggggcgcctgtagtcccagctgcttgggagtctgaagcaggagaatcgcttgaacccgggaggcagaggttgcattgagccgagatcgcgccactgcactccagcctggcaatagagcgagactccgtctcaaaataataataataattacaataaatactactttggggtgggagcggtggcacacgcctgaaatcccagcacttccctttgggaggctgaggcgggcgaatcgcttgagtccaggagttgggaaccagcccgggcaaaatagtgaaatcccatctctacaaaaaatacaaaaattagccgggcgtggtggcgcgcgcctg

SEQ ID NO: 23456 - DNA, 1132 bp, Artificial sequence
  DNA replication origin
cgggggcggaggaggagcgagccgggccggggggcagctgcacagtctccgggatccccaggcctggaggggggtctgtgcgcggccggctggctctgccccgcgtccggtcccgagcgggcctccctcgggccagcccgatgtgaccgagcccagcggagcctgagcaaggagcgggtccgtcgcggagccggagggcgggaggaacatgacatcgcggaggtgaggagccccgaggggcccggcgcgggcctcggcccggccaccgccgcgttcggttagccccgtccggaagggggcgccccggccgggcttcgggctcccgccccgggtcggggttgggggccggttccctcctcgtcccctcgccctccaggggccgggggccggccccaccgcgcccccacccctcgggtccccattcatttcctgcctccccgagttccggctgcggcagccccggggatgcccgtcaggcccggggcaggtagagccgccgagggaaccacgggtgccagcggccaggctcagcgccgcattcctgacccattgcctcatgagaattgcctcatggtgattccgaaataaccctgctcacttggggaggctccttgggacacgagaggggagttgcgcggggccgggcccccagtggtctagtcgttctggctcactgtgccactttcgtgcatttggggacttcacgcaggacccctgacccttttatatgcctctttgtgtcttcttttcctcctacccctcacgtgccagaaatggaaaaactgactgtatctgcagccactagaagtatttccttcctctgcgatcttcgctttgggagatggaaaggaagggagccgcatctcgttatttaatccttcactgcaaccttaacagtcaggtcactttactggtacccgttttatggatgaggaaaccgaggcccagaagcaacatgctagtaaatgacaagatttgaaacttaggaggattagtgagttaatgagatcctttgaaaggtcagggtaatactactactaatagctaacatttgcttagttctgaccacagccctatcagatggctactattatccccattgtaaagatgagtaaaccgagtttcagaggtt

SEQ ID NO: 23457 - DNA, 2424 bp, Artificial sequence
  DNA replication origin
tctttcttttctttctctctctctctctccttccttccttccttccttcctctctctctcctctctctctcttttttctttctttctctctctctctctctctctctctctttttgacagggtctcactctgttggccaggctggagtgcagtagagcgattttgactcactgcaacatctgtctcccaggctcaagcaatcctcccacctcagcctcctgagtagccaggaccacaggtgcatgccaacccccggataacttttgtaatgtttgtagaagtgggattttgctatgttgcccaggccagtcttgagctcccagactcaggtaatcctcccaccttggcctcccaaagtgctgggattacaagtgtgaaccaccacccctggcctcccctttatactttcccttaacatgctaaggtacttgagttacaaagactgttcaacttttagttcctttgtttattagctgtgtgaccacggggagttaactagacctttctgagcctcagcttccaggctaaattttaaaatttttttgtagacatagggtctcactatgttgcccaggctggttttgaacttctggcctcaagcaatcttcctgccttggcctcccaaagagctgtgattaaaggcgtgatccaccatgcctggcctgatctctgtttttaagtattggcaattaagtcacatttttctagaacaccaatgaaaccaaacagaatatattctgcaggccacatttggccacaatcctctgggttacatcagttgctttaaagtggcagagaatgagatgatttcagccctggaaagatgttctgctccatttcatccttggaatggctgtcatgccgaatgcaggtagaagataataactaacattatggagtgtccactgtgtgccagacactgtccctagcactttacatgagctaatttgttaatacctccaataactactcattttaatttgggtcacaaatgaaagtttcataaatgagctgaaagtccaggttaggcactgagctactcattgaaaaccctgcaccttggggtcagcagttccttcagagactagataaggaggcacttcggttggctgactccctgaggcccccctcccctcgaatttcctttgaggatccttagaagaggggacaaatgttcccagtataggaacagcaagtgcaaatgccccagggggcaatggcctctgtgatttggggaacagcaaaatgaaagaatgattgagggggagggaggggcatgtgaaggggttctgcctgcacccttagaaaaacccaactgtagaaggggtggtggagggagaggggtggtggaggagggagaggtgtggtgggtagggagacgggtgatggaggagggagggggtgctggggagaggtgtggtgggggagggagaggtgtggtggggcagggagaggggtaatgggggagggagaggggtggtggaagagggaaaggggaggaggaggaagaggggtggtggaggtagaagacagatgggttggtggaggagggagggggtgtggaggagggagagggtagtgaaagtgaaggagggagggggtgggggtagtggagaagaaaaagggggtgatggaagagagagaagaggtggtggaggaggcagggggtggtggaggagtgagggggcatggaggagggggagggaggaagaggaagaggagagtgggaggtggaggagggagaggaggtggtggaggagtaagagggagtaatgaaggtggagcacggagagggggtggtggaggagggagaggggttgatgaaggtggaggagggagaggggatggtgaaggagggagagggggtaatggaggagggagagggggtgatgaaggtggaggaggtagagggggtaggaaaggaagtgatgaaggtggaggagggagaggggttgatgaaggtggaggagggagaggggatggtggaggagggagagggggtgatggaggagggaggggggtgatgaacgtagaggagtgagacggggtaggaaagggagtgatgaaggtagaggagggagaaggggtggtggaggagggagaaggggtggtggaggtggaggagagagagggggtggtggaggagggagggggtgatgaaggtggaggagggagaaggtgtggtggaggagggagagggtgtggtggaggagagagaagggtgtggtggaggagggagggggtgatgaaggtggaggagggagagggggtggtggaggagggagagggggtggtggaggagggagaagggataatgaaggtggaggaaggagggggtggtgaaggtggaggagggagagggggtggtggaggagggagagagggtgggagaaggagtgatgaagatggaggagggaggagggt

SEQ ID NO: 23458 - DNA, 716 bp, Artificial sequence
  DNA replication origin
ggtggaggagggagagggggtgatggaggagggaggggggtgatgaacgtagaggagtgagacggggtaggaaagggagtgatgaaggtagaggagggagaaggggtggtggaggagggagaaggggtggtggaggtggaggagagagagggggtggtggaggagggagggggtgatgaaggtggaggagggagaaggtgtggtggaggagggagagggtgtggtggaggagagagaagggtgtggtggaggagggagggggtgatgaaggtggaggagggagagggggtggtggaggagggagagggggtggtggaggagggagaagggataatgaaggtggaggaaggagggggtggtgaaggtggaggagggagagggggtggtggaggagggagagagggtgggagaaggagtgatgaagatggaggagggaggagggtggtggaggagggagggaggtgggtggaggagggagggggtggtggaggtggaggagggagagggaggaagaggagggagaggggcgatggagaaggtaggggggtggtggaggaaggcggcagtggtgttcctaacccttgatcttggcttgttaaccctttctgagcttccctttagcggggggatgaggatggtcggctgtttccacatttaagggcagagctgggtgaagggtggtgttagtgctcgagggtcacgcgcgggtggctttg

SEQ ID NO: 23459 - DNA, 1228 bp, Artificial sequence
  DNA replication origin
tggtggaggagggagggaggtgggtggaggagggagggggtggtggaggtggaggagggagagggaggaagaggagggagaggggcgatggagaaggtaggggggtggtggaggaaggcggcagtggtgttcctaacccttgatcttggcttgttaaccctttctgagcttccctttagcggggggatgaggatggtcggctgtttccacatttaagggcagagctgggtgaagggtggtgttagtgctcgagggtcacgcgcgggtggctttgccgcggtggtggcagcggtggcagaggcgacaccgctggaggcggcggagggacgggcccaccaacgctgcaggccggtaaggcgggcgggggctgcgggccaccaggtcctgccctcccaagctgcagcacgcgctggctggggggtcgtgggggctcccgtgggggcgcggccggacgcgggacgctgcctccgggaatggggctgctggagcgggaggatgcgctagaaccgggggtggggcgacgagggacttgggggcggggagacccgcgcaggacccgtgctatcctttgggattttgaggggcgggtccggcaaggccccccaaagtggctgctcctgcgagtctccgagaggggaacaggtggtcgcggggtggctgcggcgaaggtagctcctctccggtagccacggggtgtcggatgtgcgcttttacccaggctcgatatgtgcctctcctggagccggctgggaccccgcatcaggctttggtcaagggtctttcgaagggataggaagacgggaaactcagaaagtgctgaaatctgggcactagagagacagtgtgtctgatttttacccgcatcctcactcccactctaggtcatagcacgttccctggatcaaggtttccatagttaatcagagggcgtctccgcccctcaccccaaccccatcctgacaatatatccttttgatttcacctcctaaaccaggtgttgcaaactcagatgcacacagggccagagggatgcacaatgggcccaactcttacctagtttcaactacgcaccaggcgctgtctggagttattcattcattgaatcctcaccacgctccctgaacttgctacttgtgatgaccctgattttacagacagggaaacaggtaggcaaggtgaaagtcacttacccaagatcacatgagtagcaagtgtcaagtcaggatgg

SEQ ID NO: 23460 - DNA, 1041 bp, Artificial sequence
  DNA replication origin
tgttctggaatcttttttgaaatatctttaccctccaggtttccatgagcttgctgaaaatgtcatggagtgtctactgtgtactaagcacatagcaaaataaactcattagaagcctaagagggaagtatgtgtgtcccattgcagagaggagcagattgaagctctgagagagatgatccttttgtccacagtttcccagacagtgagtttcccggcaggaatttgaactactattttctgcccaccctcacaccttcccaaatttcctttcaggctccaggcaggctggtccgtccaccccggtggtcagcctgacaggcagaggaagcaggaagagctgactgatgaggagaaagaaatcatcaacagggtgattgctcgagctgagaaaatggaagagatggagcaggagcgaatcgggtgaggcttaacgcttcccattcaccccagagctgctgtggcaggagggtgtgctgggctggagcagggctttggcctcaaacggggtgtgctgggctgcctctgggctttgccatttgtgacttacggggccacctccccgccccacccccttccccactggcagacgtgggatctttgttgcatgagttgggagagctaggagaagagaaaagggactagaggagagattgggctgcgagtgaggaggttcttggctgggggtgcattgaagaaggggcagggggaggggtcttgtgatagggaaagaggagatgtcattggaggctgcaagaagcggggtgggtgtgagcatcaggtgtctcagctaatcacagctgcatagggatgtgttctggagatgagagccatgtaggtgtcagaaggtacagctgagggcaaggttaggaggacagagagtaggtaaaaaagagtgtgtaaaagagagagcatgtttgaaattagttacttaagacaatcggagaaaccagtcctataacagtcaggcagcatgtgagtgaggaagcagaggttaacctgatgggtccagactccaagaacccggggtcccatgccagc

SEQ ID NO: 23461 - DNA, 1141 bp, Artificial sequence
  DNA replication origin
cattgaagaaggggcagggggaggggtcttgtgatagggaaagaggagatgtcattggaggctgcaagaagcggggtgggtgtgagcatcaggtgtctcagctaatcacagctgcatagggatgtgttctggagatgagagccatgtaggtgtcagaaggtacagctgagggcaaggttaggaggacagagagtaggtaaaaaagagtgtgtaaaagagagagcatgtttgaaattagttacttaagacaatcggagaaaccagtcctataacagtcaggcagcatgtgagtgaggaagcagaggttaacctgatgggtccagactccaagaacccggggtcccatgccagctccccacttgcctgctgtggatcttgggcatgttgcttgacctctctgagccccagtttgcttactggcagaatgggggaaataacagtaattatcctataagactcttgtaagtgttgggatgacacatgcacagttcctgacccaggctctggtgacactatgtgtttaataaatggtaggaaggaggggaaagtggggctcagagggtggggataatgaaaacatgtttgggagagaagcaaggcttataagaaggatgtgtgaagagtggaagagagtgacaaaatcaatgagcagggacagtactggagagcaaggagtggcatgggtgtgggctggagctgggggactggggaaaatgtggggcatcatcagggtgggaggagtgactgagagaagggagtgagggtatgtgtttggaggactcttggtataaatggagactggctgccgggatacagagaggccactggagtggtcttcctagacccgaatatcaaacaggaaatgggaaggcaggttgctgggataccacctccaccctatgcccctacccaagcccttctgccaggggaagccattgccaactgcttacagcggatttgggcactgagatgcccactgattccctacccagacactcagctgggggttaacgaggttcttggatggaaaatgatgctctggggatgcaggaagtggatgcctttgatttgagcctctgcagataattgcactcagggcaggctagggaaatagggggtgttgttgacaagtgacaaacat

SEQ ID NO: 23462 - DNA, 912 bp, Artificial sequence
  DNA replication origin
tacagcgattatcctccatagcatgggtgggttcagccaatgagttaaagccttaggagaaaaagaccaaggtccccgcagggagaagaaattatctctccagactgcttatgactcaagctgaagcatcagctcttccctgggtctccagcctgtcctgcagatttggacttgccagcctctgaaatcatgtaattcaattcctagagaggagggagggagagagggagggagaaaggaaggaaggaagaaagggagggaagagaagggaatggaagggaagggaagggaagggaagggaagggaagggaagggagggagtgtgggaaaaagaaaagaaggaaagaaggagggaaggagggagggaggaaggaaggaaaggaagggaagggagggagtgtgggaaaaagaaaggaaagaaggagggaaggagggagggaggaaggaagggaagggaagggagggagggaaggatggaggggggaaaaggaaggaggagggggagtgggggaaggagggaggaaggaaagaaggaaaggggaaagaggaagaaaggaaagaatggaggaagcaagggagggagaaaggaaagaagaaaggaggaagaaggaaggaaggaaggaagctacagagagagagagatacacattttattggttctgattctctggaaaaccctgacccatataatggctttgggatgggatggcggggggatgctcctgacctaaggactcctcatgaagaataagagtgtcctcatggtctaagcctctctaagttgggttttctgttatttgcagcccaagcatcctggttagtgcacctgctctatcatttctattgctgcttgaaaagccaccccaaaactaagtgactaaaggcaacaaccaggtattatctctcataaat

SEQ ID NO: 23463 - DNA, 1030 bp, Artificial sequence
  DNA replication origin
ggtgctcaataaatggtgggtgagcattggttggatggaagggaaggctggaaatggcagcggctcaagtgttaacgggatggccagtccccctgtcctccagcaagctggatgcggctgagacacacattggctgggaggggggtggaccacctggggcctgggggtgtttagattggggaagatgaaggatgcgtccgggaactccagcctgggtggctgacgggggtcagtggcctgtttgggcgcctgcccagagcagcccacgcctgcctccccggggcagatggggatacactaggcagggtcaggggcaggctgctcaggggtgctttcccagaatccagctctggctctccggccagctggagggacctcccctccccaggcccctgctctgacctgcagcccagtgttggatgggctttttcagattgggtcaatgattctgcttgctttcacctgctgtagactaaagagagaggctttgcatagggcagggccaagtctgacgatactcccacaggatcactgagttctgggattttagcctagggtccctggatggccttctggggtccatgaagtccccctctcccattacaggcaaacttgtgtgtctaggcattgtgtgtcttgtatgtctgggaagaagggctctggctgtcagcagattcttctcacaggagactgtgactgaacggattcagagcaggtgctcaaccagcttatgttgtagaaggatctggggatcccacagtggagaagagattggctcaaggtcgcatggtgatttagcagcaaattggaaagaagaactcgtgtctctggacttcctgtcgaatgctatttaaggtctgattaaatgtcacctcctccaggaagcctttcctgaattcaccccatcttcctctgtgttcctttgcccataccttgacatgacaccctgtatcacaattagcctcttaaatgaaatctgtccctgctagagtgagatagccatcatattcatcttggtgtggtgtggctg

SEQ ID NO: 23464 - DNA, 1484 bp, Artificial sequence
  DNA replication origin
gccttcccttcccccggggccctcgccctgccggggggatgccgggtgcgctggggtgcgccgggaagcacggggatgcgcggcgctgcaggcgcggcccagggcccctcgggggtcgcgtcgcggagggggcgaagccaggagctggatcgtctctgcctcccgccctgggggtaacagccccgcttccccagcccagacgtccccgagccgctcgcgggcccccagcgggagccgggggtggggtccctaagcacccgcgttctcaccgcctctcttcgtctccggctccggctccggctcgcgctccagcaccgccgcctcctgggctccccccggagtgggagggagccgcggtcccgcctccgcgcccgttccctcccaggcccctcggccgccgcgccgagctttccgcgcgtggacagactgcccggccgacggacggacgcaggagccggctggcggccgccgggatctcgcgggtgggaggaggcctcggccgtgctccgggagggagaggggagggggcggaggaggaggaaggggaggagacagatctcggccctgagcgccaccggcgctgacacgcgagtctcggggcgccccaaatcctcggccaggccctcccgagaccccaaggggccttctgaccccaagcagagcgtgaggcagggagtgggatgtttaggagtcaccggcttgaatctttgtcatctttatttccagtctcccagtccagggcctggcactgaataggtgctcaataaatgcttgaatgaatgaataagatccagagactgtctaaagaaagatcttgaagcattcagagctagcctcctttcctcctctaactattcctgggggtgggagggtgctgacaaggcctgattcagactcagttggaaccgtggaatctgaagagtacagatgaggagactgaagccagagagagtaagagccaggcccaggatcacaaaagcttagagcgatgcccagacaccaaccccgatctgaatctcctgccagtacccagttcccagccctgagcccacttcccccaaagcacccacctgctccaggtgagaggggtgggaccaggggaggggaccctggccaggaggtgagatcctggaggaagagaagggcaggccctctgccatgtcattcacagccacctgcaaacaactggtgctcaataaatggtgggtgagcattggttggatggaagggaaggctggaaatggcagcggctcaagtgttaacgggatggccagtccccctgtcctccagcaagctggatgcggctgagacacacattggctgggaggggggtggaccacctggggcctgggggtgtttagattggggaagatgaaggatgcgtccgggaactccagcctgggtggctgacgggggtcagtggcctgtttgggcgcctgcccagagcagcccacgcctgcctccccggggcagatggggataca

SEQ ID NO: 23465 - DNA, 860 bp, Artificial sequence
  DNA replication origin
aaggctccgggagccaaggagggcgccccccaggcggagagtctcggaaaaccgcgcccccggcccctgccttccctccaggcctgccccaagggaaagcgggcggggcgaccccgtacgccccccttgctgtcccccttcggttccccattgttctcagccgaatgctctcctgggaaggggggagggggtgctgcgctctcctcttaaagggccctctcccctcttgtctcctggcaggtcgcgagcacgagtggggtggggcgtgcccacgggcccccgcccccctcgtccccctcgtcccccagcccagctccggagccgcagtccaggcgcgccgcccgagggtccacgccgcacccctcccccgtgcgttctgcggccacccaggccttccaggacaccgtggagagggaacaagggggcagggacgcccccttcggcaggagccgtcggagaagggggcccagaccggagggaggcgagaagccccactgaagccgggcgcagggtctgggacgcagttgggagtgcaaagggctggctgagagccgcaggagcagcaggctgtggcccaggcctcctgggtgacaggccctgtctggcggggaagagggaccaagagacaacacggaagaggctggacctcgaacaggggcggctgcctcactccctacctgagccagccgagggggccaaggactttagagctgtttcctccggcataagagagacacttgctttccagggcagcaccctttatcggagaaggctctacagggaaggggtctttgcagcctggatggccatcccacattcctttaacggaggtctctaggcctcagagagaacccagagtt

SEQ ID NO: 23466 - DNA, 964 bp, Artificial sequence
  DNA replication origin
agggctggctgagagccgcaggagcagcaggctgtggcccaggcctcctgggtgacaggccctgtctggcggggaagagggaccaagagacaacacggaagaggctggacctcgaacaggggcggctgcctcactccctacctgagccagccgagggggccaaggactttagagctgtttcctccggcataagagagacacttgctttccagggcagcaccctttatcggagaaggctctacagggaaggggtctttgcagcctggatggccatcccacattcctttaacggaggtctctaggcctcagagagaacccagagttagaaaggaggccagacggtccttgctgtccccctggggagagaggaagttgccgcctgctgccaggcccaggaggagctgggcctgcaatagtgggggacctggcccctgaggcagtggcggccatgtcacggccaggccacggtgggctgatgcctgtgaatggtctgggcttcccaccgcagaacgtggcccgggtggtggtgtgggagtggctgaatgagcacagccgctggcggccctacacggccaccgtgtgccaccacattgagaacgtgctgaaggaggacgctcgcggttccgtggtcctggggcaggtggacgcccagcttgtgccctacatcatcgacctgcagtccatgcaccagtttcgccaggacacaggtgagcagacacccaccccatgccacccgccccgccgagccatcactaccttgcagcgtaggatgctgaaaatcccagtaaatctgctgatgccaaatcccttccccatctccctgcctcacctccagaaaaacagggcagtctaaccttgtccagtttaagacttggattccaatgcagcctctgagcaagctgtagggccttgagcaagttgcatcatctctctgagcctcagtttcctcatctgcaaaatgggt

SEQ ID NO: 23467 - DNA, 1153 bp, Artificial sequence
  DNA replication origin
gacacccaccccatgccacccgccccgccgagccatcactaccttgcagcgtaggatgctgaaaatcccagtaaatctgctgatgccaaatcccttccccatctccctgcctcacctccagaaaaacagggcagtctaaccttgtccagtttaagacttggattccaatgcagcctctgagcaagctgtagggccttgagcaagttgcatcatctctctgagcctcagtttcctcatctgcaaaatgggtagatcaatatctctcacagctgagtgaggattaaataaaattgtgctcactgagcacagaacctagaacagcagtagcatgggattgtagaataagggctttacatgcacttcctcatttgatttttcccaagaatcacaggcagtaagtctgtgtattgttgtattattatgagtcccattttatagatgaagaaaccgagtctcccagaagctgagtgatttaaactcagagctgggatttaaacccaggcggttgagttccagaaccaaagttcttaactggtatcctatactggctccaagtgttggtttgtggggtggagtcgtgctggtggtaattaattggggatggggggcgttggtggtgttgatggtggggtgaggtggcaatgatggaggagacagtgttagcggttgtgttggtggtgactcagtgatagtattgatggtggtggggtcttggtgacaatggagggatggatgatggtgacgtggcagtgttggtggtgatgtcagtgatagcgttaaccatgggattcagtggtgttggtgacattgatagttgtgttggtggtggtgctggaagtggtgtgatggggtggtgatgatggagaaaatgagagaatgatgttggtggcagtcttcgtggccatgtggtgtggctggtagccctgtgtgtggctgttacttagtggtattggtgatcctgttgtggttgtaatgatggtgatgttgatggttgcgttggtggtaatgtgatggctgatgatggagataaaatcgatgaggtcccactctcaggcctactctcttttgttctggagatttgtcatcgttggggagatctccctgagtcattgcccggtggtatctgtgacaagctccatgggcagtggggact

SEQ ID NO: 23468 - DNA, 1358 bp, Artificial sequence
  DNA replication origin
tgggccccgtcttaccccggcgggatggaggcgcgcgcgctcacgctggtggtgcgctggggcccgggccggttgaggttgttctgccccggggtgcgcgctccgccgggggcgcccgggctccgtgggggcgccccgggaggcggcgcgggctcggcggggccggcggcgggcgctgcccagagcgcggcgcctgtgaaggtggcgctggggcgcacggcaagcgcgcctggaggccctccaggtggcggcggcggcggcagcgggggcgcggggggcgccttgcggcgctgcgaggccaggatggcgttggaggcggcgcgcgtgctgttgaccagcaggcactgctggcaggagcagggctggcccgagctggcgcccacgggccacgactgcgacttagggatggagcccacggtgagcgggtaggcgaggtccaggcggcggcgcaggcggcggcgccggcgcgtctggcggttcatctgcgacatgctgttgaagtagatgaggtagcagaagcctagcgatgagaggtcgagccacgggtgctgcttctcgtaggcgttctggatggtgatgcagatgtccatatcgtaggccgtccatgcgccgccgtcgttctcccactcccacacgatgcccttgcccggcgccgacgacgggtcgtagaagttgcgccgcacgggccgcatggtgcctgtactcgaaatggggaggaggcgtcagcacagcgggcgttggtctgcgcggctggaagggcgggccacagccaggcaagggtgggcgggaggttggggggtcagcacaggcctccagggggtccacccagacttggggagagggtcaacacatgcacggagaggaaggaggtcaaggcccaggcatgaggttcagcacaggctggagggtcaggacaggcggcagccagggtgaggggggccggggctaaaggttcagcgcatagcactggggcgagaggtgggcaggggcgcgtggtcagtagattgggcgtaggggcgggagagccaccaaacagggtgggggtgccaagatagcctggggtaggaaaccagcaaggtgtggagggctcccccaccctccacctctccagggccaagacagacactgaagtgggggttatcacaggccctggatggtgcgggggagggcaaagggggcctgggggttcttcagaccagagtcagataaagtggggcaggcatagacagagaccaaggccatgcacataggccccatgcagtcctcttcttcattatagtttgctcactcattcaatgattcattcatcaatctgttcatgccttagttcattaatttaagcactatttcatttagtc

SEQ ID NO: 23469 - DNA, 901 bp, Artificial sequence
  DNA replication origin
tggagtccagctgcggcctcttctcttctccccgcagggtccccgcactcccggtgaagaacttgaatggtactgggccggtccatccggccctggcaggtgaggtctggcccagggcgggaaagaagggcggggcccactaggaggcagctccgcctgtcacccggtgaccccgcccccgagatgggctggtgagcgtggcccggaggaaacgcccccttccactgggcccaggacacagggcgggcgtggcccgcagaaaggcccttcaggggccttcaaggggctgagtgggtggggcccaagagcgcaaccctcccacccacccgagggccccgggattcccagggccagtggtcgggggtttgggcggggatggcgccccgccctgtgactgcgccccctaacccccagggatgaccgggatactgctgtgcgcggccgggctgcccgtgtgcctgacgcgggcccccaagcccatcctgcacccgccgcccgtgagcaagagcgacgtgaagcccgtgcctggcgtgcccggggtgtgccgcaagaccaagaagaagcaccttaaaaagagtacgccctccacgccctgcctcacacgagatgaaccccactaagccttgaccacaactctgtgacccctggtctccaacttattcttagcatttactacctcacctccattgcctgatctcagctccccttgccctggccccatctttcaccagctcctgttacagctaacctccagcaacccctgacctctgaccctggccaacccttgccagcctgaccccggccaacccttgccagcctgacccctgccctctgacccctgacccagttctgagccaagccttcggggacagactctgggtaccctcaaacccaccccgct

SEQ ID NO: 23470 - DNA, 903 bp, Artificial sequence
  DNA replication origin
gtaaagaaagaaaggaacacaataattgcagatggaaaagtgctgttctagcatccacaaaacaaaacaatgattgagtgccaggctctgggctgaacactgacgatacagtagggaacaaatagtcccaagtccctattctggggggagacagataatgagcaactggaggaagaaggtttatttatttatttatttattttttgagatggagtctcgctgtgtcacccaggctgcagtgcagtggtgcgatctcgactcactgcaacctccacttcccatattgaagcgattctcctgcctcagcatcccaagtagctgagattataggcgtgcaccaccacgctgggctaatttttgtattttttggtggagatggagtttcaccatgttggccaggctggtcttgaactcctggtctcaagtgacctgccccctcggcctcccagagtgctgggattacaggcatgagccaccgggcctggttgggaaaaggttattgaatgggaccagggaatggaataaacgagggaggggagaggcctgcaatattccagagggtgaggacaggggcagcctcgcaggggaggggacatctaagcaaagacttgcagggggtgaggaagggagtgttgcggagatttaacatttaacgggagagtgttctgggcacggagataagccagtgcaaaggctgcaggatgggaatgagctcatcgtgtttaagcaacagcaagaaacccggtgggaaggggcaggaaggaggctgcggacgtggagggaagatgagtcctctcggagctcagcggggccggtggagggtttggagcaggcagatgttgtgccccgaggctgagctgctccgccggcccctccaggaggatctccttcaaaggcgcactc

SEQ ID NO: 23471 - DNA, 942 bp, Artificial sequence
  DNA replication origin
gagctaaccccaatcccaggacttctcccaccatgtcctaattgctgggagagagcgcctgcttgtggaaggggggtctgtggggtaagcagccctgacacctgttcctctgatccctggagcccagcacaggctgggcccatagtccaagtgaatgtttatggagtaaacgaatgaacaaatgaatgaatggaattgtgtgtgtgtgtgtgtgtgtgtgtgtgtgtcagtgactgtgtgtttgtatgactgtgtgtgtgtctctatgtgtacctgccttgtatcattgtaagtgtgtgagagtgtgtctctggatctctgagtgtgtctctgtgttcccgacatatgtctattttcatatgttttcatatgtgtctgttttctatgtgtctatctgcatgtgtctggtgtctggatttccaaacacaaaggtacatgtttttaggactttctgagggtgcatatgtgtatctgcttatgtgtaaatgtgtctctgtctctggcctccttggtgtatctgtgagcaactctgtctcagtgtgaatccgtgtgtgtgtatctgcacatatgtttctgttggttgctatgcatgtctgttggtctctgtgtatctgggaccttagatgtgtattggggccctgtatgtgggtgtgtaggatcatgtgtgtgttttgtgtatgtgcctctgtgtgtgtgtgtgtgtgtgtgttgagatctctggtgtatgtctgatactctgggtatgtgagtgttggggtctgtgtgtgtttctatgcctggattcatacatgctccagtgtccctgggtgagtacatatctaggatcttggagtggctgtccttgggtgtgtgtgtgtgtctgggcctctaactgggttcatgtggggggtctctgagtgtgtgtgtgtctggattcccgtgtgtgtgtgtgtgtgtgtgtgt

SEQ ID NO: 23472 - DNA, 830 bp, Artificial sequence
  DNA replication origin
caccccctcttgccaccgttgccctccctgataggagtctgataaggccctcatgcgtcagagccctgcagctgactagtgctgagctcggctcccaggagggcctggaggtcaggctgggtctgcaggagggggtgtgtctcccagccctcggctagtgggatcccagcccatctgaccccacatctgtagttggggaaactgaggggtgggagcctgcataaaggaagcttaggggtggagaacccagggaaggaaactgagacacaggacattaccagccacaggagtctgaaggtgaagcccagatggggaaactgaggctccaatggatttgggatggagccagaagaggaaactgaggcttggggcactccacagaaggggattcagatgtaggatccacagaggatcacgaagacactgtctgtctaaagtgttcagggatagaagccaggtagggaaatggaggcattggagtgtccagccagagggggatgagggaaggagtccagagagggaaaccgaggcacagggaagggctcatccagcaagataggttcaggttggaggcaactcttagcgccaatgtccctctttcctggcatcccagaggcatttgtggatctatacaaactggagagacagaaggtggcagagatcaagggagtggtgctggggcatcgagggagagggccatttgaataggtagagggggcattggtttcagaacatgagtgtgagcccacaaacctgggtcccagtcctatctccactgttactccgtgctccagagagagcactccataaacccagtcattcagaaatag

SEQ ID NO: 23473 - DNA, 1077 bp, Artificial sequence
  DNA replication origin
cgccccctgcccgcccagcctgcttgtctggagctccagacgcctcggcaagagcccgctgcgccccctgcgcgctcctcctgctcggagcacggctcctacctgtagagtccggacgggcgctccctccccgggcacctacaccttctcctctttcggaaatctcccatccagctacccgggtctcggacaggcggcactgggaccacgaggcagggagccaggcttgaagcaggtgacatgtagacgtcccctggtccagcctcggaacctgagcgcccttctgcctggaaagtttgtggctaggcgccatggccaagagcagctccctgaatgttcgcgtggtggagggccgcgcgctgcctgccaaggacgtgtgagtactcctcgggcgcttctgggtgaggggcgcgcaaggcctggggtggggccgacgtcgccctttccgcgtgccagggcgggttggcaggagggcgaggggttcttgtccaagactggtcttggggcagttccgctttaaaggggcgagaggccgcatgcccatggctgtcccggtgggaggggggcgcctagagttagcagatgccccgcctcacccccgggcaggggagggggtgtctttgttcccgggatgtactaaagggggtcgtccagagctgaagaggggattagagggccatattctgtcagatctgggaggggagaaagcggggggtctcttccttagtccaggcagatgttggaggtggctcctccaggcgtgggtgggggcctagcaagggaaccctggggaggacccttggagagggcctgggatcagatgagccctaacatcctgtgtggatctggtgcttaggtttgcagagtgtcaccaggtggccctccagggtccttttgaccccaagccctgagctccccagtcttgtggctcccagcctcgtgtgggccttccccgggtgctgagctgcttgaagagccaattccttgctgcgaccccctccccagccaggtgcaatgggactgggggaccctacggctcccttcactactagtcccaagctatgcttcccccagggc

SEQ ID NO: 23474 - DNA, 1085 bp, Artificial sequence
  DNA replication origin
tcagggagctgctcttggccatggcgcctagccacaaactttccaggcagaagggcgctcaggttccgaggctggaccaggggacgtctacatgtcacctgcttcaagcctggctccctgcctcgtggtcccagtgccgcctgtccgagacccgggtagctggatgggagatttccgaaagaggagaaggtgtaggtgcccggggagggagcgcccgtccggactctacaggtaggagccgtgctccgagcaggaggagcgcgcagggggcgcagcgggctcttgccgaggcgtctggagctccagacaagcaggctgggcgggcagggggcgggaggggcggcccagggacctccccacaatcccgcctccaatggggtcccccacctgaccccgggccccctcgcgcgccctctaccggcaccccagtcatgcgcgccagagcgcacgggcggcggagacaagggtgcaccgccaggtggggaggggcccccgtcctgatgggcgtggccgctggctcctggtgagttggcattgggcttaaaagacatggtctgtgcccccgcctgtccctcatccaacatattcacacctctccgcccccacccctccttgcctaccatgcagacacctgcctcctctctccaacctccgcgccccccggtccaggagcaagtattagtggtgggtgggaggcgtcgccagagagagggtcgcatgttccctgggggtccgttcagagtcaagggaggggccttgaacatccccttccatctcgttctagtttccagttaaacacagaacccagactctgctctaacgtcacgggctggcactgcgggggaggaagccgcggccagatgggggaggggaaggcttgaagataaccactacagcgatgataaaaagtcatctacagttgtttgaacacttcatgggtgccaggcactgttctaagcgctttactgggattagctcatttttgtctccagatgtgcactacacactactccactgttaccccattatccgcagtttatggataaagaaactgaggttcagagggattaaataacttggcagag

SEQ ID NO: 23475 - DNA, 911 bp, Artificial sequence
  DNA replication origin
ccaggccctgcaggcccagaaggaggtgagcccccactactgtaacgaggtggtgagctggtggatgggaagtgatggagccaatttattagtgacaaggtctgagacaagtcatttcaccactccaagccttgatttcctcatcgtcaaatggggatcaaatgagaccagttgttggtgcaaataaatttgtgtgcattgagcatgtgctgggcactgcattaagccctggaggtcttacgatagtccctggccttgtggggctcacagtctagagaggaaaacagataagtgttcaggtggtgactgctacagggaagaagcactgggcaggggctgtggaagcccagaagtccctacctccccatgggggtggtcaaggagggcttcctggaggaagtgatgtcttggggattgctgaagggcaagtcggcttatccagcaaaggtgaaacagatgaggaaggaaaaacaggcagaggaaaaccatacacaaagactggttggaaggcaagaaccaaacacaggtggttgagtggctggaagacagaatatgggagggcagagggtaagatgaggcctgaaggaagggcagggacactggcattcgagggctggaggagggtgtttgggcttcatccctgggtgatgggagccccggatgggttgagcagggagcagccacagatcagggacaacaggtggaaggggttaggtgtgaacctgacagcatgggaggacccggacccccgaacccacacagacaacccactcctcacccccaggtgttccgcaccaagacggcagccctgaaacagcgttgggaacagctggaacaaaaggagcgggagctaaagggatcgttcatccgctttgacaagtttttgcaggtaggtggagcctcctgggggg

SEQ ID NO: 23476 - DNA, 1412 bp, Artificial sequence
  DNA replication origin
aataaaagaagtggttttcgtcatgcaaaaggaaacggcgggaaacacacacgcactgcctgaagcaaccgattaaaaaaaaaaaaagcgggcgggggagttgggtgaagagccagcttccgagccaggcctgctggccgcccctggttttgcgagcgaatgtcagggcaggatggaggtgccgaactccccgccagctcctgagtcctgaaggtcgtcttctccccaccgtactccccaggactccgaggcccggcgcaatcgcgcgctgcggagggcggcggaggagaggcaccaggcgggccgtcgggaggtggaggcgctgcgtctgtggacccagctccaggagctacggcgggaacacgcgcggctgcagcgccggcttaagcgcctggagccctgcgcgcgcctgctggagcaagcgctggagctgctgcccggggtgagtccggggcaggaggctgggagctcggcgccaccgcgtggcgctgagtggctcagggacggcttcggaccggcgaactactggttcgctgaactactggagatcttggcatgcatgccgagaactatcacttatggagcgctcactgtaagcaagggatacgctttggtttttgtggttgttagttttggaggttttttgagacagtgtctcgctttgtcaccaggctggagtgcattggcgcgatcacggctcactgcagcctcgacttcctgggctcaagggatcctcctgcctctgcctcccaagtagctgggaccacaggcgcacgccaccacgcctagctatttttttaaattattatttttagtagagacggtggtttctctatgttgcccaggctggtttcgaactcctgggctcaagcgatcctgccacctccgctcccaaagtgctgggattacaggtgtgagccaccgcccacgctttgttcttgaatcctccccaaagtccagtgaagtaagtcctgttattgtcaactgtccaccccattttacagataggagaactgaagattcagaaagctaactctggccgggcgcggtggctcacgcctgtaatcccaacactttggggggccaaggcgggaggattgcttgaagccaggagttcgagaccagtctgggtaacatagagtgacacctgtctctacaaaaaattagtcgggcgtggtggcgtgtgactatagtcccagctactttggagcggagatgggaggatcgcttgagcccaggagttcaagatgacagtgagctatgatcgcgccactgcactccagcccaggtgacagagcgagaccttgtctctaacaaatggaggttgacatttaagtcactttccagaaagattattccaataataaggaacgctggcggccaggtgggatggagagggtaaggcactgcag

SEQ ID NO: 23477 - DNA, 2120 bp, Artificial sequence
  DNA replication origin
gaggatcgcttgagcccaggagttcaagatgacagtgagctatgatcgcgccactgcactccagcccaggtgacagagcgagaccttgtctctaacaaatggaggttgacatttaagtcactttccagaaagattattccaataataaggaacgctggcggccaggtgggatggagagggtaaggcactgcaggcccatgtgagtcccttccccgcccccgactctagttccaagaggttccggagctggtggcgcgcttcgacggcctggccgagacgcaggcggcgctgaggctcagggagcgcgagcagctcgcggagctggaggcggcgcgagcgcggctgcagcagctgcgggacgcctggccggacgaggtgctcgcacagggccagcggcgggcacagctgcaggagcgcctggaggctgccagggagcgtacgctgcagtgggtacgacccgccctaggtggggggcgctccggaccccaggcttccacagccgggcggggaggaacgccagggctgatgaggaccgatggggcaatgcttaccccagagggtccgctgcactaaggaggggaatctcaggcatcaccgagccgtttcgggcatgaggccccgccccatccgcctgcacaaggctcctgcaccccactcccgagagcacctgactgcctgactggcagaggtggatgggaagaatgccgggcgcggtggctcatgcctgtaatcccaacactttgggaggccgaaaggggcggatcacctcaggtcatgagttcgagaccagcctggccaacatggtgaaaccctgtctctactaaaaatacaaaaattagccaggtccactggcgggcgcctgtactcccagctactcgggaggctgaaggaggagaatcgctaggctctgggagccggcggttgcagtgagctgagatcaggccactgcactccagcctgggcgacaaagctagactccatctcaaaaagaaaaaaaaaaaaagtggctgggaagagggggcagcccgccttggcccagttgccataattgggagtggggcgggtgttctccaggaatccaagtggattcagattcagaacacagcagcggagaagactctgctcctgggacgcagcaggatggctgtgctcaacctgttccagctagtgtgccagcatcaggggcagcctcccaccctggacatcgaggacacggagggacagctagagcacgtgaggacccctctttatggcacctccagcccccaaacactccctctttggaaaaatgagcctaaaaccccacagttagtgacaccttctctgggttaagcatggccctctacggtcagagcccttgccccagccgtggctcgattgtcgggcaggcacccggtctaggatggattcctgggtgcatcttggctctgacagtggccagaagaaagccatgcccctctctgcgacaaagctagactctatctcaaaaagaaaaaaaaagtggctggtctcaatgccctccctctaccaggaaggccagggtttgtgctgagtccctcttttctcacaggatccaacagcccacacgtgtcaacacctgtaaaaaatcatgaggtccagactcgctcttcattaatctctggccctctgtctccctgcttcctgcacagagaggcctcagcttccgcagggagggtgagggtggggttaggctgagttgtgtggtgtagaatgtgccataggcttttttttttttttttgagacagagtctagttctgtcacctaggctggagtgcagtgacacgatctcggctcactgcaacctctgcctcctggcgattctcctgcctcagcctctcgagtagttgggattacaggcacacaccacgacacccggctaattttgtatttttagtagagctagggtttcaccaggttggccaggctggtctcgaaatcccaacctcaagttatcctcccgcctcagcctcccaaagtgctaggattacaagtgtgagccaccacacccagcgtgacataggtttacaatggaggaagatttcagacttcaaacacttcttttgtttctagtgggtatacccaaagcatggcccctttg

SEQ ID NO: 23478 - DNA, 1023 bp, Artificial sequence
  DNA replication origin
cccaactccctctcctgcagggaccgtaagaagaagcggtttgtgggacagtcaggacaggaagacaagaagaagattaagacagagagcggccgctacatcagcagctcctacaagcgagacctgtatcctgaggggcgtggctggggaggggcggggccgaggagcttcagcaggagcagcttcaattaagtggaacctgggggcgggggcgggggcggggaggagggggcggggctgagcggcttaagcagccgcatctccaatagatgggacctggtgctgggggcggggccgagcagcttcagcagcagcatctcgaactagtgggacctgtgctgggggcggggcccagcagcttcagcagcagcatctccagtaagtggggcctgtgctgggggcgggcccagcagcttcagcagcggcatctccaataagtgggacctggtgctgggggcggggccgagcagcttcagcaacagcatctccaataagtgggacctgtgtgctgggggcggggccgagcagcttcagctgcggctgggataacggaactctgtctgctggggcagtgtggggaggagccttctcccatcccaggggcttcacgcagcttccttaacgaggtttcccagctatcagaagtggaaacagaaacagaaaattgatgatcgtgactcggacgaagaaggggcatctgaccggcgaggcccagagcgaagaggtgggaagcgagaccgtggccaaggtgagagccagggtggggagtgtgggtgcacaggtaggcagagcagttgtggtcagattagggtaacgctgaggcacaggtgcaggggctactgcagagccccagagctgggtgtgttggggtatgctgccaaaaccctgggtccctccatgatcccccccacccaacccccacacccacagtttcccccttcctactgtcccggcctctgatggtcacgagcaccgcctgacaggcgctgggaagtgccatgcccctcaggtgccttgtccccg

SEQ ID NO: 23479 - DNA, 739 bp, Artificial sequence
  DNA replication origin
accctgctcacctcagtgaggtactcggcgtggtgcttcgtggccacaaacaccacggtctggtcctggggccgcaccacgttgtgcagcaggtggagcagcacggcagccttggtgtcctcccgcacgaggaagaaggaggtctgtggggagagggcatcacgtgttggcttacggggtcctggcccagggcctgcagggcccacctggacacaacctcctgggatgggacaggtgcagcctcaccttcagctgctcgttgagcttggtatccacgtcaagccggatgagcacgggctccgtgaggcctgcaggagacatgggggaaagtgggggagtcgcagagggactggcccccaggccccagcctgacccccagcccccatctccacccccagctcacgcaccagcccgggcaaattccaccagcagtttgggcagcgtggcggagaacagcaccgtctggtggcccccggggaggcgggcgatgatctcctgcagctgctctgcgaaacccatttcaaaaagcctggaagggtagagggcaggactgggtcagagggggccttcactccctggagttccaaccgcagccatccttgtccccacaacttctgcagtgtcccagggcttgcctcactctaactcagcccactcacacttatcacgtgacttcatcctaaacaacaataaccttgaaatctggaatctgtcttggtcatgttcttacaaactcatg

SEQ ID NO: 23480 - DNA, 1285 bp, Artificial sequence
  DNA replication origin
aggcactggcgaaagctcagcggaggtcacgtggtcaccgcacctcccccccccccacgcagttggtgcgctcctcaggccacgcccccttctgcgttcccagcgcgcggcccgaatggcggccgacaagggcccggcggctggacctcggtcgcgagctgccatggcccagtggaggaagaagaaagggctccggaagcgccgaggcgcggcctcccaggcccgcggcagcgactcggaggacggcgagtttgagatccaggcggaagatgacgcccgggcccggaaggtaggcgcgtggggctgggacgcatgttcgggcccgagacccggctccgggcagcgcctcgaggcctcagtttccccagctggggattgggctccgcagagtgtggggagggaggctgccgacccgaggaccggtcttgggaccgccggcctgagcacgtgtctcggggcttgtcaggctcagggttccgcggccagagccttgggatcccggggctggagcctgcgggccttcctgccgggttttggtcgcgcgtctctcattggctgcctcctgctcgtggggcggatcctggctccctttcgcccaatgaaaagtgcgggtgcagaagatctgactttgagagtttggagcgttcttgggaggttgaattaaggggaggccagactgcgtggcttgagacagtgtgacgcctccaaacctctgggaaacgaattaaaacaattttttttgagacagagtcttgctctgttgctcatgccggagtgcagttgtgtagccacgccttgctacagcctccgcctcctgggctcaagcgatcctcccacgtcagcctctccggtagctgagaccacagacatgcgccaccacgcccggataatttttaaattttttgtagagacgggggtctccctatgttgcccaggatggtctcgaacttctggcctcaagcagtcctcccacttctgcttcccaaagtgttgggattaacaggcgtgagcccggccagtttgtgtttgttgaccgtttactatgtgccaggctccatgctaagagctgtacgagccttattatttaatcctcacaccaacgttgtgctaacaccaccagcaactgtcatcttcatttttctacaggaggaaactgaggcctagagggttaagaaatagtcaaaggcctggtgtagtggctacacgcctgtaaacccagcacttagggaggctgaggtgggaggattgcttgaggtcaggagttcaagatcagcctgggcaacat

SEQ ID NO: 23481 - DNA, 1086 bp, Artificial sequence
  DNA replication origin
gaggtgcggtgaccacgtgacctccgctgagctttcgccagtgcctgcggccctcggcggcctagtacacacgcacctgagtgagtggcaccagaggaccctctccatgtttagggacctcctgggcctcaggagcgtggcgcccgcccctgggcggactccccccatccgcgggcgcgaatggtccgggccgcgtccgcagtgctgctggctgctccctggttgctgggtgcaaagtgctgggttctgggtttctggattcgcgggccgttcacacgtagcctgtgccggctcctcgggtgagtccgtccgcgcgcggtgccccgggacggcctaggctgccgggggtccggggccccaggcattccgggctgcagattgacggggatcccggatgcaccgcgcgcccccgcgccctcaccgacgggtccagacctggtgggaagaaggtgcggggacgggtccctgaggatcccgatgcctacgagccaagatgctcaggtaggagaacaacccaaaaatgcagggacctcgggcactttttaatcgggtcattgatttgggagtcgcagaatgtggggcggtgggggcggcggtgatctcccgatagcagtgtagccaagtacacaagctctggactcagatttcacttccaccgttttagctttataggtgtgacctacacatgtgacttcacctcagttttgtgatccgtaaaatggacaaattcgaagctacttcacagtgctgttgagaggattaaatgaaacaatgcttgtaaagctctttgcaggaggtaggcatgggatccacgctggctgtcattgcccccacccccatcagtacacataggaaagtgcctgtctcccctaccaccatagtgtgttttctggttggtgcctaaatagacacaggtgtcatctctccttcaccgccagagtcattctgtaaataattgccagtagcccccctttcaccaccattatgacaactaaaaaaaagccaaagaaatttccaaaatgccccctgaagttgacagctcccctttgagagactggttgagagagaactaaacccttgggatga

SEQ ID NO: 23482 - DNA, 1117 bp, Artificial sequence
  DNA replication origin
gccaaaaccccgagcccgaagctgttgcagccgccgcagccgccgaagccgccgccacttcagccactgccaccagggcagctgcgccagctctcctatccaccgcctaccgtcctctcaaccccgctggccccgccccatttccccttcacagcgtcctactggctaactgggctaccgtgatgaactctgattggccaactatcacgtccttccgcaggtctcgcccgccgccgatgcggtactccctgcccgcctccttaagaaggggcgggacgaagaatccacgccccttactcctcccttgttccccgccttactcgttgagtccaacccagagggagtcccaagtctttccattggtgaaaggtcaaaatggcggtgcttctgattggtcagacttcaggaggtggggacaactgagcggaacaataaattgaatggtgaaaagaaaggtcagtcagacaccgagtctcgccttctgagattggcgggtaacctagcaacgcagggaccgcggcggtaactgtggctagggaaacctggagcggtcagagcaggtgagtagccagttgggaaagggtcgcggatcgggggagatgtggaatagggttcagccctctgtcctttggctccctgaggaattagaagcccccgctgcgatctcgtctcagcttcaggaccctgtccctcagctcctgccttagtctggacctttcgctccacaacctgcagggagccggcctccattctgcccttctacctgcccacttcatggctccactccctcatccctaaaacgaggaggacaacagtcaagcagagtcatatcgtagttaacttatttcaagtcaaacatgggagctgtgggtgggaggggagtttataagtcccctcccatttcacccaacggccatacgttcctcggtgagcaggcaatctcacttcagtgtttaaattaggtagttttgtttgtttgttttgttgttgttgttgttgtttttgccgagcatggtggctcacgcctgtaatcccagcactttgggaggccgaggcgggcagatcacttgaggtcaggagttctaggccagcctagccagtatggtgaaaccccatc

SEQ ID NO: 23483 - DNA, 1369 bp, Artificial sequence
  DNA replication origin
gaggccccaagtgggctgcatcacatcccccagggaaacgctgctcacaccattaccccatttcacagatgaggtaatcgaggctcagagaggagtccatagctagctaataagaggtggagacagaattgaaacccaggtctctgactccagggctgtgtgctttcctctctccaagcacacagcactgggagagtcttgtctccaaggcaggctgcatgagatcagacagggagagagcctttttttttgtatctgtctgtataccacaatatggcttaggaaggtcttggtggttaacaaggctcccaaataggacccagaacacaggtgctcaataaacatctggatggatagatggatggatggatatgaatgaatggatggctgatggatagaaaatagataaatatggatgcatgggtggatattaatgaatctgcacagacccgtgtgtggatggatgggtgataaatgaataggtaggtggatggacgggtgggtgggtggatggatgaatggatggatgagtgggtggatggatgggtagatgggtgataaatggataggtggacggatgagtgaatgggtagatgggtagatggatggaaatgaacagatggaaatggttggatgggtggataaatggttggaaggatggatggatgggtgagtgggtagatggatgataaatggataggtaggtggatggatgagtgaattagtagatgggtaaatgggtggaaaatgaacagatggaaatagttggatgggtggataaatggttggaaggttggatggatgggtgagtgggtagatggatgataaatggataggaaggtggatggatgagtgaatgggtggatgggtagatggatggaaaaacagatggaaatgtttggatgggtggataaatggttggaaggatggatggatggatgggtaaatgggtgataaatggataggtaggtggatggaggagtgaatgggtggacgggtagatggatggaaaatgaacagatgaaaatggttggattgatggttggatgggtgattggatggatggatgggtggatgggtgacaaataggtaggtggatgggtggataggtgagtgggtagatgattgggtgggtggatggatggatgcgttggcagatgggtggatggatgaatggataggtagttggatgggtgggtggatgaatgggtgggtagataaatgggtgggtggatgggtgatagatagataagaacttcgtaagccatgctgtggtatacagaccaatacaaaaaaggatccctccctgtctgatctcataggtggatggatgagtcaatggctggatgagtaaatgggtgggtgggta

SEQ ID NO: 23484 - DNA, 2279 bp, Artificial sequence
  DNA replication origin
ggagagcccgcggggtggagatgggggtcggccccccctcggcgcccagccgaggagcagctgccagttgagtgcggacccgagagagaacccccgagggacacccacgtctcccaccgcgtctgcgtcgggcgttttggtttcaggaggctgcttcggggcggggcccccgggggccgagcgcggggggcggcccggcggccttaccacacggcggcttcgttgagctcggggttgggatgcgacaggggtccgctgtagccgctggtgccgctcattgggaagggcgggctgggcccgccgctgaatacctcgccgggcatggggtgcagcgtgcccggcaggcctggctcggggctcggtgtgtccgggtgcgagatcatgtcggtgaacctggggttgtccgcggcgtgcgggccggcgagcggcggttccagcgctcccagcggcgtcgagccggggccagaggccgccaggaagctggagtcggccggggactgcgcctgcgaaggcgggccgtgcgcgaagaagtcgtagttgcttcccggcgcgtagtagtcgccttggtagtctgcggagggggagcgggaaggagacagggcgcggtgagagaaggcgaagtaggcgggggacccgggacccggggaggggacccgggcgggcgagagaggggagcgcgcgacaccgacccaaggttagagagacctgcggaggccggcgccccttgagacggtggacgtcgcaggctcacggggagggttggggagagagacaatgagagatctcgaaagggcaagagactcagactgccagagaccacacacagagacgggagagactccgagaccgtgggggacacacgcggcaaaaactcggagacttcagtcacaggttccctgacacctagagatggagagagacagaggcggccagagacgcagagacagacaatgattcctaagtgtcttagggtcggtgagagacacagagatgcgggacagcgagagacagacggagagatcggcagaggggcagagagaaaggcggaaaagagacccagagacgcggagtccgcggctgagacccgaaagcccgagacatcggagggtcgcggaggagtcgaggagacgcagagagaggaaagacggccgcggttagagacacgcgtggaaacccccgggggcggcagcgagggagtcaggagtgagcccgaagatggagagaagtcgatgcgcccagagaacgcaagacggtggatcagagatgagtcccaggaacctccagagaagcggaggctgacaggcccggggagaggaaccgggcagggacaaaccagcggacagagcagagcgcgaaatggttgagaccgggaagcgacctggccgggggaaactggatccgggccgcggcaggagcgactggtgggttgggccgggcggggcggccttggcgccctaaactcggtccctgcgccctaccaacccagtccaagtccttcgcctcgccaagtacggccgccgcgtcgatcccggtgagaccatttgtaccggcctagcctagcctgagaaagagaaaactgagctccagcgacttgggagagggggaggaggacacgaagattctctgggtcatggccagagctccgcgggctccttggggtagaagctcggtcctccagccttgccccgggttggttttgccagcacccccaggttctgaagcatctgaggacattgagatcttttgagaagctggtgatagctatgggctctctctcaaggaaaatgcaaggatgagaattttgcccataaattcaggaggtgtagggactccggattgcaaacccattctgcctcaacaaatctgtatcaactctctgaccgccccacatagccccttttccagaaccttcgggatatcctgccttcccccaccaggtggggccctgaaggactgacgtgggggacgtcacgaaaggaccaccttgtaccaggcacccgctttgtacggcgggaaaaccagcgagtccagaagcctgagtctcttctgcaaatccactccccctgctgagtcctgggatctcagtcaaggggcgaattcctgatgccccctgccaccctcttccctctccaaaccctgaaatctgtccaaatggggggtgtctggaggcgtggcttggaggcagtttaagcaacagctaaaacggttgccaattactttttaaaaccattaatttaattctccccgaaagtgaaggggaagatggggagcggcaaatt

SEQ ID NO: 23485 - DNA, 1806 bp, Artificial sequence
  DNA replication origin
gtattgttgagtattagcttgtacctggttcggaggctaagtaagtatttaccttccagtttggggctgacggggcgggggcagcgcgaaacgaaaattgcgtctctcttcctctctctttctcctcacaaatatttgggggtcacgggttccaaggcctagtccgggaggtacccctgcccccttcgccatccctggaacttgcagaagttgccccacgccccacacttcgctccccttctccagcccagccagcccagattggattcccccacccccgcgccccctctgcgccctgaagctgcgtcagcgcggttctcccggctcctggagccggccccggcttctttttgtcatacacggggctggggcccagccgggcctttctcatggagagagctagtggagaccgcgcggcctgggtagttttccccgcccggccgccgagcccaggcccaggcccagggtggggaggcgggggagcaggaggggtgccatttggcctggtcccgaactccagagtttcaggcctgagtgcgctgctcacggggctctgagggagatgtggacagggggagattcagggtggacgggtcttcccgcagacagctcggaggtggcactcaccacgtctctcctttcctcgctgcaccttccagattccaggtcagcctatggggcactgtggtgagtgggtcgtacggctgaggcgggggacaccagcgactatgagagcgctgtttgtattcacgccgtgcgggctgggtgtgcaagttcgtcccctcattgggcgcaggagaagcggcgcacgtatgttccgtgctcggcagggcgcccagagtgtgaggagagagagtgtgtgtgtgttaagggggaggggggatgttggcaggtgtgcgtgaggagggggtgtgtgggtctgagtaggagaagggaccaggcctcctttcccctggggccagcgtggccaccagggatcctagttggggaagccgggaatgggcaaccaggatttgcctttcgcttctggaaagggggctgagggagtagggcctgggaccaagggctggagctggaggggtttgtgccagcacttggctgtgaatgtttgtttgggtgtgtttcctgagcttgttagtgtatactcgctgtttgagaattccatttttgcatctgtttattgtgttagtaccatcaatcctgtgagtaaatttctgcgtgtgcgttttcgtgtgtgcagattcgtgtgtttgtaattgtgtatggtcctgctaatgtttgtgtttatcactgtgtgcacttttatttttgttggtctgtgcctatgtgtgtttgcttatttgaggatgcataaatgtgagggtgttttcatgtgtacgtgtgcattcacgtaagagtgtttgtgtctgtgtttgcaagcattgatgtgaaggtgtactttgaaaaatctgaatgtgtgtgtttgtgtgtaggtgagggcgtgcatgcttgagaccctgtgtgtatgagactgagctggcttggttgtgtttgtgagtgcagaattctgaagagctatgtttgtgtgccagtcgctgtgtgtgtgtgcctgcaaatgtgtgtatttgtgcaaacagtagttttttgtttatgcaactcctgtaggcttttgtgtgtgtgtgtgtatgtgtgtgtgagggggttatgtttgtatttgtgtttgtgtgtgtactcctagctgcgcttacctttgtggattcggaggttgagggagcaggatttgtggatgcctgtgttggggctcagggatgcccacttgtccccctt

SEQ ID NO: 23486 - DNA, 880 bp, Artificial sequence
  DNA replication origin
gttctggaaaccaagcaatccacggcctagcgccagtggggcacaccagccacgacgcccccgcctcccagggttccacccaggccaggacactctccccgcctgggctccgggccgctctcagacggccacccccaagggttccccagaaaattcaccaccaccccccacccaccccactcccacccccgccatccctctcgcatccctgcccggatgtctaggcctgagcacccattgcaccccgccggcgtcctctctggcccgcctgggagcgcgcggtcccgaggttctcgggcaaacccgaactgcggagggcagaggctgggctcgctgggtctcgccggagcgccacaccagccgctctcctccggcctccagacagcggggctcagccttcacgcccgctcctactcgggggcccgattccttccggcggcgggcggtgctctgcggcgctgcgggacgctgagtgtgtgtgcgaggcgcggcctatatttacaccccaaacaaaataattacacttttgtcggagggagaaagccagtgattaggcgtaggctctttgcggcaaaacagtttctcagtggtacaccagtataatttttcacggctggctgaaatcaaagaggggaggtaatgaatccggcgagcaatttaaatttacaatttgtaacgccgccgccgccgcgcagacccggccgagagcgcagctcggaggcgctcgctgcgtttgtttaatgttaaagccgcgctggctcttgggggtggggtgggggaagtatgcgtgttggggtgggagcggtaatgatcgaagtcgggagaggacgggctgggtcgcacaagatgccaccaagagaagtgggcaaagcgcgcgcct

SEQ ID NO: 23487 - DNA, 687 bp, Artificial sequence
  DNA replication origin
atgctacagccccagaagtctgactcagagttggcccacccctgccgggtcccacaggaagcccccttaaagttccagcccggatattggactggggtttagtttagactcagagccctgctttcctgtgctggggggtgaatgcagaggaagattgggcagggagaaaacttggtgggagatgccattgtttaattcccacttcctgcagctctccaaaggaaggaaggaaggaagaagggagggagggagggaaggaagaaagggagggagggagggagggagggaaggaaggaaggaagaaaggaaggaaggaaggaagaagggagggagggagggaaggaagaaagggagggagggaggaagggagggagggaaggaaggaaggatgtaaggaaggaaggaagggagggagggagggagggagggaaggaaggaagaaacgaaaaggaaaagaaagggaagggggagggagggagggaaggaggagagaagagagggaggaggaattccctgcctttttgattaaacgtcccgggtcgggcctgcccagttaacgagaccgttaattaagccgagcacgattcaactgacaggaaggccctgcgccccgcagagatgttctggaaaccaagcaatccacggcctagcgccagtggggcacaccagccacgacgcccccgcctc

SEQ ID NO: 23488 - DNA, 908 bp, Artificial sequence
  DNA replication origin
tagaaagtccggggttctattttggaggatggggtccctgcaaagctcttcttcttggggcacaggagctggagtggggctgcagctgtcttcttagaaatagctcccaaggcctggttcatggcctctaccatcagatagtctcagtggggccagaggggcaagactacagcctctcacgaccaagtactgcctgccctgagaccccaaaagtccagggccagcctccaggcccaaccatctatgcgaggatgaagagaagcctgactgtgctcagtgcccagctgggacccactgctcctccagtgcaactggcagcctggaatccaagcttcacccatggggaagtgggccgctctgtgttaagtacagggctttcctctcagaacaaaaaaaaagtcagtgtttcccttacaggttggaggactggcttgctgctttccttctgtctctcccaggcccccttctggcccccagggatcagccccagacttcaccctcccagcaactaagtgtgttttgcccggggaaggagcacccagcaggagaaagtagcctgtttttgcttgccagatagcccaaggtgtgggacctctaggggaggggtgcattccaggagaggggcttgcagtaaggaaggagggaaacccacgccctgctgcagctccagagggacctctgagctgactggcactcaccagcgcacacactcactccagagagacctctgagctggccggcactcaccagcgcacacactcacttggaggctggatctcagccactgccctctccacctgctccaaccaccaagatccagggcctgtcccctgaggggtagtaggcccagtggacttccactagctagggcccctgatgctacagccccagaagtctgactcagagtt

SEQ ID NO: 23489 - DNA, 1227 bp, Artificial sequence
  DNA replication origin
catcgaatctgagaatcttactattcccatttttacaaatgaggaaactgaggcacggagggttttgatgacttgtctactgttgtacatcaagcctgtggctgggccccgtgcacacacttccggcttcccttctctgctgttgtcttccttcctgggatatagccctcagtgggaactgagcaggccctttgcccactgctgggccccagaaacgagagagcctagcccatgtgctgacccaggcctccctccccaggccccagccctctctgcccttctagtgtccttgaccctgtgtggcgaggggtcaccgcctcatctgtatggctcccacagaaagccagcgacggctcccaatgcatcacggagtggcagtcacgccagagccggggtgtcatttccatccatctttctccaaccgctccctgtcacgaagcaagggaggtcggggtgtggggggaggaagaggggaagatggatggggtgggggctgagaggcagggatgggagtgggaagggaggagggagcggaggaggaggagaagaatggaggggaaggagaaaaggggaaaagaaggaagaaaggccccagggggagagattgctgagtaagggagatgaggaaagaaatgagaagggaggagaggacgctgtgagctagaaggaagtggccagcaagagaactaggagagggaggcagagggaggaggggatgggagagagaagcagagaaggctgaggagggacgctggggaaagaggagtgtgggaagaaaatgcagttttaaggaaggtggaaaggcggcagaaactggaggcagggaggcaaggagaggcgacttggactgccccagcctgtttgtttatttgttttctcaattccaacagcctccccccgctctgtagccctgggcaaagtctaaatcaaagcagaggtgggaggggagctcctagcagatgcgcctgcagggctgggccctgagctgtccccagaccccagagaggggcctgacaaatggagggacctcaactagggctgctcaatgtcactgctccatgaggtctctcatcctccaccaggcttgtggggttctttgcatgatggtctcaggattccaaaaagcagcaagttagggaaagctctaatgcacaagcacgttgtaagactccactcacatcatatttactaatgtctcattggccaaagcaagccacgtggccaagt

SEQ ID NO: 23490 - DNA, 1228 bp, Artificial sequence
  DNA replication origin
cactcaggtgacctttaaaccttaggggaaatcgccgggcgcagaggctcaagcctgtaatcccagtactttgggaggccgaggcgggtggatcacctgaggtcaggagttcaagaccagcctgggcaacatagtgaaaccccatctctactaaaaatacaaaaaattagctgggtgtggtggcatgcgcctgtaatcccagttactcaggaggctgaggcaggagaatcgcttgagcccaggaggctgaggttgtagtgagccaagattgtgccattgcactccagcctggctgacagagcaagactctgtctcaaaaataaaaataaaaataaaaataaaccctagggcagattgcatgtaagttactgcctctccacctccccttcctgcatgtgggatgagtcatggcagccctgtaagcaggcagcactggcttgggtagaccaacctggactctcacatggaatgatgagtctgtgcccaggaatgatgggtgggtgggtaggtgactggatgaatggattaatgggagggtgatcagttgagtatttggatggatggttgattggttggtcaaagagataggtaggtagatagtctagggttgattgggaattgggtgggtgtgtggctgagtgggtagatgggtaggtaaatggatgcgtagatggatgtggtgggtaaatgaaggagaggttaatataggtgaataatgaataaatggatgagtagatgattgtgggttggctaaatctgcaggtggatggctggatagatgagtggatacatagatgggtcaatgtgtggatggataaatgggtatataaatggataagtgggtaagtaagagaatggatagtgggtagatggatgaatgggtgagtatttggatggatggatggatggatggatggatggatggatggatggatgaatggatggatggatgaatggaaaggagtatagattggtgggtatgtggatggataagtgagtgaacagacaggagggcattgatagatgaacgtatggatggatagataggtgaaagatggataactgggtgtatggatacatggactgatggggaaatgaatgggtgaatagtgagtaggcagatgaatgagaaagtaggatgtgtgggttggggggagtagatggatggatggatgggtggatggatgaatggatggatgagtaggtagtaagaggatgaataaatgga

SEQ ID NO: 23491 - DNA, 1013 bp, Artificial sequence
  DNA replication origin
accgccctacccccaccccttccccagctcgagttcaaggacgcagagaggacgggagggggttaaagcccattcaaacgcgcagccccccgcccccggctcgccccccactccccgccggccgcccgcatctgggcgcgcagaggaacagatttcgcgtttcacacagcgcacaatggccgccctcaaaggcgcgccgcccgcattgttcgggccggcgcccgcgcgtcctacctccgcgcgcgaattaacccccgtcaccccgccattgtcaccgcgcacttcggggccggccacaaaggcgccagaaaaccctgccgtgttcggaagggtggggggtggggggctggggggagggaagcaacagggactggagggaggggggcactggagggatggagagggcttggaggggagggaggccaccggggagagggggcggacgcagactgggtgggggggcctggagcagggcgtgggggcgcaggctaggagagggggcgctgggagtaggcgggtaggagggaagaagggggtgcataggctgggaggggtggggggctcttgccggctagaagggctgctgggggcgggagctaggtgcagggcggaggggcttgggggctgcctgtccacccctgtgccttcggatctctgattagcctcctttatctattccgcctctggcttctctgttctcttcctgcgatcgtctctctccgttctttctcttgctgtctctgtgtctgtgtctatttttcctttgcctctagttctccctcgctttctctctctccgcctcttattatttgtctctctgtctctgtccctctctcttcatctctgtatctatttcttcctctccttctttcttatcttttctttcttttttaaggcaagggcttgctctgtctccccggctggagtgcaggaatgggatcctggctcactgcagcttggatctccctggttcaagtgatcctcctgcctcagcctcctgagtagctagctag

SEQ ID NO: 23492 - DNA, 763 bp, Artificial sequence
  DNA replication origin
ctcattgccccagtgctgcttaaaagtgaatgtaaaatatatacatgtacataagtgtgtgtttgtgtttgtgcatctgtgtgtacgtgtgtgtgtgtgttttcctcaaaaaccaagagttgcagtgaatttcagggaagcggcagggcccaatgtggtaattaacaaagaagactcggtttccccgtgcctctgtatttactgatctatgcatgcacacacaaggtgagataggatgaatggctaatttcccagcggcttttgctcctgcttgctgcaaagttgtgaacaaaatgactggccatgcattgaactggcttacacagctctccatatggaaattaagataatccagggcccagctttgtgtctcagctacggcaggggagccaggagggaaggggaggggggccagggaggctccaaagagacagggtgaggctcccgggcctttcagaggaacagtttactgctcgggctggggaatttagctcgattttgttggtcaaacacttaggaggatgtatattcttccacttcccccaacccccaggcctgctccctgccaccttctttcttctgctcagacctcaccagggatgtaatactcggttcagggtaggaagggtttaggcagcagaacaaaagaggagggattatgggtaaggtcagagggctccggggattagagatatgatgtattaagagggcaagactgccaggaatactttctgtttctatgaagcctgtgttaattgatggg

SEQ ID NO: 23493 - DNA, 1342 bp, Artificial sequence
  DNA replication origin
tccattttgattcctgaagtttcttttagtatattagagctagtctttttccccctcttcggatctcaagcactcctgttcaaggaagccagacggggaaaatgaggcccgaggaggcaaagtttcctgcccaacagacacacttagtggtggcagcagtgtttgaaagccaccagcccaactcaagacctgtgttttaatctcttgggtatgaaacagacgtgggtggagagaaagggatgactccagtggaggcggcagaggggactgcatctggggctggaggaggggagggttgggaggcctgggtccccaccagccagccagaccggcagcctctcgccctccgccccagcctgctaattgctcctgctaacggttcagggccaacgcttccaagcagtcttatcttcttctttaccatttttctttctgggcaatgaagttaaaaatcccttcccagcactccgatggggtttttaaaatgtagcctccatatcactatttaacatgcactgctaaaaactcgataaacagcgaccgtcacttgcagattagctcttcacataacgaaatgatttatttagaagatttcccaacaccacccttctctctctctctctctctctctcattccttggctaagaacattattaatcagaaattaaggctgatggaggaacagaggtgagagtgatgggaacagtgagagaaaggggtgcggagggaggtgagggagagaacgtgggtgtgagtggccacagggagaggtggcagagggaggccggaggggccaggtgctctggaagggatgatggcgatggggggctgggcaaaggggggactcagaggacaccagaggagggtctggagagagaggagaatgctggagtcaggggagttggtcagagggggtgggaagaaaaggagggaaaatcgggagggggagagagagaggaatgaagggaaggagaagagaataaatgagagagagactaggatcaaggcacagagaaggagggagagacaggaagagcagagagactgagatggaggcagacagagggaaaaaactaggagaaaggagagagaacgagagagacatacagaaagagaggcgggagagggagagacgaggaaagaaaaacaggagagagggagagagagagacagagacagagaggagagacagagaggggatgagacagagagcgaaatagagggaagagagagagaaaagacagagaaggagagagaaggaactagagagggcaaaaaaaaaaaaaaaccatagggccaggcgtggtggctcgtcctgtaattccagcactctaggatgccg

SEQ ID NO: 23494 - DNA, 1001 bp, Artificial sequence
  DNA replication origin
ctttcccaaagggaggaggccccggggccagaggcacaggaggggaccttgggcctggcgagaggctggaggatgaaatcgatcaggccattttgtcctggggctggaggaaggctggggggtcctgggaagagtctagggggttgaatggaggttagaaaggcagcgagagggggagagaaagaggaggaataaaatcctggggatggtggtgtgagtgagggagcgggagagagagagggagagacaccaggttatcagagaagtgtgaagacaataatgcaatctgacatttctgaaacaagaccccccggttgccatggcaacgtctcatgtgggagcagctcccaggagacggctccgagatgtactataaatgatgtttgattagaatttaaatcatttaggcagagagaagataggccttttgtcagcaaggggacctgggggtggggagggaggggggccggggttgtggcgggggagggggcaccgctggagccagcatgggcgtggggagcgggatcggaggtcagccagggggttgattacttttgccctcagcttcatttccgtttacagtaacctttccatggtggccagagggactcagagggcaggagaggagagacctgggggggatgggggtgtgggaagggagtaagggagagcagcagagctgaagggagagatgcggagagacagagaggaacggacagagcagagagacacaagcgggagagagaagcaggaagagagagaaggagagggaaaggagaggaagagagacagacacagacgggcagaaacgatgagagagacggaaagaagagagaccaggaaatggactgagagacacagatagacggtacagagacagagagagactgagagacacaaagggggagacctggagtgaaaacatggactcttgtgtccacacacccggaatcattttccagcctctgaaaaatgcatcaggaatgtgggtgcccatgctg

SEQ ID NO: 23495 - DNA, 1388 bp, Artificial sequence
  DNA replication origin
aaatgcgagaggcccgggcagccggattttcaatcccagttcccagggcacctccttcccaccgtaccccgcttcctccagcagggagccccctccctccagcagaacagggtctggcctagccaacttgctaccggggccgggggccaagagttaacgtcggaagggagctcgagagagtgtgagagctaaaggacatgtcaaatcaatcatatttaaacaaaagcctctcccgcccaagggcccttttaaaagctgcttatttaattaaaagtcccattttccatatttatggcccttattcagttaaatattaaccgctggggccagggctagtgtgtgctttgtgagcggtgtgcggggaggttcattaccgcggccgggatttaccagacggtggcacggccgcggcggatcaatgcggcctgccctggacaaacatgctgggggcggccgcgggggccgggtggggcggcggggcccgagggcgcctcctcactctccggctgggactcagcgactcggggacgccttgtctctctccctgtctctcgcttccacatgctgtccctggggctgagtcgtaggcctggagtcagagacagagagacagtgagacccagagagagatatagagaggcccagagagagatagcgagagacccagagacagtgagagacccagaaagagacagagagacagtgagacccagagagagagagagagatacagagagccagtgagagatccagagagacaatgagaccctgagagaggcccagaggtagatacagagagatagtgagagacccagagagagacccaaagacagtaagagacctagagagatagtgagagacaccaagagatacagaaagacagtgagagacccagagagacagagacagggagacacccagagagagacacagagacagtgagagacacagagagagacatcgacagtgagagacagagacagagactgagagatccaaagagacactgagagacccagcgagacagagatagagagacacccagagagagacacagagacagtgagagacacagagagatctagagacactcccagtgagacacagagacagagactcagagagacagagacagggagacacccagagagagacacagagacagtgagagacacaaagaaagacacagaaagtgagagatacagagaaacagagactgagagacccagaaagacagtgagagacccagcgagacagagacaggaagacaccagagagagacacagagacagtgagagacacagagagatctagagacactcccagggagacagagacagtgagaaaccagagagtcagtgagagacagcgggtcgtgtttctccgtg

SEQ ID NO: 23496 - DNA, 1472 bp, Artificial sequence
  DNA replication origin
aggcagcctatgagtgggaataagcaaaaactaagttatctgacttggggagagcaagaaatggtggttgggcataaggggtagagtcttgataaactaggaggctgtgtgaccaccatcatccccctccttaggtaatggagaatgtcagaattatccaggaaggtgacttctacgtcagctcagagaagccaggaccagatcagacatgagtcccagggcatgggcctgcaccaggctaggcccacagggggcttaaggcactggtggcaaagcagcctgggttcaaatcccagctgctccttagctgggcaactctgaactggttacttggcttctctgggcatcagatccctcctcacccaggaagtagggcagatgacagggctctgaggtcaggcatgtgcagaatctggtgtatggaaggtgcttcataaatattaaatttagaataggatgtgatttctttctttttttgaaaagttttgaaaggtaaaggccattagcttggaggcagaagacagacctccctgactgctgaattcctgccggcctgaaattggagcattccaagctcctcagatgagtcataagccaccaagattgtgagcctctgggtgagtatgagtagaattagatacttcctttgtggggctcagtgcaaaatgcaaatgagaggtcggcgctaaatacgagaatgtgcccatcaagctgcttctgtggcctcgcgcctcgcagcagtcacagagccttcagctggaatcctggcaaacactgtgggccctcccatggtctgggatgtgcttaatccgaacacagccctgtggagtaggtgctattgttatcctcatattacagatggggaaactgaggcacagagggagggaccaccagctgagccgccaaaggacaggcagctggtggcatggcttttaaaagggaacctgtgcccccggatctggagacatcttagcccactagccccttcttttagggtgaaatacgcattctgcgaaatggaggcagcttgtaatgggggtgaagccaaatgcgagaggcccgggcagccggattttcaatcccagttcccagggcacctccttcccaccgtaccccgcttcctccagcagggagccccctccctccagcagaacagggtctggcctagccaacttgctaccggggccgggggccaagagttaacgtcggaagggagctcgagagagtgtgagagctaaaggacatgtcaaatcaatcatatttaaacaaaagcctctcccgcccaagggcccttttaaaagctgcttatttaattaaaagtcccattttccatatttatggcccttattcagttaaatattaaccgctggggccagggctagtgtgtgctttgtgagcggtgtgcggggaggttcattaccgcggccgggatttaccagacggtggcacggccgcggcggatcaatgcggcc

SEQ ID NO: 23497 - DNA, 969 bp, Artificial sequence
  DNA replication origin
cgggcagaggggctcctcacttcccagtaggggcggccgggcagaggcgcccctcacctcccggacggggcggctggccgggcgggggggctgacccccccccacctccctcccggacggggcggctggccgggcggggggctgaccccccacctccctcccggacggggcggctggccgggcagaggggctcctcacttcccagtaggggcggccgggcagaggcgcccttcacctcccggacggggcggctggccgggcaggggggctgacccccccccacctccctcccggacggggcggctggccgggcggggggccgacacccccacctccctcccggatggggcggctggccgggcagaggggctccccacctcccagtaggggcggccgagcagaggcgcccctcacctcccagacggggcggctggccgggcggagggctgacccccccacctccctcccggacggggtggctgccgggcagagaggctcctcacttctcagacggggcggctgccgggcggaggggctcctcacttctcagacggggtggttgccaggcagagggtctcctcacttctcagacggggcggccaggcagagacgctcctcacctcccagacagggtctcggccgggcagaggcgctcctcacatcccagatggggcggcagggcagaggcgctccccacatctcagacgatgggcggccgggcagagacgctcctcacttcctagatgtgatggcggctgggaagaggcgctcctcacttcctagatgggatggcggctgggcggagacgctcctcactttccagactgggcagccaggcagaggggctcctcacatcccagacgatgggcggccaggcagagacactcctcacttcccagacggggtggcagccgggcagaggctgcaatctcggcactttgggaggccaaggcaggcggctgctccttg

SEQ ID NO: 23498 - DNA, 920 bp, Artificial sequence
  DNA replication origin
agccccccgcccggccagccgccccgtccgggagggaggtgggggggggtcagcccccccgcccggccagccgccccgtccgggaggtgaggggcgcctctgcccggccgcccctactgggaagtgaggagcccctctgcccggccagccgccccgtccgggagggaggtgggggggtcagccccccgcccggccagccgccccgtccgggagggaggtggggggggtcagcccccccgcccggccagccgccccgtccgggaggtgaggggcgcctctgcccggccgcccctactgggaagtgaggagcccctctgcccggccagccgccccgtccgggagggaggttggggggtcagccccccgcccggccagccgccccgtccgggaggtgaggggcgcctctgcccggccgcccctactgggaagtgaggagcccctctgcccggccaccaccccgtctgggaggtgtacccaacagctcattgagaacgggccaggatgacaatggcggctttgtggaatagaaaggcgggaaaggtggggaaaagattgagaaatcggatggttgccgtgtctgtgtagaaagaagtagacatgggagacttttcattttgttctgcactaagaaaaattcctctgccttgggatcctgttgatctgtgaccttacccccaaccctgtgctctctgaaacatgtgctgtgtccactcagggttaaatggattaagggcggtgcaagatgtgctttgttaaacagatgcttgaaggcagcatgctcgttaagagtcatcaccaatccctaatctcaagtaatcagggacacaaacactgcggaaggccgcagggtcctctgcctaggaaaaccagagacctttgttcacttgtttatctgctgaccttccctccactattgtccc

SEQ ID NO: 23499 - DNA, 1353 bp, Artificial sequence
  DNA replication origin
gcttcaaaagaaatagcactggaatataaaattttctttttaatcctcagcaaggctatttgcttctagagaagggtacagcctcatagatggaacaatggtgagcacacacttgaacaaggaaggggaaggggttcttacccctgacacatgtagcccctgctgctgtgttgttcccctattggctagggttagaccacataggctaaactaattctgattggctaatttaaaaagttggagtgagtggtttggtgggaaaaaatggttatgacagagaaggaaatcagaatgagtcagggtggagaaaggagccggtaacccggagggattcagggtggagaaaggagctggtaaaccagagggagtcagggtggagaaaggagccgttaacccagagggagtcagggtggagaaaggagccggtaacccagagggagtcagggtggagaaaggagccgttaacccagagggagtcagggtggagaaaggagctggtaacccagagggagtcagggtggagaaaggagccggtaacccagagggagtcagggtggagataggagccggtaacctggagggagtcagggtggagataggagccagtaacccagagggagtcagggtggagaaaggagccggtaacctggagggagtcagggtggagataggagccggtaacctggagggagtcagggtggagataggagccggtaacctggagggagtcagggtggagataggagctggtaacctggagggagtcagggtggagataggagctggtaacctgggagggagtcagggtggagataggagctggtaacctggagggagtcagggtggagaaaggagccggtaacccgggtggagtcagggtggagataggagccggtaacccagagggagtcagggtggagaaaggagccggtaacccggggggagtcagggtggagaaaggagccggtaacccggggggagtcagggtggagaaaggagccggtaacccggggggagtcagggtggagaaaggagccggtaacccagagggagtcagggtggagataggagccagtaacccagagggagtcagggtggagataggagctggtaacctggagggagtcagggtggagataggagccggtaactgaaaaaggttgctttatgagaaaaccactgacatgctgtgaggaagcccaagcttccccttgaagagacatctgaaaagaaataacctgtatcgactcaccaaccatgtgaccagggctaaagaatccacttccaggaatgctcaggttgcccctgctgacaggtccagctgtctgtcccatccccccaagcctgctcata

SEQ ID NO: 23500 - DNA, 1477 bp, Artificial sequence
  DNA replication origin
tccctctttctcttttggaagactggatagatagctttctgaaagttgtcccatacttaatagtatttgggtagattacagagctggaaagctcacagagtgcttttaaatactaatcctattgagcaaatattttcactattcccaaatgggtcatttctcttgccaattcagttcattcagatgaagaaccattggcgagtcttcccagacagagaccctgaaactcagagtagtaatctttctagctgagtgaccttcagcaagttgggaaggtggctataattcaggtcttctgactcacaaagcagtgctcattctgacagatggccccaggctttccatttcacgcaaccctacatgctcagccaacatgaaaaggtagcaaaccttgactcttatggatgagtgggtggatgagtagatggatggatgggaggatagatgtatgggtgggtgggtgggtggatggatggatgaatgaatgagtgggaggattggtggatgagtgggtggatggatgggtggttggatgggtggatggatgcatggatgggtgggtgggtagatgggtgaatggatgggtgggttgatggatgagtgagtggttgggtaggtggatggatgggttgatagatgggtggggggatggataagtgggtggatggataagtggataggtggggtgatggctggatggatgagtgggtagatggatgagtgggtggatggatgagtgagtggatagatagatgagtgatggatgggtggatggatgaatgagtgagtgggtggatgggtgggtggatgggtgaatggtgggtggatggattggtgggtgggtggatgagtgggtggatgactttttgttgttgttgtttttgttgttgttgttatttgtttttggtgtccccatgctcttagcataaagtaggaagggttggaatggtattgtgcgaagattctcaacgagaaatcaaaagactcagtttgaaacatcacctagtcactacctgaaaccaataaatttacttactggcttattatatgtctcatccagtaagaattcaagtttcttgagagcgggagccttttccaccatgtcctccacttatcccaagcacctagcacagtgtccattatacattaagtgctcaataaataaagattaatctgatgcatccatcccagatctgccaatcatcagccacataagcttaaaatctaaccctgtctcttggtcctccattagatccctgcaaaatagagatgggtggcatctcccctagtccaaagactgctgcagggaactggagaatcagcaaaggaatggatgtgaaatcgcattttaaaacatagcactcagaaaatgcaccctgcaaagcccttttccatatcgaattccccttcccctctcaatctctaactttcctttgaatatctgattcagctcatggctttgctagaatctttattt

SEQ ID NO: 23501 - DNA, 1284 bp, Artificial sequence
  DNA replication origin
gtaaaccagggtcctaaacttggagtctggattggacccaagagaggggactggtgaatttcctgaaactgaatgcagggtattgaatgtgcagcctgctcaccacccaaaagaatgtgtaggttttagtggattcttagtagggtcatcacccctcttccccaaagaaaaacaaaacacaaaacactgatttttgaaaaaatgtccccaaatctcatcgtagaagataattaattactagaacagaacacggattctgtattcacgtttagaacttttagctggatgattctgccatacaagtgggtacattcgtcttgggcatttgattctcacggcagcctagggggcggacgggaggcatagcttttgcacaggagagtccaggggacgggggtgacttgtcaaggtcctacagcttgtatttgggagcagagatttgcggctaggtctctctaattacaaaaggagttccctgtcctggaaggttgtagcttcaaagaggagcaacagataggcgcatggtcgccgatttcagggaaaggaggggactgggagggaatgaatttggtcaagggggcgggggaggatggtttatgaaggtccaaacgagaaatctgctcctttgaggccttggggctgaagcactgaagtccccaggatctgggatgggaagaggatctcaggggtccacactgatgggtaaatgcagctctcagcacgtgggtggagaggaaaaagaatcattcactctctgtgcagcctgcttggagcgctcggaaggcattcccaggcaaatgcagagccactctgttaaacccgggtgttttgcccacgagtccttcttgctgggcttcccaggaggtgctctgtaaattcagcttgtgtaggcattggctgacccgccctggctgtgtatctgccagtccccagcagatgccttaccagcaccagggaaaaccggagccatttctaaaggttccacatgcatctctgggctggctccttctggaggatgggacccttgggtggggtcctgcgtggtccttgacgctgggaagtgggacggttccccaggctcatttcagctcctagctttttctctgctcctctggagtgcctttggggtctctctagggcggatgcctgcggaaggtgcacaaccccaccaccaaattcctggcatccctgccagcttcaggacgttcccagctggggagaggggctcggagctgctcagaactgcctagaagccaggcattcccacccgagactccggacttt

SEQ ID NO: 23502 - DNA, 948 bp, Artificial sequence
  DNA replication origin
tgcaccttcaccctgccttcaccccagagtcgttgagagtaggggtgatgagtagggggtggaggggagatgtcaggaaggcgagcgccggccaggcggggtcaggcagctctccttctcgaggtcagcgttggagagaatgtctgcaaggctgcggaggcccgcggtgtgtttgtgtgtgtgcgtccagactcggttctctgcaccgccagcgtcactgagattacttcccgattagaagccgaccgcgtttgaaatgatttgtgcaggagtttttgcagccaccgcttgctcagagaagcagagatggatggaggttgggaaaggggtagagaggagggagttattgcaggtctgtgttgagagtcgtattgtgatttgagtgttcgggaaatctagtggaaatttggggtggggggaagggaggacgggagggtgggagggagagagaagggggagggcgacagagtgcagtgggagctagttggataggcgatttcagtactttgtgagcatcgaggcaacccaacgtcactgtgctcagctgagttggcttgtatttcagagagagagagagagggagagagagtgagagagactgactcttacctcgaatccgggaactttaatcctgaaagctgcgctcagaaaggacttcgaccattcactgggcttccaactttccctccctgggggtgtaaaggaggagcggggcactgagattatatggttgccggtgctcttggaggctattttgtgttctttggcgcttgccaactgggaagtatttagggagagcaagcgcacagcagaggaggtgtgtgttggaggtgggcagtcgccgcggaggctccagcggtaggtgcgccctagtaggcagcagtagccgctattctgggtaagcagtaaaccccgcataaaccccggagccaccatgcctgctccccc

SEQ ID NO: 23503 - DNA, 982 bp, Artificial sequence
  DNA replication origin
gttgataagttaatatcattaattactcaacaaattatacaatgcccgaggccttggggtctggagactatttaagataagcaaggaaatagcgtccttccctgagagacacagagagaaatcttctaaagttaaattctacttagccaagactagaatcgttagggaccacctgaaatgttccccaatcctctcatttcgtattgttcccagagagtgatggggggggtcttaatttatttgggctcacacacttctgagaatcggagataaattgtaggatcccgtcgagaaatgtgcacctctgcacaataacaaacttgcgtatgatttcaggagattcacgggaagtcctgagccctctcttcctgttagaagtcctagccctgggactaatccccaattagctcaagggtgccggctctggaggagtgggtgccctgggggcggggtgggcgggggggaagccgggtgtcggttggggtggtgggtgcgccatttggcagatacatattcagcgctggtgcttctaacaggctcccactgcggctgtatgcctgggttgggagggttggaggttgagggtgactaaggtaacgaccggagacagctggcgcttctgcgcgagtgaagggcgcccggtcccggcataaaaaaaaaaaaagttttgtcaacgatgcccgcgttcgggactggggtggacaatgcgcaaaagcgttaggaaaaaagttcgcgcccgactgtgggttctgtgcctgcggtgttcttgacgctttggggacatttgggaggcaaagggtgcaccttcctgggcccgccgcgcgggcgcgaagaggacctaggcgagagttggctgtgcgggcctggggaagcgagtctgtcctccgggtgcaattccccaacccgaaaccagagcccgggtcattagcgggaaaccgaagtggcgcggggatcgcatttcaaaagctcaaagagacaggct

SEQ ID NO: 23504 - DNA, 1207 bp, Artificial sequence
  DNA replication origin
cttatcgagagatcgctgcagcccctgagctcgctcgctcgctctggttcagcccacgtctgaaatgcctcagtcatccagccggggatcgagggaggaggcagggccaaggaggaagggggagggagagagggagggagccagcgagcaggcgagccgggcggggaaggcggagagcgcgcccgggcgccgggcaggggcgctcgcctctcttgcactccgctcgcctctccgaccgccgcggccggttctctctccagctctccttcttctccccgccccgggcgagccgggcgggtggccgagcctccccgcgagctgccatccggccactcggttctacaaaagccggcggcagccgagaagcgagcgccgagactccaggcttgcgtgctctccagccccacgtggagccaagctccgcccggccgccgctgaagggctcccgagctcgggtgtctcggtgctggtctcccctgcgtctgggctgggggagcacaaggatgcggccatatctcagcacacgcatgtgtgggcttcctctccactgcgccccacccgcagccatgtgcgggtacccaaacacccccggtgtatctgtactcgaacacgcgccaacacactgggactgaaacacacaccgaaaaacacgtacacacaaacacgtacacagcctgcgcggctggccctgcctgagctcctggggaagatggatttgggatttttatgaaatgcatttaccagcccttttggatctcgtctttcatttgcatgcgggcccccatattccacctggatgtgggtgtgggtgtagagaagagaatggaggatctggacaaagcgagcacagcgagagactgggttctgagcctgtcccctccaagccgctgccctcacctcgaggcccggctgggtgcacagcacagggtaaggggtgggcgattgggttgggggaggcgcgccagcctggtatcttctctaggcatcgcacttatctctcggtgcctcagttctttctccaccccggggacttaatctggccagaagtcggggagggagggtgaatttgtaaaacaaaccgtgaaacgcccccacctcagaggcgagttgactgtttttagtacgggtagggtgggggcctcctcttaggcggacgggagggaaacgaccggatcttaccaatcgccgaattaccaactctgttacc

SEQ ID NO: 23505 - DNA, 1191 bp, Artificial sequence
  DNA replication origin
cgggcgcctgtagtcccagctacttgggaggttgaggcaggagaatggcgtgaacccgggaggcggagcttgcagtgagccgagatcgcgccactgcactccagcctgggtgacagaggaagactccgtctcaaaaaaaagaagaaagaaagatgaatacatccaagcttctgacattttttttttgaaaaattttactgcacatccaggccctcctttggtctaggtaaagagagattcatctggattcttctctctgggttcttcactgtgtgagccatgggtgacattttgcttgtttcctgaagtgcatttttttttttttttttgagatatggggtctcactctgtcacccaggctggagtgcggtggtgtgatcataaatcactgctgccttgaactcctgggctcaaaggatcttcctgcctcagcctcccaagtggctagggctacaagcatatgccaccatgcctggctaatttcttttttcttttttgtagagacaggggtgtcaccatgttgcctagactggtctaggcaaattcccgggctcaagcgatgatcccaccttggtctcccaaagtgctgggattacaggcaggagccaccactcctggccgggtgcataattttttaatggttgactggctgtgtggagggggaagcaagggctggggcctgggaagggaggagttggataaacaggcagcctggcctcttccgggcccagagtttgctgcaggtgcattgagtaacaaaggcctaagttctgttctgggacggctgtgcctggtctttcaggtatagataataaacattaggtaaatgcatgggcagattgagccaacggaaacacagcccacagaacctcagaaaaataactgagacgaatgggcctcagggtttgaagggctccttttatgaacctgcctgaggatgcagccttttgtgtgacgtttccttttctcttttcttttttttctccttcctttcattttctcttctactttttctaatgcaggaaggaggaggttgcttttatttagtccgagtgcttaggcatttccatcagccccagctgtgtgtatttcacgtccctgagactgtgtccttcctaccccagtttctcccaagcatctcatgggcccgcgggtgaagacttaagacttaaaagacccatcctaacccca

SEQ ID NO: 23506 - DNA, 1114 bp, Artificial sequence
  DNA replication origin
ttttctgttcctcacataccaactcagtcactcacagtttcaatggcctggctatttgccttctcctgagctaagccctccagcctggacttcgcctttctgcttttaccctgccctaggacggcagggagatttactggaccggtccacaaaggcagcagagagggggaatcttatagaaattcaatgtcattcagtaaagcatttcttgaaatctactacacgaagggatgccgtgatagagaaagctatgcctgatcccttctgaagcctgtaaaatattatctccctccctccctttgtccttctctccctcctctctgtctctcgctcacctcttccttcacaccacatcatcggtgggagaagcaagatacaggcaatggttgctcagcaggaagttcaggagactgcgggctcctctgggaacctcttgtgctccgtggatcctgggaactgctcatccacatggttcaaatgaaatgaggtgtgtgtgagtgtgagtgtgtatgtgtgtgacagtgtgtgagtgtgagaaagtgtgtgagactgtgtgtgcatgtgtgtgaggctatgtgtgagtgtatgaaaatgtgtggaagagtgatgagaatgtgtgagtgtgagaatgtgagtgtgtgagtggagagcatgagaatgtgacagtgtgagtgtgtgtgtgcatatatgagtgtgaaagtgtgtgagagtgtgagggacttgtgcatgtgcatgaggctgtgtgtatgaaagtgtgtaggagaatgcgaacaagtgagaatgtgtgtatgagaatgtgagcgtgtgtttgagtgtatggagactgtgagaatgtgactgtgcaagtgtgtgcatacgtgtgtgaaagtgtgtgagtgtgtggaaatgtgtgtgcatgcgtgtgtgtgaaagtgtgagagtgcatgggaatgtgtgagtgtgtgagagtgtgtgtgtacatgtgtgtaaagcatgtctgattgtgtgggagtgtgtgtgcatacatgtttgtgaaagggtgtatgtgtgtgggaacgtgtgacagtatgagtggctggagagagagggcaagtgtgtatgaatgtgagagtgtgacagtgtgagagtgtgtgca

SEQ ID NO: 23507 - DNA, 1213 bp, Artificial sequence
  DNA replication origin
ctcatagaaatccacaagaaggaagggagcttcactatagtgtgggctccatgtgggtagaggctgtgctggattggttctcattaggtggcctcatttctgactgtagtttctgaaacatggcaggcactcagcaatcaggcctctagggaagggaagggaagggaagggaaggggagggcaggggagcggaggggaggggaggggaagggagaagagagagggaagggaagggaaaggaagggaaagggacgggtggggaggggagggaggagaaataaggagagggagaggaagagagggagagagagagggaaggaaggaggagaagggaagggaggggaggggaggagagtggggagagggagggaagggaagggaaaggaagggaagggaagggagaagaaagaaggagaggcagaggaagggaaggagggagaaaaagggagggagggaagggaggggaagacggggaggggaggggagggaaaggaaaggaaggcaagggaaagaggaagggggagaaagggagagagaggaagggaaaggaaaggagaagaaagaaggacagggagaggaagggagagagggagaggaagggagggaaggaggggaaggtaagggaagggaggagaggggaggagaagggaagggaagggactaatttgtgaggtcatggcctttgggatgccaaggccaactccagcattgttactcaagctttctaaatctgggttccgtgtctgtaaaaggagaatgagagcagcacctatctagcagggttattggaacacatgcacagtgcctgactctgtgcccagcactaagtaggtgctcaatgaataccagtcccctgttctccccaccactggctaagacagcaccagggctggggagcaggagggagggatgagttcactgcctctggagcggggtcccctgggatgctcccttccagggtcactgcctgagagccatgtgagcacagccccagatggcgatggttgggaagggggtcacagggtgaagttgaaggagattcatgaccttgactgtcctccacagcctgatttatggagcagtgccgtctcctggatgatatggagacactgtgaatgaaagagctgtggaaaaccttaatccccaagtggcagaaagagatactctcatggccagtgtgtgtttgatcacatccatcaggtgaggcatgatt

SEQ ID NO: 23508 - DNA, 1149 bp, Artificial sequence
  DNA replication origin
ggagggagggagggagggaaggaaggaaagaagaaaaggaaggaaggaagagaaaaggaaagaaagaaagaaaggagagagggaggagggagggagggaaggaaacaaggaaaggaaggaaggaagagaaaaggaaagaaagaaagaagaaagaaagaaaagaaaaaagagaagggaagaaggaaagaaagaaagaaagggagggatggaggaaggaaagaaggaaggaaggagaaagaaagagaaagtaggaaagaaagaaagaaaaagagagagggacggagggagggaggaaggacggaaaagaaagagggggaggtaggtagggagggagggagggaggaaggaaggaaaaaagaaagaagaaagaaagagaaagaaagagaaaggaggaaagaaagaaaggaatgaagaagaaaggaaggaaggaaaagaagaaagaaagagggaggggggaaggaaggaaggaaagaaggaatgaagaaaggaagaaaaagaaagaaagaaagaaaaggaagaaagaaaagaaaagatagagaaagaaaaagggagggaaagaaggaaagggtaaggaaggaatgaagaaaggaagaagggaggaaggaagggataaagcaaggaaggaagatggtgagtgaatgaatacctgagcagtgagatctaccccttaggcaagaggaaatgaatcatatcacaaccatggatttcaagtgaacattttgagaagtatcaatcccagatgtttgctggaacatgctcccttcctatttccatcccattttgaaagtcacagtgtaggtaggatccccatggatattgtttattttgaagtatattctacctcattctgctgaaacacactggccacacaggaaagtcaaggaaagactgaggaattgctccggattggaaggaagctaaaagaaacaagaaaaccaaatgtaacgtgtgattctttggctacaaacacatcactttttttctttctgagatggggtatcctagtggtgtgatcacagctcactgttgcaacctcgacctcctgggctcaagcaatcctccttcctcaacctcccatgtagctaggactacaggtgcacaccaccacagctggttaatctttttactatgtgtggagatgggtcttgc

SEQ ID NO: 23509 - DNA, 1075 bp, Artificial sequence
  DNA replication origin
ccaggccaggacccattcagataaatctagccccatctcttgacccccagagccgtctcagaaagggtggtttataagctcctggcagaggcttgcactgcaggaaggaagcagcagaaactcacatccctgctgtatcagtttgtcatctttggcctgtgcaaccctcggaaaccttaatctctccaggcgtcagtcgggattctgtcccctgcactaaactcatttaaggcaggggagtgtgtattaataatgaagataaccaaacagcccaggctgtgatattccctgacctgcccccaggcaggccttaatgactgtttgtgaagtgcgccagagccttacatgaaaggcacaggtgagcacagtcctgccccctgaagtcaggacacctgctgagcctagccccttgtggggtccagctattcctgcaaccgctggctctgaaggccttgtccctgcaggcgggccggccatgcagaaagtgccacaggatgctgagatgggcaggggacacgcagagttatggggaggagcccagggcgagaaaagaaaagggaagatacagacaaatgagtgaaagaacggagaagtgagagggagttggggacgcagaaagaaaagatgcagagagaggaggacaggcaaggactcggagagacagggaagggagagagaaggggagaggcaggtcagagtcagaaagatggagagagggagagaagacagacacagggagaggggagggactggctccaagttaggtgaggaagagagaaatagaacagggagagagggagaaactaagaggggatgctaagagagaagagagcgacagaatcagcaggaggtggagagaatcagagaggtggggagtaggagacagaaaggtcaggaagtgcacagagacaggtacaggagacagggagcaactggagacacagacacacatgcacacgcacacacacacgaacacgcgcgcacacacgctcgcggcgagggctggggagggagggaatttaggggagaggcgcagacaagagacagacatgggcaagtcacacactttcgggag

SEQ ID NO: 23510 - DNA, 1331 bp, Artificial sequence
  DNA replication origin
ctcctcttcctcttcctcctcctccttcttctccctcctcctccttcttcttctccttcttcctcttctctctcttatacacacacacacacacacacacacacacacacacacacacacacacacacacacacacacacacacccttctcttccaaaatcaaccctgagttgccatctcagcttggggaacaaccttcatgagcggccctgcctggagaagccgtgagtccctgcctcctccctgcggcctcctgtggatccttggctacccagtggaggactctcagaactagtgattggggccagtggaggacactcagaggcagtgattggggccagagtgcaggagaatgtcttggagatggaatttccaggaggtgtttgaaggggggccagctctgtgcagatggccgggctggggaggtgaccaccagcggcctgctgtgtctgcctggtgtctctgtccaccttttccctgcatgacatcagagcgaagcaaggaagccctctgccaagcactaacgcatctgatgtttgcgtcatgtcaagtgcagggcaggtggtgctgtttatttttcaaaaggggtaggaaggaggtgagaagtgaggaagaagggaagagagggacagaagaggagaaggagaagggggtggggagaaaggagacagaggagaggagaagaaagagaggaaacaaggagaatgaggggaagagggtgaggaagaggatgagggggctctgagagggaggagtagagaaggagggaaggaagatggcagggtaggggttaggagagggcaggaccggctgagatgttcttttgagaagccccctcgccaaggaccattcctacttgccttatattatattagtgaggatgtaataagtaaagaagaatttaaagactatggcaatagcaaatataaggggaagctactacccctagggctgcgatagagcctccaccaacagggctgacatccagaccttattggacaggcatggccatggttcagcagatgccagagaggtgctgtgatgctgtactggtggaacttgctggaaatccacccccagggtgctgggaaaagctgttactgggaggtgtcttactggaggcactctgctacaaaactgctggaaggtgggtgggtgaaggggattgctgggggaggctgctggatgcaacctgctgccatgcgctgccggagccagggctggggaagcctcctgagctacaggaacggggcattacgggagccctaaagaaacctagtgagctgccatcagctgcagaaagcaaaaccctttcatcccgcaatgtctct

SEQ ID NO: 23511 - DNA, 1808 bp, Artificial sequence
  DNA replication origin
ctgactggggaggaggggggggtgggggaggaagaggaaggaggggacgtcgctcggctgccggggtcgcccgctggcttcgtccgcaccccccccttcgcgagttcgcgctccgcggcggcggcggctccgaggcggcggcggcggctccggggctcgcctcccctcgcgcgccggcgggggccgagggggagtcggtggctggagataaacaaggcggcggcagcggcagcagcggcggcggcggcggctgaggagcagggaaggcggaggcggtggccggcccgcagcgccggcccggggcgcgcgccccccccgccagcccgggcccgctgcccccggcgcggcgtcgccgcggcgcctcccgcctgcccgccggccctcgcgccctcccccggcggcggcggcggcccggccgccccgcgctccccggcgaggcgccgccgcccggcccggcctcgcctcggacgcctcgctccgacatgccccgctctggcggccgggctcgcggaggatcatgactgcggcagcgaactgggtggcgaacggggcgagcctggaggattgtcactccaacctcttttcgctggtgagtagccgggctgcggggagggggctgtgccggggaagggggggggtccccgacctccgccgccgaccaactttctcctcccgccgccgggacttcgcccctccctcgcgtctccccgccgttcgcctctcgccgattctcccccttttggatcgtctctctctcgccttggatcccatccagtgtttatttggctctttaaaaatcatttgtgagcgcggcgctcggcgtggaatttgcatgtggaagtctcggagctgcggattctgggtcgcacttcgaacgcccaccctctgttgcaatcgcactccccttctcctcccctttcccccctttttttccccccgtaaatgtggaaggctttgccttgtgctgccgcgcctccgatcggcaacctcttcccccgttgttggatcagctgcctgcccgcccgcctgccttttgaatttttttaaattccataatgacacctgcaatttcgccctaaaatagttgattgaatgcgattgtgtcaggaaaggactcttgcacccgaagctcccgcgattgtaaacatcgacagccgcctgcctctcggggcttactatgctggagagccgtaaagccattgcaccgagccgacggaaggtggagaaagctttttcttctttctctcctcctgtgtcttttaaaaactgtttttctctatcctaacaacgaatccgcacacacacacacacacacacacacacacacacacacacacacaaaagcaacaagctggtcggtttgataacatcgcttttatctgccttcgcctctctcgcgctctctctttctgataattgacaacttttccttcggatttgaatcgcctgccttaatcttgaagcagttagggtgtcaattgttctcgtggaagcctggcacccgccgacggtgtctagattcatcgaaattaaaaatgtatagggctccagcaactcttttcctggcggtgtcagtgacatttggtggtaaatgccatctttgctttttattgggtcgtattacctacctctgaaaacattcacgttgttaaacctggcgtttaggctaataattgcagtgcgtggtctttaaatatgtgctttgtgcatgagttactgtatgtatagctatgtgcccaggagagtacgaatttgtttaaatattgagcaaagatttgtaaacagatgtaaggcaattacgtttcaag

SEQ ID NO: 23512 - DNA, 1298 bp, Artificial sequence
  DNA replication origin
tctgacagcaatggcggccgccgaccgcggctcggcccgccattggctggcgcttggtcacgtgacgggcgccggccgcgcggggggagcgaggggcgggcgggggaggggtccggagtggcggcggcggcggcggctcgcgggaggcgctgctgagctgagcgcggccgggtcctccggccgggaagagggagggagggaggcagagagggagagaaagaagtgcgggcggccgggctccccggcgggcggcggactgccggcccgtggctgccgtgggctgcccctcgtggccgccccgccccctcgcggtgcactgatcgtggcggggcgggaccgtgggtcccgggcgcgcccgtggtggccgcggaggagggcgcgggacccccggcctgtgccctcgcagcccaggccggctggcgtggcgcggcggccgcgatgtgggccaggcagcgggtccgagtgccctggggaatgtgtcctcagaggctcgcgccgccgtccgccttttgcagaggagaaaactaaagcacaaagggattaaatcacttgcccgaggtcgcacacttgggaagaggagtccagattcgaacccgcgcacagtgaagccaagctcttggacaaggtttcacaggcttcgcccagggatattcacggctgccatagacggagcgcttactgtgttccagacactgtgcgtttaatacagaaatgtttattgagcccttactcctagttactgtgtgcactcattcattcattcattcattcattacataaatgtttcctgagctcctgctgtgtgccagaatctgttataacttccaggcactgtgctaaggccgtgttgggagcagacccttcttcctggcgtcattcattggataaccaacatttcctgagtgtatatggcctgggagtccggaggagtgctgctatgaagagaagctctcccagtcctcaagaaatggatccccgaaaagggggaggagaaaacaatgtcttcactaatacgcctccaaacatggaacaatcagctgtttcaggtagattaagctaaaagaggaagagtggatggctggcacagtggctcacgccggtaatcctagccgaggtttaagaccagcctgagcaatgtagcaagaacccccgtcatgacaaaaaaaataaaatacaaaaatacaaaaattagccaggcgtagtgtggcatgtgcctgtagccctagctactcgaaaggctgaggtgggaggataacttgagccctggaggcagaggctgcagtgagcccagtgagccg

SEQ ID NO: 23513 - DNA, 930 bp, Artificial sequence
  DNA replication origin
taagttgtggccacacctttgcacacccagggtctcatatgatggtcacaggtcagtttgcaggtgaagagccaagggtgggaagtgtccatcaaggagcccaagggacacgttgctttcaagggtgcagaaggctatgccagctgcactgcaccccagcacccagcacagatcatcgaggtaacacatgttttgtgcctgcctgactgggctgggtgtttttcccactcgatcctcagagaggcaggaagaaaggaagtcctgactccaggatcctgcagctggctgcctgcacccaaagcctgcactttcccgcttcccagaccggtctctgatctcacagttcccatctttctgacccttccctatatggggggcaggtgcggggaggaagctttcccaggaggagcagcagggcaggtgggatttctccttcatgtggtcttcattctgcagagaatgagaaagagactggctctggggggtatcaaagtgtgtgaatgtgtgtggctgtgtgtgtgtgatcatgcgtttatgcatatgtgactgtgtgtgagcatgagtgtgtatgtgtgtctgtatgtatgagtttgagaaagtgtgtgcgtggctgtgtgtatgaacaagggagcatgtgggtgtgtgtgtgtggctgtgagtatatgcaagtatctgtaagtgtgtgaacatgtgagtgtgtacgctaatgtgagtatgtgcgtgtgtgagagtgtgtgtgtgtgtgtgtgtgtggttttacaggggggcaggaaagggacaggggtgggagcaacattccttggaggttgaaccagagctggtggagggaccctctcctcctcccctcttgcctgttccctcttccctcctccttcctcttccttctcagcccctcgccccttcccagcagattctattaagcaacccggg

SEQ ID NO: 23514 - DNA, 1285 bp, Artificial sequence
  DNA replication origin
gaaaaaaaagaaacaaaactaaggagcagctgggcacggtggctcacgcctgtaatcccagcactttgggaggctgaggtgggtggatcacttgaggtcagacgttcaagactagcctggccaacatggcgaaaccccatctctctactaaaaatacaaaacttagccgggcgtggtggtgtgcacctgtaatcccagctactcggaaggctgtggcaggaggatcgcttgaacccagaggcggaggctgtagtgagctgagagcacaccactgtactccagcctggttgacaggagagaaactctgtctcgaaacaaacaaacaaaaaactgaagagcatttgctgggtctctgtgagactggaagcacatcaaggatttctgcagcttggctgagtggccccaggtctggagaaaagggctgatgagcagaaaaagacaccaaggagacgtcaagggaaacggtgcctgagagaaattgacagagagaaattcggatgaacagggaaggttcagtgagtgtgtgtgtgcgtgcatgcgtccacgtgtgaatgagtgtgtgtgagcacgtgcatgcgtccacgtgtgaatgagtgtgtgtgcgtgtgtgtccatgtgtgagtgggtgtctgtaaatgtgtgttgtgtgtacatttgaggattgtgtgtgtatgaatgtatgtgagtattgtgcatgcacacgtgtctgtgtgagactaaataatgtgtgaatgagtgtctttgtgtgaatgtgtgagagtgtgcatgtctgtgtgcgtgagtgctgtgtgtgcctgtgagacttgtgtgtgagtgtgtgaatgtgtgtgaacacgtgcgaatgtgtctctgtgacaatgtgtgtgaacctctgtgaacatgtgtctgaatggggcatgtgaatatgtgtgtgtgagtgcatatgcgattacgtgtgcctgtatgagcgtgtctgggagagtgtgtgtgttgtatgtgcatgtctgtgtgtatgcgtgaatgaggggggtgtgtgtgattgtgtctgagtgtgtctgggagagtaagtgtgtgtgcacatgtctgtgagtatgtgtgcatgtgtgaacgagtgtcgtgtatgtgtgagtgcatgtatgtgattgtgtgtgtgtgtctgagcgtgtctgggagagtgtgtgagtattgtgtgcacatgtctgtgtatgtgcatgtgtgaatgagtgtcgtgtgtgtgattgtgtgtgtctgtatatgtctgggagagtgtgtgagtgttgtgtgtgcctgtctgtgagtgtgtatg

SEQ ID NO: 23515 - DNA, 1761 bp, Artificial sequence
  DNA replication origin
taagccccttccatgggccaggcacacgcatatccattttccataccacctagcaaattggctacagagggtactgaagaaatcaaggctcattgggttgacatggttgttcaaagctggcatacttggttttcagggagtggagacctggccttggatggtgatgccatctgacttgccttttctgccagccagctctggctctcctggaggacaagtgacgggggaagagtttgccatgagtctttaggtcacgtaactacggaagcagttctcttgaggcttgatacgtgatctttatacaaaccctcctcgggacaggagccagaaagtcactctcccacccattttgggacaagggaggtggggggaggacccaagaccggatcccggcagagtcccgctgcccacgacaggcagcaggtggcgccatggccccggtttaacaaggacaccgggaaggtggaaagggtgggtgggtggggcggggtggggggcgtgggggttgcggttggactccagaaagaaaaactagtggaaaacaaggctttaaaagaagaacaatttgttccaaaacacttgccttgtaacggggtcatctataaattctgggatttcctgttggcctcggggagggcaggcaggccggccggcgggcaggccactgtcttctctgcagtctggaagaatcatttccagcccagctcacgagctccagcctcccctggcccagattggctctgaaatttcccagctttcgtgcccgtaagcaggatcctgtgacagcagcgtctccttgagcggtgctccagtttccactgggttgggaggaggcgtgagatcatggtcattttttaaaggagaggctgtcttcgtgatctccctgttccgtctccaccatcggacttgttccaaaacaatcaaagacgtggaaacaataaaatgaaagagatggaagtagcccttttaaaaagaagacagctgttcctgtcaatacggggacggaaaagagaaaaagagttggaaacaaataatttttaagcccaggactggctacttggttaacagatgtggcctgacctcgctctacccaaatcacttcatcatgggctctgagcggccaggcgcggtggagagggcagggagctttggaaccagtcgttcatgagctgtgtgaccttgaacaagccatttaatatcttggaacgtccgtttcctcctccaataagtggtgaacagtaattaatacctgctatgccaggaggttgtgaggctcatggatggcctgtttcaaagactcgtgtgtatcagcaacgcaatgcaaacaaggtcacggttctctcttgactgtcgtccccgtgcggccaacaggccatcctcacgggcaaaatgacaaggaacagcagaactctaaaggaaagattatcttacaaactcacggtgatatctttacatgtctctggaggaaaagtcacagtgaaaatattgccaatcagtcatgaagatggttaggattatgttttctctttacccagagagccaaggccaggagtttaactgggaccacataaaggaagaagcagcggctttgagtctggcttggtttggggtaaagactcctggctcagtcacaatgcagtggtgccattgaacgagatgcgtatctccctgggtttcaatttccttatctgtacaagggtggtgggctgggggaggtcaggaatcattaactgaatgcctatagagtcagacataagataa

SEQ ID NO: 23516 - DNA, 1343 bp, Artificial sequence
  DNA replication origin
cagacagagacatacattgcccgcaggtgtccactttgcaaacaggactttgttcctattggattttcttaaagcagggcacctgggagagagccagggactcgcagacacagctgcctaggtaccaaagaggcagtgcctgctgtctcgtgcctggacaggccggggagcttcctgacctctgcccgcagcctgcacgcccgtctgaatagccttggcggaagagggggaggaggaaggacggacagctcgtctgcgtggaaggcagcaagcgcagatgttttcagcagcagatggcagactccagcagagccctccacagccctcttggcccccgcaaggcaaggagaaaggagagggcgggggaggctggcccagctcctctgagctgggcctccagcagcacgctgtgcgtgtgcccgcatcgcattcacatctgctctccccctcccaagtattgatcccgggcccagagtctagaggcatctcggagggctcaggctggctgtgggcttcccagcgctcctgaacgattgctgcctgggggctgtgctgctgcatttctgaacagccacggagcgggatactcttgagttccacgtgggccactaagtaggggagggagcaactgttcacaggtctctgggcccttaagaaccccaaactgaggccccttcagacctgggagaggaaaaaagaggcccagaaacgtggcctgggcacagcagaggccctatccttactctcaacgaagggtgccatttccaggcaggtgaaacaatggcgggtcgggggtgagtgaaaggatggagaaaaaccgaggtggcagagagaagagggagaggtagaggggatggcaggcaacacccacctggctcctgtgctcacagcgcagcaccccttacccgtcagcctcttagcgagctctgctgcacctcagaatcctccttaacccagctcttcaggaagccaccgctggtgagttggggtctgcgctgaagagggagagctggtgatatgttggtcctagctctgactcagtggcctctgtaccccggatagtccctttctcctctcggggccttagttgtcccagctggaaaaaataaacaccaccatctcctgggtattaattaggtctctcttcctcttgggctgaactttgaaaaagccaggagaagccgcagtgtgtcctgttgtgtccggaattggtgggctcttggtctcactgacttcaagaatgaagctacggaccctcgcggtgagtgttacagttcctgaaggcggcctgtccggagtttgttccttctgatgttcagatatgttacagccttccggtgggt

SEQ ID NO: 23517 - DNA, 1080 bp, Artificial sequence
  DNA replication origin
ccagaaattctcacatggaagaaaaatgaaagggtgcagtgtgttggaggggtggaattctaccaatcaagttatgcacaaaaagcataaaaggaactgtgggtccttttgagtcacccaggaggacacagagcccccaaattaaacgaagggcacccatgcgagggctggccgaccctcgccacctatgtcttggtttcccccactgtaatactgggaaccccacttctcccaggcctgctgcgaagatgaagccagcaaatgcacgccctctcttagctctggaccgggcaggtgaaaagcagggaggtgttcataaaagcagtccccaccgctgaagggtcctcaactcggggttctagtcccagctctgccctggcctagcaaccccttcccgctgcagggaccaaggcggtgggcaggtccctcacccgtgctgagaccgggacaggaatgcgcacctctccccaccctcggacgccccggcggcgccgctgcagaagtcgggaggtcggacaaacgcgaggagtaaggaaaaagaggaggaagggaaggaaggaggaagaacgaagtgaggaaagaggatgtcagggaagaaagggagtaaaggaagaaggaagggagagggggacagaaaggaggaggacggaaggaggaagggaaggaagaaagacggaagggaagggagaggaaaaaggggaggaaagaagaaagggaagggggaggaaggaaagggggaggaaggaaggaggaggaaggtgaggaaggtaaggaaggaagggaggcagggagaggggaaggaaggaggaagataaggaaggaggggaggtaggaagaagggaaggaaggaggaaggaagggaaggggagaaagaaaggaagggaaggggtaggaagacagggaggaaggaaaaaaggaggaaggtaacgaaggaaggaaggagaaagtaaagtaagggggaggaaggaaggaagaagggaaggggaggaggggaagggcggccactgacctgcttgaaggtgctgctgaggaagtagacgagcgacagcccgaagaccagggcgagcacccacctcttcc

SEQ ID NO: 23518 - DNA, 1297 bp, Artificial sequence
  DNA replication origin
gaggaaggtaacgaaggaaggaaggagaaagtaaagtaagggggaggaaggaaggaagaagggaaggggaggaggggaagggcggccactgacctgcttgaaggtgctgctgaggaagtagacgagcgacagcccgaagaccagggcgagcacccacctcttccgcagaagccggcgccacaccatggccgccaggttcaccatcccggcgcggacgtggggcgcggcggccggggcgcggaacgcggcaggcccgggtcccgggcggcatggcccctacgcgcccggcagccccatccctccaggcaggcgccggccccgccgcccgcagcccagtctgctcccggcagccttgggcgcagccccacgtgaccccgccctacgccccgcctccgctccgcagcgacaagggctagtcgcgcaagatcttctcaccattggtccctaaggaacggcggcctcctattggttaagtgccgggaaagggggcggacaatcgcgtgagtgctgcgggcgtagctgtgcccgggtcctagcgccggacccggcgacgccaagaaaccacccaataggaggccggaagcatcggaagtcacatgctgcccaggctgcgcgggtgattggcttggctggacctgaatgatgcggctgtgattgctgaattgtctgggcaggtaaaaagagaacgcgatttttttttcttttctcccatcatggtctgtgtagtctcctgcccttgcagtcccagagcgttttgcgctgtgtgttggttgcagggatgaaaagcgctcgcgacgttgttcccgaagtgcacctgccggcttccagtccaagtgatgcaggcgatgctcctctgagtgcatttcggtgcagtcctgtaacgggccccaggggcgcaacttgaaccatcgcaagcatcgaaaagtctcggtgcggtccttcaaagggacatagtgggatgtacagagcagaggattaaaaagcgtttcattcattcagatgcatcccgcgtgcaaaaatttattccagaattatgtacggcctgcttccgacaaagaatccgaagcctcttccaatacaagcatccgaaagtagagtttcgagcattcgatttaggagttaaatgtgtggatgagaactttggaatatgaattttattttcccccaaggatttgcaatgtgggataatggagggaggggcgagaggaggattaagttgagattgcaaattcttgaaaaatatttatataatgaccttttcttgatatatgaagatgctgctgctgaccggtttgtt

SEQ ID NO: 23519 - DNA, 1127 bp, Artificial sequence
  DNA replication origin
agcctgggcgacagagtaagactctgcctcaaaaaaaaaaaaaaaaaaaaaaaaaaaaaaaagaaacaagtagtcagaaaaaggaggatagcttcaaggactaaagctagcaagctagcacagggccaggaatctgcatttcaaagccctccttccacatgtggaaaaataagcaggagggactgcttccagcctcctgggccagagggggccctcagcctcctgcgagacttttccttgcttgcttttcttccctggatggactgcctgttggctcccaaaagccccagggtatgggggccacaagtcctgctcccaagtgggcggccaggacaaggaactgaaaacaaagacatgttgtcctgggaaggtggcctgcgggcctgttaggatggtggggttgtggggaccacagctggcagagtcctgcagacccagcaccgacctggaggcttgaagggctgggctaatgagctgaggcccgtgctgggtctcctccagtgctgggggtgggatcggggctggaccactgacttcacagcagcgcccggccaggaggggtgggagaaacaagtgtgacggggcaggactggggatagaagcaaggctagagaagagcacaggaaggaaggagggaagtggatagaaacaggagggggaaatggggctgggggcagaagaaaggaagagagaaatggcagagttagaggccagaagagaaagaacacccaggaggcagagtccaggtgagaaggcaacaggggaagagtaacccccgtattaagcgcttaccaggggccaggaacggcacaccaattgctcctcttgtaggtagttatgacgcgttcccatttcttagatgagaaagctcaaacacagaggcaggggagggaagaacagagtgggagacccagcaagtgagaggattacaagaggaaagagagaaggactagggctggcttctagtttagtgatgagtttctcggttgaacacttagtacctgcaggctgtccccagactctgacaatcccaggagatggacactgaaattatttgcccctgttaactggtgaggagagagaggctcaaagaggcagggtatgttgttcgaagttgctagacagtg

SEQ ID NO: 23520 - DNA, 1057 bp, Artificial sequence
  DNA replication origin
agtcttgctctgttgctgtgagctaggcctggaaaggcagagatgattcacataggtaaatgggtcatgctgattcctaaaagcattgaatgaatgaacaaatgaatgaatgacttggttgcgatgttgcttcctccataaagtctttcctgactctgcttctccagactagtcacgtccctggctatatggtctcatagatgcctgtgtttttcctacttagcacttattccaattgttaactaggtagttcatttggtaattagatgggcaaggtctgtctgcctcctggtgaatcacaagcaacatgagagcagataccatgtctgtcttgtttagcagcagagccacagtactgtctcagtaaatattggatggatggatggatggagggatggatggacagaaggaaggatggatgggatggttggatggaatgtttagattaataggatggttgggtgggtggatggatggatggatggatgggatgggtgggtgggtggatggatggatggatggatggatggatggatggatgaatggaagtgaatgatggacaggtggagaagttggtgggtgagtgaacggtaggtggacagaggtataagggggtgagtgactgtatggatgggcaaatggatggacagatgagtgggtaaataggatggatggacagatggacggatggatggaatggtgtccaagtggaggagtggatgggtgagtgtaaaggtgggtagatagaggtataagtgggtgagtgacagtgtgggtgagcaaatgaatggacagatgggtgggtatatagatgggtgggtgggtgaatggataggtggaaggaaggaaggaagggagggagggagggaggggcggaggggcccactaggctaaagccacaccttgtctcccctttaagctcaatatgtcactcccactccacccactaccccctgagctagggctcaggaagcagattgttaattgaagctggttgggcagacactgagcatgtcctgaggttagaacactctgctcaggagcacacttgcccagt

SEQ ID NO: 23521 - DNA, 1011 bp, Artificial sequence
  DNA replication origin
gtctgcctcggtctcgggagcaggagaaggggcagcggactagacagacaacccctgccttcggggcgcctgcactcgcgttggggagacaatgcgactccaaaatactgagttatcagtaggaagcaccaagatgaaacagcaggggaggggacaggtgtggtggctcaggactgtaatcccagcactttgggaggccgagatgggcggatcacctgaggcaggagtttgagaccaccctggccaacatggtgaaaaccagtctctactaaaaaatacaaaaattagccgggcgtggtggtgggcgcctgtagtcccagctactcgggaggctgaggcaagagaatcgtttgaacccggaggcagaggttgcagtgagctgagtttgtgccactgcactccagcctaggtgacagagcaagaatctgtctaaaaacaaaaaaacaaaaaacaaacaaacaaaaagcaggagggagaaggaacagggagggcttgggcgggttgggacgttaaggacaactttacggagatactgacatttgggtaaaacttgcaggacagtgaggagtgagccctgatgagatcttggggaaaagcacttctagcagcaacagcaatgtgcaaaggccctgaggctggactgtgtttgatgtgcgggaggaacaggaaggagaggatagctgggctggggttgttggggtggatgggagagggagatgaggtcacagaagtgatggagggtgaggggtgcatatggtgtaggtacttgtgggccattgtgaggtctttggctcttattctgagagaagtaaggggcccatggtagggcttggagcagaggagtgacctgatatgatttgcagtttaaagcgatccctccgccttctaggttgagaatagaacacaagggtcaagaggaaaggcaggtaactagtgctacgataaacagatacatgcacgcatacgttcactgcagcactattcacaatagcaaagacatggaatcaaccc

SEQ ID NO: 23522 - DNA, 886 bp, Artificial sequence
  DNA replication origin
ctggcactgtgctaggcgctttgaggaagcacacagcgtaagcatcgtcttactactctggatcctggagtagcgaggagcgctgcagagaatgagggagagagaatcaggctgagcccaccatagatgggtctagggccggaaggtgaagctcgaaggtgacatagccagccgcccttaggtccccgcccccgagccccgccgcgcgccgcagacaccctgggaagttggagcggcgcctgaaggcgaggcccgagcgtctgcgcccgcggggaaaggcggcagccggagcgtggggggtggcagcgcccagggagctgcgggggtgcgcggggtgtgagccgggaccgcaggcgacagatgtcgcgtgggcccgcgcagcccgggcgctggcgaagagaaatgcgcgcttcggggcgctctctgcccggctcccgggcgccgggggtcccatccacttctccctaccttctctctctcctgttggagaggccaggggctcccgcgactgaaaggggccaggctgaggctgcccaatcccagggacaggaagaacattttggatggatcgcggggtgcagaaaaaggaagttgagcgacagacgcgaagcccaaagcgtggaatttgggaagaggcagaaaaaaagtgggcgaagaggaagagaaaaaacaagcgacgagatggggagggacaagaagtttggggaggatagagaaaaagagaaactgcctggaaaacaagttgcaagacaattgaaaagtgaatgagaaggaaagagaggaaggtagtaaaatcaaatagaactgtggagagagggctgggacacggctttctctggttctgtcgtccaggagattggaaacgctctccccttccggcaccagg

SEQ ID NO: 23523 - DNA, 1597 bp, Artificial sequence
  DNA replication origin
tttaattaataatagcgccgtcagcacaacaaacgcacaacacaaggagaaacttggtgtccaggggaggcccccggcggctggagcgcggcggcagcgggcgcagaggccggagggagaggaggcgaggggcggcccgagcgcggggcgggagcgaggccagcggtcatgtgcccgtgccccctgcaccgcggccgcggccccccggccgtgtgcgcctgcagcgcgggtcgcctggggctgcgctcgtccgccgcgcagctcaccgccgcccggctcaaggcgctaggcgacgagctgcaccagcgcaccatgtggcggcgccgcgcgcggagccggagggcgccggcgcccggcgcgctccccacctactggccttggctgtgcgcggccgcgcaggtggcggcgctggcggcctggctgctcggcaggcggaacttgtaggaacgcggggcttcttggtggggccggagccgagacccagccggagcgagcaacaggtacgcgagcgagcgagcgagagccggggcgcggcagctgggcactggagacgctgggctggcccgggagcgggagagtggcaagtttggctttcttcttttcccttctccttcttcctccgttctcttctcttgcaagcatctccacctctcctcttctacccagtccccagtcttcccttccaagtgtaaggtccaccgtttctgcccccatctctgcgagtccttaagcgcatcttgctactcacttatagctcagtggcttgcggaggacttcagcctccataatccccaccagccccacaaataaacacacaatgcaagtaaaaagtgtgcttgctatgggaatgtagttgtaagccacgccaaatacttaaaatctatcgcacttccaagaaaggtccccggtcccgttccaatcctcttgccgttcctgagtcgcccccgtctccatcacctttgctcccaacctcttgtccctaagtgtcacttctccaatctctgatccccattatctggcaccccaagcgcatctcgagacttcctccccctccaggtttctggctggcccaatctttcttcccaagctccgcgcatttgcaattttcctctgccctgccaacttcgctccttctcgagtgaggtgtcctgtttaaggagtttggcttccttctccccagacggttgtagctgctacgggaaggagacgccctcggagtgggctggaatagggggctttcagggaaactccaatgggaagccttaaggaaggaacatttattgagctccttcggggtgctgggcactgtttagggaggtcatgtgttgagaacttaggacaggaagtgggtactgagcacctagtgtggttggtatcagtgggaggaaggtactaggctcttggggtggggggatcattgtgccctagctgtgcgcctggcactgtgctaggcgctttgaggaagcacacagcgtaagcatcgtcttactactctggatcctggagtagcgaggagcgctgcagagaatgagggagagagaatcaggctgagcccaccatagatgggtctagggccggaaggtgaagctcgaaggtg

SEQ ID NO: 23524 - DNA, 1684 bp, Artificial sequence
  DNA replication origin
cgcagccccaggcgacccgcgctgcaggcgcacacggccggggggccgcggccgcggtgcagggggcacgggcacatgaccgctggcctcgctcccgccccgcgctcgggccgcccctcgcctcctctccctccggcctctgcgcccgctgccgccgcgctccagccgccgggggcctcccctggacaccaagtttctccttgtgttgtgcgtttgttgtgctgacggcgctattattaattaaagtgtcacatggtggaggggggcggggaggggggttacatcatccggcccccgggggttggggggggggctgcaggcagaagaaaccgagaggtaacttttaaccctagcggcgccggcagctagggagcgcgaggtttgggagacggggagcgcggcgcggggcggcgcgagaaggctccccgcagcggaggtcctgggctttgggggtctcgggggacccccgcggaggcgcggagcgcgagggaaggttgttctccttccccttttcctgaattcagctcgagttccgatttggcgagggaaaaaggcttgtttgccgttttggatgaagctgatgctgaattcggctgcattattcaaaaatattccgaggctgttgttttgtttgggggaggtgggtggattcaaaatcttatggaagggtcagattacacccaacttgcctcgtttcaggtctgacttggcacctgtaggctttcagcctgaccctaacgtgcccccagcgcctggctagaaacctgaccctaaagtgcccccagcgcccggtgggaggctggatgggcccacctgagctcgcgtggggcgcggacggaggcattctcgctgcccggcacccgcacccaaaagaccctcgcaaggggctttctaaagggaaacttcttgtctgctttctttgtgaacattattttcctgatggcgttacagttttctgcgatgaccccgatttaatgcgcagtggagaccctaaggggtcggcgagaggaggggcgcgggggactttaattcccccttttccaatccgacagccactcctgtgcacctccagactggagcgtctgcagttgtcacaaacggtgaaggttcagatgggctgggcggctgtcaggattctgtgggggagaatgaaacctgtgatcttaaatcgactgggattcagacaactttgggattcagaccatcgggatgagtccagagatggctccaagttgggagtctggaacctgctgagggagcttccgttcttgccttcccaccgcagagtataaccaagattcttcgagtctgtgaacttagttttggtctgaattgatcaggaggagaaatgtcccttttggcccacagcgtggtgaaatgacaacaaagtcagggctcaaagcccacaacactgtgtgattctggtggccttttccctcacccagctccaattattctaggcttcataatggccaagacctactgcgcatcttctatgtctggcacctgtgggctttgggcgcccttgcctctgctgcctaaaggtaaatctcccaacaattctacatgcaattactataatatttcaaagatgaggaagctgaggcacaggtaggtaagggttcttgccctagctcacagagtagctaagaatgaaaccgtcatctgaactagggcagtatgc

SEQ ID NO: 23525 - DNA, 1105 bp, Artificial sequence
  DNA replication origin
ggaggactggcacaggcgtggtgctccctgaaggagggggcagggacctcagtcattggggaatgtcgggtgtccagaagttggacgttgaaacaagtgaccacatctcagggggactccaggcgcgacgggcctgtggggaccctgaggagggagctaggcaggaaggggcggtgaggtctgggctggtgtgggtggctgagaccaccctgcaggcctgggagaccaggtgggattggggattaccaggagaactggggaggccccaggagggtgctgagcaggggaacaacaggctctgatttgcattttgcaaagctcattccggctgcacttggagtgcgtgagaaggtgggggctgggccaggcagctgcagaggccaggagagaaaaggaaggttcccagggcactgactagaggtgtgagcctgggggtgggttgggtgtgggggggcatccaggagactccgggtctggagctgagggcagctgtcattgtccctgcctgacagagctgtcgttgaaagatggtcagggatctcctgggctgagctagaagtggagggcggtggccaggtatggggtggtgagagcctcccctataggtccctggacctcggcctctggctgcttcttagagaaacctggtgtggagaaaggaaggtgccagtgactaaggctggcccagaagtcactgagggaggggatgattttaaaaagggtttcctctggcctgcacccagaacaacttcgtgggctacagctgggagcctgtaactattggaaaagggcttcacatcacatcctgtaaatgctgagaagaagctggaggaggatttcagaggagatgctggaaacaggattttcctttcaagaaataccagcctcagcctttgttcctaagactctttgggaacaggtcttggggaaggggtattttgagcagaggccatccccacctccagggcgccccattccttacagaagaattggaaagttaagggggcatctttgcaaaaagagtgaaaatggcctgccctcatgctgggttgcagatttagatgtagcccctgttttctgtccactgatcttcatcctggtgctc

SEQ ID NO: 23526 - DNA, 1511 bp, Artificial sequence
  DNA replication origin
gaggtgtgcactttggccagtgtcccagagctgaggcacaggccagagctcgagcctcagtgtccagtattgtttaaggtgaaagacctgggtgaccgggatggagcctggaggtgtctgggactctaggggggatgaaggggtgggtataccctccccatgctgctggggcctgtggcagacacagtgaggcccgccagcctgtttgccccacggtccccatgtctgcaaagatggctgggaaacggaggatggccagaaagaggaaggatgggaacaggcgtggtgtggtgatgagaccgtgggggcttccctgatgggtcttgagctgtgcagggatgaaccactcaccctggttctgccagggatgtgggaccctggacaaggtgctgagcctcccagggtcccactggaaactggggtgctgctcacggggagaggggtccttcagctgcccctggagttgcaggggccttcctctgtggcccatggggcaaggcctggcgagagagtgaccaagagttaaaccagaaaagcagggagagaaggttccaggcgatgggaactgtgtgtgcaaaggccctgtggcacagggagcttggggagctgagaggcagacccagctggaccagagagaggccagtgtggtgtggggagggcaggctgcatcggacagcatctgtggaccagcagcagcaggggtcttcaggagccaagatgggggacgctgacggactttaaggtgagggtgtgagggggtgggtgagccaggtttgcactttgcagagggtgctgtgactgctggttggttgtaggggtgggaatgggaggtggaggccagggaggagtgaatcatggtcccgggcttgggtcaggggtgccccgaggatctggggagcagggggcagctctgagccacctgggaggttatagatgaggaagggttggatccgggagttggggtgagagacctggtaccgcaggaatcttcacagccagttgtcatgtgtgccaaagaggaggggcctgtggagcttaagtgactgtgaagtgtgtgaagttgcacagtcagtggcaaagacagagtggaatccggtgccctcacctccttttaaatcctggttctcagagaaaggactcaggtgggcagtgcgtcttaggccagtccccagatgagccagagcaggcatcagggtgggaggcgtgcggcccctgacagggcacctagagttggaggcactgacaggaagatggtacaggggaccagagcccagggggtgcctgtgggtgcgtgcgtgtgtgtatgtgtatgtgtgtgtgcgcgtgcgcgcgcacgcgagagagggagcatgtgtgcacgtttagggggtgtgtgtaggcacgaggcttgtttccagaaggcttgggtgcaactttggccagttgtaaagttggaagagggaacttctagggtggatgagatgagaggtggatttcacaagggcatatgttcgtccaaacacaagatctgt

SEQ ID NO: 23527 - DNA, 983 bp, Artificial sequence
  DNA replication origin
ctcagtgccgcagccgctcagcttcggactggcccgggaactccctggccgggggactgcggaccggggagggagcggggcccaggcttcccaagcgcagggcaggtgcctcaggccgggcgggcaagtccctcaggcacccccgctggcgcgcgcgccccacacctgagagtcgtttgcattcgtgagcgcgagagcggaaagttttgaagtcggcggacctgggtgggaacaggtctccgacgctccccggccgggtgaccttagtcgggagagccggcgcccggcgcctgctttcgtcctcgcatctgtaaaatgggttcaggcagcctcatccccgcgggtggctgggagacttagcgaggcagcggccgcagagcactttgcccggagcccagcgtcctcccctgagttcgctgagtctcccgggaccagcaaaggctgcgcgccccgcatcggcccggaggcggggagccctgggaggcctggccgagctgcccgcagggaaatggcggagaaagcgcttctctgcccgagttcagccgggctggggacttggccctgggtcctgaactcggcatggccagttctgcctctggctgtggaccagggtgtggactggagaccgcgggggccaggtgtgtgggcaaaccggctttggcgagcgacagaccggctgtgaaccctgccagctgcacttcctggctgtgtgaccttgggctagtcactttacctctctgattctcagctttccttctctgttgtaagagttctcctagtacctggtagacgctcaggaaatgggagctgcagatattttgggaaagagctagctcctggcacctgcttcaagtgcagagaaccagcgtccagtattgatcaccaagagagggtggcccagctgtttgtgtgtcagctgaaaagcaacccctcttgacccccaatctaaatacccctttccaggagaactggatgaaaattgc

SEQ ID NO: 23528 - DNA, 1487 bp, Artificial sequence
  DNA replication origin
cccgccccgccccggcccggaaaccgccgggaaggggaccccggagcccaccgctctggagtccccgttcgtgcagcagtgctcacgtacctcgtcccttccgcacacctgctggatctggaaggaagcaggtgtgagcaaatttgggggcgtgggtaggaggggtgggacccctgggaggtgctatgcccactcccaacccatcccaccttacatcctccagatcttaggagggaaactccactgagatagtcaaggaagtcagcgagcatgaaatagctctatggagaacaacagtaataataatcctatttgaaaatgcaccatgcgctttggttttttccaggaaagccccagcaccttctgaggtgaacacacccacgtggcggcccgtgtgggccctgcacagcccggtggctgagaggcacctcaaactgcaggagcgggctgggcgcatggctcacgcctgtaatcccagcactttgggaggccaaggcgggcggatcacttgagctcatgagttcgagaccagcctggccaacatggtgaaaccccgtctctactaaaaacacaaaaattagccaggcgcggtggcacatgcctgtaatcccagctactccggaggctgaggcaggagaatcacttgcacctgggaggcagaggttgcagtgagctgagatcttgccactgcactccagcctgggcgacagagcaagactctgtctcaaaaaacaaacaaacaaaaaaacaactgcagaagtgggcccaggaggctgcatttgggacaaactgctggagagaaggcaatgccggtggtccccatgcccattagggaagttctgggttaagatggcttgaggggttggctctccatccagttggggtgactggggccgatgctgttgcctgtgtaatgtgattcctcctccttaaaataaggataagttaatgagatgtccaccagagggcctggcgtggacacagcacatggccacagaggctggtgggcgctatggaatcttgtcccctggagaggcacacagccagggcagaacatcaaggtcaaggctctcctgaaggctctgcagtgcttagtgacaccaccatcaatgaccgtcaggtatcaggtctgttctgaacgttagtctcgatgataaatgttggggaggaagggggacagggtagggggcaggagtttttcggtgcccacagaggggactcgggtggacctacctccatcagtttcacaggctgctgggaagggggctgctgagaactgctgttcattcctgcagactacaggctcaagccaagggtcacagccctttccaggggcaggaggtgactttcagagcccgaggtagagggtgggagttggtcctaaaacctcctagagcatcagaatcagccccttcctggttgcaaatccagcttttggccaggtgcagtggctcatgtctgtaatctcaccactttgggaggctgag

SEQ ID NO: 23529 - DNA, 1372 bp, Artificial sequence
  DNA replication origin
ggtgccggcgctggcggaggaggccgcgccggaggtagcgggcctcagctgcctcgtcaacctgccgggtgaggtgctggagtacatcctgtgctgcggctcgctgacggccgccgacatcggccgtgtctccagcacctgccggcggctgcgcgagctgtgccagagcagcgggaaggtgtggaaggagcagttccgggtgaggtgagccagcggccccgcgccccggctgcgcgcccaccgccccgcgccccccggggccgggcagccgccccgctagctccccgcggccgccccgcgcgcggaccccaccccggaccccttcccgcggacagacagacaaaggcctccaggccccggaccctgcggggccacgccaggcggacccccgggtccccaaatggcgcatctaggagcgcctcgcagccgggtcctccgtcaagggtgacgctggcggcggcgcggctcgtcccttttgcgcgcttcttttgtgcccgacttcgggctgaaatgtttacatggacccagtgatgcatcgatcgggcgggcgcagcatccccgggctggttgtggacggcacagatttcagcgtggccccaggatgaaatctggccctgcacactccctctgtgaccttggggggagcgacttccctttttttgagcctcgttcatagactttgagtggtggtgatcattagacctacctttcaccgtgtttattaaattagatgatgtccgggaggcacgcacgcagggccccggctcctaggaggcgctcaatcagtgctcactgtcattgtcattattattattgttgttgttgttacaactgtccccattttagagatggggaatggagacatcattcatgccgctacgccaaggtcacaccgggagtgagtgagtgaatgctggtggggttttgaactaggtctctcgccggggtccctcttaccactggacgccactgctgtccctgtttccaaggctgccttggattcgtggccgcctgcctttgagtttctgttaagctgagggggtgtttctctcctcgtaggtggccttcccttatgaaacactacagccccaccgactacgtcaattggttggaagagtataaagttcggcaaaaagctgggttagaagcgcggaagattgtagcctcgttctcaaagaggttcttttcagagcacgtaaggatctgttgatgtggctctaagctttggcttgctggtgtatgtgtctgggtctgcaggcatgagctcatccagctcttttcgtatctcccttttcaatgctctcacaatcccttactcacttagatggctgcaagagtcattgtgtccttttcctcctatccaacaacacga

SEQ ID NO: 23530 - DNA, 957 bp, Artificial sequence
  DNA replication origin
caggagtgaggaaagggaggagggaaggaaggaggaagggaaagaagagagaacgaacgagggaggggaggagggacagaaggaaggatggaaggagggagggaaggaaggagggaaggaagaggagggacagagggagggaaggaaggagggaaggaagaaaggaaagaggaagggaaaggagggagggaaggaaggagggaggaagggaaggaaggaaagagggagggaaggaaggagagagggaagaaaggagagaaggaaggaaaaagaaggaaggagggagggaaggaaggaaaaagagagggaaggaaggaaaaggggaagggaggagagagggagggaaggaagaagagagaaagggagggagggagggaaggaaggagggaaggaaggagagaaggaggaaaggaaggagagagggagggaaggaaggagagagggagggaaggaaggagagaaggagggaaggaaggagagagggagggaaggaaggagagagggagggaaggaaggagggagggagggaaggaaggaaggattctgttcccccatggctttctctacagcagggaagaggactggctcggtttttgcttcgaggactcacgctagttagaattctccattagaactgacctcagcatgaccaatggcagtattgattccaggactgtctgagtcagaagcactcctcccagaccacacttgatgtatctcagagcttggaatccctctgctggggcatatttcaattaaggaactaagcccagtaacttagccttcaacctgaatttccaccttttattctgatcttgcccacttgaacgtaagcagctccccatccacccttcctggggattactctcgctttgtaccctctccccatctgtgtccctgccgtcttgccaggtgggtacccagccctttattctgaggaagagccatgggataagc

SEQ ID NO: 23531 - DNA, 1236 bp, Artificial sequence
  DNA replication origin
gattgcattgttggccacagtgcacttggcttctagccatcacattttttaagacactggaatattttctcagagtctgaaagggaaactgaggccttgggtgtcatctactaaagaaggtgcccctggcctgttgtagcgaatgcaggtcaccctgagggatgcctgacattgagatgcccaagacctagcttcattcaagcaacaggagggactcccccatttatggaagggccccttcatttgctctgtggtcctcatgccctttcttcttcactgcaaccttggtgggcgggcaggcttatcccatggctcttcctcagaataaaaggctgggtacccacctgacaacacggcaggggcacagatggagagagggtgaaggatgggatgaaaaagcccatccttcatccaaggctggttcccacccatggtctcaccatttaagcaccacattccattcttctctgaatccccatcatttagttccaagcttgaccccagggtaggccttagaggagggagggagggaggcaaggaagaatgcatgaaagaaggagggagggagggagtaaggagggaagcaaggaaggagggaaggagggaaggaggaagggagggaaggagggaaggaaggaagaaaggaaggagagagggaaggaaggagggaaggaagtggggagggaagggaggaaagagggaaggagagatgaaaggaaagaaggagggaaggaaggaaggaagaaaggaagcagggacggaaggagggagggaagcagggagggaggaaaggaatgagagagggtaggaaggaagaaaggaaggagggagggaaagaagaaaagagggagggaggggaggagggacagggaaggaaggaaagaaggagagagggaaggaaggaggaggggaaggagggagggaagaaggagagaggaaaggaaggagggaagggagaaaggaagggaagaaggatggagggaaagcaggagtgaggaaagggaggagggaaggaaggaggaagggaaagaagagagaacgaacgagggaggggaggagggacagaaggaaggatggaaggagggagggaaggaaggagggaaggaagaggagggacagagggagggaaggaaggagggaaggaagaaaggaaagaggaagggaaaggagggagggaaggaaggagggaggaagggaaggaaggaaagagggagggaaggaaggagagagggaaga

SEQ ID NO: 23532 - DNA, 929 bp, Artificial sequence
  DNA replication origin
caagttgggcaatggtgaaggaaaattctgggaaggagcctggaacccttgaaccctgtgggctggcccaggctgctagctagacagagaagtgtcaggagaggtgggtagtcgggaccagctagtgaacagtcagccagccaggctacagcctggttggtttccctgagtcttagacctacttgcaattatacagttatttgttgtttactttattgctgtgccctctactagaatgtcagccccgggaggctggaactgtgtctgacttgtttgttgttctctcccaggactagtacagtgcctggcacataataggtgttcaataaatacttgtggaataagtgaatgaataaaataatggatgtgtgagagggtggacagacagggaggtggatagagggatgaatgagtgaatggaggggtggaaggtggatggagggagggatggagggagggatgaatggatgggtggatggatgggtggatgggtgtatggaggggtgagtggatagagggatggatgggtggatggatggatgagtggacagaggaatgaatgagtggaagggggatagatgggtggatggaggggtggaggggtggatagagggtagatggatgggtggatgagtggatggaggcatggatgggtggatggagggatggataggtgaatggagaggtggaggggtgggtggatggatgagtggatagagggatggatgggaggatgggtggatgggtggatcgaggccctgaggggccctcggagccttgagactgcctccactccctctgccaacttggcccaagtccctccaacttccccagcagcctgccactccccttgtccatttccagacaaagaaaatctattcagagagaaaagctgcccctgaggtcatgccagagagttctggaggcca

SEQ ID NO: 23533 - DNA, 1723 bp, Artificial sequence
  DNA replication origin
tgtgagggtgtgtgcatgtgtgaaggtgtgtgtgtgagggttgtgtatgtgcaaacgtgttaaagggtgtgtgagaagctatgttgagagtgtgcatgtgaggggtgtgtgtatatgggctatatgtaagagggtgtgtgtgtgtgtgagggttatgtgcctgcaaggatgtgtttaaggttgtgtgtgagaatgtgcacgtgagggggtgtgtgaaggtgtttgtgtgagaatttgggggtgtctgtgtgaggatgtgtttaatagtgtctatgggtgtggaagggtgtgtatgtctgcatgtgtgtgagagggtgtggctgtgtgagatgtgtcagaatgcatgtgagaggtgtgtgcatgtgtaactgtgtgtgagagagtgtaaatctgtgagtgtgatacacatctatgtatgttcatcacttaggattcttagactgacctaggagagtctagaagctcaccccatctacccaccctacatgtagcaccctacatttgtgtatatgtagagtgtgtgtgtgtgtgtgtgtgtgtgtgtgagggttctgtgcatgcaaagatgtgtttaagggtgtatgtgagaagctatgttgagagtgtgcatgtgagggtgtatgtgtgtatggagtgtgtcggtgtgtgtgagggtgtgtgtgtgtgtgcgtgggagggttctgtgcatgcaaagatgtgcttaagggtgtatgtgagaagctatgttgagaatgtgcatgtgagggtgtatgtgtgtgtatggagtgtgtcagtgtgtgtgagagggtttgtgtgtatggagtgtgtcggttgtgtgagggtgtgtgtgtgagggttatgtgcatgcaaagatgtgtttaggggtgtgtgtaagaagctatgttgagagtgtgcatgtgagggtgtgtgtgtgtgtatggagtgtgtctgagggtgtgtgtgagaagatatgttgagggggtatgtgtgagtgttatgtacgtgaaaacgtgtttaagggtgtgtgtgagaagttatgttgagattgtgcatgtgaaggtgtatatggagtatgtgtgaggatgtgtgtgtacataaagtgtatgtgaagggaggtgtgtgtgtgaaggtgtgtgtgtgagggctgtgtgcatgcaaagatgtgtttaaaggtgtgtgtgagaggctatattgagggtgtgcatgtgaaggtgtgtgcgtggatggagtgtgtgtaagggtgtgtgtgtaaagtgtgtgtgtgagggtgtgtgtgagagaaggtgtgtgtgtgtgtgagggttccgtgcatgcaaagatgtgtttaagggtgtgtgtgagacactatgttgagagtgtgcatgtgagggggtgtgtgtgtatggagtgtgtgtaagggggtgtaaagtgtgtgtgtgagggttctgtgcatgcaaagatgtgtttaagggtgagtgtgagaagtgatgttgagagtgtgcatgtgagggggtgtgtatgtgtgaagcatgtgtgaaggtgtgtgtgtgaggagttggtatctgtgtgagggtgtgtgtatttaatggtgtgtctatgggtgtggaagagtgtgtataatgagtctgcaagtgtgtgagagagggtgtggctgtgtgagatgtgtgagaatccgtgtgagaggtgtgtgcatgtgtaactgtgtgagagagtataaatctgtgagtgtgatacatatccatgtattttcattacttatggattc

SEQ ID NO: 23534 - DNA, 1214 bp, Artificial sequence
  DNA replication origin
gagggaagccttgaaactggctgagaagggcaccctcacatcctctccctgcacctcactcccagagccccgagccctagcctaggtcgatcatctctttctccacacctcacaccctcgttctgtctcattcagcaaatatttattgatcgtcgggctctgaggatacacatatgaataagacagaaggggcccctttgcttggggacctcaaagttcatgattggggtcatcagataccaaggatggggaagaaagagagacatcacccaggggtcaggagagtgacaagcatgtgtgtgtccattgaaatttggttccatgtggtcattggaagcccagaaggagcagtttctgggcatccgtggggcagaggcctggtggcagagtgagcagacactctgttctccaccatagcttggccgaacccctcaaagtggctaatttgaaggacatgatgtgtgtgaggctgtgtggggggtggctgtgtggacctgaggagtaggagtgtgtgtgcatatgtgtgagaggtgtgtgtgtgaggttgtgtgcatatgtgtgagggtatgtgtgagagcgaatacatgtgaggattgtgggtcatctgtgtatgagagtttgtgtgcatgtgacggattgttggggaatgtgtgtgaggttgtgtgtgaaggtgtgtgtatgtgagggctgtgtgcatgcaaagatctgtttaagggtatgtgtgagaggctgtgttgagcatgtacatgtgaggatgtgtgtgtatatagtgtgtgagggtgtgtgcatgtgtgaaggtgtgtgtgtgagggttgtgtatgtgcaaacgtgttaaagggtgtgtgagaagctatgttgagagtgtgcatgtgaggggtgtgtgtatatgggctatatgtaagagggtgtgtgtgtgtgtgagggttatgtgcctgcaaggatgtgtttaaggttgtgtgtgagaatgtgcacgtgagggggtgtgtgaaggtgtttgtgtgagaatttgggggtgtctgtgtgaggatgtgtttaatagtgtctatgggtgtggaagggtgtgtatgtctgcatgtgtgtgagagggtgtggctgtgtgagatgtgtcagaatgcatgtgagaggtgtgtgcatgtgtaactgtgtgtgagagagtgtaaatctgtgagtgtgatacacatctatgtatgttcatcacttaggattcttagact

SEQ ID NO: 23535 - DNA, 782 bp, Artificial sequence
  DNA replication origin
gtgggagggttggagagtgggaacatggatggatggattgattaatggtgattaaacagatgggtgggtaggtaggtggatagctgggtgttgaacagatagatggatgagagggtaggtgaatggatgggtggatggctagattaatggtgggaagatggatgggtgggaagtggataggtggactgacaggatgaatgggtaaatggacaggtggatgttaaacagatgaatggatgagagggtgggtgcatgggtagataaatgagtggatgggtaggttaattgtgggtagatggatgggtggctggataggtggttagtgggtaggtgaatgggtagatggataggtggatgttaaacagatgggtggatgtgaaggtgggtagatggatagatgggtggatggatgttgaatgaatggatgagagggtgggtgggtggatggggtggatgggatggatgagtggatggatggtaggtgggcttatattgaatagatggatggttcagagggtgattggatgggcagggggacaggtaaggggtctgggggatataagatggttgaattgataggaggatggatggatgcgtgatcattcacttctgagggttcagcttaggtcaaacaggtccagacaaggaggtacatggtccagctaaagatgaagcagataatgttataatcatttcaaaaacaagaaaacagagctagaaggttgaaaggcttgtctagagtcacacagtggtagaagaagaacgtgaattcttggccccct

SEQ ID NO: 23536 - DNA, 1066 bp, Artificial sequence
  DNA replication origin
acaggcataggggaggataaaggagacagatgtcaggaaacagggcgtcagagagaaagaaacaatgctggaagtatgtggggatcaagaggtattcagaaccaacctgatgggacagctatgtgggggacctgcaggagccccacctcacccctgcccctagggcagtaagtgttaaatagttacctcctcggtggatgatcagaagatgacagggtggggcttctttggtgcatttgttgtggcactttaacctgagaaagataaagagagagaaagatggataggtgaatggctgagtgagcgggtaggtgggtgggtggatgaatggatggatgggtggatgggtggatgaatggatgggtgaatggatgggtagatggatgggggatagatgggtgagtagatgaatgggtgaatggattcacggatggatgggtaggtggatgcataaattggtagatggattgatgcatgggtgggtgggtgggtggatggctgggtggatagattgataggtggctggacagatggatggatgggtggatgaatagatggataaatgggtaggtggatggacgggtgggtggatgagtgggtggatggatagacagatgactagatgaatggatgggagatgaatgaacagacagattgatggttgatgtgtggatagatgaggaagtgaatagataaataaatggatagatggatggatggaaggatggatggatggatggatggatggatggatggatggatggtggatgggtaggtagatggataggtggatagatgggatgcccccagtggtctggaaagctctgggtgctgtggataccaagatgtgagatgagatggggcagctactgcaaaggcatatcctcagcaaaccaggaaattatctccgcagagaggcttctagtatcccactctctcaggtaagtcttgggtggtccaagaatggatggcagctgttttattagcactgcccacacggacttcacgttttaaaaaatatcaaatatcatgcttttcccatcagcctgtatttatgatcatcatc

SEQ ID NO: 23537 - DNA, 1045 bp, Artificial sequence
  DNA replication origin
agggagagagggagagagaggagaaaggaagggagggaggaaagaagggatgaagggagggaaggaggaaggtaagggaaggagagagtaaggaaagaaggaagaagggaagggaggaagaaggggaggaagaaaggaagggaggcaggcagggagggaggaagggaaggaggagggaaggaagaagggaaagaagtagggaagaaagggagggaggaaggaaggaaggaggaaagaaggaaggaagaagggaagggaggaagaaggggaggaagaaaggaagggaggcagggaggcaggaaggaaggaggggagggaggaaggaaggaggggatggaggaaggaaggagaggagggagggaggaaggaggggagggagggaggaaggaggggagggagggaggaaggaggggagggagggaggaaggagaggagggagggaggaaggaggggagggagggaggaaggaggggagggagggaggaaggaaggaaaggaggaaggaagaaagtagggaaggaaggaagaagaaagggaagggaaggaggaggggagagggaggaagggagggaggaaagataagcaatttgaaagtcattaggagtcaatcactaaggaaactgtctatatctgcttgaatatcagggccttaatgctgtatttaaactttttaactgttgaactttcacctatccattcctgcatgccaggtaagccctgtcctaagcactctgcaagcatctaatcacagcatttcctatcagccatggtcaccaccctgggatgtaacacttaagaagagcccttcttccttttatgggtgaatcttcctctctctggtcccattgtttctttctttggtttctttttctcgtttctggaatctaactgaggcataaaataagccgtttgttcatctcccacttataagtgagaacacgctgtgtttggttttctcttcctgcgttagtttgctgaggataatcgtttccagatttatccatgtccctgcaaaggtcatgatctcattcctttttatggctgc

SEQ ID NO: 23538 - DNA, 885 bp, Artificial sequence
  DNA replication origin
cgtctaggaagtgaggagcgtctctgcccggccacccatcgtctgggatgtggggagcgcctctgcccagccgccccgtctgggaggtgaggagcgtctctgcccggccacgaccccgtctgggaactgaggagtgtctctgcccggccgccaccccgtctgggaggtgaggagtgtctctgcccagccgccccgtctgggaagtgaggagcccctcctcccagcagccgccccgtctgggaagtgaggagcgtctccgcccagcagccgccccgtctgagaagtgaggagcccccccgcccagcagccgccctgtctgggaagtgaggagcgtctccgcccagcagccgccccgtccgggagggaggtggggggcagcccccgcccagccaccgccccgtccgggaggtggggggcgcctctgcccggccgccccatctgggaagtgaggaggccctctgtccggccgccaccccgtctgggaggggtacccaacagctcattgagaacaggccatgataacgatggcggttttgtcgaatagaaaagggggaaatgtggggaaaagaaagagagatcagactgttactgtgtctgtgtggaaagaggtagacatgggagactccattttgttctgtactaagaaaaattcttctgccttgggatcctgttgatctgtgaccttacccccaaccccgtgctctctgaaacatgtgctgtgtccactcagggttaaatggattaagggcggtgcaagatgtgctttgttaaacagatgcttgaaggcagcatgctccttaagagtcatcaccaatccctaatctcaagtacccagggacacaaacactgcggaaggccgcagggtcctgtgcctaggaaaactag

SEQ ID NO: 23539 - DNA, 1005 bp, Artificial sequence
  DNA replication origin
ctcctccccgcgctgctgctgctgctgctgctgccgccgccgggctccgggggtgacggttgctgcaatcgctcctgcctcgctccacaccgacatcttgcctgtcaatcaaagggcgggggggagcgagggagcgccggagagggatggagaccaagcgagggacctgcaggggagcgggttggtggagaggcgccgtgcgcgcagccgccccagccgggccccggccccggcgcgccagggacccgtcggaggaggcggaggaggagcgcgcagactcgcgcacctggccggggggcgggatttctaggggctgcggagctcgcgtggcaaagtgaaattactaccgggagtgcgtgcgagcgagcaagcgagcgatcggcgggcgggggcgcggagacagcgcgcgcatcgggcccagcctgctcccgggggcggcgggggaggccgggagtgtgcccgagcctggaggctgggcgagggggcggggagagggatttggtggcggggagcgggtgggggccactactcctgcaccgctctcgcgagaccgggccggagtgctgctcagcaggtgcgctccggctgggagcaggtgtgcgcccaactttaaaaccctcggtgcgcgccggagaggcgtcggcgtgaacctgggcacatcccgtctgtctttagctcgggggtggtgtgtgtgtgtgtgtgtgtttgccttttttgttcgtttgtcctttgggtgtgtgtttgtgtgtgtgtgccttttttgttcgtttgtcctttcttgttactggggaaaaaataaagcgaacctgatgatcttccgtgaatttcaggaagctgcctcctagacttggtagcctggcccgccctgatggctttccatttggcgaggaaaagggcctttgccttattctgagtattcccatgtcctacaagtgtctgtgtggcctgaccccagcatacctaactgacgttatatcagcaaacgatggctccacagttaagatg

SEQ ID NO: 23540 - DNA, 1483 bp, Artificial sequence
  DNA replication origin
ccaccgccatgtgacgggaagcagctgatggcctctccgggcggcggcggcggcctggccggggcgggcggcgcgggggcggcatgagggcccgcggcccggggggctgaggcgcccgccgcctgccgcgggggccgctcgcgtcctccatggaggccggaggtgagtggggccgggcgcgcccgttcccgcccggcggggccctggcccgttctccccggggaggggggaggcgaccccggggcgggctgggcggggtggggcgggggctggacgcggcgggggcgtccggcctgggaggtccgcgcggggccggcgggggtgcgcgcccggcgaccagctttgtttcactttcgttgtcagtggccgccaccctgactcccgccggcgacaggatcgggaagatcgggcttctgcgggaggagatcccccgaccgggacagagggggctcccgggtgggactcggggcggggggcaccaagccctaaaacggagatccccaagggggtgggtgcccctgggtacccaggtgccaggggacgcacttgcatgtctggatgggagtcacctctgtccctcacaagctgtgtgatcgtgacagtggacaagccactgaaccaccgccacccacgtctcagttttgatctgcaaaatgggataatcctagtaccttcctcggagggtggctgggacccggtaaaaatggggtctggggtctgggttccctattgaaacaatctattcccagcctctcccactggagattaagtcagtggaggtggggcgggactggagacgctgatccctggtgacatgtatgatcaggcaaatttaggatacactgatgggtggggaccttgcctctattcttgttaactgccatccccatcagaagacagcgtggaagtcagaggatattggatatacctcaagccagcccagatgaacataaaatctcagtgggaaaggtgtgtctcttatgcaaggggaaaaaaaccccaagacgcatgcacgccttggccctctcccctccaacgaccttccctcggaaccccacttgggatagatttagaattgattccgggagtcccaggtcttgaaggacccgagtttaaatgtaatttccttaggagaaattttcagagcaggttcaaggcctagggctcagaatttgttccagaacttcatggtaatcttgcagccaagttcaagcttcatcctggtctggagggttctgattgctgatggcttgttactgtgggtgggaaggttgaaatctgggtattccctggggtggtgttactttttaatttaggaaatgacatttctttgtttgctgaagtcaggcattgagttaaaggcagctctctctccttcccatctagataagggctttcttttcagtgagtgttacccgtagaattctttttaaaagggcccctactgtttgtgtagatcctatgtgaatctttttatagcttc

SEQ ID NO: 23541 - DNA, 2017 bp, Artificial sequence
  DNA replication origin
cacccgggagccccctctgtcccggtcgggggatctcctcccgcagaagcccgatcttcccgatcctgtcgccggcgggagtcagggtggcggccactgacaacgaaagtgaaacaaagctggtcgccgggcgcgcacccccgccggccccgcgcggacctcccaggccggacgcccccgccgcgtccagcccccgccccaccccgcccagcccgccccggggtcgcctcccccctccccggggagaacgggccagggccccgccgggcgggaacgggcgcgcccggccccactcacctccggcctccatggaggacgcgagcggcccccgcggcaggcggcgggcgcctcagccccccgggccgcgggccctcatgccgcccccgcgccgcccgccccggccaggccgccgccgccgcccggagaggccatcagctgcttcccgtcacatggcggtgggcgcgggcggagacgcgcgggggcggggcgcaggggaaacggagggggggtgcggacgggataaaaacggtggggggcagctgagggaaaagatggaaaatcggggaggcggtacgctgacgggataaaagctgaggggttgctcaggggaaacgggggcggggaagacgcgcgaaccagataaaaatggggcaggggtggggggagctgagcggaaacggggtggggcgcgaacgggataaaacccaggggttgtgcggggtcctgaggggaaccagcgccggataaaaacggggaagggagggaggtgaacagagctgagggaaaccgggaaaaggggagcgatagaaaccggagtaggggaagccgggctcaggggaaaagggggtgttggagagtggtagagccgggctgagagaaaaaccaagcaggggaagcggcgatccggggagaacggagagagggagaccgagggctgtgggggtaaggggaaccaaaggggctgaagcgaaatcgaggggaggggcaggtgaaaatggagccatgcgaaggccgatgaggggggaaacgggtaaaaatgggggcgggagaaataggttggagggaatactggccgagaagaaacctggggagagctgggcttaggggaaaatggggagggggtggaaggaaggtgtaataaccgggtgctggggaggacgtaagaattggggggtgcggcgagggtcaaggctagggtaaaacaaggggggctactcaatggctccggtaatgggagagggaagtgaggagaacacggggcggtggggagaggagggcagggtgaaaaccggagtgggggtgggaacgagataaaaaacggggcaggagcgattcggaagaagactgtccccttacctacctacggcgacagcctcgcctgtccccgtccccctgagaaacctgctctccctgtctacccgcatagcctcaagaaatggctcgcttgggtcagacgccccctttttaacattccagggccagggcaggagtcatcatggaggcttttcatgcctgaaagaccccatttcttagttgtccggtccccagtagtatcagtggcttggggatttcttactgagctcagctcattgtccccaaaatgcctccccttacccccaactcgagcgcttccctttcctgctttgggcccaagctcttcccgcggttcttggtgtcagcttcattcaagtcactctcccgcctctcattcctttctccccgcctttcttcgcttccctccaagtgccctctccatttgccggtcactggtcccagagctccggatcgcagtggttccattttaaatttctttgcttcctaacgcaacctatgttttctacggtaactgaggttcccgtgttctttttcaccatggtctctccgttttaatgtttcgggtttttttacccaggcccctgttttatgagccctgggtacgtccttcctgtgtcccgtttggcctcctgggttacactcctgttcaccccgcttggccggtttttttttttcttttctt

SEQ ID NO: 23542 - DNA, 1397 bp, Artificial sequence
  DNA replication origin
agcctccgcgccccgcccctggcccggcgggacccggctcggcgcgccctcggcagaaagccctcctcccgggccaaggtagaggaagttgggctcccgcctggctgggaggcgggagggatcccgctcctgttgttttccgccggcaggagtaggctggcgggcgcagggggcggggtgcgccctccctccccggccagggcgctcgggagcggggacccgagcctgcagccgagctccgctgccggccctggacactcggctcagccaagcatccttcctgggggccgaggaagtggggccactctgccgttccgaggacctgggaggagccctcggtaccccgggccccggggccctggggcacacacgtccagcccagcccgagcctgcgtttcctgagccgggatctggggcgagatggccgcaggcggcagtgcgcccgagccccgcgtcctcgtctgcctcggggcgctcctggccggctgggtcgccgtaggtaaggggccgcgatctggagggaaaagttgagttttcccagtcagcggtggggaggggacagcgagagacccaattccctccgactccgcccggatccgtggtggccccagcctagaagctgccccaggagggtcttggtttcctgctcgcagctcggccgtctttgcaggaaggagttttcccgggcgcccggtgcggggcgagatacccccagcctcctggggtgggcagccggtgaggctgcagaggagccgagccgagccgacgtgcgggggcaaagtaaagaggcacgtgtgccgggaaagtgatttttttttttaagcgtcggatgtaaattcgcgttctggttttagtagtaactgatacgctggtgctcaaactcgagactcccactttatttttctcctccctctgcccaaggttgaactcgccttacacctgtaaccggtggacttccctacacacctttgcaagtcttcctgtgccgaccagcgccttcaaagcggggtcttccgcctttacttttggaaaagctttttattttgaaatacttggctgacttacaaaagacttcccctcacacttgacatgattgacaaaaggtctgaaatgcttcatctatggtctgctttgctacgaaaaaagaattggaggggtgcttacaaaaatatgtagaatgtaaaaagattgaactatttatatatatttgaatttaattcaccagcatgcctactgtgcatgcctactgtgtgctgggagtgtgacaagctgggaggaggctggggtgcagggagaggagatggagccaggaggtggtgaagtttgccaggatgcaggcagagcgctactttttgtgttcccgggtctgctccacccaacgggtctcctcttgcacg

SEQ ID NO: 23543 - DNA, 803 bp, Artificial sequence
  DNA replication origin
tgcttggctgagccgagtgtccagggccggcagcggagctcggctgcaggctcgggtccccgctcccgagcgccctggccggggagggagggcgcaccccgccccctgcgcccgccagcctactcctgccggcggaaaacaacaggagcgggatccctcccgcctcccagccaggcgggagcccaacttcctctaccttggcccgggaggagggctttctgccgagggcgcgccgagccgggtcccgccgggccaggggcggggcgcggaggctgggccctccccagtccactccgcccgggacagcagtaccgagtcgcggggacagcgggcgggacggagccctgcagctgccgcaggacgcaacccccgccgctgccccgggctgcagaacccggaggaagcggttgccaagctgcagaacgcaggacccccctggcagtccccgctgagcgtctcgagggattccggtctgtgtccctgggcgcagggcgggcgccaaggccgccatcgcttcctttccttaccctctgcaaaagggagccagagaaagatgatcccctgactttcagccaaagcagccacgagactccggttctccagtgaactggctgggaccacacagtgacagcgagagccaaggagtccccaggacgtgtttctcaagagttttgtttttgcttttccccttttagttctcccaccccttacccagtcagattcccaggctaagctcctctcttccctgccatgccctcatcccattctgtcctggggaaaatgcggctttgatatcctcagga

SEQ ID NO: 23544 - DNA, 1015 bp, Artificial sequence
  DNA replication origin
gaatccaggacagagtaaagagaggggaccggtcaggggatgtgaagacaggggatccccagagggcttagaacagagtgtgagaagaccccaggaagggccaagacagtgggagaagaggaggggtcccggaagggggctgggctgagacagcggggctgagagcaggacacctagagagaggccgggacagcgggtgggagcagggtgaccccgagaggggccaggacagcggggtgagaggaggggacccccagagggctcgggacagcgcatgcgagcgtgggactccgagaggggctttgagcgtcgggtgcaggcgcggaccccgagggaggagcggtgccccatgggtgcgggtcgggcccccagtcacatagcgggggcccggcgtgagcagcgagggagcgggcggggggtcgcgcccgctgagttgcgggagcccccccaagaacggctgcggcggggagcctgggtcgcagtcgcggcgtcgggcaaataggaaccggctgcagcgcagacgagtggagcggggaggtgctcccagggtctggcatcagcgacctccctgagggtggagtgtgagcccccgggactccgggggactccggagccggattatgtcatgaaacatctctgaagtgaaacgcatgggctggaggagctggaggggctggtggggctggctgcaggacaaagatcttggaatgatcaagagacctgcgcggcctgacctcttctcactggcccgctggcttcgcattcgttccttagagtctgatgtggatgtcttgaaagcgaggggcttcctgatcttaatgaaaaggtcaggtgaaaagttggaaggggcttcttcaaacctcccccacttccccctccacaagaagttgaaagggacagggatccttttggagacccgtgttttagattaataagaatatttctttgatagacccttgcgttttcctggactactggtttttcattttagctcaaggagctaagaaactttttt

SEQ ID NO: 23545 - DNA, 1464 bp, Artificial sequence
  DNA replication origin
ccggagagcagcacaaacaagactgaccgcaccccaggcgggcccgtaggttactaaagttgcaaggtcttccgcgtctgaggagaccccgccctgccctgtcccgcccatcgacaactccgccaatcctcgggttccatcgaccgctcggcttcccaggctccatcaatcaaatacctatatacggccccggccctgtgccccgcgatcagggaaggtcagtagagagcctattggagccgagcttggggcgtggtccggggcagggggcgggcggactgagacggtggggcggggcgtgctcggcgcagtccggtgcgattggccacccctggcaggagccgcacctcggacagcagcagcggcggcggccgcgggagggtccttgtggcgccgggcggcggggtcctgcgtggagagtgggacgcaacgccgagaccgcgagcagaggctgcgcacagccggatccggcactcagcgaccggacccaaggatccgccggggaacaagccacaggagagcgactcaggaacaagtgtgggagaggaagcggcggcggcggcgccgggcccgggggtggtgacagcaggtctgaggtgagagcaccggggcgcggggcatgacagtgggagccgaggcggcgggaccccaggcagagtgaggggagttgcgggagcgggctcgacagtgcagactgtggagaggagaccccgggagggaccgggacagcgggtgaggagaggggactccgagagggaccgaggcagtggctctgagtggagaggactccgagagggtccaagactgaaagtctgaggggaggggtctccaagaggggccgggacagtgcgcgtgagaggaagggacccggagaggggctggggtagtggggtgaggggtgggtgcctcatgaggcactaggatagggggatgaggggagggggtcccctgaaggaccaggtcccagaaaaggtcagggacagcggggagaggggaagggtccccgagaggggccggcactgagagtctgagagatggggaccccgagaggggctgggacagcacccggggagaggagaccccgaggtgaggggaggggacccagagagaatccaggacagagtaaagagaggggaccggtcaggggatgtgaagacaggggatccccagagggcttagaacagagtgtgagaagaccccaggaagggccaagacagtgggagaagaggaggggtcccggaagggggctgggctgagacagcggggctgagagcaggacacctagagagaggccgggacagcgggtgggagcagggtgaccccgagaggggccaggacagcggggtgagaggaggggacccccagagggctcgggacagcgcatgcgagcgtgggactccgagaggggctttgagcgtcgggtgcaggcgcggaccccgagggaggagcggtgccccatgggtg

SEQ ID NO: 23546 - DNA, 1679 bp, Artificial sequence
  DNA replication origin
aggttgtggcgacgggggcgtccagcggcatctccactcccccaaggatggcggaatcaggccgttgtcgggcagctctcgacccggaagtcgctcgcggcgcgaggcccccgttgccgagcgcgggcgcggggggcggagctcggcggagacggggaaggggtcgccgtggctgccggtcctcgagttgggggctgccgcggacactgctaggcagacggcgagtaccgagcgcgggtggccgcggtgtccgtgggccacgctcagctgcggtcagaggcgacatgagtgccgcggggctgctggccccggccccggcccaggctggagcgccgccggcccccgagtactaccccgaggaggatgaagagctggagagcgccgaggacgacgagcgcagctgtcggggccgcgagtcggacgaaggtgagtcctgccgctcgcccggccgcccggagcggaggtgggaccgctgggggagggggtggggctgttcgggagaggggcggggcggcctccggggcctggggctgcgtggaggggccgccgggagttgcggggctcggggaagttacccccatccgtgctggagtagcggggaagccctgggtgcgttacactcgaccgtgatggggagaggggacttagatgttgtcacgctgggggtccctttaagaccccgtcctccctcccagccgtttctgattgaacctcactcactagtaggaattagaaactcatttactgaatacatcgagtgtagttcgccccttttttgtgtgtgagagcatcagagtccaaagttgcccctccccacccccgaaatgcataagtcatctatactttaggtagtacactattgagaactcaggttggttaaaggaaagggacctagaaccagccagatacaggtttaaatttggctttgtcacttaactcagctttgtaaacttaagttttccagcctcgatttacccaactgtaatggagctgtttaattcccacacctgccctagaaggcacttcctagggtcggtatagggattaaatgacatgcgcataaagtacttggcctggtactgtaaatactccgtaaatgttctccccacccgcccccctcccggaaacaggtaagagagggagagatttgcttaatggtccccaggtgttgtgttttcagtcccacgctctttgcactgtcatcacagagtctcagagccttgcttttcaaactgggctttataatttggcaagtgtgaggaacgctattttggagggatggaggaggaggaaggtgatgaaatgtgagagatcaagggaggagaaataggaaacaaagagagaccgatatatgagcggaatattctgggacaaaatcgggccgtggagcaaaagctagaccagctgtttggaatggggcctacgttttattcatctgagtttcccgagtgccaagtaatgtggctgaccatgacaggaactcagggaaggcctcttgactgaaggaggggagaagggtttgtggggaattggatctgcaacagccttacaaaagacagctgcatatgcatgacatacaaagttgagggactgcattcgatttaattccatcagaagacacggcttaaccagagattttgaatgtgaagcacttgcacttcatctcatacccacgaggg

SEQ ID NO: 23547 - DNA, 1221 bp, Artificial sequence
  DNA replication origin
atcagggtgggggaactttgtttttctaaagagatactttgaagacatacatctcactgcaagagcacaaagcatctccgagctccgttttccattggccaaggagatcctttctgaggcttccctgagcaggagggctacaacctgcagttttgatgtgagttggaactcagtgcagggtgtgtgatctaaaaataagcagaaagactcgagtcagtggctgccccagtttttccagttctgacgaggcacttcggttaatagagatcagaagttttaaaccagacaggacgcggtggctcacgcctgtaatcccagtgtgtccggaattggtgggttcttggtctcactgacttcaagaacgaagccgcggaccctcgcggtgagtgttacagctcttaaggtggtgcgtctggagtttgttccttctgatgtttggatgtgttaggagtttcttccttctggtgggttcgtggtctcactggctcaggagtgaagctgcagaccttcgcagtgagtgttacagctcttaaggcagagcgtctggagttgtgcgttcttcccggtgggctcgtggtcttgctggcttcaggagtgaacctgcagatcttcgcggtgagtgttacagctcataaaagcagtgtggacccaaagagtgagcagtaccaagatttagagcaaaagaacaaagcttccacagtgtggaaggggacctgagcgggttgccactgctggcttgggcagcctgcttttattctcttatctggcctcacctacgtcctgctgattggtagagccgagtggtctgctttgacagggcgctgattggtgcgtttacaatccttgagctagatacaaaggttctccacgtccccactagattagttagatacagagtatggacacaaagtttctccaaggccccaccagagcagctagatacagagtgtcgactgctgcactcacaaaccctgagctaaacacagggtgctgattggtgtgtttacaaaccttgagctagatacagagtgcccattggtgtatttacaatctctgagctaaggccccaccagagcagctagatacagagtgtccattggtgcactcacaaaccttgagctaaacacagggtgctgattggtgtatttacaatccctgagctagatataaaggttctccaaggccccaccacactcaggagcccagctggcttcacccggt

SEQ ID NO: 23548 - DNA, 1358 bp, Artificial sequence
  DNA replication origin
tctgtccccttctctccatcttcactctaccaccctaatccaagctgtgagcattttttgcttggattattgcagtagcctgctagctggtctccctgcttcctcccttgcctatacatcatcctttacatgccagccagagtcatcttttatataaatcagatcttgtttctcacatgcttaaaacccttcattatcatcccatcaaccttagaacaaacctggcctccttacctaccctgtccagcactgcatggcctggcccctgcctctctcccttgctatgcaccagtccctctggccttctgtcactgcctaggacctgcccagactttttgccacaggacctttaaacttgctgttccttctgcttggaaggctctttccttgtcatgtaaagcttagctcaaatgcagcctcctcagagggctaatgcagagtttggggatggtgatgttgatggtgatggtgatggtggtgatggtgatggtgttgatggtggtggtggtgacgatggtgatggcaatggcgatggtggtggtgatggcaatggtggtggtggtgatggcaatggtggtggtggtgatggtgatggtggcagtgatggtgataacgatggtgatggtggtggtgatggtggtggtggtggtggtgatggtggtggtggtggtgatggtgatggtgatggtggtggtggtgatggtggtggtgatgatgatggtggtggtgatggtggtggtggtgatggtgatggtggtggtgatgtggtggtgatggtgatggtgatggtggcagtgatggtgatagtgatggtgatggtgatggcagtggtgatggtgatggtggtggtgatggtggtggtggtggtgatggtgatggtggcggtgatggtgatggtgatggtggtggtgatggtggtggtgatggtggtggtggtggtgatggtgatggtgatggtggcggtgatggtgatggtggtggtgatggtggtggtgatggtggtggtggtggtgatggtgatggtgatggtggtggtggtggcagtgatggtgatggtggtggtggcagtgatggtgatggtggtggtggcggtgttggtgatagtggtgatggtgatggtggtgatggtggtggtgatggtgatggtgatgatggtgatggtggtgatgttggtggtggtggtgatggtgatggtggtggtgatggtgatggtggtggtggtggtgatggtggtggtgatggtgatgatggtgatggtggtggtgatggtggtggtggtggtggtgatggtgatggtggtggtgatggtaatggtgatggtggtaggcattgcagcaggagataggactcaccttcct

SEQ ID NO: 23549 - DNA, 814 bp, Artificial sequence
  DNA replication origin
tctcaggcactcaaataagcggacgcaggcgtgtcgaacacacacacttcaaacgtagataccctttggggcgggtactcatttactccaaggttctttcttctcctgccccatcttatcctctctgttggcctcttcatcttcacctcctagttacctcctgttccccttcagagaatttctggagttcccattgttctcccgacccccccgccctaccccgccctcattgggtccccattgctatctgctttagcaaagagcaggagtttattctcgctgtgactgggactcagcaccaggtgcttggaggcatttaagactgagcgaggcctccttccaggaatttacagcctggaaagtggaagcggggttggggggagggggagggcgttaggtgggagatgggggagtaacaactctgctaagattaaaaggcttccaggaaggcaagggctgaggggtcccgccacgatctcttttttttataatgaaaaccctgggggaaaacaagagtcattctaaccagatcttctgtgtctggggttgatttgggattctaaacctccacttgcttgggattacgattgaactgcgaggcggtaaggagatggggaggagagaccgaaaagtaactatccccctgctaatcctcgagattttcctctccaaccctcccactaagcgctttcttttccaaaacgtactcctttcccgagactagcggcattaggaaaagtggctgcaggcggattccccaggagtggatgggggtggggtggggtgagatgggaactctttcctctggacgggg

SEQ ID NO: 23550 - DNA, 1693 bp, Artificial sequence
  DNA replication origin
aggctttgaacagacacgtaatttcaatgatgttggggttggggggaccataagctcgcacaatcctaaatcccagccccaaggaggcctagggagagcctgaggctcgaatgagtaagaatgggagtgggaacgaggatgaaggtgggtcccccttgccccctggcctcacctggttatcctccgggcctccaggtggctcggggagtctctccggcgctttctcataggcgagtaggaccgacgtctccgacgcgctcgctcgcgctcccgctgctgcgagtccttctcactgtatttgggatcccgctccctgaaggggcgcggggggttactggggagctggggctgggctggattttctgcgtgagcgcgtgggagagggacactccctttctttcccaccccactgggtcacgggatggggtctgcacgttgccgcaagggagaccggagggaggatgacggggctgcggtaagagtctgcgagggttgttagtaccgtaggggtgggggctgggcttgtgcaggggtgtcagcatttgcaggtgggcatcatagcagggcaggtgctgcaggggtgaggacgtgaatgttacgcaggccctggtgcgtgggtaagaactgggggctctgaatatggggacggtctgtagaggctgagggctggggatgtgaattctggggtatgtctgcgggactgtttgggctggagacattaggaaacaagggtatttgatgcctcgctgccactcctgattggacaaagggaactgtaagaatgctgagtcagggtcagacctaagaggaagaaggcccgagaacggggaggcggggccagagaggaggatcagagcaaaggggtggggcctaggacgggcctagtttgaggggcggggccggtacctgctggggctgtagcgggagtagctagggctgcggcgggacctagagcttctgctgggcgggctcctcttgccagacttggaggaatagctgggagagcgggagtaggacctgggggagaggtaacagcctctgaggagcctgctgagtgtccgcctgggttatccaagacggcttgagctttattcagcgggtccctgggcagtgacctttttctttctggaagccaggcagaggaactgggccccgatcaaagaatgaaagcccctccccaccggtggttaataataataccaacaacttctattttgtgcctactatcctggccacttactagctgtgtgaccttggcagatgatttcgtttccctgggccgttttcttgtctataaaatgcaggtaataatagtccttaccctagacaattgtaaattgaatgagtgaattcgggtaaatcacatagcatattggcacctatgctaagtatcaattagacaggacataggaaatgttagctatgactatgacatattttattatgtgccagacattgaaccagtgctttgtgtgtattatttaatcctcaacacatcttagggttaggtactattatcaatttcattttatagatggggaaacagaggcacagagagatgatgcacttcgctaaacacagctggtaagagatgtgaacccaggactgtttgcctctaagccaaatttaattcacgtctgtttggtttcaaagtgctcttgatttttgtagactatattgttgtgcatctaca

SEQ ID NO: 23551 - DNA, 952 bp, Artificial sequence
  DNA replication origin
cggccgccccgtctgagaagtgaggagaccctccgcccggcagccgccccatctgagaagtgaggagcctctccgcccggcagccaccccgtctgggaagtgaggagcgtctccgcccggcagccaccctgtccgggagggaggtgggggggtcagccccccgcccggccagccgccccgtccgggagggaggtgggggcgtcagccccccgcctggccagccgcccagtccgggagggaggtgggggggtcagccccctgcccggccagccgccccgtccgggaggtgaggggcgcctctgcccggccgcccctactgggaagtgaggagcccctctgcccagccagccgccctgtccgggagggaggtgggggggggtcagccccccgcccggccagccgccccgtccgggaggtgaggggtgcctctgcccggccgcccctactgggaagtgaggagcccctctgcccggccaccaccccgtctgggaggtgtgcccaacagctcattgagaacgggccaggatgacaatggcggctttgtggaatagaaaggggggaaaggtggggaaaagattgagaaatgggatggttgccgtgtctgtgtagaaagaagtagacatgggagacttttcattttgttctgtactaagagaaattcttctgccttgggatcctgttgatctgtgaccttacccccaaccctgtgctctctgaaacatgtgctgtgtccactcagagttaaatggattaagggcggtgcaagacgtgctttgttaaacagatgcttgaaggcagcatgctcattaagagtcatcaccactccctaatctcaagtacccagggacacaaacgctgcggaaggccgcagggtcctctgcctaggaaaaccagagacctttgttcacttgtttatctgctgaccttccctccactattgtcctatgaccgt

SEQ ID NO: 23552 - DNA, 1167 bp, Artificial sequence
  DNA replication origin
tttctcaatcttttccccacctttcccccctttctattccacaaagccgccattgtcatcctggcccgttctcaatgagctgttgggcacacctcccagacggggtggtggccgggcagaggggctcctcacttcccagtaggggcggccgggcagaggcacccctcacctcccggacggggcggctggccgggcggggggctgacccccccccacctccctcccggacagggcggctggctgggcagaggggctcctcacttcccagtaggggcggccgggcagaggcgcccctcacctcccggacggggcggctggccgggcagggggctgacccccccacctccctcccggactgggcggctggccaggcggggggctgacgcccccacctccctcccggacggggcggctggccgggcggggggctgacccccccacctccctcccggacagggtggctgccgggcggagacgctcctcacttcccagacggggtggctgccgggcggagaggctcctcacttctcagatggggcggctgccgggcggagggtctcctcacttctcagacggggcggccgggcggagacgctcctcacctcccagacggggtggcggccgggcagaggcactcctcacatcccaaacagggcggcggggcagaggcgttccccacatcccagacgatgggcggcggggcagagacactcctcacttcctagatgtgatggcggccgggaagaggcgctcctcacttcccagatgggatggcagccgggcagaggctgcaatctcggcactttgggaggccaaggcaggcggctgggaggtggaggttgtagcgagccgagatcatgccactgcactccagcctgggcgccattgagcactgagtgaaccagactctgtctgcaatcccggcacctcgggaggccgaggctggcggatcactcgcggttaggagctggagaccagcccggccaacacaacgaaaccccgtctccaccaaaaaaatacgaaaaccagtcaggcgtggcggcgtgcgcctgcaattgcaggcactccgcaggctgaggcaggagaatcaggcagggaggttgcagtgagccgagatggcagcagtatagtccagcttcggcttggcatgagagggagaccgtggaa

SEQ ID NO: 23553 - DNA, 912 bp, Artificial sequence
  DNA replication origin
gaggccaaggcaggcggctgggaggtggaggttgtagcgagccgagatcatgccactgcactccagcctgggcgccattgagcactgagtgaaccagactctgtctgcaatcccggcacctcgggaggccgaggctggcggatcactcgcggttaggagctggagaccagcccggccaacacaacgaaaccccgtctccaccaaaaaaatacgaaaaccagtcaggcgtggcggcgtgcgcctgcaattgcaggcactccgcaggctgaggcaggagaatcaggcagggaggttgcagtgagccgagatggcagcagtatagtccagcttcggcttggcatgagagggagaccgtggaaagagagggagagggagaccatggggagagggagaccatggggagagggagagggagagggagagggagacgagagggagagggagagggagagctcaagtctatcacaggtctattttatcaaaaatcttttagttgcaagtaacaaaaccctctcaaatttacacaagcaaaaaatattggaatcagaggttcacattacagaaactctaaggtttcaggcatagctagatccaagagtttagacaaagtcatcaagaatctgcctatattcattgtctctatttccatttgtgatggtttcattctcaggcaagagctctttattgagtgtcaaaatggccaccagcagctccaggtttaaattcttctggcttaggaacagcagggaaaaaaaaataagcttctctttctgtaaagaaacatcaagggtcgcaaaagaatcacccctgagttattcacttggagcccagagaccagggttacccacatttgagcaacatgtactgaggatggagaagggataagtcccaagatgaaaatccaggtgcttt

SEQ ID NO: 23554 - DNA, 1003 bp, Artificial sequence
  DNA replication origin
tcccaaagtgctgggattgcaggcgtgagccaccacgcccggccaggaagctatttcttaaggtacattttcttcctaaattcctgtgtctcgcaaagtctgaattacagtcatggagttccttttttaaacaacagtggccccgtgggggcctcagttccccaagtcactcctggcctccgcaacagacacacaggcctcggaatgctgcctcaccttgttcacctgggacagcggggtcctcacggctcccgcaggcagccggcccctgctgctgtcttcaaacagcctcccgggggaccgctctctccgcgtgctgagcatccggccgggggacttctctcgctccagggggcggccaggagacttgtccctgcgcagctcggtccgcccctcgcggtagcggtggggtgtgcttggctctcgcgggtggctggggccttcgggcggcgctgggctggaggccacgcgcttggtgatgtgctcgttgtacgtgggtgggcctcgcttgttggggctgctggcgacacaagaggaacgtagggagctgcgaggccacaaccccagaggggcattttccttcttacctgagcaaccccctccttgacccagcctcaccactgattatcaagagattagacctggagttctttggactttgcctgcatttgattttggtagcaaagacagggaagagagcaaagatggcaacaaaagacaacccaccttcctcagtgcaggctttcatttactgagcacctactgtgtgccaggcctgtgctaagttcttcatctgccatctctcattatctcattaaatcatcacagcagctcctgagctatgaacaagcatgaccctcactgtacaggcaagaaaatggggacagacaggagttaggtgacttgcctgagctaatgagtggtagagctgggattccaataaagaccagtttgataggccaggcgcagtggcgcacacctgtaatcccagcactttgggagg

SEQ ID NO: 23555 - DNA, 1322 bp, Artificial sequence
  DNA replication origin
gcaaggtgtcaagagcacgtgggcattagcacagccaagagcaggggcatcagcgacacacatggtgatggaagaatgaggagcagagcccagggacccctggccagatgggactgactgtgaaaaccagaggccctctgctgagccagctctcagctttattaaaaatgagggactttttaaatttaatttattttaatttattaaattttattaaagaaagagaactcaagtgaaaagaaggaaaggaataagaggaggagagggaaagagaaagagacagagagagaggggaatgaagcgatccggaggaaggaggacagacagggaaagacggaaagactcaggaaagaagggaagggggaggggagggaggggatggggagggggaggggagggaggggatggggagggggaggggaggacccaagaaagaaagaaaagaaagaatgcaacaaagaaaaggacagatagaaggatggaaagggaggggaagggaggggaggacgaaatgaggacagagtaagagaaaggaaagggagagaaagaaaggcaagggatggatgaggaaaaaactgcctgctctttggagagaatgtgataaagttagaccacgctagtatctggtgatggagaggagcatccccaaggggacttggtggtgctggaaggacattctctgtacccctagtcaaacctatcctgccccagagctccatgtaccctcctccaacccctcatgggtccctagtgtccatgaggacccaaaagggcagtgggcgcagccacgactcaccgtggaaacacagcaagtactcctctcgctgccctgcgctgttcacctgcacgattgagacagggaagctgttggaagaggcggcaaacacagcaggtgccaaggaatggtcattcttatccaggaattctgtaaaggcaggcgagaagcggggcttcaggagtgagttctgagtctcagcgcggcctgagccatgggtgggtgcgaaagtggaggtgggtcctaccctcgagcgtgtactgcttcatgtcgatttcgtagaatttattggttccaatgaggatactgtaattggtgaagtggatacagctgcagggctctgaggtctctatctcctgagacatgagagcagaagagaaggatgtgagaggtaacacagggcagccaaggtccacagctgttctgcttctgcctacagcatctagccaagccctggagaacattgtcaccaagcttgttcacgttgtcatagagagccattcatctttttttttttttggagacaagatctcgctctgtcacctag

SEQ ID NO: 23556 - DNA, 975 bp, Artificial sequence
  DNA replication origin
cccggccagccgcccgatccgggagggaggtggggggtcagctccccgcccggccagccgccccgtccgggaggtgaggggcgcctcggcccggccgcccctactgggaagtgaggagcccctcagcccggccagccaccccgtccgggagggagatgggggggtcagcccccccacccggccagccgccccgtccgggagggaggtgggggggtcagccgcccggccggccgccccgtccgggaggtgaggggcgcctctgcctggccgcccctactgggaagtgagtagcccctctgcccggccagccaccccgtccgggagggagatgggggggtcagcccccccacccggccagccgccccgtccgggagggaggtgggggggtcagccccccgcccggccggccgccccgtccgggaggtgaggggcgcctctgcccggccgcccctactgggaagtgagtagcccctctgcccggccaccaccccgtctgggaggtgtgcccaacagctcattgagaacgggccaggatgacaatggcggctttgtggaatagaaaggcgggaaaggtggggaaaagattgagaaatcggatggttgccgtgtctgtgtagaaagaagtagacatgggagacttttcattttgttctgcactaagaaaaattcctctgccttgggatcctgttgatctgtgaccttatccccaaccctgtgctctctgaaacatgtgctgtgtccactcagggttaaatggattaagggcggtgcaagatgtgctttgttaaacagatgcttgaaggcagcatgctccttaagagtcatcaccactctctaatctcaagtacccagggacacaaacactgcggaaggccgcagggtcctctgcctaggaaaaccagagacctttgttcacttgtttatctgctgaccttccctccactattgtcccatgaccctgccaaatccccctct

SEQ ID NO: 23557 - DNA, 1303 bp, Artificial sequence
  DNA replication origin
ctcacctcccggacggggcggccggccgggcggggggctgacccccccacctccctcccggacggggcggctggccgggtgggggggctgacccccccatctccctcccggacggggtggctggccgggcagaggggctactcacttcccagtaggggcggccaggcagaggcgcccctcacctcccggacggggcggccggccgggcggctgacccccccacctccctcccggacggggcggctggccgggtgggggggctgacccccccatctccctcccggacggggtggctggccgggctgaggggctcctcacttcccagtaggggcggccgggccgaggcgcccctcacctcccggacggggcggctggccgggcggggagctgaccccccacctccctcccggatcgggcggctggccgggcggggggctgactccccccacctccctcccggacggggtggctgccgggcggagacgctcctcacttcccagatggggtggctgccgggcggagaggctcctcacttctcagacggggcagctgccgggcggaggggctcctcacttctcagacggggtggttgccaggcagagggtctcctcacttctcagacggggcggccgggcagagacgctcctcacctcccagacggggtctcggccgggcagaggcgctcctcacatcccaaatggggcggcggggcagaggcgctccccacatctcagaatatgggcggccgggcagagacgctcctcacttcctagatgtgatggcggctgggaagaggcgctcctcacttcctagatgggatggcggccgggcggagacgctcctcactttccagactgggcagccaggcagagggggtcctcacatcccagacgatgggcggccaggcagagacactcctcacttcccagacggggtggcggccgggcagaggctgcaatctcggcactttgggaggccaaggcaggcggctgggaggtgtaggttgtagtgagccgagatcacgccactgcactccagcctgggcaccattgagcactgagtgaacgagactccgtctgcagtcccggcacctcgggaggccgaggttggcggatcactcgcggttaggggctggagaccggcccggccaacacagcgaaaccccatctccaccaaaaccagtcaggcgtggcggcgcgtgcctgcaatcgcaggcattcggcagactgaggcaggagaatcaggcagggaggttgcagtgagccgagatggcagcagtacagtccagcttcggctccgcatg

SEQ ID NO: 23558 - DNA, 1336 bp, Artificial sequence
  DNA replication origin
gcagtcccggcacctcgggaggccgaggttggcggatcactcgcggttaggggctggagaccggcccggccaacacagcgaaaccccatctccaccaaaaccagtcaggcgtggcggcgcgtgcctgcaatcgcaggcattcggcagactgaggcaggagaatcaggcagggaggttgcagtgagccgagatggcagcagtacagtccagcttcggctccgcatgagagggagaccgtggggagagggagagggagagggagagggagagggagagggagagggagagggagagggagagggagagggagagggagagggagagggagagggagagggagagggagagggagagggagagggagagggagagggagagggagagggagagggagagggagagggagagggagagggagagggagagggagagggagagggagagggagagggagagggagagggagagggagagggagagggagagggagagggagagggagagggagagggagagggagagggagaggtttcttaaaacctgagctctgaagctcacacagcatcaagtctgccacattctgttggtcaatgtgagccatgaggccagtatcagttcaagcgagcagaagaatagagtccacctcttgaagggaggaacagcaacaccacattgcaaagaggggtgggtaaagggccattatttatttacttttctttttgagcagggtctcactctgtctcccagactgcagtgcagtgacgcaatcataagctcactgcagcctcaacctcccaggctcaagtgatcctcccaccccggcctcccaggtatccagcactaaaaggtgcacaccaccacacttggccaacttttgcattttttgtagaaacgggttacaccatgttgtccaggctggtctggaactcctgggctcaagcaatcctcctgactcggcctcccaaagtgctgagattacaggcgtgagccactgcagagagccattattataatgatctagcacatcatgtgacccaggccactccaattagacactgtctcttgggattccagatacatatgtgtgtgtaagagtgttcatgtgtatatttatacatatacatatatgtataaatgtttggtttgagttggccagagttgatttctgtgtcacttgcaaccaaaatatcctaactgatacatgtatcagggctattgagtggaaggcctttctcaggttttggcatatcagggtatttacttcttctcattggtaataagggaacaacaccaagtccctgagacctgtcttgtccccatttccaactcccgtggt

SEQ ID NO: 23559 - DNA, 1052 bp, Artificial sequence
  DNA replication origin
atgaaagtgatggcttttatagatgcctcagaagaaataacacatattcccaaaagagttgctgtcatttatgcctctttcaaggttaaacttggctgtgtgcaatgttttgtttgcaagtttttgattgcaagtaatgggaatgtcctatggctagcataaggaaagaaagggaggagaaaggaagggaaggggaggggagggaaggggaggggaggagagaggaataggaaggggaaggaagaagggagggaaggggaggggagggaaggggaggggaggagagaggaataggaaggggaaggaagaaagggaggagaaaggaagggaaggggaggggagggaaggggaggggaggagagaggaataggaaggggaaggaagaagggagggaaggggaggggagggaagaggaggggaggagagaggaataggaaggggaaggaagaagggagggaaggggaggggagggaagaggaggggaggagagaggaataggaaggggaaggaagaagggagggaagggaaggaggaagttaatgaaaggatgttggaggcattttatggaagcaaaggaagaggtggataactaaaccatcctagaaaaggaagaaaccatgccaggcgcagtggctcatacctgtaatcctagcattttgggaggccgagacgggcagatcatctgatgtcaggggttcgagaccagcctggccaacatagtgaaaccccgtgtctactaaaaatacaaaattagccaggcatggtggcacgcacctgttatcccagctactgaggaggctgaggcaggagagtcacttgaacctgggaggcagaggttgcataagccaagatcacaccactgcacttcagcctaggcgacagagcgagactccatctcaaaaaaaataattagccaggcatggtggcaggtgcctgtaatcccggctactcggaaggctgaggtaggagaatctcttgaacctgggaggcagaggttgcggtgaacacagatcatcccactgcactccagcctggatgaatccagagtgaaa

SEQ ID NO: 23560 - DNA, 1672 bp, Artificial sequence
  DNA replication origin
ttcctgccttccccggctcctcccggctcaccgggccggcagcgccccgccccgggcttccggccgcgtcccctcgccccgccccttgccggcgcctgacgcgcgcgggcacctgttcgccccgcccgcgcgggattcgccggctcgcgggtctcctcagcgacgcccaggtggcgccggcggccttaacccctgctctgcctcacgccctgcgggcggctgcgcgcgccgcctgcggaggcggctggcgcatccctcacggtcctggctgcctcaccgcgcggccacgcccccagccttgcacccacttcggggtgcggttccgccctcagcctcgctcagagctggggtgtggccacgccctcagctctcgtacctcggggtgtggcctcgcacccggcctcgctctcacctcggacggagcgcggccccgcccaccgcctgctgctcacctccaggcgcggccccgcccccagctacttggaagccggggcgcgcctcagagttctgttgccgcatctctggtggtgtctggggcaaaggggactgaggacattcctccaagactggtgacccggccccgagaaagacataccctcacgaaatttaggtctgggcccccaggagaactaagcagtcaggagagggagccctagagagcagtaggaggagggaggacttcggaaaccaggcatcttcatgctgatgactcagggatatgaaggaccagatgcttcgcagatcagcagcccggagagaaagggtttctgcggagaaataacggaaaaaactgctcacagatgggaatacgaagcaaagaacctccctaataataactaccgtttattcggcactcagtgtgtgccatgtcctgtattaagtgcttgatagtcattattttagataatcctcacaagaactttataaaatcagtactgccgcttgtcattttaacagagaaggaaattaaagcctgagagatggcatcgtctgcccaggtcattacaactggtagagtcaggattgagatctagccaggccgacgccagggatcacgtgaatcattattctttattttcttcacatagaagcagtcttgaggaagataaatggtcctttgtgaccaagatggattgggtggatatggaaggaacatttcctcaatgattaaaggaaggtttggagagcctactgggtgacttgcagtcattccttggtgttgacctcgttggtggtgctacgtgtctcctatttccagaaacaatcccatctaaagctagaattcgtccctatgcttccttttcctcttggacagacaacccattttttacttggatcatgcctttcttcttttcatcccagtgagatggaaatttcagaacatcaagaggctgaaatgggtcaaatagtttctcatggtttttatcgcttattaaattcagagcctaaacaatattcaagttttaacatcgttacccttagactgaaggccagaatctgaaaagctcctgggcctcagggctggcattgttcacttgttgactggaaaggagacagacagttgagggattcccacatcaatcttagagctaaatttctgcagttgaccatgttaccattccagcaaggaaatgttctaacactttttattatgacctcccaccttgagctg

SEQ ID NO: 23561 - DNA, 1312 bp, Artificial sequence
  DNA replication origin
cctcccgcgcgcgcctgagcagctgagcccgggggcgggggagggggcgcgtgccgccggcgcgggggaggggcgggccggcgcgcgccgcgcccagggctcgcggggacccgggggcgcgtgccgcggcgcgaggcgaggcgcgggacgcggggcggcgcggcagggcccctcccccctgcagcctggcgcgcgcgggccgggccgcaccgctgcgggctccgcgcgcgcgggccatgtccgctttctgcctgggcttggtcggccgcgcttcagcacccgccgagccggacagcgcctgctgcatggagctgcccgccgcggccggggacgcagtccggagtcccgccgccgccgccgccctcatcttccccgggggctccggggagctagaactggcgttagaggaggagctggcgctgctggcggccggggagcggccgtccgaccccggggaacaccctcaggccgagcctgggtctctggccgagggggccggaccgcagccgccgccctcccaggaccccgagctgctgtcggtgatccgacagaaggagaaggatctggtgttggcggcccggctgggtaaggcgctgctcgagaggaaccaggacatgagccggcagtacgagcagatgcataaggagctgacagacaagctcgaggtgaggacctccctccagggatgggtggggagcaggggccgcccaggcacgcgcccggccctgggcagttagggaaccactcacccccacttcgttgctcaccctacctcgcagaaaatctggaatgaatgggggagggaggatggaggattatcagatttcgttgaacccacttgacttccccaccccgctcacagcaaatgggtccatgcgtggctccagccgctgtgggccgttctatatacgtactgtacccagcatctaaaatagagcttacagtatgactatatagcactgaggtgatgtctgcatacagagaaatgaggaagtcgggaagcatttaaaatatgttgcaggttttcagagcagttaatctctaatcagggtgttagcctaaagccttccagtttgggcgttaaggcctttagatgcccttgtcttaacttcctggcagctcagagttgtgggaaacaagtgcccctaaaggagctttatatagccttcaaatgctcagggattaggaaatgtggttccattgcagaaatcaggcgagccagggctcaacatgtgaccgctggtagtggatttaatttgggcctcagtatttatgtgtatttaaacagtacttttctgtgttctgggtctca

SEQ ID NO: 23562 - DNA, 1115 bp, Artificial sequence
  DNA replication origin
catctaaaatgaggacgttctcagaacctgcctcatgggattgccgtgaggtttaaatgaggtaagtcggataaagggctttgcacagggtctggcatattcctgctgaattattatatccctgcgtggttcagtttcctcatctgtaagatggaatgatagttggatctgccttatggggttgatgtgagtattaagtgagattctgcagtgttgctcacagctcctggcacatagtgagttgtcactgtttgctgttacactactatatacagaggggtcctggggatgggacagccaaaattataaaagtgctttggccacacacacacactgcttgagggctcctagctctgatcactgctctagctccagtgcctagaacagtgcctggcacccagtacatgcttaagacatatttgcagaaggaattaatgaatattaagtgtccttcgaaaaggtagactggtttctgggaaaaggtggagggttttagagctgtttggagtgtggcaggtgagcaggtttatggagtgaccaagaggtcaggaaggcaggccccagaaggtttatgggagcgaaactgaggtgctggggttatatgatgttcatgaaagagtcttgggagcatgctcagtttgtagaccagacctgagctgagtgtggggagggatgtcttatgattggaggcagaggccaggctggtggtagagcccatggactgttaaggaaaggggatcaaatcaagtgagcggtatgacttgggatgtaggagtgttgggtagcgatgtcagagctaggtcagggaagtgggtggttttggcctcccttttaaagctggatggagatgtggttggtggtttggatcaggtgaaggatggctgaggtttccgtggttgctggaggaggggagaggtaagggggaaagctgggggctaaccagggagatggaagagtaactgaggttggggaaggaggtagaaaggtggagtactgactggttatggtttgaatgaagggaaaccaggcaagctctggagtgttctcttggagatggcctttggtattcttcagggtcttgaggcttcttcctttacatgatttccttgcagccc

SEQ ID NO: 23563 - DNA, 1102 bp, Artificial sequence
  DNA replication origin
gcggctgcgcaaggcggtgccagacgctgcgcctgcgcagtggtggggcggggcgggaaggagggaggcggtggtagcggcggcggctgctgaggaggaggagggggagcggagggaggtgtttctgtcagttccggctgtttgttcgggaagtggatccgccgctgccggagcagcccgaagggagctgcggatcgcgaggccagtaccgaccccgcccgcccgcgcgcaccgcccccgcccgccatggcccgggactacgaccacctcttcaagctgctcatcatcggcgacagcggtgagggccgcagcggccggaggcggcgcgggccctgccgggcgcggcccgcgggggcctcggggcggcaggcgggcggggaggtgccggcccgtgcggggcgggcgggcggggcagcccggcggtctgggccccaggggtgcgccgaggggctccggaccgcgccgaggggaggttggggcgcggggcggaggggccaagcgcgccgggtccagtcatcgcgcctgttcctgcctcacgtgtgaccttggtcaagtcgcgcgatctctggagttggagagacgtgggttcgagtctcaggactaccacctgcctcgcgctgaccttgggcaagttgcttcgccgtcctgagcctcagttccctcatctgagaagtggggatgtgccttgctgggtggtgtgaggattcgatgggataaagtaggaaaagtgcgtagcgccctacccggtaaagtaagctcgaagtaaatgttcactattgtcattatcatcagtatcctttataagcgtcagtttcttcccatctaaaatgaggacgttctcagaacctgcctcatgggattgccgtgaggtttaaatgaggtaagtcggataaagggctttgcacagggtctggcatattcctgctgaattattatatccctgcgtggttcagtttcctcatctgtaagatggaatgatagttggatctgccttatggggttgatgtgagtattaagtgagattctgcagtgttgctcacagctcctggcacatagtgagttgtcactgtttgctgttacactactatatacagaggggtcc

SEQ ID NO: 23564 - DNA, 978 bp, Artificial sequence
  DNA replication origin
cgtctggcaccgccttgcgcagccgcagcctgagccggccgcgcccgggtcgcgcacgcgccctgacggagtcccagcaagcgcgggcccgtcttcctcgcgtctcctcggggagcgtcgtcgccgccaccctgggcgctgagagcttgcggagccgagccgctgtcgagtcccagcggaaagaagcccaaggtgccggagaagcccggtcgtggacgttgttgctccctcatcttcgagacccgcacgccctgcggagaggaaatgacaggcacgccgcgaccgtggggcggggctcgcacgagctccgggtttccagaggcaggggccggggccgtagaaggcagagtcgcgcggggaaggcccggtaccccgccccttccgcaccgacccctcccccgcggagctggccccggccccgggcctgtggagtggacgccgagggcggcgggcggcttccgagttggacagaacgggagctgccggcgggagcagagctgcgaggaggtggcctttgagggcagcgcggggtcgaaatcccatcccagcgctgtgacctcttggagcccacattgcctctttggtggaggggagggagtggtccagctccgagccgagcctgggagctgaatgacccagtgtgcaaggcgcacctcggagaccgaaagcaaccgctcccccggcttcaatttcacaccacctgcagatacacgtctcagaatctgcggctaggaagacctgggccgccagaagctaaacgtgtgcattttgtcatcagccccggtttctcgttttagagtgagttcccacctgccctacctaaactgacctgaaacggaaagttgtatgcccccacgaccatcctcactgcagaactgcagagggttttaagctccttattacctgtttcttataatcctgtccctttccaggcgagtatttatcggatagttctacttgttttatcaaacttccttt

SEQ ID NO: 23565 - DNA, 1556 bp, Artificial sequence
  DNA replication origin
cccgcggtctgcctgcgccgcccgggccgggccaagcccgcagccctgagagtccagcctgagacggccccgagactacgacctccacagccaccacctccaacgcccctaagccgaggagcgagaggggccccgcccgacggccaccgtccgcacccagtccctggccgcgttggccccgcagccgcccgcctcacctgcgtgtccgccgccatcctgccggggctgactccggaaccgcttccggaacgcttccgggtcacagcgtggcccacgcggcagggcgaggccgggagccagcgggggcagggccccgggcttggtgcccccgggcaggacggcggccgctgcagcccgggcagccggatcacgggcttaaagttggcccgcgcccgagccacaaggcctcctccccagggcccgctcttcagccccgggcgcctcgtgggagactagcgcttgtaacgtggtgagcccgcggtgtaacgctatgggcccgccttgcagcccctgacccacttccagcccgcagggccagccctacgtgggcctttcctgagtgatgactaagttctttagaaaaacaagtgttgcttcctagatagcaggaactaaaaactaggtaaaagagtcggtgaactagtcttttgtcctcagtttgtagttcagttggcggatgacttgtacagggttagcaaacgtggctggatacggaggtcagggaaggttcagaactgaacgaggcccctgccctggggaaatgctggacgccccaggctgggagttttgaaggccacagggcaagaggctacgtgcagacgtggctgcaatttagggaacagggtctccacagcttagttgtcagccctgttagcagtggctttcaaacctttgacacagacctagttagaatgaatatatcatgttccagcagacagatctctaagtgaaatacaggaatcacaacaaaaacacctattctcagcagatgctgctttctctttaaatactggggccaggcatggtggctcacgcctgtaatcccagcactttgggaggctgaggtgggtagatcaacctgatgttaggatttccagaccagcctggtcaacatgacaaaaccttgtctctactaaaaataccaaaaaaaaaaaaaaaaaaaaaaaaggccgggtgcggtggctcacccttgtataattccagcgcttcgggaggacagggcgggcagatcacaaggtcaggagttccagaccagcctggccaacatagtgaaaccccgtctctactaaaagtacaaaaattagccgagtggtggcacatgcctgtagtcccagctactggggaggctgaggtgggagaaccgcttgaacccgagaggcagaggttgcagtgagctgagaccataccattgcactccagtctgggtgacaggacgagactgtctcaacaacaaaaaaattagcccggtgtggtggcagcctccggtaattgcagctacttgggaggctgaggcaggagaatcacttgaacccaggaggcggaggttgcagtgagcc

SEQ ID NO: 23566 - DNA, 951 bp, Artificial sequence
  DNA replication origin
gccaggagccctaaagtgggagtgacgtcagcaggactcctggtggtcggaggggcccaccagggtcggaaaggctgagggcacccagcaggcatggccaagcccagggagagcacgacacgcaggacacccagcccagccttggcactgacccctccctcgtcctgccctccggggctgctccgcccgccgtcccgaggccagccggccgcccagcaccgctccccatccgctctttgctccaggccctggatcttagataggggaagagatgagggtaagaaatcttttttaaaaattaagaaagaatacaagaccttgtcactggactaaaagggaatctaggatgagatctgagggtttctcccccaccggcaggaccaaaattgggggaaaaaatctggagaaaaagagccctgagagagaggcctagggagaaaggaagaaggacagggaggggagtcgaccaaaggcagaggaaatggcaaggggaggtggccgggctcagtgatgaggcctcaccgggcgctgggcctgggggctggaagggaggagacaggtttctggtctcccttctggagtggcttctttcctcgatgggagcccggggcagtactgaggaccagtcgaggaaggagcagacatgggtggacccacagaaaagcaagagggcagcggaccttctgagtgggggaagaccggggtcaaggtttacggcaggactgtggttactgtgctggggcttgtagatggagggatggagggtatctgtgtatgtgtgtgtgcacgtgtgtgtgtgcagagtgggggatggctcaggcattaggacaggggacagaaagggaggggctcctttaaggcctgcctgcatcggggggaagagcgggtcctcatcagtctggcagcccacggacctcatggtgtggggtgcaggaatgggaagggcagggc

SEQ ID NO: 23567 - DNA, 844 bp, Artificial sequence
  DNA replication origin
ctcgatgggagcccggggcagtactgaggaccagtcgaggaaggagcagacatgggtggacccacagaaaagcaagagggcagcggaccttctgagtgggggaagaccggggtcaaggtttacggcaggactgtggttactgtgctggggcttgtagatggagggatggagggtatctgtgtatgtgtgtgtgcacgtgtgtgtgtgcagagtgggggatggctcaggcattaggacaggggacagaaagggaggggctcctttaaggcctgcctgcatcggggggaagagcgggtcctcatcagtctggcagcccacggacctcatggtgtggggtgcaggaatgggaagggcagggccctgcaccccctcatcatggggctcttcccctgcactctggaccccagaagaaccacaggtataagctgagggccccaggggggaggaggcgagcaggctgggcaggggagaagagctgctggccgcggcgtctgtgcgatgctggagcaaagggacagaaggagaagccaggacagagatggttcttctcaggggaatgggagagccaggagggaagacaacctggggagaagaaaggagggagagcgatgaggaagaaatcgccagctcagcccacaggggtggcgggacctccccaggctccccctgggccttcccactctgcaccaagagtggggccagtcttccaaagtcacaggaggcaagaaacccccaccctctccccagatctcccctccggccagcactggggccagggaagaacccggaccccaggtgcttggctctggcccagccccagccatgggcatctcctcgccacctt

SEQ ID NO: 23568 - DNA, 895 bp, Artificial sequence
  DNA replication origin
aatgggagagccaggagggaagacaacctggggagaagaaaggagggagagcgatgaggaagaaatcgccagctcagcccacaggggtggcgggacctccccaggctccccctgggccttcccactctgcaccaagagtggggccagtcttccaaagtcacaggaggcaagaaacccccaccctctccccagatctcccctccggccagcactggggccagggaagaacccggaccccaggtgcttggctctggcccagccccagccatgggcatctcctcgccaccttctctacgagctgccccccggcccgcttcccacgtggctgcacagtgatgatgacgccctcggtcagccagtcctgggcagagggccccgccgcctccgccggctcctctgcctcaggctggatgcccagccgcccctgcagctccgcgatgagctgttcctgggatggggtcctgctcaaggtggcagggtccagccggcggcgaggggagggctcccgggacatggggtgtgcgtggccagactcccagctcctcctgatcacagatcggatctagggggagggggaggggaggctgtcaccgtcccactcccagcttgcacaacgctgctcaggccacactcagatgcctcaggagagggagcacaaaagaaaaccaccaaagaaccaagcggaggtgggtggaggcacggggagggggcagattggaccggtggaggtgggtagaggcaaggggagggggcagatcggactggctccagaagcacaggctgcgagcgagacctctgacccagcattcacctctaagttggccactgaccttgggcaagacacttaattgccatgggcctcagcttccccttccttaaaatggaaccacaagat

SEQ ID NO: 23569 - DNA, 911 bp, Artificial sequence
  DNA replication origin
cgtctctactaaaaatacaaaaaaaattagccaggcgtggtggcgggcgcctgtagtcccagctactcgggaggctgaggcaggagaatggcgtgaacccgggaggcggagcttgcagtgagcagagatcgcaccactgcactccagcctggatgacagagtgagactccgtctcggaaaaaaaaaaaaaaaatacaaaacttagctgggcgcagtggcagacgcttgtaatcccagctacttaggaggctgaggcagggaagtgtttgaacctgggaggcaaaggttgcagtaagccaagatcacgccactgcactccagcctgggtgacagagcgagactctgtctcaaaacaaataaataaataaaataaaataaaataaataataaataataaaaaaaaatcaaaggaatagtccacaagactttgtggctggagcatagccccttgtgggtacttaaggtttaaactcactgggtggcctatctggcttcctttgtgggtggggaaggggagctccaagaggtgggctcagggcataggaatgaggcagctgggagggagttggggcctgggactgggtgactctctggcttggtgctggggaaggaggaggaggggcatcacgtagcaacagagcaagaaggaacaggagtgtggcagccccaggccctgcagatctggtcacacctctccccatggagcagaggaggcaggggacatgagctggaatgtgcgattttctcaaacgtgcaccaccggaatgtgtcagcaacaccaagtgtggggctgtgtagcccagagagactgacagcatcgattatcatgactgaagcacagatgggatgagccacaaagcacgtacagattagtgaggctgagggagttcacaggcagggaaactagccag

SEQ ID NO: 23570 - DNA, 1164 bp, Artificial sequence
  DNA replication origin
acaaatagccagtcttaacttagtgcccggcgctgcttggtagaggtccatcagtcctgtctgctgaatctactcctcagagcctgggacagaggaagcatcagtggtcacacaagccacccacagtccagagaggaaagacaaggctcctgcagagaagaaacgttgcccccctcctcacctcccaagctcagggccctccagctacaggcgtgaaggggagggagagacagcgaatcctcccactcctgcgttcacgccacccaaggcattcctagaaccctggcaccaacccccttgggtttagagtcggcttccaggagatactttctttcccctaacaccagatcaagactggactgaaaagagtagccttggggctccaataacaggaaaacagtaaaactctgttctgggcatcctgtcctctttcacctgcgtggcttccagcagggcctgacgcagagagggtggaggggactctgctagccaggacacgttcagggatggtcataccttggggcccaccttccacctcattcccctggcatttcaccagaatctaggggtggggagagaatcaggactcccaaattaccgttctagacttagataccatggtagacggactggtctgtgaattgaggggctggtccacagagcggggaggtcagtgagagaaaatgagtgatgggtccttgaaacggggtgaccagatttgaagtggggggtcagaagagcaggcagactgggaaacttgtctttgaaatgggggtgtggtcatcacacgctcatctctagcttttgcatctgacttgtgaaatgaaaggggtgggctccgaggggttatccctgaaggggggtgctagtctgtgaagtggggggcggccctggagggacggggagcaggtcgaggaaatgagggagcagcccatgagatcgggcagctgctccccgagttgggcggtcgatctgtgaggtgggggtggggagaggtctgcgaggtgagggtcccgtagctgacgaggtggtctgccgcaggaagtctcgtccctgcagcggacggggtgggtccctgaggggcgggctggtccctggggcccttctgggagatggtgatgggtccccgaggtcgggggtccagaggtgaagccgtcccagacg

SEQ ID NO: 23571 - DNA, 1050 bp, Artificial sequence
  DNA replication origin
cagccccgcggagccccggccggcagggacaggagctgaggccggggccgccgagggtgggatcccgcggcccctgccgctcgctggcgccctcctggccccaagctgcgcgcctctcgcctcctcctccctcggcctcccgctcactcaccgaggtcgtccatggccggaccacgggcgccggctcagggtcgcgctagctgcccgtcccggggccgctcgtctatgccccgcaacttttccgccgcgagcctcggcccggaacggaacgcgccgccgccgcgcgcgcccgcgcccgcgcccgccgcgcgccccgcccccggccgccccctgtgcacgcgcgccccgcccccggacacccccgcgagcttgctggccccgccccctgcgcacgctggtcccgcccccgccaagagcccgggcagtgggcgtcgctgggcggggcggtggcgccccctcgcggctaagcgggcaggtgggcggctcccaggcctccagccactcccatccatctttctgtccctctcaaagtcacttgcctgaccctgcggatgacaaatccgtccacagtcagccatgtgtctgtgcattcgtcagccactgggtcatcacatgcctgtccactggacagtcagttttgcccacctgtccgtctgtcacctgtaggtcaccacccaggaggaccataaatcagtaccaggcaaggcccggagcccgtggctgacctttcctggggtcgtcctctggatcaatggcagtgcagctcgcagttcaccctttctggcccaaacccaatacctgtgtggttccatctctcttaatattacttccacacagccaccctccctagacacttttccaaaactgcatggggcagaggggtccccagattagacattaaagggaaaactacaggaaagtcacacccagtgctcccacacactcggaaattgggtaataataacaactaccatttattgagtgtctgaatagacagacactatatagctattctctaaattaatcctcctagaggtacttccctacccg

SEQ ID NO: 23572 - DNA, 747 bp, Artificial sequence
  DNA replication origin
tcacatcccagacgatgggcagccgggcagaggcgccccccacctccctgatggggcagccgggcagaaacgccccccacctcccagacggggtgtccgggcagaggcgccccccacctcccagatgaagggcggccaggcagaggtgctccccacctcccagacgggggagccgggcagagacgcccctcacctcccagacggggtggctgggcagaggcgcccacttcacagacggggcggccgggtagaggcactcctcccagatggggtggcggccgggcagaggtgctcctcacatcccagacagggtggcggccaggcagaggcgctcctcacctcccagacggggtggtggccgggcagaagcgctcctcacctcccagacggggtggcggcagggcagaggcgctcctcgcctcccagacagggtggcagccgggcagaggggctcctcgcttcccagacggggcggccaggcagaggtgctcctcgcttcccagacggggcggccgggcagaggctgtaatcttagcactttgggaggccaaggcaggcggctggaaggtggaggttgcagcgagccgagatcacgccactgcattccagcctgggcaacactgagcactgagtgaccgagactccgtctgcaatcccagtaccccaggaggccgaggcgggcagaccactcgaggtcaggagccagagaccagcccagtcaacagggcgaaaccgtgtctcctccaa

SEQ ID NO: 23573 - DNA, 1073 bp, Artificial sequence
  DNA replication origin
gttttcaaataatttattaggaatttaaaactgaaaataaaacctggaaaaagaagttacagatgtggagagaagagacaccggaggatggtaacttgctggcttcgaaacaccatgtaacatcttaaaaaaaaaaaaaatcccaaagcaaatcagaaaacggaattccagggtcctgagcccatggttgggcccagtggggtggaagggtccgggaatgagggagagggaagctaagtgtctcaggactcagctcaaacgtgtagaaaattaaaaataaaaaccaataaaatgcagcttctcttttattaggaaacattaaaaaaaaaaaaaacccaaaacacgaacagccgcgcatctcagtaacaaagattattgctttgtgttctcagggctgataggttaagcacctcacacagacaattaactctccaaaggtggggtttccgggtgggggcaatgctggggaagagagctcaggccctgggcctcataactgggggagagggacacacagaagggggatggcagtgggtgggccttggccctgccacgccagccaggccactgttcatgaaggtccaacgctctgaacctctctttttccttagaaggggggtctggggtgaggggctgccaagggactctggctgtggggtcatcctggtgggaaacttcagtgagagaatgtgggggttccctgagacgccctttgctttcccctggggtctgccctcgccagagcgtcccctggtgcccactcattgcgggggtcgagggggaagggggacagactgagcagaaaccatgaagccccaacctaggtagggagcaggggagacctttggagagttaattcctgtccagcagtgtcgctgggcaagccctgctcttcccacgccctttgcccccacactgggtttttggagtgggcaggtccaaccaaggccttgaccctgagggcctgagagagcgggcctgccgtggccacagctgaggcctgcaagcttacagtaacggtgtctgaggggacagaaacaggggaggggggagcccctcacccccgaggggtc

SEQ ID NO: 23574 - DNA, 1029 bp, Artificial sequence
  DNA replication origin
atcgtgccagcatgggcgagccagccctcagcaagactgacagggtcggctgggcgcggtggctcctgcctataatcctggcactttgggaggccaaggtgggcagatcacctgaggtcaggagttccagagcagcctggccaacatggtgagaccccgtctctactaaaaatacaaaaattagctgggcgtggtggtgcgcgcctgtaatcccagctactcgggaggccaaggcaggagaatcgcttgaacccgggaggcggaggttgcagtgagctgagatcacgtcactgcactccagcctgggcaacagagtgagactccgtctgtctcaaaagaaaaaaaaaaaagactgacagggtctctgccttccagggcttgcagcctggtggtggcatcaggtattaaaaaggcaataatgctgatggctgatgctgctgcactagggggagtccagtaccagaggagctcccagctggggcctctaggaaaggcgagggaaggcttccaagaggaagggcctcttaactttgcattcaaaggcaaagaggaggaaaagtgtttctggttgagggaatagcatatgcaaaggcttggaggccagtgggtggggaaagtgcggaagtggggagtggagaacggaggcaggaggagcccgggtggtggggagacagtggaaattgcaagtagcagagggacgcgggtcagggtttagaacatgcattcagctgctaggtggggagaggttgggaaggggctcaggaggtgaggctgctgagtggtcagacgagatgatgggggtcagggctaggggtgactgggtggatgggcatggggagatctccaggaggtgggcccacaggactttctgaaatgtgggggtccaggttagggtgggtgggacaggcttgagggggtgccgtggggtggcagagggcaccagggctatcaccgtcttctttctgggttgccaggctctcacccctggacgatggctccccctccaggttcgactcccagccgcacagg

SEQ ID NO: 23575 - DNA, 1068 bp, Artificial sequence
  DNA replication origin
gccccagagggtagggcgctcctgggaagcagcaggcccggctcggctgcggcggggtgtctttgtgtctgagcgccgagcattagagctcgcactaatctgatccagcagctgtgattggaggccgcctgcccccggggccggcgttgccatggcaaccgggccccaggagaagccgtcagcggccgcgtcttttgttcgggcctaaatcggcgttggcatgtgaaaccggcccggggaggccagggggagccggagaataggctgccagggagcgagggggacagccgggaatgccaagggccccgcggcggggggccccccgcccggatcgaggggccgccgccgaggggggaacaatggtcagccgccatggctgccactcaggcttagcggccgccgaacttggcggctcggctcctactggtcagcaggcctcggccgcctcccctccccccgcccgatcccccctgccctcgggttcccatggagaccaaagcctattaaggacactgggccgggagcctccctcccctcagctcgccccaggaggggacaccggtggggctaacccggacccccagccatcttccttgccccctgccctggcctcaaccccaccgtcccactaggggcctctccagccaaggcccaggttgaagggtgtagtggggccagggatggtggccttccttgcagggttgggtggaggaaggtgggagaagttgtggatttgggctgaatccatttgtgggtcaggcagggactcggagctgtaggattaggggggagggtgtggctggttcgttcattcattcattcattcattcaaaaaatgattgacctccagtcaaggtgctcaataggatggtggtcatggccctaaatgacacagacgatgtcctcatgcaaccttcaagccattagtatctggctgctctctccccagctttgccacgttccccccgtgtaactatgggcaagtccctcccttgtaaagataataataatagctattatttattaggcacttactatatcctgggtctgtgagttaagagtgttaca

SEQ ID NO: 23576 - DNA, 1024 bp, Artificial sequence
  DNA replication origin
gaaggaagccgcaccagggagcacatggttggaactgggttaattccattaagcagtttggtgacagaaggtgctttagtgttaggatggggctgggaattgccgcggattagccatgcgctcctggggtaattaggaccatgtgttcttcctaaaacagggctggggccacagggctgccagaggttgtgttgggaggaggctgatgaggaaaatgtcggcactgagttcagggagactctgtgatggaccttggggggtctcccaggagggccagtgaggtcttagtgttaggctgtgggtctgggtcactggcccgcccccttccctgtgttagtccttagggaaggcattttctggacatagtccctagggagggaggcaggaaggaggcacactcgagccagccagggtgtgggtgcacagctgcccatgacaggcctagaggcgggggtccaagagggagcttgcggggggggggcctttaaagaggctggggccacagagagcttgtcagctggcatcctggcaggggggctcgagcccctgctggtggcggtaggccacaggactcagatgcccactttctcattccctcccctaacagatggtgactcgaacgaagaagatctttgtgggggggctgtcggtgaacaccacggtggaggacgtgaagcaatattttgagcagtttgggaaggtgggtttaaactgggggcgcttgctgctggggctgtgaacacactgtagaatggggcactagcaagccgaatccagccaggtcattccattcctgcaaaagatgagagtggggctggatcctgctgtgggggcagaccaggccaatccaccttgcagcctcctggctcatctgtgagcttcagactcaggatatccctcgggacagagaagccacacagtagctggccctgttgttgcccttccactgtatttttctcttacttatcttcattctcacaagggaggcagtgctcccacagccagttcaatcaagtcagcccgt

SEQ ID NO: 23577 - DNA, 1015 bp, Artificial sequence
  DNA replication origin
tagaccctgcagggggcgctggctccagggcagatggaaaagtagaaaagtcagaggagggggttactcccatgtgatgggggtgtctgtctgctgggggcagggatagtgtggatctcttctctccatgcttccctgctgtcccccagccttgggcctctctgcttgggtcagtccctggctcccgtttacctgcaacaatagctgcttgtgcccaagaatttgtcaaattaccgcctgtccccagctcctgttatctctgcccagtggctcccgctcccgctcgcagtaatgagcaaatgaggccaggcctcaactttgccggctctgaaaggatcttcttggcgcagcctgagtgacccaagcctggaaatggagagacagtggcctattgtttttggtgattatctgccatcaagctgcctgttctgctaccatcccctgtcctcagaatgcactgatggcttctgcagtgctgaggaagctgagatttaggggctgggggatggaggagtggaagattgataaaggggaagagaatgagggaggaaggagggtgagatgagcatccttaggagatggggctgaaaagggccagggctttgtctgtgtttggcgtcctccagcctgggaaagggggtgggagggaggtttactgtggggagtctattttgagctctgactttcaccttttatttacttgttgggttttatttatgttgccagctgtgagtcacagtggaggtggggtgtgtcagggatggggtgtgcgtgggtctgtgggatcgtggcttgggtaccatctccccatcggggtctgtgtagggggactgtgtgtggtgcgctggtggctggggcggctgcttctgggagaaagagaaggatggacatgtccgtggaggtgtggaattgaaacttcaggcgggagaaatgggcagttgtgatttttccctggagcccagtgggacttggcaggagaggaggcattgccccagtgtggattttggaggttcca

SEQ ID NO: 23578 - DNA, 1077 bp, Artificial sequence
  DNA replication origin
tccacccgccactcactgccttgtaaccatctgcctctccctcactacggcgcgcaggggtttcggcttcgtcactttcatggaccaggcgggggtggataaagtgctggcgcaatcgcggcacgagctcgactccaaaacagtgagtggccctcggggcttcgggggtcctttgggagagggaggctgccggaggagagggtcaggactctccccaggggacagctggacggggtccatgaggaaggagggagtttttctgagtaagagggctgccatgctctgaaactttgtcactagagttgggggggagagggaggagaaaaatccctggcctgccatgagatgctacatcccccctcccctagtcctggtgaggggagaggcagccgccaccctctccctagaagtactaatcatgatgcctcagagcagagcttggggtggggctaggtccctcccccagcccaaattgggtgagtcagggtagcactgacccacccggtggcttctgtgaactctaactagtatttggctctgcgacaccccctcttcatccagaccaatggcaaagcatcccttgaagccccctccctctctccttccctcctcccccgacttttggtcaatgagctccttgctttgtgtggaagacagggacctgctttgcccacggaggggatttatgagaaaggctctagcttgcctggaaacgacccttcggaagactagatcttaggagaagctgcttggttggcattcaaactcatggaacattttgctgttgtcccacagctccttcgtgtcttagaccctgcagggggcgctggctccagggcagatggaaaagtagaaaagtcagaggagggggttactcccatgtgatgggggtgtctgtctgctgggggcagggatagtgtggatctcttctctccatgcttccctgctgtcccccagccttgggcctctctgcttgggtcagtccctggctcccgtttacctgcaacaatagctgcttgtgcccaagaatttgtcaaattaccgcctgtccccagctcctgttatctctgcccagtg

SEQ ID NO: 23579 - DNA, 1000 bp, Artificial sequence
  DNA replication origin
ctacgcagggtgagcgagcccgggagcgcccgccggtccggcagggcaccccggaccccccggcgccccggacccggacaccccagcccggccctgcgccctgctgaccccgggcgccctcgcgccctctttcgcgccccgcccggagaccccgagagcgcagggcgatccgcgagcgcacccggcccagcgggtggaggggagcagatgaggggttcagggggtatcggggggtgggctgggcccccgggacccgccggcggcagcgccaactccgctcgcacctgcggctcaaacttttgtgaggctgctcccggagcggcgggaacccggccggagccgtcccccttccagcccagctcggccctcggcttcccggggccccggtgggcgccaggaggctcagcgggaacggggcgagggcggtggggggcggcggcagtggagaacgcgcgggcagcttggcgcgggggcggccgggccgctccggggtcaccgggggcaaaggacgggggggggggaagggcgcggggcccgggctggtccgaaggcgggtgtgtggttacagaagggctgcgcgaatacttcggccagttcggggaggtgaaggagtgtctggtgatgcgggaccccctgaccaagagatccaggtgagcccctcaccccctcctcctgctcccggctcgcccccctccacccgccactcactgccttgtaaccatctgcctctccctcactacggcgcgcaggggtttcggcttcgtcactttcatggaccaggcgggggtggataaagtgctggcgcaatcgcggcacgagctcgactccaaaacagtgagtggccctcggggcttcgggggtcctttgggagagggaggctgccggaggagagggtcaggactctccccaggggacagctggacggggtccatgaggaaggagggagtttttctgagtaagagggctgccatgctctgaaactttgtcactagagttgggg

SEQ ID NO: 23580 - DNA, 1916 bp, Artificial sequence
  DNA replication origin
ggagaaggatgaaggagatccctgtcgagaggcatgttctcgtgggtaggtcgccactgccggaaaggacccatttcctatccttcaagctcatctgcccagcagcaccagcacacaaaccaaagtccaggaacactggaagatccctactccccgcacctctccaatgaccctttttaagttcagacctaagaagagtcacctccctaataccgcagaggctacctgctcaccctcatctgtgtctctgctacaacacaaactggaatgcttttgtgtcggaatggtaagaaatgccttgtgtgggtggccctccagtccccagtccaggggatgctgagaaactgtggggcagagtaggggacacaaacaggaaaaagcaagtttgtttctagtgttatgctcacagggtggcaggatatacctgctgagcattcccagaaggtccccaaggaaaccattactgtaagtctctcactttcttctctgcctgatggttggggtggggagagggaaggagggctatcaagagggggatgggcacccttccagaggtcagagttatgatgcccaggaataaaaggtgttgaattcaggatggaatgtgaaggtgaacagcaaagggcttgtcaacatgggttgtcactggattacaccggatggattaaggtagggatgggggaaggagtagaaggtgagttgggagggaggggcttgtgtggcactgagacccccagcagggatggggagaaggggtgttggccacctaagcttcctggtttgatccttttttggctggtttcagctggggaagtgaagggtcctaaggcttggatatggagaggtgggaatatggagaggtggggatatggagaggcggggataaggagaggtggggataaggagagtggccccgcagctcccctggtgaaccagaatactttctcagggttgttcccaggctggagggagggaattttaggggtacgtaaggtgactccaaggagccttgggtgcaagtactgggggatcccagagacccagaagatgggggtagaaaggaaggtgtttgccttcacggggagtagcctcaaaataagagggactgagggaagtcattccaaatgcagtgggtaggtagtttaggctcttccaatgggatggggtggagcttagacctctgcaaaagaagggggtcattcggaggggacggtgcacagctgaggcgttgggctcctaaactggaaacaggaggctctaagaggcactgccttttcctccagcctcggtgtggtgggggtggtgagtgtctggaaccgggtttcccgaatcaggacaggagtctgaatggatctcacaaaaaccggccagggagggagagaaccaggggagactcctcacaccgggaggtgggggtggcggcaaactgagaacccgggcttggggcgcgggattttctcaacagaccatagggtccactaatgtggacggcagggatttggggaaactaagggggactctcactttggacaccaagggctgaggacggattggggaagaggatacggtttctactggggtgctgatggaggttccccactcgggacgcgaggcactgagtgggtcccccaaactggatatgggatcctgggaacggagcgagggctctaaattagagccctggggtgggggtggggggctgtaaattaggttgggaggaaactgggggctctgagggcggcttctcgctccgactggggaaatggagcatgtggggactggggagcactagggctatctcccgcccgacccgaggagattggggttctcttcaattctggacagcagggacctgagagggaagaccgggggggttcccgatccggaaccgagctaccttgaaggcaccgggaagc

SEQ ID NO: 23581 - DNA, 1146 bp, Artificial sequence
  DNA replication origin
cttcgccttcgtgcgcttcgaggacccccggtgaggcccccgcgcccctgccctctcctcctcggtgcctgaggcccccgccttccctgctgtcccctcccccagggctcccctccccccggcctcccctccccccgcctccgcgcagacccctcacggcgccccctcacgggtggaggatgaggcagcctctcctcgcaggcccgggccgtccttcgcgccgtcgtcacttcctttatttttattattccaatattttacttagaaacccaaaagctgagcctttggagggcccaagcccgcctgcaccggcctcggggggtccaaatgagccttgtccgcctcctgcctggggcagcaccgtagggggaagcggccgcggggcagcgcgggggtcgccgttcgcccttcccgctcgcctctcccccggcccgtgctcgccgtggctggagagcaagctgcagggtcgcggatgccgctggaggtcgtggagggatctctggtggaatagctcgccgttcgcgcgccccgccccgcaggccagggcccgggctttgtaaagggatcacggattcgggaaaacttctaaaacagccggagtggggctctgatttcacttccctcctttgatgagggaggcttggcgagatgctaaaggttccagggatttggaaactctagattcctaaccccgctctaaggagtgcttgtgattttgcaaacagcgtcggccctcaggccggaaaaagcccaggaactttcaaaactgtggttggtggtggttagcagctgcggcgctgacctggtcactccactccggccaaataagagcccgcaccctgttttcctagcatcatttgctcccggggaacgcggaatgttcgtagggtgtccgacctacctggggtggacgtattgatagggcaaggggagcatctgaggaagggcaggcaggaagcaccgcgaggcgttgatggctgaagagtcgactctgacagctcatccctagtatctcctcatttgcctcaaaaccggaactgggcatttttacccctaagccggagaaggctatgcctcgcttatttagtaaccgtgccattgtggtttttcaacagttgctatgggtcaagtgccatggtgtgtatt

SEQ ID NO: 23582 - DNA, 1145 bp, Artificial sequence
  DNA replication origin
tcgtccgcccagcccgacatccgcaccgcccgacgccgcgggcccgccgcagcccacgtcgccgccgccgcctcagcacgggtccccccgcagcgtccccgcgggctccgaggcgctcagccgcactgcattgtgggaacgcggagcggaagcgaaggggtcggcggaggcaaaaggagtcctcttaaagagaacgcggctgcgaccattgcgcgtgcgcgcaggccggcgccccctggaggtgcgaagggccttcgggcgctgacagggagagcctggggccgggccgtgtggatgccatccccgagcgcggttcgcgctcggctgaggcgctggacaagtggcttgggctcccgcgcctcagtttctctctgtggcgccgcctacctcacagacttgtgagcactcactgacgtgggtagcgcccagggcctgcggggcgcaggagagctggagtcaggcggagaccgcaggctgaccccgcagcggccgggctgtcgcggcccccacctcaggtcagtaggcccccgggccaccctgtccccattttacagttgctcagaactgacggtgtcagcatgagatggactccatagcttggccttgagtttgtcggagtcgagggagtaagactcttaatgagtatcacagcgatcactatagagtgcatccgacttgtgcttttcatcctctcccgggcagagtctgaggccacagaggggtcaggaatggaacccagagccatgctcccatcctaagtactgagtccttatggagctcaggtagacacccaccttggcacttacttttccacattcacatcccagaacgcggagcattgaacccagggaccttacagtgaggccttgcaccagaagactttttgtttgtttttgatacagggtcttattctgttgctcaggctggagtgcaatggcgcgaacacggctcactgcagtctcgatctcgctggactcaggtgatcctcccacctcggggcgccgtgaggggtctgcgctgcgtccagctagtttattttctattttttttgtagagaggctggtctcgaactcctgggctcaaccgatcctccagccttggcctcccaaagtgttggattaccggcttgagcccggcgcccggct

SEQ ID NO: 23583 - DNA, 1485 bp, Artificial sequence
  DNA replication origin
caaaatgcaggagaaagatcctgagggaaccatggagtcaatggaccaatggaagaatgccgtgggctgcgtcaagccaatagggtcgcgcggcgaggggcggggccggcgggagcagggcggggcctgagcactaggcggcggcggctggcgtggggctgcttagatgcgccacggtttcggtagcgacggtatctctagccgggcctgagctgtgctagcacctcccccaggagaccgttgcagtcggccagcccccttctccacggtgagaaactcggggggccagggggtgtcctcgctgccttatttcgccccactccggacttagccctccgcgtagcccgcgcttcctgagaagtggggtggggggcgtcgtcccgtggtggcgccggccggggtgggggcagttagtgcctggggggcgcggcccaactcaaccccttaccccaggccttgcccactaggtaaccatgtgcgaccgaaaggccgtgatcaaaaatgcggacatgtcggaagagatgcaacaggactcggtggagtgcgctactcaggcgctggagaaatacaacatagagaaggacattgcggctcatatcaagaaggtgaggatgggcgcgggggccgatacgcagccgggagcagggggttccttccccccgatcctgctttcctaagggcgcctgacaggtcccgggaatactgctggcggcttggggcgtagaagcttccagaaaggacgcagatgcattttgcgctcctgtggagaagaccagacccccggcgtccgaagtttttttttttttttttttaattacccagctccgcggggggaaagcgccacctagcaacggtatctaagatcagggagcagcggttcccccttctgtgtggttcctgcgccgaggatccatctgggtgttccggaggggggagctgcgtgggtgtttccagccgggccgggaggagatcttgccagccttccagtggggagttgagggaaggtggtgggtggtggcggggctgggggctggggtaggggcttggtaaatggcagtctagaaagccggcaggactgccaacttctcgagcagtgtttgctggaagggaagaaagctggcagcctaagccgtgggagggttccagtcgagaatgggaagatgaaagacttcagatggaacagaaataaatgccttttttgacaaacgcagcagtgcgtgcctctagcttgcaagagcgttactccccttcatagctttaaaaggttttcgcactgcgtgcagttagagtagctaaatcttgtgtgacgctccacaaacacttgtaagaattttgcagagaaagataaccgttgccacccaatgccccccacaggcattctactccccagtacctcttagggtgggagaaatggtgaagagttgttcctacaacttgctaacctagtggacagggtagtagattagcatcatccggatagatgtg

SEQ ID NO: 23584 - DNA, 1420 bp, Artificial sequence
  DNA replication origin
gagccgggtagccggcggctaggcagccccgggtcccgggcagggccgtggcggggagcccggctgcccccgctcgccgccgccgccgccgccttcagcagcgacgtcttggactcgcttttggcgatgtgcgagctcatcgcggcggggcccgcgctcgcatggcccggcgggggcggcgcggtgcggcgcggcgcggggcccccggcgggcagagaacggggctcccggcgggagccaagcccgaggacgcgctggaggcgggcgccgtcccccggccgcttaaatgcggccccgtcgccgccgcccatgtgacagcgcagcctctacgcccggagcccggagctcccggcggctggcggtgcagatctgggggcgctgccggctgtccccggagagcccacccccggctccctggcggcccaggtaccgccgcgccccgccccttgccccgccccgccctgggggagccccgcttccgggcggcccctggcggcgaaggggacgctgcaacgcggagcgggagcacgaggagggaaggggcttggcaatgggccccaaagaggccgagaccccgggagtgccggcagcgctctttatcacgcctggaggctcctgcagagccccggaaccgcccgaacctccagaaatgcaggcagggtgcactccccagggggtacaactttggcaatgaggactacagaggtccggggagaaccggagacccgaggagcatgaaggcactctgtgacatcactgcctacaaacgcaggggccggaatgcagtgacaggacactgctgggaggaaagtctcccagcgcctccgtgtggggctgcctccactcccaataccgtgcggggggactaggacgaccctggtaagtcagccacaggatatcagttctcagaatagaagagaagccaggtctggcagcacctgatgatggtaagtctcaggtaggacccatttgctccccctccagctcttgtcccctctttcaccttcctgcctttctagatgctacagaaattcctgctctcggtgggcagccagggagcgtcccaggccttatctgaatctcaaatcccagctctgccacctaccatctgggtaacttgggcaggtgtcatcaacctctctgagccttgttctcctcttctgtaaaatgcagatgataagcataactaatttcttggtaacagcagacgatactatgcacacaaaaggcctagcccagtgctcggacaggggaccatccagttaagccagttcccttccccctgcacatcgtgaggccccatctaccattcttctttagtatccggtgcttgagctttgcggggggctggaggggttcctcccaggctctccctgttctggtccctggccccaatgccatccacagtcttgtcaccgct

SEQ ID NO: 23585 - DNA, 1097 bp, Artificial sequence
  DNA replication origin
gcgacgccgcagtcgtccggggaccccagttcgcggaggcccctgtgccggccggcgccgcgagaggagggcgcgcgggggagccagcgtgtgctcccccaggcgcactgcaggccccgggaggcgctgccggccgcggcgtcccgaccttcgccgtcgtcgccgctgccgccggcccgcgggcgggatggggaggaacggggactgtccccggcgctcggcctccggggctctctgcgagcccggggccgcggggactccgttccagccgccgcgtccgaggcggacccgttcctccaccggctgcgccccatgctcagctccgcctttggccaggtaagggccgcgcctcccgtcagcgctcccgggaaaggcgctcgggaccctgccggccgcggttgcgcgtccacagcctcctcccgcggcccgtggtcccccacggatcacgcctcggctcacctcgtcctccccgggccggcgcccttgccggcactcctcctccccgtgcctgattcagcaccccgtgcgctgtccacgctccgggcctcttggggcaaggccctccccgctagcctccctcatacccgccagaacccgccagtcctggaagagagcgacctctacgaccgtcctggagatttgcgggggtcaaggaggggcgctccgagcaggtggcgccaaacccactcctctggcctctggccagtaccgccagggagggactcaggagagcaagcggtttggagtctgggggtcaagagaggggacctcagagaacacagaattacttgagggcgagggacactggccactgcctatcatgtccctgaaggcctgagaaaagttaggagatccaaaaatatgaggaaagagaagaggtgtctgggtaggcatggaggggcatgcagagctgtggctcaaactggaactttggggtggtttaaggaggctgtcactctagggatgccattggaagggtgagaaaggccacaaagaggtcatcagtggttccctcaggcctttccctcaagagtcccaggcacctgggagcctgccctttaaaagcagctccgtagtcacaatataggtctacagtt

SEQ ID NO: 23586 - DNA, 1195 bp, Artificial sequence
  DNA replication origin
tgcctgcgctgcctccgtcatgctcccctcggggccatctcctggtttccttcgggtcagagaaattgcacacagagcagaaggatctgatctgactgttggctcatctgcactgccggcccccgagcctcgtcccatttcagtgacaaggcaagtgtgaaaaatggagcatgatggaggcgtcaccagacctcccaggctctcgactggagccgcagctctcaatgcagctggaattgccaggggcagtgagtgcttgtccagctcactgctctttggaaggggcattcatctccctgagcgcttgtgtgtgcatgcatgtgtgtgtgtgtttgtgcgcgcgtgtgtgtgtgcatgcacgtttgtgtgtgtgtgtgtgcgcgcgcgcacacacacaaggctgggagctgtgcggcaggcaccctggcttcgggaacccaaactagccagcttccctttctgggcctgctggcctaattcccagccgcagctgccattctgggcccccctccctgaggccatctccctgcagatttggcagcggggaaaggaggggccgagagaaggggagagaaccagagacaggactgagcgctaatctgatgtagatgatccggcagccttctccagcttggttcccctctgccatcagctctccaggtgactttccctgtgccctgcactctccccttctgctttcatctccttaagaaagtgcccagaaagttaaacccacacacaaacacacacacaatccacccaaaaaaaaaaaaaatcggagagcaggagcaggcagacgagtaagagagcacgcgcgcaagagagggctcacatccgtcctggaggaagaacggcacagacggagggaggctggggttggcagagactgggacggaagtccctcagtcccccaggagcctccttcatggacccggggatcccaagaggggctgcctcaacttaggatgggcaactgtgtcaagtatccactgagaaatctctcaaggaaggtatgtttttggagtttccaagatctggggctggggattgggggtatctcaccatctgtctcagaggttgggcacagaaagggtggctggagcttgctatccttcccaggggttctgtccagggctgcctccctgcttctaccccaaacaccctcctattgccgttttctgtgtcccaggctttg

SEQ ID NO: 23587 - DNA, 1316 bp, Artificial sequence
  DNA replication origin
ttgtgattgtttctcctggactagactgccttgaggataaaataaacatgagcgcctggtggcagtgcaatacctgagtggtacgtgggctctgcaggccaactgcctggagggaggaagccccatcaccactacttgtgtttctgttccccatttgcaccacacccctcctttgagggtaactgaagcctctgagttgtcaagatccttaaaagatgacagtttgagagagagaatagtagaattagaaaccccaagaggccaggtgtggtggctcacacctgtaatcccagcactttgggaggccgcggaccccgaggtcaggagatcgagatcatcctggccaacatggtgaaactcggtctctaataaaaataaaaaaaactagttgggtgtggtggcgcgcgcctgtagtcccagctactcaggaggctgaggcagcagaatcgcctaaacccgggaggtggaggttgccatgagccgagattgcaccactgcactccagcctggcgacagagcaagactctgtctccaaaaaagacagaaaaaaaaaaaaaaagaaacaccttggacaggaaacatgtctatgggaggaagtaaggccagatgcttgcaaaataggggggaaagtgagaccgggagggaacacttccaaaagttacccccatggggtctgaatttggggcctgggaaggaatttgggtgcatttagatccaccactgatagtctctattttggcaccctgttttgttcccgtatagcacttaccactgttctaactaaacaattaatttcattatgggttgtgcaaagtctatgattctcatgcgggaccccaggtgtgttttttgttcatgtagcacaaagctcattgcctaagtagtaggtaggattggtagataaaatacaagaagtccagttgtttaaattttaataaacaatgcatttttttttttagtataagtgggtcccatttgcttatctgaaattcaaatataactgggcttctcctattttatctgccaaatctgacaaccctggtagcagggacttgatacatttttttccttttagggagaatttctaaatcgaccagtatttatggaaaatgcataagcgtttttttgttttttttgtttttgccttgactctgccctacacttgcggtgcgaccctttggcaaaattcagtccctttctatgcctcagtttccccatcggaaaaatgggagtttgaacagcgaccgaagcgcagggatcgccagtgtgggagagcgccaggtgaactgtgaaggagcagggagggagttcgggcc

SEQ ID NO: 23588 - DNA, 892 bp, Artificial sequence
  DNA replication origin
gagagcgacatgtccccggcggctcaggcggagcggcccgtggcgctgtttttctgagtccggggtggcctggcagccggccgaggacgagggtcggcgggggctgcccccgtggtggtggccgccatgctgggagcctgggcggttgagggaaccgctgtggcgctcctgcgactgctgctgctgctgctgccgccggcgatccggggacccgggctcggcgtggccggcgtggccggcgcggcgggggccgggctgcccgagagcgtcatttgggcggtcaacgcgggtggagaggcgcatgtggacgtgcacgggatccacttccgcaaggaccctttggaaggccgggtgggccgaggtgagagtccccctgccgagccgcgggatccagggcctgctgtgctgggcgcagccggccgggggctgcgggccccgagcccctttcgaccctggggccgcgtctctggagcgaagtttctctctgcagcttcttcgggggcccgctctgagctcagggcctggcactggctccaaggtacctagagtcatacaggcagagagttggccagaagttagttatatttggatttctcatcctgcattttctcaacccctcactcccatccaagctgggagagaaatgacgaaggcggccttttgctacctccaggcctcgcgggttgtaggtcatgggtgcccctgcttctcctgtcgagacagttcttgggagattctcgtcgacccaggaatcggccgctttccttgccccttctgcaggagcggggcttgattcttagccagaataggaaggaatcttcgaagagaatgggccaggaaagtttgattgtagcctcctcccccgccctcttttcgagcgaagaatatgtgt

SEQ ID NO: 23589 - DNA, 980 bp, Artificial sequence
  DNA replication origin
gcgtctctggagcgaagtttctctctgcagcttcttcgggggcccgctctgagctcagggcctggcactggctccaaggtacctagagtcatacaggcagagagttggccagaagttagttatatttggatttctcatcctgcattttctcaacccctcactcccatccaagctgggagagaaatgacgaaggcggccttttgctacctccaggcctcgcgggttgtaggtcatgggtgcccctgcttctcctgtcgagacagttcttgggagattctcgtcgacccaggaatcggccgctttccttgccccttctgcaggagcggggcttgattcttagccagaataggaaggaatcttcgaagagaatgggccaggaaagtttgattgtagcctcctcccccgccctcttttcgagcgaagaatatgtgtgcttaaaagtagaatcggcaggccgcccccagagggtggttctatcgaagccatcctgcacgtgaggctggtggctgtgtgtgaactgggtcaaccagtgtaagaatccgaatggtctatcagagaatgcttacaacctcccctaggtgatcctgagagttctaattccagcttagggggaaaatgattgtgacttaacttgctgggcaacagtggtttttaacggagctgctcccttcccaaagttagtgtgtgtcagaattgccagggcagctggttaaaaatgcagattcctagtccccactcgaaattgattatagtagattgagcttttttgctgggatccaggtttctgcaccaggggcttgtgatgtaggttgccccgagaccaccgttttggaagatcagctttataatctttgtttcttctgttggagggattggaaaacaggtttcagaaggaagttctttgctaggagattgatactgtatgctgggttcagaggctaccaaattggcagtatgccacctccagacaaccaggagac

SEQ ID NO: 23590 - DNA, 1237 bp, Artificial sequence
  DNA replication origin
gcgggaagcgcggcccggccggccgagggggtctggcggggacccccgcgctggtcaagtggccgggtccgctgaaggctccgggagccggggcacggcgcgaggggagggcgcggcccgcgcggcactcactctcggtgacccggctgaggcgcaggacgtgctcgggccggatggtgtccagcgccagcagctcctgctccgtgaccgctgccccgacgccgtcgtcggccgcgtggtggggcgcctgccgccgcgccttcaggcggttcaggacgccgccgcccgccttcttcttctcctccttgccagccaccagccccccgggcccagccgccgacgccgcggccgcagccttcgggttagacccgctcatcgctccgccgccaagatggccgccgcctccacagcgcggtaactatggagagcgggggcggggcccggggcccggcggggaaggggcggggagggggcggggcgggggcgggggcgggcgcccggggggctgtggaattccctttcgcacagggtggaccaaggcccactctccccaaacttccatccccaaataactagagctgccatcagcaacctgaggtgcacatgagcagccctgggctgactcctatagcaattcagcggacgacaccatggcagccttcgatccattcagggaatgctgctgctgccacagggttaggagaccgcaggccaggagtgatgggcaggccaagataggcctaactgggtgactgcacactcctgcggggcccggggggcggtgcttcggctactgccccaactttggtcctgccaggtggagggcctaggggtggctggagcttcagcaaccccactccccatcagacccccaagatcctccacgatgtttaaatacatatcttacggtcaaatgaatttacgtcatataaactttcctcctcctcatcctcctcctggtctgaaagagcacacagaatcttccgtgcaccatctcggcattctcaatccaagagttctgtcaccagtcccaacagcacaatggcaactaattcccagtaatcacaccaagaagaagaatggccagtgtttactgcgcacttgctatatggcaggacacttgctatagggcaggctcctcacctcacaacaaccctgtgaggtattactgtctccattttacagatcaggaagctcaagttcagagaagtcaggtaacatgtccaaagtccctcaa

SEQ ID NO: 23591 - DNA, 957 bp, Artificial sequence
  DNA replication origin
tgagatgtggggagcgcctctgccccactgccccgtctgggatgtgaggagcgcctctgcccggccgcgaccccgtctgggaactgaggagtgtctctgcccgaccgccaccccgtctgggaggtgaggagtgtctctgcctgcccgccccgagaagtgaggagcccctccgcccggcagccaccccatctgagaagtgaggagcccctctgcctggcagccaccccgtctgagaagtgaggagcccctccgcccagcagacaccccgtctgggaagtgaggagcgtctccgcccggcagccaccccgtccggcagccaccccgtccgggagggaggttgggggcagcccccgcccggccagccgccccgtccgggagggaggtgggggtcagcccccgcccggccagccgccccgtccgggaggtgaggggcgcctctgcccggccgcccgtactgggaagtgaggagcccctctgcccggccaccaccccgtctgggaggtgtacccaacagctcattgagaacaggccatgatgacgatggcagttttgtggaatagaaaagggggaaaggtggggaaaagattgagaaatcggatggttgctgtgtctgtgtagaaagaagtagacatgggagacttcatttcgttctgtactaagaaaaattcttctgccttgggatgctgttgatctatgaccttacccccaaccctgtgctctctgaaacatgtgctgtatccactcagggttaaatggattaagggcggtgcaagatgtgctttgttaaacagatgcttgaaggcagcatgctccttaagagtcatcaccactccctaatctcaagtacccagggacacaaacactgcggaaggccgcagggtcctctgcctaggaaaaccagagacctttgttcacttgtttatctgctgaccttccctccactattgtcctatgacc

SEQ ID NO: 23592 - DNA, 1308 bp, Artificial sequence
  DNA replication origin
atccatttaaccctgagtggatacagcacatgtttcagagagcacagggttgggggtaaggtcatagatcaacagcatcccaaggcagaagaatttttcttagtacagaacgaaatgaagtctcccatgtctacttctttctacacagacacagcaaccatccgatttctcaatcttttccccacctttcccccttttctattccacaaaactgccatcgtcatcatggcctgttctcaatgagctgttgggtacacctcccagacggggtggtggccgggcagaggggctcctcacttcccagtacgggcggccgggcagaggcgcccctcacctcccggacggggcggctggccgggcgggggctgacccccacctccctcccggacggggcggctggccgggcgggggctgcccccaacctccctcccggacggggtggctgccggacggggtggctgccgggcggagacgctcctcacttcccagacggggtgtctgctgggcggaggggctcctcacttctcagacggggtggctgccaggcagaggggctcctcacttctcagatggggtggctgccgggcggaggggctcctcacttctcggggcgggcaggcagagacactcctcacctcccagacggggtggcggtcgggcagagacactcctcagttcccagacggggtcgcggccgggcagaggcgctcctcacatcccagacggggcagtggggcagaggcgctccccacatctcagacgatgggcggccgggcagagacgctcctcacttcctagatgggatggcggccgggaagaggcgctcctcacttcccagactgggcagccgggcagaggggctcctcacatcccagacgatgggcggccaggcagagacgctcctcatttcccagacggggtggcggccgggcagagactgcaatctcggcactttgggaggccaaggcaggcggctgggaggtggaggttgtagcgagctgagatcaagccactgcactccagcctgggcaacattgagcactgagtgaacgagactccgtctgcaatcccggcacctcgggaggccaaggctggcagatcactcctggttaggagctggagaccagcctggccaacacagcgaaaccccgtctccaccaaaaaaatacgaaaaccagtcaggcgtggcggcgcgcgcctgcaatcgcaggcactcggcaggctgaggcaggagaatcaggcagggaggttgcagtgagcagagatggcggcagtacagtccagcttcggctcggcatcagagggaga

SEQ ID NO: 23593 - DNA, 1070 bp, Artificial sequence
  DNA replication origin
ggctccacaggcctcccctgctgagggagtgggggagcaggggatggaggggtcccctcaagggaaggctctgactgtacccccatgtttaggaggcagccatggccaagctggccgcctcggaggccgcgaccgccatcagccaccaggtgagtgtccacagtgagctctgagggggccagctgccccttctccagctttccccacgccggggtcttctccctcctgagccactgttctcatctcaggccatccagatcctgggcggcatgggctacgtgacagagatgccggcagagcggcactaccgcgacgcccgcatcactgagatctacgagggcaccagcgaaatccagcggctggtgatcgccgggcatctgctcaggagctaccggagctgagcccgcggcggactgccccaggactgcgggaaggcgcgggagccaggggcctccaccccaaccccggctcagagactgggcggcccggcgggggctccctggggaccccagatgggctcagtgctgccacccagatcagatcacatgggaatgaggccctccgaccattggcagctccgcctctgggcctttccgcctcctcaccactgtgcctcaagttcctcatctaagtggccctggcctcctgggggcggggttgtgggggggctgagcgacactcagggacacctcagttgtcctcccgcgggccctggtgccctggcatgaaggcccagtgcgacaggcccttggtggggtctgtcttttccttgaggtcagaggtcaggagcagggctggggtcaggatgacgaggcctggggtcctggtgttgggcaggtggtggggctgggccatggagctggcccagaggcccctcagccctttgtaaagtctgatgaaggcaggggtggtgattcatgctgtgtgactgactgtgggtaataaacacacctgtcccccagtctgtgtcctcgccctctcctgggtgctccggggagggatggtggtctctgcacagagtcctgctctctgacagtctcaccctgtgagtgttgggggtcttggggagg

SEQ ID NO: 23594 - DNA, 856 bp, Artificial sequence
  DNA replication origin
acacctgtcccccagtctgtgtcctcgccctctcctgggtgctccggggagggatggtggtctctgcacagagtcctgctctctgacagtctcaccctgtgagtgttgggggtcttggggaggggcctggccacctgggaggttcctgagttccggcagaggccagattggccaaggaggcagttcaggaataggaactgggtcctgcaggcctcagggagtggcccctggggagggagggtgggccaggcagggccagtgggctagaaggggttctctacgcaggaccagcctccaggcaggaggaaggaaggccccagattgccagagtcggggagcaaagctgtggaggcctcgagccccaggtgggagaacacagaacctcgagaagcagccattgtgctcactagcgcgctcgggggcggccctggccagccagtgcgggggcttgccctggtcctggtgcctgcagggctttctctgggcaaaggtgcccctgaagccaaggtccaagctcttaaccctctgggccagtgtcgatctcagcagctggaagagaaaacagtgagcaaagaaagatttcaaaggaggtggggacagccctccgccgggcaggcagggcagagagtcaaactggcattgctgggaggtctctggagggaagcgggagggagacggtgactttaggagctgtcatcaaaggggcgcccagggaccctgagcccctgttggggatggatttttttttagagacagaatctcactgtcacccaggcaggagtgcagtggcacaaccacagcttatcagaacctcaacctcccaggctcaagtgatcctcccgtctcggcctcccag

SEQ ID NO: 23595 - DNA, 982 bp, Artificial sequence
  DNA replication origin
agattaaaatgacagtgtaaaggagaaaatggagagcctctgcaaaaaggataaggaactacagaactacaggggaacagatggcttaaagagatgggagaagagaagcaattcatgttttgtttttattaagcacacacctattagtggaaatgataaactccacagtaggaagggaaagctgtattagagatacaagtggctgagacatgaattcccaaggtatcctaacctctgcttcacataaacagtggcataaacagtgagcatgcaaagtggaatatagaaatagaattttggagaaatttattttagaggagtttgaatgggacctgattaaaggacttatgaagagtggacatttctaccttttgtaaaaggaaacatgcttaatttggggtgagtgctggaggacccattgtattagggttctccagagaaatagaaccaatagggtatatatgatgtgtatgtaagaagagatttatataggaattggctcgggcagagatggaggctgtgaagcaccaccatctgcaagctaaagaaccaggaaagccagtggtgaaactgagtccaagtccaaaggcctgagagccaggagagccgatggtgtaactcctgatctgagtctgaaggtccaggaatcaagagtgggaatgtctaaggaccgaagttgaatgtttcacctcaaggagagagagagagagagagaatttgcccttcctccgcctttttgttctgttcaggcccttggtggattagatgatgccctcccacactggggaggatcatctgctgaactcagttcccacttcagtgctgatcccctccagaaacactctcacacacagaaataggcagcaaacagaaataatgtataaccacgtagctgggcatcctttagctcagtcaaattgatacataaaattaaccatcacatccatcaagctacagtaagcagaactaagtgatggctggg

SEQ ID NO: 23596 - DNA, 1602 bp, Artificial sequence
  DNA replication origin
ccttgttctccgcgccgccgccgccgccatgttgggtttggagctgcagcggagccgccgccgccgccgcgggtgagggaggccgagagcggagcccgccccgccccggggcccagggagcggggccgcttcggagcccggcctctccccgccagccgccttcccggcccgccgtgcagccagcgagccagcgagcgagcaagcaagcaagcaccggaccccggccgcgccttcagctacggcccgagcgagcccgccgccgccgggcccggccacagcctgcagcggagcccacgagaggcagcgccatggcggagcagacctactcgtggtgagtgcggggctccgggaggccgggaggcggcaagggtgggggtcggggcgccggcgcggcccgccgaggggaagaggaggaagaacaggtgcgtgtcgtggggggggggcgcgggttggggtgcacgcccccctcttccccaccggagggggcggctggcgcgcacggagggcggtgagtggccggggacctggcgtccgagaaggggaatggaggaggaggcagcggcggatgtcatctggctatgggcggagcaggtgatggagaaggggagcatgaccccgggggtgggaatcccacggatgggaagttgaatccgacaggcaccccggaactgactcgtgggggtgtttcctgggcaggaggactcgaaggggtggagagaggcaggccagggcaaaggtgggccgctgggctgagaggaagctctagtgagaacaggtgatagaggcagaacttctaagttgggagagtggagcggccgccgcttggctctgggacagggagcgcagggagagttggtgaggtgggcagaggcccgggagtgaggggaggaaaactgcgggggtagagtccacgaaccttggaggggagtcactggtgaagaggttggaagaggagcctgaagaacctgtttccttttccttctggaaaaggaattcgttggtgacagtggggcatgggcagagtctttgtaagggttggtactattattttcagaggaatggcgcccagggccaagtgtggaggtggaggacctgcaagttaagttcatttctgtggggcttttaaagttagtaagtagctcgttaagggccgagaagcgagaagctactgtgtagtttatggggtgacaacctacatatccggagaagggagtgccagggtttgggggaaggaacatgaggggtctccctttagcatgtagaggtgggatatttgcaggacgggttgaaggaatgatggcagtatccatgaagagtggaaatcgggtagtgagaaggaagtcatagctggagagtgaggaagcaagaaatggcatgatcgtaggagtgggggacctgattgcaatttagagaaatggtttgaagatggtttactcttgaagcaaatgtggtttgggacagaactgtagacattcccttcttagaaaagagcataatagaatgggacgagcatgccgtgtggagttggaagacctatttcggaggtccggtttgccaccaacttgctttgttgatacgacatggtagtgagttcttcggtcc

SEQ ID NO: 23597 - DNA, 1479 bp, Artificial sequence
  DNA replication origin
aggcgcggccggggtccggtgcttgcttgcttgctcgctcgctggctcgctggctgcacggcgggccgggaaggcggctggcggggagaggccgggctccgaagcggccccgctccctgggccccggggcggggcgggctccgctctcggcctccctcacccgcggcggcggcggcggctccgctgcagctccaaacccaacatggcggcggcggcggcgcggagaacaagggggccctggggcgggcgaacggcaagacgggcccgcgctcactgcgcgcggggccgcgggagcgccgcgctcgggcggcggcggcggcggccgggggacatggccggcgggcggaggcggcggcgactgaggggggcgctaggcgatgaggcgaggccactcgatcacacccgccgaggggaggaggggcgggggcgggggcgagccttggccccgcgcgggtcacgtgcccaaaacacgctcacgtgatgcgcgccccgcccctcgagccgggcccatgcgcagagacgtcggctcctgggttctaggcggctgctgctcgcacagccagagcagttgggccgcctcccgctgcctggtgccgcccccctccccacgcggagatgtcgcctcgggtaccctcttccgcccctctccgaggggctgctgcaccagccaatcgggaaccccgatgcgcgtctgttggctgccactcagctgtcaaccgtcagtcaacagtctgctggccacgggccccccaactgtcagtcaacctgtcagtcaacaggcagagggctgcattccttcgttcgtatgttccttggttcattcattcaggtagcaaatattccaggcagccaacctttattgcgcccaggcccggcaccaagtcgaataccccacgcttgccttcacagaatcaatcaacagatatttgttgggtgccaaccatgtgtcaactcactctgccttcctagagcttacattctaaaggaagagacatagtccaagcccacaaataagataatttcagatgctgctaagttttacaaaaacacattttgtaacacaaggtgaggggacagagagtgagcagaggtgtgggttactttagatagggtggtcaaggaaggcctcgcttaggaggtgacatttgagctgatattgaatgatgacagagagctggccttgcaaagatccacaggaaaagagttcctggcagagggaacagcaagggcagaaggctcaggaaaccgtccatttggaggtctggaaaccggcacagaaataaacacggtagagctagaccagagaccaacaaagtgaatctggagcttagatggagagagaagagagagattaattgaggccccaggtactgcggaatgcttccccaggagtggatgaggccgtctgaaagggtgagaggcttatcaaagaaaagtcattcttttggccgggcgcggtggctcacgcctgtagtccca

SEQ ID NO: 23598 - DNA, 1288 bp, Artificial sequence
  DNA replication origin
tggtcgatgggactgggcgccgtggagcagggggcggtggtcatcggggaggctccgactgcacaggagcccacggaggcggtggaggggggtgcgggtgggggctcaggcatggcgggctgcaggtcccaagctctaccccgcaggaaggcagctaaggcccggcgagaaatagagcacagcgcccgtggcccggcactgctgggggacccagtacaccctccgcagctgctggcccgggtgctaagcccctcattgcccggggtggcagggccggccggctgctccgagtgtggggcccgccaagcccacgcccacccggaactccagctggcccacaagtgccaacccgcacagccccagttgccgctcccgcctctccctccacacctccctgcaagctgagggagctggctccagccttggccagcccagaaaggggctcccacagtgcagcggcgggctgaagggctcctcaagtgtggccaaagtgggagcccaggcagaggaggcgccgagagcgagggagggctgtgagggctgccagcacgctgtcacctctcattgggattacaggcttgagccaccgtgcctggccctccactttatacttcaaacagcaatgtataggtgttccagctgccacacatccttgtcagcacttgttattgtcagtccttttaattttagccattctaataggtgtggttttgtagcatgtacattttcagtgcagagtaagacttctttaaaacatttcttcttctctcacaatagtatgcagagaggaagtggtatgcccaggtctcaaattatctgacaacttttgtctcaagacacagcctattgctgggattctgcctgataaaggggagatatggagctgactaggcaagaattgtcttcccttagaaggtgtggaaggaaagagcataaataatcacacctagacgataaaaaaaaattagccaatctaatcctcatattaaccctgagattataaagatccttcaccaaattgtagtcatgaggaaacaggctcagagggaaaatgagttgcccaaggtcacgcggccaaatccaacatttgaatacaggccctctggttctaaaacttgtgctcacttcttagaagatccccaccaggctctagaggtaaccagggcaggtatgcaggttgtctgaaatgtgtcagctgaggaatgggtagaggaattagggccctgtagttaggaagacagaactcccagcagggtgtgaaaatcgtcctcagttatttatttattta

SEQ ID NO: 23599 - DNA, 915 bp, Artificial sequence
  DNA replication origin
gtggcgtgaagtcttccccatcgtcgtccgtctcgtcctcggagccccgagtctcccccagcccattgggcagctcagccagctcccctcgaccgccgccgcaggactcccccttgtccagggggccttctccagccaggaggtagggccccggctcacccagtgcctggatcagtgcctctttgctcagccctgactcgagcagggccgccaggagctccgtctgcagctggctcagtttagaaaccatggctcggctgccacagggccacgcggcccgggtccaccacgctagccgcctcccccaccgcgtgggttgcgtttgcctgccggccggcagacacaaaccaaactccttgcacccactgcccccccaaaaccccactagccaagccctgtgggcacccccaacccccaaccctggccccagcggcccgtgaatcagggcccctgcctgttctgtttacattggagctggggaaattctccaaggttcatatttatccgtgtgcttagcgaagggactgaactttggacttcagccctgcaaagtgcaggcctcatggcagcggagagggacagggagctatggcctgcgatgggagtgggcagaggggagggtgggggaggcgcaggtgaggggccctgagcagctgggatggaaggtgctgggagccagggaggccatcaggagagcagcgttgggtcccacccccgaaagaaccttgtaggggcatcatgctgagacaggagagccaaaaatgcttgctgcttacgagagcggcagcagcagggagctctagacagctgggctagctcttctcaagggcagaggatgctcacggccattttggggcccttccatccattttgggacccttccaccccactcccggcctgacaccaggcctccct

SEQ ID NO: 23600 - DNA, 1442 bp, Artificial sequence
  DNA replication origin
gtgggggagaaggaaggatggcctgggggctacaggggccacccctccccagcggctccctgacctccaccctacagcgcctgcttgaggaggttcactacttcctgggcgctgtgctgaggtttcacaggaataatttcccttcatggtgaggagtcctgggcagaagctattggtgactctgcttcacaaatggggaaactggggcttagagccgggaaggagctagactaagttcaccaaactgaggccccaaacctactctgttcggtgctctcaattgctatgaccggggaccagaggcctgcagggggtggccagggagtcagagagagaccgagccccaaagatgctccaaaggggcccatctcttttctgtccaaggtcctgatcccagctggggtgggggagggctggtggattcctgctttcccagaggcctcagggagcctcccgagggcctggacagggggcaggggagcagtcagggccccctgacttggcaggaagaggagggcaaaggactccagagctgcaggggaggggcaaagagtcaggcatcccagacccagggcgaaggcaacctgacggggtggggctgggcctgacctgcccagggccccagatgggactgggggctttggggtgagggtgggggcaggggatgctttcttacctggctgagtgagctctctcggtcagcagccccctttggtgggatggtggggttggggaggcttgatccacagcatttgaaggggaagcagaggtcaaagtgcttcctagggaccagcagagacctggaagctgaggcagagagtgtagagagaggccattgggggagatggacagagaagctgggagaagcagaacggaggagccaggggggcgggggctcagacccagctgggagaaggggcacgggagagaatgaggcgccccaagcttgcaaggaggctggagtgcttcccgcctgccccgattgggttttctttaatgctaacagcatgctatttactttccatttaaatttgagatgttgctataaattatcaaccagctccttgttcctgcagagtttataactaactacctgggttacttattgttcaggtaacaaaagggatcggaaaacgccctgagtgaaaaaagtggggcctccagcgtcagggtcaggaaaggagccagggagagaggggcgggggacccctattgaaggcctgggccattggggaggttgaggctgggaagacggtacagaggcagaatgtctagtagaagctgtttcccgggagaagtcagtgtctgggaagaagccggggtgggtcctgggtcccaggcctccctggggtgccccatgttggtggccacagcaggaacctgagctctttcttcagatctcccccttagctccctgagtgaccttgggaaagtctgttcct

SEQ ID NO: 23601 - DNA, 997 bp, Artificial sequence
  DNA replication origin
aattttccaaaagatgccagaaatctggatttctatgtgaaaattcctgattttgaaatgttggcaacaaattcaaagaatgttcaaccctgagccaagccaaaccaaacacatgcaagagtcgcttctggctcacagacctggtccttatcgttactctccactgcctctaacaattacttcatcattttcctcagtccagtccctgagatgttcttgtaaggtgggccccatcttcctggggtcgcctgtgcctcttgggcttcatggaagcccaccccacccctccacgcctgccagtgcttcctcacagcagccctaggcctgctgcatgcacagccccacagtgacggacagcaacagaaggggtgggaccaacatggaagggggcagggacagtaagggagggggtggagccagggcctctcacctgtggggctggcgctgagccggtgggccggctgcaggtgctggatgctggcagggtcctggctggggacgtggagggtggtggcctgagatgccggcgtgtgaagcccggactcactggaggcctcagtgtctgaggtgaagacctgggggagcagagcagcctcctgagcccgggggatgtgggggtgaggggctctgtcacaggccaagggagggccagcaggcctggaccttacctgcttggtgggcgtgaggctggccagggcgctcaggttggtggtgtcggtgatgagcatagtctgcgggagcaggcccgtgtgggtgtactgggccacctcgggcttgtggctgtagagggctggccgcaggggagagaggggcagacgtggcagacgtgcctgacagccctagtcccaggcctcaagactggggaaaggggggcatggggcctgctgaacagccagactgggcagcagttggagatccagggctgattttcaaaactggaggctccagataaagggacagaccctctccccattacagggaactgctcagctgcgct

SEQ ID NO: 23602 - DNA, 1409 bp, Artificial sequence
  DNA replication origin
cggatggggtggctggccgggcagaggggctcctcacttcccagtaggggcggccgggcagaggtgcccctcacctcccggacggggcggctggccgggcggggggctgaccccccccacttccctcccggacggggcggctggccgggcggggggctgacccccccccacctccttcccggacggggcggctggctgggcagaggggctcctcacttcccagtaggggcggccgggcagaggcgcccctcacctcccggatggggtggctggccaggcggggggctgaccccccccacctccctcccggacggggtggctggccgggcggggggctgaccccccacctccctcccggatggggtggctggccgggcagaggggctcctcacttcccagtaggggcggccgggcagaggcgcccctcacctcccagacggggtggctggccgggtggggggctgacccccccacctccctcccggacggggtggctgctgggcggagacccttctcacttcccagacggggtggctgccaggcggaggggctcctcacttctcagacggggtggctgctgggcggaggggctcctcacttctcaggcgggcggttgccaggcggagggtctcctcacttctcagacggggcggccgggcagagacgctcctcacctcccggatggggtcgcggccgggtagaggcgctcctcacatcccagatggggcggcggggcagaggcgctccccacatctcagacgatgggcggccgggcagagacgctcctcacatcccagacggggcggcggggcagaggcgctccccacatctcagacgatgggcgcccgggcagagacgctcctcacttcctagatgggatggcggccgggaagaggcgctcctcacttcctagatgggatggcggccgggcagagacgctcctcactttccagacggggtggcggccgggcagaggctgcaatctcggcactttgggaggccaaggcaggcggctgggaggtggaggttgtagccagccgagatcacgccactgcactccagcctgggcaccattgagcactgagtgaaccagactccgtctgcaaatcccggcacctcgggaggccgaggctggcggatcactcgcggttaggagctggagaccagcccggccaacacagcgaaaccccgtctccaccaaaaaaatacgaaaaccagtcagtcgtggcagcgcgcgcctgcaatcgcaggcactcggcaggctgaggcaggagaatcaggcagggaggtttcagtgagccgagatggcggcagtacagtccagctttggctcggcatcagggggagaccgtggaaagagagggagagggaggccgtggaaagagagggagagggagagggagagggca

SEQ ID NO: 23603 - DNA, 915 bp, Artificial sequence
  DNA replication origin
gggggggtcagccccccgcccggccagccgccccgtccgggaggtgaggggcacctctgcccggccgcccctactgggaagtgaggagcccctctgcccggccagccaccccatccgtgagggaggtggggggtcagccccccacccggccagccaccccgtccgggagggaggtggggggtcagccccccgcccggccagccaccccatccgggaggtgaggggcgcctctgcccggccgcccctactgggaagtgaggagcccctctgcccagccagctgccccgtccgggaaggaggtgggggggtcagccccccgcccggccagccgccccgtctgggagggaggtgggggggtcagccccccgcccggccagccgccccgtctgggagggaggtggggggggtcagcctcccgcccggccagccgccccgtccgggaggtgaggggcacctctgcccggccgcccctactgggaagtgagtagcccctctgcccggccaccaccccgtctgggaggtgtacccaacaactcattgagaacgggccatgatgacaatggcagttttgtggaatagaaagcggggaaaggtggggagaggattgagaaattggatggttgctgtgtctgtgtagaaaggggtagacatgggagacttttcgttttgctctgtactaagaaaaattcttatcctgttgatctgtgacctttcccccaaccctgtgctctctgaaacatgtgctgtgtccactcagggttaaatggattaagggcggggcaagatgtgctttgttaaacagatgcttgaaggcagcatgctcgttgagagtcatcaccactccctaatctcaagtacccagggacacaaacactgcggaaggccgcagggccctctgcctaggaaaaccagaga

SEQ ID NO: 23604 - DNA, 1358 bp, Artificial sequence
  DNA replication origin
cggcggctggggcccagggaaggtgtcaccgcctcggctcgccgctcccggactcgcccaggtgaccgaggccaggatgagccgccgcacggcgcggacgcgagggcagcacccgccgcgccccccgcgcggccccacgctcacccgatgacgtaggccaggatgagcagttgcacggcgcggttcatgagccccactttgcggctgcggatgagcacgatgcgcggcgtgtcgtactcgaacaggaaggccgccagcgcggcgcagcagcccgccatggccgcgccgcccgctcccagtcccctagtcggtctgggtcccagtccccgctcggagccccgcccagtccgcctggcctgctggcggcgccgtcatcgcggaggagggcccggaaggaggcagcacgggcggtcggggcccggggcccgggggagggcgccacctccccgtcgggaacgatgaccctctagggggcatggaactcgcggggggggagtggcctcgcccttgaggacgaaaggctccttcaaaaggcgggcgaggggccgggggcggtggctcacacctgtcatcccagcacttgcggaggccgaggtgagaggaatcttgagttagagaccagcctggacaacatagcgagacctcgtctctatcaaaaatacaaaaaaaaaaaaaaaaaaaaaaaaaaagcgggcgtagtggcgctcgcctgtagtcccagggaggctgaggtgagaggatcgcttgagcccaggaggtagaggctgccgtgtgagctgtgatcgcgccactgcactccagtctgggagatgaagcgagaccctgcctcaataaaccagaaaccaaaaaacaacaaaaaaggcgagttggggagtaatgaccttctcaggagggccagagagaacaagagaccctttcggggaagatggggtccgcgaagagagagtgacctcccatttgggacagagttcaagtgaggggtaacgagcgacctcccttaggggtactgataggtgccagggatttccgtagaggaccccggggctgtgcggagtagccatcgctcacgagtgcgggctcctaaacttgggcagctgtggttgggggagctggggccgcgctgtccttagcctcttggggaacagcctaaatatcaggtgtcctgtgagccctgggtgagagccacacgccctgtaaaatacccctcctggatttgaagcctggtcgcattctcactccaaatacttccttagttgcagcccaggggagataattctgtggtcatcctttccactgagaaaatgctatcacaactttaggagagaaaatagtgaaagggggggaaacagccaccgttc

SEQ ID NO: 23605 - DNA, 1091 bp, Artificial sequence
  DNA replication origin
tccatcaaaaaaataaaaaagggtctggggatgggagccaaagatttccagatggttccaatgtgcagtttggagaccactgcactaggcaatacgtgtcagcccagcagctgtagacaccagaacaccccaggtaagcctttaaagtggccccaggtggcaaggtaattatcatcttctctctcgcgttgtattcaattgtaacaggtgccagccccgcgtgggggctcacgcctgtaatcccagcattttgggaggctgaggtgggcggatcacctgaggtcagttcaggaccagcctgaaaccccgtctctactaaaaaatacaaaaattggccgggcgtggtggcgggcacttgtaatcccagccactcaggagactgagacaggagaattgcttgaacccgggaggcagaggttgcagtgagccgagatcgtgccattgcactccagcccgggcgacaagagagaaattccgtctcaaaaaaataaaaaaattaaaaaagtaacaggtgccttcaagtacaatggcacattcagcgaggcctgagggcggtagggcatctctagcctaagggggcagcatggggaatgactgactaggctagggcaggtaccacaaaaagccccacaagcccagaaaacaaaggaagcaaactttaaacactcgctacagtctgacctcgctactaccacatagtgacaccgcatagtgatcaaaagaaatgaccaaaagccacccacccagaaggaaccaagcggaaattccaagctttggttttgtcagcaaatcagcaggatgggaagtggagagcgaagattgagacgttcagggcgaagcccctacagccaaggggcactatggggggtcaggcaggagagggtaacagcctagccaggctttgcctttatttattttgtaaacagacgggtctcggactgtctcccaggctcgagttaagtggtgtgatcatagctcactgcagcctcagcctcttgggctcaagcgatcctcccacctcagcctcctgagtagctgggaccccaggcgcgcgccaccaggcccggatgatttttaattttttgcagaga

SEQ ID NO: 23606 - DNA, 1698 bp, Artificial sequence
  DNA replication origin
tttcccgccgccgtggccaatccccgcgctgcccggggcggcgacgcgcccaagccgagccgggcggctcctcccgcccccgccccccgcgcgcccgccgcccgggcggaggagaggagcgcgcggccgcgcagagcaagctgagccgagccgagccgagctgggggcgcagagcgcgggaggcggcggcggcgcggagcccaggtgagctggcggtagccgggcccggggcaagggacgcagccgccgcggccccgggcgcccgctccgtttccctctcgaggcgggggaccgccgccggcatggcacacaaagcccggaggctggcctggggctcccaacacggagggaccccacgtgcgcctccccacgccccgccacgtggagggacacggtccccgacagcccttcccccgcgtcctctgggcgccctgggcctcgggatggcctcctcggctgggccgcgccctgtccgggtggcaggggcggtcctggagtttggaaccggggtcaccgggggccgggtccgtcagggttcgtggaggcggcctaggcccagcccctcgcgtttgacaggtggggaaatctggagcgttccggggaagagaggaccagcggacttggagcacccccaccccgcagcctgcctgtctcggggcaaacccaggccctggtggcttggacaccaggtggcaggaccctaggccagcagttgtggggacctaggggacctttggctgtcttcggtctgccctttgaccacccccaccgcacctcttctctcagccggagcctcacaggcttggtccttctgacctaaattcacctcggggttgcagtatgctgtgaatgcggagaggcgtccgcctgactctcagggacactggacccagcccctctcagcattggggctctgtgcctggggtgccacccgacccagccttgagcttttcctggctttcccccagcccctgcactgcctagctggggaagtgggtgctttcacagctctgccagcctgccctcctggccactctcacttagtgctggacaggatgcagctcagcccctccgatctccccgagaaggctgagctttggggagggcgtctcagtgctatcagcaagagagggatacctggcctccggatgggacctgcagcgtccatctccctacaggctacttttaccttccccagcctggtgtttggagtctccacgcaggggatagaaacttcaggtgccctagagctgtgctgccatttaccactccccctcccctagctctgcccccagaggagagagaagaggatggctttatgtccccataagctcctttgttccttggaggaggcgggggctgcaacaaggggagggctttgggggagttagccaccctcttccctaatcaccccacaaaaacatgcagtttcagaataaatagtgtgcatgccatgcaaatgcagctttagggcaagccccacataccccttccagactgctgctcatacacccttcctatggaggaagcaggcattggtgacacacacccttcctatggaggaagcaggcattggtgatgaggacgcaaaacatatttttgtaatgaagagtaatagccatcatttgatgagcccctaacttggataataataagaatacttatttatttattttgagacggagtctctgttgccca

SEQ ID NO: 23607 - DNA, 1903 bp, Artificial sequence
  DNA replication origin
tatgtcagtacagatccagtgcaccccttttatctattagatggtattccatcaaacaactataatgagtttcatttatccattcctttgatgaacatataggaagttgttcccaggtggttttttttttgtgtttttgttttgttttgttttgtttttgagatggagtcttgctctgtcacccaggctggagtgcagtggcatgatctcggctcactgcaacctctgcctcccgggtttcaagcgattctcctgcctcagcctcctgagtagttgggattacaggcgcgcgccaccatgcctggctaatttttgcattttttttttaagtagagacggggtttcaccatgctggtcaggctggacttgaactcctgacttcgtgatctgcccaccttggcctcccaaagtgctgggattacaggcgtgagccactgtgcccagacttttttttttttttttgaaacagtcttggtctgtcgtccaggctggagggtagtggtgcgatctctctgcctcccggttcaagtggttctcgtgcttcagcctcctgagtagctgggattacgggcaccgccaccacaccgggctaatttttgtatttttgatagagatggggtttcaccatgctggccaggctagtctcgaacttctggcctcaagtgatctctccgcccgggcctcccaaagtgctgggatcataggcgtgagccaccatgcccggcctcaggtttttgccatttccagcaaatgcatgcacgttgagtaacatcagaagaggtggatggccgagcatgttggctcatgcctataatcccagcactttgggaggcagaggcaggaggatcacttgagcccaggagtttgagaccagcctgggcaacatagggagaactctgtctctacaaaaaatagaaaaaattagccaggtgtggtggtgtgtgcctgtagtcccagctactcaggaggctgaggctggaggatcacctgagcctggggaggtcgagggtgcagcgagccgtgatcgtgctactgcactccagcctgggcaacacagagagaccctgtctcaaaacaaacaaacaaacaaacaaacaaacaaacaaaaaaaacaaagaaaaaaaaatgggagtgggccgggcgcggtgactcacacctgtaatcccagcactttcggaggccaaggcgggtggatcacgaggtcaggaattcaagattagcctggacaacatggtgaaaccccatctctacgaaaaatacaaaaattagccaagtatggtggccggcgcctgtaatcccagctactcgggagactgaggcagagaactgcttgaacctgggaggcagaggttgcagtgatccgagatcgcgtcactgcactccagcgtgggcgacagagcgagactccgtttcagaaaagaaaaaaaaaaaaaaaaaaaagggagtcggggtggagctctcattggctcgttgcatgtgagtgtccctacggcctagaaatacaagagaagcacatcggaacgggctggaaatccacccagttaactagagggctttgaaccttttattaacttggaggttgactctcctgtcaactcgattcccttttggctgtttggcagggtcagtgagacatcccctgggtcgctcgaccccgtaggacggttcagggagccctccaggtcttcgtttctcctcttccccgcacagtgctgttatccagctgggggatccaacgcacacttaaggctccagcaaagtaagtgccaaaaaggggagaatgggaagaatatgctgtatttcacaaaaagcatctaagtagccatctggaaaagccagaatgaacttcaatggtgcatccaggtgggctggggatgggagaggaacgccttcccccagcctt

SEQ ID NO: 23608 - DNA, 906 bp, Artificial sequence
  DNA replication origin
gtatggcttcattgtgctccgcaaagcgttccagctggctacagcggcccctctggtcttgtcagaggaggtgaccccgtttattccgatttagcttcctggagggtgaagtgaggaccacgtggagtccttggcttcggagagttagtccaggtttccagcaaggctgcgagttgcaacttcagtccagccgatatttaccagctttctggccttagctctgccttaccctcttggatgaacgggcatgacgccagcttcatgggggttgtttggaggaacggccggtagagggcgttgtaaagcccatggtaaatacttgatggaggccgggcgcagtggctcatgcctgtaatcctagcgctttgcgggcggatcacttgaagtcaggagttcaagaccagcctggccaacaaggtgaaacctcatttctactaaaaataaaaaaattagccgggtgtggtggcgcacacctgtaatcccagctactcgggaggctgaggcaggagaatagcttgaacctgggagacggaggttgtggtgagcagagattgcaccactacacaccagcctgggaacagagcgagactccgtcttaatacatacatacatacttgatggagagtggaggccatggctgttagagcaggtgggaggtgcccgcgtgggggcaggataggtgctacatagagaagggtccagagcgctgagttaaggagcctcccagaggttgttaggtggggacagttaagagctgtgtgtgggctccctagaggagccccacctctgacgatgtgtccccacggggccggtccccaggtgctgcgataagcggttgtggacccgcattgacctgaaccactgcaagtctatcacacccctgatgctgagtggcatcatccggcg

SEQ ID NO: 23609 - DNA, 1079 bp, Artificial sequence
  DNA replication origin
gcgccccccaagaccagggagagcgaccactcccgctccagctcccccaccgcgggacccagcaccgaaggggccgagggcccggaggagaagaagaaggtgaagatgcgccggaagcggcggcttcccaacaaggagctgagcagggagctgagcaaggagctcaaccacgagatccagaggacggagaacagcctggccaacgagaaccagcagcccatcaagtcggagcctgagagcgagggcgaggagcccaagcggcccccgggcatctgcgagcgtccccaccgcttcagcaaggggctcaacggcaccccccgggagctgcggcaccagctggggcccagcctgcgcagcccgccccgtgtcatctcccggcccccaccctccgtgtccccgcccaagtgtatccagatggagcgccatgtgatccggccaccccccatcagccccccgcctgactcgctacccctggacgatggggcagcccacgtcatgcacagggaggtgtggatggccgtcttcagctacctcagccaccaagacctgtgtgtgtgcatgcgggtctgcaggacctggaaccgctggtgagcggcggcctgtgtagggctctaggttaaggctcaggcggcaccagggatggcccgtggtgtgtggagtcgctggcgatgctctttccttccaaaccccagtatggcttcattgtgctccgcaaagcgttccagctggctacagcggcccctctggtcttgtcagaggaggtgaccccgtttattccgatttagcttcctggagggtgaagtgaggaccacgtggagtccttggcttcggagagttagtccaggtttccagcaaggctgcgagttgcaacttcagtccagccgatatttaccagctttctggccttagctctgccttaccctcttggatgaacgggcatgacgccagcttcatgggggttgtttggaggaacggccggtagagggcgttgtaaagcccatggtaaatacttgatggaggccgggcgcagtggctcatgcctgtaatcctagcgctttgcgggcggatcacttgaagtc

SEQ ID NO: 23610 - DNA, 2816 bp, Artificial sequence
  DNA replication origin
ttccccatgtctctgtctctaacatgctctgtccattttgtctgcctccctccactaaaatgtaagctctggatggcagagattttgagctgtcttgttccttgctgtatccccagcaattaagagtagtatctggcatgtggaggtagtagcctgatacgtatttcaatgaatgagtgagcgaatgtgcctgggccactttccgggggtctcctggcaggcccaaggggagcagctcattgcccttgaactggcccccctgggggtccgtgctccccacccctgatgacttgtcttgttctccctggctcctcagccagtgctgccccacaccgccgtgtgccttgtgtgtggcgaggcggggaaggaagacacggtggaagaggaggaaggcaagtttaacctcatgctcatggagtgctccatctgcaatgaaatcatccaccctggatgccttaaggtgagtggcccagtggggacaggtggtgctgacgctctggggcaggtagggttgctggagatgctggtgagatggtgggatgcaggtcgtgcagtgaattcctggaggacccctgagtctgggtgatcctgtgtgtcaagggataagcccggggcaaggagggcctggagtacctcagagacccagtgtcatcaaaggaataaacacacccccacctcccaggatgtcagaaccagagagggtttccagagcctcagcagatggcaaacacaggctgcttgtttgtagctgggccagaggaagcgcctccaggtggctccaggcttctgggagaacaaggccccacaccacactccttcccccagcacccagtagagtcctctgcagagtcctttctgcatgccaggcgctgagctcatggctttacctgggtcatacccccccagtgagatgggcacactaacttttatggccgagggcaccagcccacagagacggagtgtcttgcccagggtcccagagaagcaaaggggctcagcctctgaaccctggcctggatccacagctgcccgtctctgccagcctctgcagctgtgttttcttttgcctggaaacgggatagatgtgacgttggggagggggtgctgctgcttctggaagacgtggcgtcacagagccttgtgcccgtgggccatcttctccgcccgtccctcttctgagtcctggtgttccccgcagattaaggagtcagagggtgtggtcaacgacgagcttccaaactgctgggagtgtccgaagtgtaaccacgccggcaagaccgggaaagtgagtgccgggctccaagtcccagggtcagtcgggagaggggcgggcctgggcctggccgggaccagcctgtcccaggagtttcaggcaggtgggttgccgtcggcctggggaggaggaagggcaagtccaaaggtatacagttggtctgttcattctctctttttggcctacaagcaaaagcgtggccctggctttaagtacgcctccaacctgcccggctccctgctcaaggagcagaagatgaaccgggacaacaaggaagggcaggaacctgccaagcggaggagtgagtgtgaggaggcgccccggcgcaggtcggatgagcactcgaagaaggtgccgccggacggccttctgcgcagaaagtctgacgacgtgcacctgaggaagaagcggaaatacgagaagccccaggagctgagtggacgcaagcgggtacggaccaggaggggctgggaggcaaaggggttggtctggctggtcccgggtgctgggttggagggatggggcagggggtgggcagcaggtagagcttgggataatcccggcctcttgctgccctgagcaggtcacctaagtcctgagagccctgccccaaagaaaggaggggaaaaccagcgagtcactcctcttcccactccacccccctttaggcctcatcgcttcaaacgtcccccggttcctcctctcacctctcgccgaggccccctctaggcagcagcctcagcccctggtggagatccagtctcacttacttccagcagcaggtgctcccacgacgcacgccctcctgaggccccggggactggcgagtcctgggctgtcccccaccccaccccgctggtcctccaccccactgctgcctctcctgaggcttcccaggtctcggccccagatctctggctcgtggttctggcttggggcctgggaagctgtctgtgcctagagcctctgttggttgggatggaagctgtgagtccagggaacctctgaggagcctggtggccctgctccacccacgggccgtgctgtcaccagccacaaggtggcgccaggagtctctcccagctctagccattcctgctgggccggggattcccacagggctgtgctccagaactggctcccagagccgaggatgatttgaatgggcggctgcacatctccaggtctgtggggtgggaggtcagttgggtgggaacagttcaactgtactcctacttccagcttcttccttgaaagctgcaggcagggctcgcccgtctgtcggtcagacgtggagatggcatttgtggggaaggcctccctccagcccctcctctggagactgtggactcgtggtggggtggggtgtcgaggagaccaaatcccacgagcccggggagcaagctctgcgtcctttctttttcgtgacagctcaaacctggcaaagaagataagcttttcaggaaaaaggtaccatcttcccctccctcctgtgccccaggcctgagcggttagagctgcaccgcagctccctgggccacag

SEQ ID NO: 23611 - DNA, 1043 bp, Artificial sequence
  DNA replication origin
acctttattatgctgctcagaggagcttcaagcaggctgggatatacacgccattggtaagtgaaaaagacttgattaaatggcgcaaatgtttgaattctaataaacaggacacagaaggcaaggcagtcatcgttccttccacaaataccaaacacacatctgccacggcctgaaacaaggtcctggggccacaggagcgagggagatggctgctccccatgagctatttgggaagacaaagacattaagtcgctgaaatccaaagaaaacatggaaaaatcatgttcaagagttctcagaagcagcagaggctgatttctggaggacttggaggacagggtggagagaagccaagtgggcaaggccgcggggcctcaaggtgaatgaggacagagcaggccaggccaaaggggacgtctggggaccagactgcagcggggggcacagggtgaagcacggcccacacggcaagaagagggtctgtggtggggtggggcagatggcagaacgggctctgagccaggtggcaggatgggaggcggtgccagaggcaaatctcctgcaggggctggcagggggcttggggcgcatgtgggggggcagactgcaggacaccagcatgacatcggcatgacactggcagggacatggtggagaggggaggctacggaggcagccccagcgacggagcaaagggagggtccagaaaaggaagataggtggggctgcgtatgtcacaggtgggtaacacgtgagaagtgccctggcagagcagaagggctaggagaagagtaagaaggaccccaagggtcaggccaagcctgcatctgccatcagttccagaagccacgtcaagctgaagagagtaggagacgtagaaaaatggggtttccttcaaccagcatgcgctgtgccaggcaccagagctgcaaagataagatggcacccgagacaggtttcctataactgggcccagcacacgggggctgggagataataatgccaaagagaaaaagacagtcgcgggttcattactggca

SEQ ID NO: 23612 - DNA, 1393 bp, Artificial sequence
  DNA replication origin
agtcactgaaatgaagagggtgggactctggaccaaagggtgttcagttagctgaaaaggggctttaggcgttagatgccgttaggtcagctggtttccagggtgaccacgtgtctccctgacagggacttcaccatttctcagccaccccaggctctccagaaagatgccacagacaagaaaagctctcccatcctggtccctcccactacaggtcccaggtggacaggggacctctgtggacagtgtcctcagcagctagcttagggctcccccgtagatcatgggtctgcaggaggctctggggctgggaaccagagggcaggggctgtggctgtcccattttcctggcttagctactagcccagctctctgtccacctactgtctctctcttctgtgagtcccagggaagggagcatttggagcccatctagggaagatctgagtagtcagggacctaaaggttactatcccatcctccctggggtggctctggtttgttgagtgcattctgcatgccaggctggctcgtagagaggtgcagtggtgcacaagacacctgtggtgagtgccctcctgtgccccgtctcaaagggaaggaacagatgattaccatcatgagcgctctaacaggatctcccagaggggccctgaacccagtgcaggtgggcagtaggggcttccagaagaaagcagcctgtaaactgaccagacggaatgagtgggcatcagccaagtggcttgggcgggggtggggttggccttccgggctgggggaacagagaccgattgtgtggccccttgcggtctttcttggggagcagacggaggtgggaaaggtgggcagggtccgagcctgtgggtgcagccatggaaggtctcgagctgtgtgctgcggcaagaagcacgcgccctctgtcgtcctctcctagggctgccataacgggtggcttaaaacaaccggcctttcttctctcccggttctggaggccaggagtctgaagtcaaggtgtgggctggcgggccgggctggctctgcgggctctaggggagggtccttccccgcgcctccagctcctggtatgtgctgccatccttggcacttcttggcttgtagacagggctccagtctgtggaaggcctgtgtcttcacacacgttctctacgtgcgtgtctgtctctgtgtccaaaagttcccctttcgtaaggacaccagtcatactggattagcgttcacctgaattacctcgtttaacctgacggtctctgcaaagcccccatctccaaataaagatcacactctgaggaatggggtttagagcccccatcgtgtctttctgggggtacacagtttgctccctaacaccctttccgggggtctggccgtgcct

SEQ ID NO: 23613 - DNA, 1790 bp, Artificial sequence
  DNA replication origin
agcggggcgtagaggagcgcggcaggcccgcagccggcccgggcagggggcgtgtgcggccgagcgagcgcactgggggccatcgggcaccgcggggacaatgtgggccgccgggcctcgccgtcgggcgggcctgccgggcgccggccacggcccggggcaagttgccggcggccgcggggcgcgccgcgccctcccccggcgccctcgcccgcggcccacgcgcgtgccggctgccccgggagcacccggaccccgcgggcgccggcacctcctgcctctgcgttcgcaaagttgtgccaggaccctcggcttcggggctggagcgctcccggggcccgtgggcccgacggcccgagcttttgtctgggcgccgcgcgcccgccgcccgccgtgggcagacggagacaggaaggggtgcgagccgcgggccggcgcgggccacccggaacccgggcgaatccgcacggcggcagcggcggcggcggcggaggaagccgcgaccccagatggcaggagttggcctcggtggattcagaaggaaaagcaacctctctcgggaccagggggagaaatctgtgtgtaaaacaaagccctgggtgtgtttacggcgtgaatttactccgggaaggttcgtgtttaggaagaaggcgaaaaaagttgaggttttacgaagtataatctgcaaaataatacttggaacaggacgcaggccaggtagacctgtccgaggaattaagaatgggatggattgagttagcatgtggcattggacggacttgggtgcataaaacgcttatttataatcctggtgggataaaggtgttgtggaatgacccagccaaaatgtggtaactttttttttttttcatcattaggtgcaattgaggaagtgctctataggctgcgcttaaatcgtattatacgtagtattaagtggttttacctaacaggcagttgatttttattttctcagctttgttggagaattttcaggcacgtgtgcgttttgaggtgttaggaatctcacggctctttcggattggattaacccagggacgattcaagtgcttttggcttgaacttttattaagtcagtagccctacgtgtgaatggctctcaaagtcttgttccatagatcacacttcaattcctgctttgaacattttcatttcagtttggagtctacttaatcctgcgacagtttgccatttctggggcatttggtcattcattcgtaggatgtcagtattctgtgtcagctgggctttgatgtctccactgagctttggtgtttcaggattggggttcctgttagctgatttttgtttgttttttaaatttggtcataccctatggcctgtagatacaatctttgacactgcaagacttattgtgtctctgggcttaaaaacatgttttcgggtcctgccactcctgagagaaacttctgttaagagaggacctgtaggccgtgcgcggtggctcacacctgtaatcccagcactttgggaggccaacgcgggtggatcacttgagctcaggagttcgagaccagcctggccaacatggtgaaaccctgtctctactaaaaatacaaaagtgagcccggcgtggtggccggtgcctttaatcccagctaatcaggaggctgaggcaggagaatcgcttgaacccaggaggcggaggttgcggttgcaatgagccgagatcgtgccactgcactccagcctgagcgacgagagtgagactctgtctcaaaaaaacaaaaacaaaaacaaaaacaaac

SEQ ID NO: 23614 - DNA, 1617 bp, Artificial sequence
  DNA replication origin
aaagggagcccggcctgcggtgacacgggggcgggccgccgagggcggtccctcgcggccggagcgcggggactggggctgcgtgggggcgtgccccgcgccccgcccggcccggcctggcccgcgcgccgcgggatgcacatgggtggctgcacgccgccaccgctgcaacaggaaatgcgcgcccggcctggggtggggtcctttgtgtggtcccgtggggcgtctcgcggaagcccgggggcgcccgggccgtgggggacgactctgcacccgacgccaggagcgggtccccaggtcccttgcagcaggcacacgggctgccgggtttgcactcgctgcaggaccaggacctgaagcgcacgaacccgggaacccccgacccagagcctgcaggaccgctggcctggataagctctgagagcccagtctcccccgacgcgggcggttgggctgggccggcctcctggcgctgcacctccggcactcgggttcgcctttgcagggtcaagtagtgcaggcgggagttccactcgagtcgcctgacgggggctgtcagaacgccctgactctaccctgaggtgggcgccccctcccttggacaggtaccgccttctgagttgacctccgaaaggtggaggacgtcgcaggccagaacccagctctcctaggagactggctgccccttaggctggctggggaggtgtgggtttctgaattcttaagctgcaaaggttcctagtgctcactccagctgcagcccactcctgaagaaaagtgttgctagaaatccagatagatcttcattcattcaaaaaaaaagtctatcgggcacttaagccagcagcctctctgaaagagctcatgaccatgagctagaacgaccaaagctgttataagcatcaaaaccaaagctaaacacaagctaaggaggacttggcatacatatcatccacctgtccaaggtaacactaaatatgcacacctgtacctgttcagtttctccatctatacaaggggaaggatttaccaagggatggataaccttctgtaaaaagatcagaggctttcccaagaataagccatgaaatcaggtgatcagctctgcaatggccatctgttagtcacgtccaggccactggccacgaaatccagtgagaacagaagggatgggcaggctggtcctggcctggcctttcaaagaaggcaggctgtgtgccggagaccttgtaaacaaaactcaggaggcttctagcagagtcggcaaaagtgaataagcagggatgtcagttttactgagtggattttaaagtctgaaatttacacacccactatagaaaaaatcccagtcgacttgctctttgccgaaacgtatctgttctgagtttccttccttactctcctttttttgagacagactctcactctgtcgcccaggctggagtgcagtggatctcggctcactgcaacctccacctcctgggttcaatcgattcgtgtgcctcagcctccagagtagctgggattacaggtgggcgctaccacgcccagctaatttttgtatttttagtaaagaggggggtctcaccatgttggccaggctggtctggagctcct

SEQ ID NO: 23615 - DNA, 839 bp, Artificial sequence
  DNA replication origin
gtgtgattaggggatggggagtgtgattaggggagtggggagtgtgattagggggtggggagtgtgattagggggatggggagtgtgatcaggggatggggagtgtgattgggggatgggaagtgtgattgggggacggggagtgtgattagagggggtggggagtgtgattgggggtggggagtgtgattagagggggtggggagtgtgattgggggtggggagtgtgattgggggtggggagtgtgattagagggggatggggagtgtaattagagggggatagggagtgtgattagagggggtggggagtgtgattagagggggatggggagtgtaattagagggggatagggagtgtgattagggggtggggagtgtgattagggggtgggggggtgtgaataggagggtggagagtgtgaataggagggtggggagtgtgatggggggatggggagtgtgaatggggggatgggtgagtgcgattaggggagtgaagatattaggggcaggggagtgtgattagaaggtgggagaatgtaattgttcaccatccaactccctgagttcgcataggatcagggaggggaggagggctttctcgtccccgcagacaccctcttggcaagagagccagggagcaaggtgtgagtgtgggcatgtgagaccatcgtgtggcctctgcaggagaggccccgtgtgggtgtcagggacctctttccatccttgtgttgggtccatcagtggcgttgtttccttcccatctttcggtgacatctcatctgtacagaccctgaactgccccccgtggaatctcccggggctcaggccttttg

SEQ ID NO: 23616 - DNA, 754 bp, Artificial sequence
  DNA replication origin
tcagagttttaccaatcaagtctcatgtcaggaaatgtggatgaggtctgtccgtcctcagcttgctttttaagtactggtaattcgttccaaaatcttttgtccgtttctcttgaatagaggtggggctgaggtcccctaaacccttcttcataggaaatcaaggtttgcttcatgcctaggagcccctcttttttaaactccagagggcaccgatctagtaactatgagaaaagatgactcttctcccagcactgaaactggggttctcaggaaaggagctggagccaaggaaaccgctagatgatggtccccactccgtgcatcccccagggggctgaagagcatgtggtggccatgatcccattccaaagcattccatccatcagaggcaggcagagcccagcacccagtgtgcaggcggagagaggaggcccagcagtgggaggaggccttgaggccaggagctgagtgagagccaggactctcagagacgctgggtttgggccttttccagacgggcactttgagaaatgcagcaaaatagcattttagggcaaaaggagaacggaggtctgcttctagttgtctttgtcccagatggggaatgtcacctgtttattgtcagcagagagcagggcagtggaggtgggcaagtgtgattcggggagggtgggagagtgtgattagggggtggcagagtgtggttgggggtggcgagtgtgattagagggggtggcgagtgcgatttgga

SEQ ID NO: 23617 - DNA, 1341 bp, Artificial sequence
  DNA replication origin
gggctccgccccgcacatacttagattgttttccctagactgtgttcagctgaggcctggagggggtggaaaccaaggttagattaaaaaaagaaaaaaaaaaaaaaaccaagacgaagagatggttttagggaaatgaagactaatattttgaagtggtgcttagagagaagaggccagtgtggtccgtgggggtggggtgggtgagggcttcaggaccccccctttccttagagagaagaggatcacccaggccttcaggcggggaccccgctgggcccagccggcctacaggtgaggacggtgtggagcccagagtcgggactttgaccaccccattgccagctccgcagcccgcgcctgtcttcgtgacagcctgcgtcctgtgctgtcaactacacccctccgatggggttgctaggcagcggggctctgatgtactggaaggccttctgatttgtcagcctcctgcagacacatggttaaggctccttccagcctatggggaggagggacgcgggcacgccgcctgcatactgctgagcccccggtccacctgaaagcgaggtgcaaaaggcagccagagggagggggcaccaggagccctccgccttctaaccagctcagccccactccccgcattatctccactcgtgccggcgcgctgctggctcctccctgtccgtccccgccccattccttccctcttccccaaaccatggaaaggcaaagtgcagcggggaaaagaggtcagtggggtaagcatgtgttgcgggctccggaggtgccaaggtgcatgggcgtgagcggtggggaggctgcccatccgtgccacctggggctctagtgggaaggggcaagtggcagggaggggtccctggcaccgtcatgtgccaggcctggacttggaagccttctctgtgccccctcctccttcagctctgccccactcctaagagggcagcagttgagggaggaggggagccctgggtgtttctgcaaggaagggtgggctctccagccctccatagcactgagaaggggatggctgctggccagttcctgcttcccctggattcactccccggccccagcctccaaggtccaagttcttcctcctccttctcttcctctgtgcatggccaccacccccaatttaatttctcttaaattctttacttgtttataacagccttactgagacataattcacagaccgttcacccatgtaaaagtgtacaattcaacgggttttagtatgttcacagagttttgcaaccacagttaattttagaacattttcatcaccccagaatgaaaccctgtacccattagcagtca

SEQ ID NO: 23618 - DNA, 1245 bp, Artificial sequence
  DNA replication origin
gtggcctcccgcccgcgggctacagggccggcgtcgcggagccgctctttgtgtctcccggggtcgggtgcgagtgtgcggcgcgctcttggcacctcccgcgcccctcgggtgtcagcgttccggcgcccctcccggccctttccccacggggacgcctcccgagccaccgggggagttacgccaagttggagggaaaaaggtggggcggggccgccccgcctccgcagcccccaggcagcgccccaaagttggtgctgcaggtgcagcaaccctcctgccgccctcctccccggctggcccggccgtggcaggcgggaacccccaagggctcggttcgggggctcccgatgatctgccgccaacttggagggtgccttgctgcacagaagccacctgagctgggggcggccgggggcggccgaggcccaggcggaagccgggctagccggctggccgtggggagagcttagcggccgtggcaccgagccggggtgcccatgtgactgcggtgtgcttgggaagaggaagctgcagaggtcagtgcaaaggcgtcacgccagagcgagcgagcaaaccagccaggggggagccccggagccagcgcggggcgggagcgggggtggcctgtcgctgcaggggccggacaaagccgcgctgtcccagccaccctggctcccctaatgcctgcgatcgcggggtgggaggggcggccaggcttggcggccaggaaatgagggacaccgggaggaggggcctctccgggagaggcaggtctggaagaggcggccccagccccccgaggggcctctggatgctggagggtgacccagagggcagatcagacacagactcaacttggagaactttccctgcacactgcagccagcttgcagcgattcttttctgcacgtgctggggaggtcggggttgcggggagctggaggatggcaggatgggggtgacctggttagccaggcagccctggggcccgcagcccaagaggcgagctcctgtcctctcctctctgctgtgggtacccgcgggcttccagctgtcgacaagagaagcacgttctctgggctccgccccgcacatacttagattgttttccctagactgtgttcagctgaggcctggagggggtggaaaccaaggttagattaaaaaaagaaaaaaaaaaaaaaaccaagacgaagagatggttttagggaaatgaagactaatattttgaagtggtgctta

SEQ ID NO: 23619 - DNA, 1451 bp, Artificial sequence
  DNA replication origin
caagagcgcgccgcacactcgcacccgaccccgggagacacaaagagcggctccgcgacgccggccctgtagcccgcgggcgggaggccacccacacccgccccgcgcagcgccacaaaggagggggcgcccgggcagcgcggcccgcggttaccctcggcggcggcggcggcggctcccgtgcgtccccttcggctcccgggcgtccccttcggctgcggaggctcgacgcgcgcccggccccactcccggcggcaacgcgagccgagccccctccacggcgctgccaggccccggccgaggacgcggggcccccgctcgctgccttccttccgcggggagccgggcgctgcctgcgctcatgcccgcgctgaaactgaacacccgcggcgcggggccgccagggaggcggagggaggccgcggggcgaccgggaagcaacgcgggccggcgccaggagacgcccctcgcccggccggtgggggtgcagggctggctctccccacccccctgagccccgtgttccatagcaggtgacggccagcaaagccaccttcctaagatgtgcccctccagatacagccatagaaaggacccgagctaggggccgcggggagagtgggatccggagtatggtagcgctgagaagggggaagccgctctgaccccaaggcccacgcgctgtgtgaccttaaacaactcacttcccctctctgaacagcatcctcactgctcggcactgaagttcaattctgcattctaagatgttcttttaccaccccttcccctgcctggtggcttagtgactgtgtaccctacatcatagcatggttgagagactcctttgagataaatacatattcaccgcatcatccaaactgtggtacctggattacttaatccaaacttcacaacaaccctaaaaagtcattcccaggattcttcctgttttcagataagcacagggaggcttgtgactcaagcctcgagttcgggtccagcctccagttcgggtcaccagcctatcagaggcagtgctcacccaggcagcctgtctcccagtccctcagctttgcccccattggtctacctgacacacctcaactccaggaggagtccagaggttacagccaaacctcaccactaacctccagctgcaggtggtgatcccgctcaaatcagaagtcccacactcaaggtcaccagagtccccgccctcctcccaccctgtcccacacccttctcccaaaccacaagggggctggaaatggtcccatagccactgcaggggcagattccagcctctccattctttctccaaaccccagccaccaggactactgagcaatattaattaacaggttctaattaccagtgctaataataataatagctgtttacatgcgtgatctcgtttcacccctaagacaaccaacataatggtgcgcgcc

SEQ ID NO: 23620 - DNA, 1251 bp, Artificial sequence
  DNA replication origin
cagccagctgtaccagggggacttcgtgcacgccatggagggcaaaggtgaggcgcccccaccccgggccgccctctgcgctgcgggccgagcgcacgtggggagggagctgccggtggctgggttcgtatttcgcgcccgcgtcccccattccaggggatccggtgacgaaacgaggccgagcactgggggggtggggtggggtggtgagggaggagggcaggcagtaaggggggccgggcatgggcctaggcccggcccgcgcccaccaccagccccagggtgggcagagccagggggccggcggacagagggacctggagatggacaggcggaccgagggagggcgggagcgccgcgtcctccccctccccgagccggtcgcgctccctgcgctgcctgaggtgccgccgcctggctggaactgggttcagggcgcccctggggcatcggggtaaggccccccaggcccgaagccttcccaatcccgttcccgcttggggcctgccagtgaggaactggtgatgggggcgcgtcgggtgtttgggacgatgcccccttaggcctggggtccgcagagccgcattcccccatgggctctgccagattggatcagggaccccatgagccctgaagctgttgacctgaacccctacctgggccggagctgtctagcgctacagccttgataggttgaagccaagaattggggtcagggggtgacttcccttcaggcttctgggggagatccctgtcccctggcagtttgaagtgaggaaatgggtctcctcccaggcctgagacttggagagctctgttccttgtgggcccacccaattgagagcggaatctggggacgcctccagggttttggagaccttcacggcctgagtttctccctggctctcctactaggagggtggtgggggtcaccctccagatgttaaggtgacgccctgggttgcctctgaggcctccagagccctggccttcccagcctgcagccagtgtggctcctggttgaggaacctagtattgcctgcgggattggggttttgaacatgccctacctagccttcccaggcccttcactccttttccctttcagatatttcaatttcctttaagttacaaagtttctattttgttccccccacgccccttggaaaacccttccatccctcagtgagctgataacctggagtgcctccttccctcctccaggttctggttgagtggctgtggctgtgg

SEQ ID NO: 23621 - DNA, 920 bp, Artificial sequence
  DNA replication origin
ggggctggaggtcgcctctcaacctgggcccagcactaacaggtgcagcagccgagcgccccctgcaccccaccattgcaacccaagcaactttgcgcaattgccaaagatgctgaaaagcaggacaaggagaggggcccgcaccccgagggtccagctgcgctctacgcggggtactcccctccggtgtcttcggaagcactgaagggacatctggggaccctcccctgccccccgcccccgaaatgtgctgggcttcgcccactcggccgggagcctggttatgtaacccgcgaagggggctccggacacgggctggcggggcaaatgtaggccccaggaggagccgctgcggcgcccggctcggcggtaacagcagccccagcggccgcggcggcagagccgggaagccggaaccgggggccggcggcatttctaaagctggagccgcccccgagctaccggggaagctggaaagctgaaatggaagggctgagaccccagccgcccccgccgcccgcccgccagtgcaagaagaggaggtggggggaggagaatcggggcttggaagggggagaggcagacggcccgccacaaagctcggatcggagaccccaaaacgcaccagcagctgcctcatctccccacaagcgcgcgcgcacactcacttcctaaggagactcccccaccactccccgcatccccctgcctcctccctccaccgcccagcgcccggcccctcagccccccagattccgggcgaaccccgagcccgctcagcccccctccacgcctttccccgataccacctccccacttaagtgtctgagactctaagcctcacaaggggctggaggagtaagcagcttgcttccttttgcatgcaatttattatatttttttcccggtcctcttgcaaa

SEQ ID NO: 23622 - DNA, 1329 bp, Artificial sequence
  DNA replication origin
ttcttccagagtctttctctgcctccatttttttaggagagttcaccaattaattgtcaacactcctgccccctgcattttggccgaggggggaaggagggaagaccaaagaaaacaaaccaaaaaataaataaataaagcaagccagagccgagatctacaaagttttgcaccaacacttaggcagatccgtttgcaaagtcctaggaaaccattttcagcagttgtggggggggggaggcgtcgacgtcataatccccggaacgtaaacattgttgccgatcgcgctcggagcccgcggccgggctatttgggggggctctcggcccgggcttgggggggtgggggcggcggcccgaggaggtatggggcggggagggagcccgggaggcaccgggcgccgttagcgccgtggcatcgctgttttgttgttgggtcacgagtgcgcctctgcacgcaggcgccgccgccgcccgggagttgtgtgcagagctgacttttggagggccgagttgcaggcggcgggcgcatcccggagatggcggggcagggagggagggaaggaggagggggcggggagggaggtgcagatttgcacggctggcctcagcgggaggcgcggaaatgcaagccgagcatgctggcgtgaaagcccccggggcctggcacccccaaaaacgaccccccacctccgttcctgccctcattgcccagggctacccctcttcctcttctttcatccacccctcccccaacattacctgtgtggccgactcaaattcaaagcattttgtatatataactgttttctttttttgcttttctgctgcatgtctttttcgtggggggtgatcctctgcagatccccccatttgcggacccgccatgtggaggaggcatttggggggctcagaaggaaattagctcggcttccatacctataaggactgcctaacttttaaactcccggcactcaaagatgtggacacacacacgtacaggaaatacagccagaccagagcctttgcagtccgcagctgaccggaagacgttgcctttcattcattcattctgcccgcctctgtggactcctttactaggcgaccagccctgaaacagaagttggacattttttaaaggttcttgcgctcggcaaggggagcagatagatgctcaggagcgaaagacgcagagaattggatctggcgcctcctaacgcagcccgcacaggagcgaagggtaagcccttgttggtagtttatagaagacaagtcggtggaaaggtgcatggtgctctgggataggtggggggaactctagtgcccttga

SEQ ID NO: 23623 - DNA, 1718 bp, Artificial sequence
  DNA replication origin
cgggtgaggccgggcccgcgtagggggcagtcggcggctgcctccggcggaggtgcctcgcggcgcccgggccggcccgcgcctcggcggcgtgctccatgcatccggagcccgccccgcccccgagccgcagcagtcccgagcttcccccaagcggcggcagcaccaccagcggcagccgccggagccgccgccgcagcggggacggggagcccccgggggccccgccccgccaccgccgccgtccgccgtcacctacccggactggatcggccagagttactccgaggtgatgagcctcaacgagcactccatgcaggcgctgtcctggcgcaagctctacttgagccgcgccaagcttaaagcctccagccggacctcggctctgctctccggcttcgccatggtgagctccggccgccctgccctgccccctctactgtcccggctgctcccgcccgcagccccgacggggctctctgggcgggccgggcgggccagagtgaggggaagagctgggagaaaccgtggtgagcgctgcgcggggggcagaggtgctggacgtgagcactggtgggcgccgagtactccgatctggggtggtgacaagccatatcagagtccgggctcggggtgcttgggtgcctccacatggccatgcctgccccagcaagagtggtagatgcatcccgaagttagctctgtaagaagcccgccccatgtgcgttcaggagcgaaaggagggactcagaagctctaacccagctgggggcgtcaggaggtggggacaaggagaaagaccttgcgctgtcttgtgccccggcacccgaggccggaagttgttagccgtgttcttttatcagctcctagaggggatttcctgacaccccttttccaccgcattttccgagagcctcagcctgggggtttgacaaccagtccccctcagttttttctccagaaacttgccactgagtcactgcgtgtgagggaggagggagggacatgttcccgttgaatgggctctttattttttatttgttccaagacggagtctcgctctgtcgcccaggctggagtgcagtggtgcaatctcggctcactgaaatttccacctcctgagttcaagcgattctcatgcctcagcctcccgagtagctgggattacaggctcgcgccaccacgcccggctaatttttgtgttcttagtagagacggggtttcaccctgttggccaggctgatctttaactctcgacctcgtgatctgccaaatctcggcctcccaaagtgctgggattacaggcgtgagctaccacacccggcccaatgggctctttcttgatctagggcataggcatgctttcctttccccaccatcccaaagagctggagtgcaaagcctctgaggtgtggggtgggtgaggctgcggatgggcctgagaagtggctctggggataccctcaggcttggcatattgaagtttctccgttgcaggggactacataataactacattattaccactcggtgatatcagcctgccatgaatggactctgctccccgcccctcagttctgtagaccagagcactcctgcccccgccaccagtgagctaagcccttggccttgagggagggagtggctgcacccttcgtgttttcttgggaagggagtgtgtctgaaactctccctgctttgccttgcagcagagcctg

SEQ ID NO: 23624 - DNA, 895 bp, Artificial sequence
  DNA replication origin
tgaacaaaggtctctggttttcctaggcagaggaccctgcggccttccgcagtgtttgtgtccctgggtacttgagattagggagtggtgatgactcttaacgagcatgctgccttcaagcatctgtttaacaaagcacatcttgcaccgcccttaatccgtttaaccctgagtggacacagcacatgtttcagagagcacagggttgggggtaaggtcacagatcaacaggatcccaaggcagaagaatttttcttagtacagaacaaaatgaaaagtctcccacgtctacctctttctacacagacacggcaatcatccgatttctcaatcttttccccacctttcccgcctttctattccacaaaaccgccattgtcatcatggcccgttctcaatgagctgttgggtacacctcccagacggggtggtggccgggcagaggggctcctcacttcccagtaggggcggccaggcagaggcgccccgcacctcccggacggggcggctggccgggcagaggctgcaatctcggcactttgggaggccaaggcaggcggctgggaggtggatgttgtagcgagccgagatcacgccactgcactccagcctgggcaccattgagcactgagtgaaggagactccgtctgcaatcccggcacctcgggaggccgaggctggcggatcactcgcggttaggagctggagaccagcccggccaacacagcgaaaccccgtctccacccaaaagatacgaaaaccagtcaggcgtggcggcgcacgcctgcaatcgcaggcactcggcaggctgaggcaggagaatcaggcagggaggctgcagtgagctgagatggcagcagtacagtccagcttcggctcggcatcagagggagac

SEQ ID NO: 23625 - DNA, 927 bp, Artificial sequence
  DNA replication origin
cggcggtgccggcggctgctcccgcagcgctgcccgaccggccccccagcgccccacgcccgcgcgctcgccgaccgccctcggaggcaccagctgttcctgcgcagccagagccacgcgcgcaactgacgtcacggccccgccccggcgcccgccccgccccacgcctgggaggcggggccgcgcgtgcgcatgtgccccgccccgccccgcgtgcggcgttccggaccgggacatggcaggctcgcaaggtctttcggggtctgttgcggcccccttggcagtgcctctgcgcctccagaatctgtctcttccaggaagagttgggggacttgtctgcaggttgcatttgcagagattatttgacttagattgtgtgttttgggggtgtctagagtttggggaaaggagatttgggggaggtgaaatgaaagctcaccggcccctggtcattgcctgacttgagcccaggccagcgccccggaaggctggcgctgacatcgaccatccaaaaaggtcgggggccgggcggcgcagcgcagagagggcacggtcatttcacgttgtcattattatgtgctgcagctaatacatcctagattcctgccctctaacgctctgggtgacgttcttaacagctgtttctgtcgctcaagggacaaccgcctccaagctgattaaatccagttctgtcccctcctctgccaagtcctgcaagaactgcccctgcctagctttccagtcccttctatctcaccgccctggactcgtaccctccagccattgctttttctcttcctgaccttgcatggaactttcttccctctaaatcttcatacgatgtgcctttttttcatcattcaggcctcagtttcaaatgacacctgtgttactttacttttttatctttcttttttcttctatttt

SEQ ID NO: 23626 - DNA, 1795 bp, Artificial sequence
  DNA replication origin
aagtcaggcaatgaccaggggccggtgagctttcatttcacctcccccaaatctcctttccccaaactctagacacccccaaaacacacaatctaagtcaaataatctctgcaaatgcaacctgcagacaagtcccccaactcttcctggaagagacagattctggaggcgcagaggcactgccaagggggccgcaacagaccccgaaagaccttgcgagcctgccatgtcccggtccggaacgccgcacgcggggcggggcggggcacatgcgcacgcgcggccccgcctcccaggcgtggggcggggcgggcgccggggcggggccgtgacgtcagttgcgcgcgtggctctggctgcgcaggaacagctggtgcctccgagggcggtcggcgagcgcgcgggcgtggggcgctggggggccggtcgggcagcgctgcgggagcagccgccggcaccgccgccttgcaccatcgcatcatgtccgggcagctggagcgttgcgagcgcgaatggcacgagctggagggagaatttcaagaactgcaggtagggccaggccacctggtcccgcaactctgctgcccgcggtgcagcgccttgcccttcctgagccccccggcccgggcggtggggacagtcagggcctagggagtgccccggagaggccctgggggcggacgggaggcatggaccagccccctcccatcacccggcgcttcagctcttcgtccacgtggggcgccgggtcgcagccccctcttccgccgccctcccactggctctctgctccacgcacccccttcgctgcagaaagttggtctgtggcctctgaggcaagttccaggcgtgttcatctgtgggggtggttcaaagagaacagcccagcccccacctctgcagggtctccccagatctcaccccgccccctcccatctgcttttggtagctcagctcccaccccgtgctctggcggggcagcactatcctgcagctctgttttgggaggtgtacttaagagctgttcaccttgaacctctaggttgtgcttggggattagggacccctatttcctgtctttgggggctctgacgctgctgcaggctgattttggcgtggagagcatctgtcagttcggacagctgagtagcctcacccagtgataggggaaactcccagctctatccttctggcccggagccttacacggggtggagtgagggcgggtgtaaggcgggggtcccctgagagaatggcattgctgctgggtgtggggagcggtcctggcagcagttgttcctgctaagaggttcagagaggccccagctacctaccgtgttgactagagacgcctcaggaaaccttggggttgaccaagagggactcggtgactatttttgaagacagggctgttccctctccagtcacgggattgtttttcggggggttggctttgcctgaaattacattgcacactatcaccccagtcctctcatttggagcagtgacattgtccctgtccatgtacctcttgtctgcagttcagttggcctcctacagtgtgcagaggggagaggaggttgccaagggtgtctctgatgggtctttctagacacgtggttgtagattctgatcaatagacagagggttgctggagagccggggcaggaatgggggtgccctttcaggcatgaatagaggggaagggacctagacacatctcgacctgtccagcatgtgtaggttgatgccttctcttctagggcctgggtcccatccggttctcaggggactg

SEQ ID NO: 23627 - DNA, 2523 bp, Artificial sequence
  DNA replication origin
agcctcccaacgtattgggattacaggcttgagccactgcacccggccttggttgttttctttaattaattttttatagagacggggtcttgctatgttagtcaggctggtctcaaactcatggcctcaagtgatcctcctgccctggcctcccaaagtgctgggatcataggcgtatgtgctgggactataacatcatgcctgctagctatttctttagaaaaatgagaagaaggccgggcgtggtggctcacgccggtaatcccaacactttgggaggccgaggcaggcagatcatgaggtcaggagatcgagaccatcctggctaacatggtgaaaccccatctcttctaaaaatacaaaaaaaaaattagctgggcgtggtggcaggcacctgtaatcccagctacttgggaggctgaggcaggagaatggcgtgaacccaggaggcggagcttgcagcgagccgagatggcgccactgcactccagcctgggcgacagagcaagactctgtctcaaaaaaaaaaagaaaagaaaagaaaaatgagaagaaaaatagtattgtcagtaattatcccttgagctcatactatcaagtattattctagatgctctatgctgtacttactcatttaatcctcaccaggctattgtctgtgaggtaggcttgaggttatcccggcttttcaggtatggaaaataaggcagagaggtttaaggactttctgaaagtcacaagactacctgggaggcagcatcactcctccaaccccgagagttgagatggggaactgcggttgcgagaggcactggggtagaaggtgggaggctggggtagaaggcgggaggctggggtagaaggcgggaggcactggggtagaaggcgggaggctggggtaaaaggcgggaggctggggtagaaggcgggaggctggggtagaaggcgggaggctggggtagaaggcgggaggctggggtagaaggcgggaggctggggtagaaggcgggaggctggggtagaaggcgggaggctggggtagaaggcgggaggctggggtagaaggcgggaggctggggtagaaggcgggaggctggggtagaaggcgggaggctggggtagaaggcgggaggcactggggtagaaggcgggaggctggggtagaaggcgggaggctggggtagaaggcgggaggctggggtagaaggcgggaggctggggtagaaggcgggaggctggggtagaaggcgggaggctggggtagaaggcgggaggctggggtagaaggcgggaggctggggtagaaggcgggaggctggggtagaaggcgggaggctggggtagaaggcgggaggctggggtagaaggcgggaggctggggtagaaggcgggaggctggggtagaaggcgggaggctggggtagaaggtgggaggcactggggtagaaggtgggaggctggggtagaaggtgggaggcactggggtagaaggtgggaggctggggtagaaggtgggaggcactggggtagaaggtgggaggctggggtagaaggtgggaggcactggggtagaaggtgggaggctggggtagaaggtgggaggcactggggtagaaggtgggaggctggggtagaaggtgggaggcactggggtagaaggtgggaggctggggtagaaggtgggaggctggggtagaaggtgggaggctggggtagaaggtgggaggcactggggtagaaggtgggaggctggggtagaaggtgggaggctggggtagaaggtaggaggcactggggtagaaggtgggaggctggggcccggggagtccatagccctcctccctctgagtgacgccccttcccctgtgcctgcatctctgtccgcaggtgcaaacgccatgccagtcgggaggaggcggagctcgttcagcagatggcagcgaacatcaaggagcggcaggacgtcttcttcgacatggaggcctacctgcccaagaagaacgggtaggagctggcaacctccccacccctagcacaggcccatgcccaggcctagcacagctggtccatataactctcgccttcctgctggtgctcagattgaaggggaaagagggaaacaagggcaggagagataaggagccttccttacacattcctccatgagcccaggaggggaccttagccacaccgtgtgacagcagcattcctgggaggtccgttgcaaggaaccagcactcactgcatgcctgctgacacctggggttaagagggaaactgtcctctcccaggagaacaaacatgcattgcgtgcctcctgcacgctcagagctgtgccgggacctcctgtgatgtcacctggtttatcctcaacaatctgtgcgtcagaccaagagatgcccatttttacaagattcagagacatcagcgaatgtttggccacaccaggatgtgaacagcagacattctgactccaaagcccacgttctttgtattttcccccttcagagaagtccccgttcc

SEQ ID NO: 23628 - DNA, 1206 bp, Artificial sequence
  DNA replication origin
cagtcaggccaggtgacagggttgctattgtcatagtgaatgcccacccagctatgacaggtgagggctgaccccccgcatgtgtgactgtccctggctcatcttagggtgactggtgtggctgggggtgggcgtctggtggagctgtgggggcagcggaccccctcagcgggtcctttttcttccctcctctccacagaagggttccagtcctggatgtggcggggcctcacctttctcctgcccttcctcttctgtggccatgtgagtccccctggagtttgtgggtatctcctgtctgggctgacccccaggaacagaaggtcttcaggccttgccctccttctccatccgtccccatgctggggcccacagcatcctggggccggggcagcctctgggcccagggatgccaaggcaggagccagaactgacctagctctgccctggcctcgggtgcctgcatttcattttgggggtgtctgtcagtgttgtgggtagttgatacccaaagttgggtgaggggcctggccatcaccctggctttctacgtggccggccaggggagtctggtgggtgagcagcgcctgccttcctctccagttctggcagctctacaatgccgtcacgctgtttgagctctccagccacgaggaatgcagagaatggcaggtatggggggtgggggcatgctcgggggaggttcccgggagggctggggtggcagggatggggtgtatgtgtggcatgctggggtgcggattcctggggagggctgggatggcagatgtgggggtggggtgtgtgcgtgtgtgtggtgtgctgtggggaggttcctggggcgggctgggctggcaggtgtggggtgttgtggggggcctgcttggcgggaggcttctggaagggctaggggtggagcctctcccaatctgtggatcccaaggaggttcgccccatcgagcccttcccaggccctgcccaagcctgaggcctcacccttcccccaggtctcctgaatctctgccttcgatggcaaaaccctgcagtttgggagtttgggggcagctgtgctggagattctggggtgctgggggcaggggttcagcagggcagatgccccagcctcgccctcctctctggactcccccaggtgttcgtactggcgttcaccttcctcatcctcttcctcggcaacttcctgaccac

SEQ ID NO: 23629 - DNA, 2081 bp, Artificial sequence
  DNA replication origin
ttccccgaggtgaggcccgcagcggggctggggtgggggcgagggacgccccttaccctgagcccagagccccgaccctcagtccccagcgtcccgagcacggacaggcggccgccaccccggggcgccccctcgggaattccagagcccagcggggtgagggggggctgatccgggacgagtgaggggggtggacagtggattcagctggaactttggcccccgccggccccactaaggaccaacccgaccccctctcccgcagcactacgccccatcggtgttcgagaagtacacggccagcgtgaccgttggcagcaaggaggtgaccctgaacctctacgacacggccggtgagtgcgcctgcgcgccggggggcccgagggtccgcccgcccgaagggtttcccctcccgggcgtcccccactgggtgtccccgccctgcagccttggcagggccttggccggctcttcactcctggaggccgctcaggggcgctggctgcggggccctagaggccaagccctatacgtaagtggaaggtgtttggaggaggaggtgaactctggggccaccctcccagctctgtgctgagagcccacagctcgttcctctcctgtggttctagaaagcagtgggctgctcttgggcctcccatggttccaggattgctgcgctacctgctgtggtctctgcagactctgtgagctgcagatttgagtcccttggtgctcggattgcctgggctgtgtgtctgggtcctgtggttctgggatgctcccggctgcagatcagcctgtggctccagggctctgtggcctgcgctctgcagcctgaggctctggggtcctgtggatgcgagttctgtgtctgcagctcccaggattccacggcttgcagttggtggttctggaattgcgtggctacaattacttctgtgctttcctagttccctgggacaaaaccagacagtgtagaaaatgaactgaggaaggaacagagcactgggggcaggggccccacaccaggctctgcctgccacctgcaggcccccacgggtggtttacggatttatgtgcaattgcttgggagtcggtgttgtgaggggtggggacaggagaaacagtcagtgggaggaccctgactcccatctgggcttcatcaacattggggaccaaaggttgagatccccaggtggggcctcaccccacctctgtgactcagtgtttagtgacctgcagggaaccacgtcatccggtggccctctccggccagccaagccttgtgtgtgtgaggtgaggtcagacactgacctaggatggagccaaaatccagacacctccacccccacctagaccttggagaggacccgaaaaggggctgtcctagctcagagcccccctccattccgacttcagcaggtcctatcgtggcctctgaggaacctgtctttgtgggatgtgggccctgtagggccaaccccaaaacagcgcctgtctctagcccctggtgagctgggagagctgaggcatcagaggaattcccggggcgtggcccgggggtagtaaaagtcatggtctgggacacctttactctcatgtttcctgtgcagtagccagggaggggcaaggtcattgacccactttttgagtcaagtgctgctgggtggagacattcacagcaacccactgccctgcaagaggtcaggaggttttttctttcctcctcctctgccatcagggcctcccctatcaggtcccggggttcactgttcagggcagcctccacatcataagaacagggatggcctttctggccttgcccagagagagatgctcaaggaacatgtcagagtagattgagttgtggagattctggaaagctgcaagttgctgtaggaagaatttgtgctaagagctgctaccagagggatggaggagcatcccctgctacagtcaccagaagcaggcgaccactggcaccatggggatcccatccatggtcccatcctgttcctgccatcctctttggagtcagatctgggctttgaccccagctctattggctacgtatcattggg

SEQ ID NO: 23630 - DNA, 964 bp, Artificial sequence
  DNA replication origin
aggccgggggcttctcgaacccggtgcggaggcacagccagccaatccgggagaccctgtctggccgcgccagccaatcagagggtccctgccgaaggcggagcctgctaatcaggggcacctggagtcgctgggcagccacgatcgggtctcgccggcgaggggcgcgacgtgacgcgcggagggtggcggtgggttgggggtgggagctttgctcgcagctgagccccgtttttccggtgctgcagtatccctgggactgagagctgaatacccacacccagggctgagaccttagcagaaaggaaactgaggctgggaggtcggccgggaggctgcctggcggaggcggcgctgctccgagtgggcggggctggttccggccccgccccgcccccgacctcttggctccgctagtgcccggcgcgccgccgccagtgctgcgggctccgggcaatggatgcccccggggccctggcccagaccgccgcccccggtccgggcaggaaggagctgaagatcgtgatcgtgggcgacggcggctgcggcaagacctcgctgctcatggtgtacagccagggctccttccccgaggtgaggcccgcagcggggctggggtgggggcgagggacgccccttaccctgagcccagagccccgaccctcagtccccagcgtcccgagcacggacaggcggccgccaccccggggcgccccctcgggaattccagagcccagcggggtgagggggggctgatccgggacgagtgaggggggtggacagtggattcagctggaactttggcccccgccggccccactaaggaccaacccgaccccctctcccgcagcactacgccccatcggtgttcgagaagtacacggccagcgtgaccgttggcagcaaggaggtgaccctgaacctctacgacacggccggtgagtgcgcctgcgcgccggggggc

SEQ ID NO: 23631 - DNA, 1654 bp, Artificial sequence
  DNA replication origin
cacgtcgcgcccctcgccggcgagacccgatcgtggctgcccagcgactccaggtgcccctgattagcaggctccgccttcggcagggaccctctgattggctggcgcggccagacagggtctcccggattggctggctgtgcctccgcaccgggttcgagaagcccccggcctccagctccgggaagagcccctcaactttgcactgccccagcggtgtggcttggcacatgtccgcctctggcctcagcttccccacaggaggtagcggcggtggcaccagggaagatgctgacgcgagagtcatgtctgcccacctcgcctgggccagggacgccagcgtgcacgcgggttcggggtgagggactgggctccgcttacccgcaccccgaccctgggctgcagggtggacgtctgacgccctctgccgggcaatcgcctcggcgccggccgctccgggcgcaggttggcccgaaaccactaggggcggccgcctccttccggcaggagccagaggcgtgaaccacgcaagacgtcgtcagggaggggcaggttggagtagctctagttgaagtcaacttggtccctctcctggagctttggagactgataaccccacacccaccaagaaatgtaagaaaatgcgtttccttgccagcagccacatgtccttcatcccaggaatccccccaactctcccatcccctgatcaaaacagcttatttgttgagcacttactgtaggcagtgctatcagggctgctggctgaattacccgtaacccccacccctcctcttactcctcaccctgggcgggctgactgccctctgcaccacccagatgagtcgacagggtggcagagggacccccccctggagccggtccacggcagacaggcacgagagcatggccgagagtgggatcctaccagctggggtaggaagagcccatttctaacaaaacccccaacagcagcatggttgggggcaagtggccttcgtagtttcctcagataggggctggcaggactcaggatctttttgctggcgaccccaccccgaagactcccagttttcaaggtctcggcaagggtcatgtaaacctcacttcgtggaggaaaaccgccaacctggcagttccatggtcaaggttctcacagtgcaagcaaggcacggtctgaccaccagagggcagcagcgaccgcccacagaatcccaagaccacagcagagctgggaaggggaggccggggaggcaccccaggttctcagtggacgccctcttcaggcactgggcaaagggtaatctcctgggtcaagcaccccctagacaaatgcacagcaactcatccattccttttttgcaacacgtttattgagaggcagttgtgctccagccttccaggaggtcacagtcttaggggaagcagtgcaatggaggttggaagcaggggaaccctttactgaaggctgagcgctggctggcacactaggcctggcagcactggagggcaggcagggaaagtagggtgggtaacccagcctggcaaatgcacggcagctagaaaacctcttcaggttctggggtggctgggccatgagaggggaggccaggcagggctgtcaaggtaaccggggtcagatcatggagttgcc

SEQ ID NO: 23632 - DNA, 949 bp, Artificial sequence
  DNA replication origin
gcggggcgggcctttggaaatgcagatgagccgccgcccgggccggggttgaaccttctgactcagccacccccggccgcccgggccgctgggggaggggcggcgtctggggtgctccctttcagccccggagcccgtctgctgtgtattcggccggtcacatctctctcccccaacgccctgatccgccctccaccttcctctcctccaggttctgggccggagaaggggcgacgttcgggcaccccccgaatggacaatctttccttctgtcaacggcaggggcaggcctagtttgactctgacagtcctcccactaaggtaggtgtgagtacttgcccagaccgtgagggagatttggggggctctggcctgcagcccagggagggccgaaccccaaacacgccgggctggttctgcggccccgccccaccccacccccccccccccagctgcgagcgcgtagggccgcctgctgggccgccggggccatccatccccgtctgtcagcttctgttgtcaggcatttggggcgtgtaagtctctgccgaatatagcagcatacgagaggatccacttgcaagtatttcccagttgtgtgttcttcggcggggggagggccctgggtgccgcctacttctgaaagacacaggtcactgtcagaaagcccaactgtgctgtggccttccctccagccgcccccgtggggcatgtggggtgacagtgtgagccgtcctctgatgtctggctgctagagaggcaaagaacagagacccgaggttccggccacctttctctatgaaagggccttccttgacgcttctccaccttcctgggattgttttcttctccagtccccgaatgggcaggcctgtatataagccttgtttctagaaccagacaaagctggatttgaaacctggcgagccattgaacagctatggccttg

SEQ ID NO: 23633 - DNA, 817 bp, Artificial sequence
  DNA replication origin
ccggaccgcttccctctttcgtctttgtcctgcgcgggcgcccgcagccgagggccacggggtcggcggggcttcgaggccgccccgggtcccaccggctcctccggaagccgcggaccggcctggccctgaccccaggccgccccccgctgcccacccagctctgggcgcccaggtccgacctcccagtcgccctctgagagccgagtcagcgcggggcggggggtcgccccctttgtcctcactcagggcgggaggccctcggggtggccgcagacgccccgttgggcagccctccagcccagctctccaggcaggaggtgggggaagcctgggaaagcggagggggggccccgggatcccccgaggcgcggggctcccggcgaagcctcagatctccggcccttcccggggagggtgcgggcggggcgggcctttggaaatgcagatgagccgccgcccgggccggggttgaaccttctgactcagccacccccggccgcccgggccgctgggggaggggcggcgtctggggtgctccctttcagccccggagcccgtctgctgtgtattcggccggtcacatctctctcccccaacgccctgatccgccctccaccttcctctcctccaggttctgggccggagaaggggcgacgttcgggcaccccccgaatggacaatctttccttctgtcaacggcaggggcaggcctagtttgactctgacagtcctcccactaaggtaggtgtgagtacttgcccagaccgtgagggagatttggggggctctggcctgcagcccagggagggccgaa

SEQ ID NO: 23634 - DNA, 1544 bp, Artificial sequence
  DNA replication origin
ggggcggcctcgaagccccgccgaccccgtggccctcggctgcgggcgcccgcgcaggacaaagacgaaagagggaagcggtccggggcgaggcctcctggtgcccgcgtgggccgccgggtcgcccagccccctacccctgccgctcctcccgcccggcgcgcggcggccgccaccgccccagccacgggcagcgcgcgaaatggcgcccatcaggccgccgcgcccggctgaggcgagcgcgggaggcgcggcgcgcgacgcccccgaggcccacggcccccgaaacggcccccgacacccggtcgccagcgctgcgccccgcgggctctcggggcccgacctggccgcgggcccgcctcctgctccgggctccccacgaccggggggacggaggaaaggaggaaggaaggaaagagagccgccgccattagcaaagcagccctgcccggctgggcccgcctgccagaccagcccggcccagccgcgacgggctcgaagcctgtaaagaaaactggtgtttgggaggaggagcgagcgcggccgggaggacagcagctccgggctgcgggcggagatgctgcgtcatggtgccaacatggacgccggccttttgtcctccttcgcgttgccagcgcaggcgcgccccggagccccgagaagccggcttcggggtgcggaatcctcacgatcgaaaggaaagtgggcccaaggctgggcgatgaggctccctagtgttttaagcccccccgtctccaaagcacttcaatttcttctccccatccaggttcagacctgggaagagcgagggggcgaaggcaggcggctccatggacccccgagggtcgctgcgaagcccgtcttctcgcccttggggcagaagaggcacaggggtccgaagagcccttcgtgtcccaaccccccgcccactgcccgctccggctgccaaatacaatgctccagaatcctccttctcctctcagctcccaaacacttgcagcccttgcttggcctgcaaaagggtttcctcgaaggggcaaaaggcactttttatctttcttacttacccgctcagcccggtgccatggagtctagaagatcaagctgggcggtggttttggagacgttattgtaaaaacatatatattttttgatttagttgggaaatttgggggttatggtggtgtctttgttcttattacctttttgtaagttacaccctcacgttctgctccttccacttctgcaaactttccagggttgggtaggcaaaaaggcggcttcgctgaggactgtttactgctctggatatagcaatggtgtgatcgtcattaagagacaaaaggcgaaaatacagtcaaatcaaacaaaaggcacaagacgcaccagccgcccaaccaccatagaaaataccccccacttaacgttggtgtttgctggaaccagctaggacttgttttccagttttaatctagtttcctgtgacggctttagtctctctacacaaagaaaaggtcttcctttccctcacccaccagctcccc

SEQ ID NO: 23635 - DNA, 1438 bp, Artificial sequence
  DNA replication origin
gcggctgccgggcccggagctgctgccgctgccgccgccgctgctgctgctgctgcccgggaggcggctggcggcggaggctcggctcccagtagccgcacatcccacaatacaccgctaaggagcccgacccgagcgctcaccctcctcctcttcctcctcctcctcctcttcctcctcccctctccttcctcgccgcttccccaggcactctcccggcggcggcagctgcgccgccaaagccccgggccccagcggccccccacccctcactcgcgcgctcccacactgcctccccctccccgggggaaggccttttaatttatttatttttctgggactggggtgggggtcttggctggcgggggagggggtctccccgggctctacctcccgcggccgggactaccctcagagccgcgaccgccgcggcgtgcgtcccgggcctgcaaaactgtttccaaactgcccgggccggaggcgggcgcgcggggcccggggagatggctggggtctggggggccgagggtgtgtgtggacgctgggagccgcggggggaggccggcgtcgactcagaggagttgcaatcgaggtatctgcgctccggcttcctcctgcggcccgcgaccccctccccggagctgagctggggaagggagaccagggttcaccacgttagcattcgcattcctgggaggatgcagccctcgcctggacctgggcgatagacgccttcttctgtttttatttttggaggggagcgccctgtaattgtcctgaacacatgcttcccccccttcctccagccacccgcggaggagagagtcccccttttttgcatttatcttttccttcccctttctttattaaaggtccgggagtggcggcggccaatcagcgcgcggcttccattttgtgagttcaactccgaggctcccgggcttcgcgaggacgcgtttgcagccccctctgccgctcctctctggcggccgaggcgcaggagccgcctcgccggggctcggagctggtgtagctcatattggggctcttttcggggtttgtaatttggccgtgggtaggtaattggctggagcagggcggcagggcgcggcagccaatcagcgcgcggcttctatagggcttgagttattagacgctgatctcaaaacatccttcatcagacacgaaggagaggccaacagatgagggaagccatttttctgcaatggaattaaatggccaagtgggtttttcctttgttgcaaatggggaatgtttttcctttgactctaccatccagttcaggacgtctcagtgtgtttaacatttgtcaacaggcccaaggactcacagttggaagactggagaagactttttaaaaagatctggatttttccttatgacttggaatccatctttgtcttgtataactaggtca

SEQ ID NO: 23636 - DNA, 1488 bp, Artificial sequence
  DNA replication origin
cccggaccgtggcaaagaccaccttggcgatgcccaggtgcttcttggtcttggggttgtacaaaatctccacctcctccacctccccatacttcttgcacatgtccctcaggaagttttcacggatgttatcattcagcttggcaaatgtcacctgcttcggaggcaccgggcccacgtagaactcatcgatctggcaggggccgagggggaagggagtttgaagaacgtttaaacctaagggaaaacacaacatcccccccgccccgcccgcaactcgcccacccgttgaaaacaataaagggtaaaaaaactaaaaattaaaaaaaaaaaaaaaattttttttggaaaaaaaaaatgcacgcgggcgggcccgggaagcggaggattaaatcgtttggaacgtggaagtcctctgggttcggaaggaaaggggaaaaagaaacagtttctctttccccacccccctttctggccttctcttcctgctgccgggtcaggggcgacccctcaggcttaagaagttgtcctgtagtgggctagcgagaggggagagtctcggagccgagccccccgcggggcgtgcaggacactgtatctgcgccgtgattacagtttcacccagtgttattttgttttcagtagctgagaggggacaccctctcgccagcgctctacccctccccgccaaaacttccctggccccggacggcgggaactgggaatccggctgggctcggtcaggactggcgttattttcgaactcggggaggtgggggagggacggcggggcagtggggaggggtcctaccttgaatttgggcaccgacagctccagctccttgtttttggtccagatcccgacgacccggggatcttcgacaatttccaccgggcggttgctggacatctgtggggagaaattggggggccgggatgagagaactggtccccctccccatgggcagacccctttctcgaggcacttgtcaaactccagggctggggccccgtctgacagttggccgggggatcgggcggggggtccctggccgctaggcgcgtctccccggacacgacgcggggcacggctgggggggcgcgccggctactcaccgccaggctgaaatgctgcccatcgtagcggtacagtttatgatgcccctttttcagagccgggtcaatcatcaacttgtaacttctccaatggtggttcctcctctcgcccgaagggccgggctgcggcgggggctgctggtggtggtggtggggggggtgactgttctccatgccgttaacccaacctgaaaaccagcaagttgttgtcgtctccgccgcggcggcggcggcggccgcttctacacacacgcgaaagaatccaatcggcaggcccccaccccctcccaccttgccagcgcgccccgaaaggagctgtctcgctggctccccccaaaacaagaatggagcgagagaataacccttccggga

SEQ ID NO: 23637 - DNA, 1036 bp, Artificial sequence
  DNA replication origin
caagccccttggtcctgcaggggcctccgaagacccacagggtgggaggtatggcctccccagccagctccagagagcacctagctgattccagagcaggggaggtgctgcggtctctttaagagagaggagggaagacacagtgtcaacccttgagcacccagagccgcctgcctggctcttccctcttcccggctctgctcttccccggcggctctgtcgagaaccttatcaatgaaacaacactcctggccccagattggctgccacttccagaggggaaggggcagcaaggaggtggggggacaccctggatccttagaggactctcttttcagttttcagaccttctcttgatgtatttcaaggcatcctagtggcacttcctcagtcccccacaagtaaacaaactctgtctcctcccctaacacaggcaacactggggactgtctaaacccaagccaccagggctcagagagggggcccgcgggggtgtcagcggtggggaagcctccgggtggtccctaggggtgcggtggccaaggaccggcacatttggtaaattacagactgtctcctagcaacagacaacacatttagctccacgcgactctaccctcaggagggggctaagaaataaggttgtggggggggatcccaaggaagagtgagggggggtcctccccacgctgcaggaagggtggggagggaaagggtcgggctgacaggtctccccacgctcctcccctgccaggctcacctttggtgtccagctccacgtggataatgttgcccatgacggaagtgctgtgcaagtgctgaacggcatccttggctccccggaccgtggcaaagaccaccttggcgatgcccaggtgcttcttggtcttggggttgtacaaaatctccacctcctccacctccccatacttcttgcacatgtccctcaggaagttttcacggatgttatcattcagcttggcaaatgtcacctgcttcggaggcaccgggcccacgtagaactcatcgatctggc

SEQ ID NO: 23638 - DNA, 1545 bp, Artificial sequence
  DNA replication origin
tcggagtctgggaggggtgttgggctgatatcctccaggccggtgctggaggggcgtgacgaggggggcgtggggccccggaagcctggctgggagttggtgccaaagggggccagtggggagagctgggaggaggaggaggagatggggctgccctccatctgcagctcggtgtccgagtccggctccctcaggaagagcagcttggtgcgctgctccttcagcagcatctcgatgcgcgagtccaggctgtcgtggggtttctctggccctgcaggggacgactccagcgtgggcgtgccagggctgtcacagggctcaggactccagccgaaggtgggccggccgcccagctccatgctgttggtgtcggggggcggcgggccgggtggcgtgcctggcttctccttggccagaggctcagcaggtggcaggggtgggggcgccggtgccctccggaactccccactgtcgcgggccccaaaagcggctgtggcggtgggctcttccgggggtggagggaagtgggccactggggtctgatacggagagaaagcagacttgaatccaggagcaggggttgcttgggcgggtggtggagtgtgggcaaatgtggctgaatcctgtggttgagccttgaacgggggaccgctgctgcccccagtgccgccgactgctccgaacgggaggtccgaggaaccccggaaagcggctgtggccccggccaccgcagtgaccgcgggagaattgtgtacataatgatgttcgtggcggcggttgtaggcgtccgtgaacttgctctcgtggcgccgggccttgaaggtcactgcagggtcctggctgaagaggtatgagggtgtgggctggcggctggagtagctggagtcctgtgagaaaggggtgcccaggcgcggtgtgagcggggtgccctgtccataggagttgggtgtgtccaggcggcagctggaataagctgtgtcctgggagaagggtgtcccaccgctattgggggtgacagaggaggagccggagccacagcctgcagacaggcctccatccttgaggcgcttcagggcatctgacagctaaggagagacagagatgtcagaccactgggggaaaacatgcaatggaacagggctattttcccttctcactctggctgctgggaagctcagagccaaactgctctagaactgcagcataaggaatggaagtgggggagattgaggaggagtgtcaggatggtactaactttttctctaatcttaggggtagccaaatatgttcagggaaccttgagggtcattcctaattccagaggaggcagagaaaaaagaagactgtaacatcttggtttaggctgggattttctttctgcctcaggctgtcagaaatcaaagaccttccaggcaggattatgaccaagaactacaatcttgtgcacgagaggatggccaagggctttgtcctcctagtcacccagtgctttaggatttaaagtgataaacagaggccaggcgtggtggctcatgactgtaaccc

SEQ ID NO: 23639 - DNA, 1442 bp, Artificial sequence
  DNA replication origin
cagctctccccactggccccctttggcaccaactcccagccaggcttccggggccccacgcccccctcgtcacgcccctccagcaccggcctggaggatatcagcccaacacccctcccagactccgacgaggacgaggagctcgacctgggccttgggcctcggcctccacctgagccaggccccccggaccctgctgggcttctgagccagacagctgaggtggccttggacctggttggagacagaaccccgacctcagagaagatggatgaggtaccaccgtgtctgtccatctgtctgggactggttttgtctatcttgtatctccctttcccccttcaagcatttagcatgactagctaagatgcggaagcaatggggctaggaaagccaatataacaggtggaacttacagaataaaaaggggatgcagaaaacaccaggggctgtgattgagcaattggtttggcaatgagctccctagcagccgtggagagaaggaaagcatggcctagttctgatgctctccttgttaggtaagaagtcagcttttcctagggataaattctggcctgagctgctttggtaggcgtttgctgagagttcagagagtatgagctgtggggatggctcttggtccccttgtctgttgcgtggcttgggaatgatcagggagagtcctggccctcaggcagaggggaggagagagattggccagaatactgtgctgggctaagtggggtgaagccccggagcattgtctcctagagcctggtgccctctgaagagggggaaaccatggcagacagggagggtgctggtttcccttcttctcccactggctccagggatgaaggagttaagagctaacttggggtgggggtggggtgccatgtagccagaaaaaggcaaagttgaccatcccccaccctctcctcaggtcatggggtctcgttgcctaaacctccagcctcaggaagtcccgcccaggggttgggggtgagggtgccacgtgccaggttcccctgggagggtgttgggtcatcttccttggctccactcctccttctcggtccaggcacctgccttggagccgtagtcccggtgggcatgggcagtcaggggcttagacagagctctgcgtccctgtgggcggaggggaggaggactgcccccttcttgggccctttgattaggcgggtctggctgcatcagggaggaacgagaggaacttggcttgcctgggagggtgctgcaggtggctggggctccagggggcctccaagcagttctggggaagtggtttctggcatcaaggggtccaggcagggggccttggcagggggcgttgacaggtgtgcagctgtaggggggccgccggccctggcacccgtctcctccgctccgtctaggctgcctggggtgaggagtgtttacca

SEQ ID NO: 23640 - DNA, 2004 bp, Artificial sequence
  DNA replication origin
agggagaaggggccccggtagggcggcaggttgacaaactggagcccagctgaggcagcggcggccgcagcggccatgaagggcgggtaggggcaggcgccctggcccgtcatcagccggctgagcacctgcgtttgcatctggaaggacatgggcatgccgccccactggccacccagcacgtggctcatgtccacctgcatcacagggaacaggcccggcggaaaggggggcagtggtggcaggatgggtgggggcgggactccaggcggcgctggcaagggtggtgggggcactgtcacagcagggtgggctggagggggtgggggcggcggtgggggcagcggtgggggcatggggaagccaggctgcggtgggggtggtggtggtggggggggcagcggggggaagccaggtggcgggggcagcggcagggttggggctagcacagaaggggctgccacggctgccgctcctggggtcaccaccatgggcttggggcagtcagcgctggtgatgggggccgagggcatctcgtcatccgagatctccatgtcctcgcctgaggactgctggccctgcagagagagcagggagagacagtgaggtgagtctggaaggccaaggggctctcggagtcccctctgcaagactagcaatcagtggcactcccagctgtgtgacccagtgcaagccattcagcctctccaagcctcagcgtcttcatttgcaaaatgggcatcatagtccctgcctcatggagttaccactagaattcattcattcattccaattcaacaaacatttgctcagtacctgtgtgccaggcactggtctaggtgctggggacacaaagttgaagaggcaggcaaacatcttactcttgtggagcggagccagcaggaaaaggcaaaaggatgatgagggtgaatacgggaaacgtgagggagagaaagaaggcagggagacgggtggggcacagaggatgaaactgttgcaatttcagagattctgttgcaacttgtgtgcagaaatagttgccacttccatagtgtctcttatgtgccagggcctttctaaacgctccacatttattaactcagctaatcctcagaacagccctattttcaactccatttttgccccacgaggaaactggggcacagagaatttaagtaacctgcccaaggccacacagccaagaagagatggagccgggatttgaaccaggaagtggttctgcagcctgtgctctcagtcaccctgctgtcctcactctgcggcagacggccaggcaggaaaggtgacattggagcgggggtttagcagcactaaggcccataaacaggaagtgtgttgttatttatttttccttgattactcttttcacctagtctcgtgactgcacaatcagtgtgggcccgcgtggggctaagcgctgcagacggctgcctcattttttatccgaaagataacctcacagggcggggggctctgctccgacccatttgacagttaataaacacactcagagcctcagccgtggccccgcggcacagccagtcagaagaaggtctggagcccaggacctgcccagtgcggggctgcagctgggatccagggcggtggtgaggggtaaatgtgggaggtgtcaaggatgggcgtggggctttagggagccgagtggacaggtctggacttggggtggggggacctttgaaggctgagggggagtgggggtggaggtggagtctgtgcaagttgcaagatcagaggtcagactacaggtgaggaaggcctcagaggaaaactgcaggtagcggggtaggaggacggagactacccaaactaaggcagcggcaggaagctctggactttaccaggtcccctctgtgcacacatacacacacacacacgcacgcacgcacacactctccttctcaggatccccatgcacatcaagaagagacagacgggctcgggtggatcctcagagagcactcc

SEQ ID NO: 23641 - DNA, 1364 bp, Artificial sequence
  DNA replication origin
gcaggtggcaccaggtcctcatggcgcttcttaggtggccggcgccacggcccccggctcttggccaactccatgtattcctcagtgacctcatcgcgcccacgggggcccggaggaatggcctcggagggccactggttgtctagctccttaaagggcagcttggtgggctctacaggtgggggaggtgggggtgggggtggctgggggggaaggggtggtggaggggctgggatccccgcgttccggaagtccagggtcaccgtccgggggtcatgggtgctggggaagacgggggtctgtggctggcccggcaggagcaggagttcccttccaagggcggcccctgctggtggtcggaccaagggcccatccaaggagagcatagatggtggggatcgccggggccggcccggcttcctcttcattgggggagggcaagaggccaggggggcgggcagcaggggtggcagcggggtgggcgcacgagcctgggcccgcaagacggcgggcaatgccaagggcaagggcaggggaaggggcagagggaggggcaggcccgtctccaggagcaccggggaggccaggggcccggagcgttcatcgcgtcggccagtggggagtgggcagacgggcaggagcaagggcccgctgggctcggagaaggtgggtgtgaagctgaagtcccggccaggtgtccgagggaggcccccactgctcaagctaggggacggggctgggtaggagaaggggctgccgggcacttgcggagagctcagggacaggccactgctgccccctgatagcgggggctccccgcctggtgtggctggcaccgtctctgtgctctgcgacttggccaggctgccacagaggcctggagtatgcggggggtggtcctcggcaaggggctccggagggacagatgggtgtgaggcatctgtggtctcaggctccggcggtgggctgggtggccggggtggtcgtgggggcggcaatggtggttgcagcggcaaggggagcatcatagggggctccggctccacttccaggtcatgttctgcagagaggtgagcgaacacgagacatttactattcaatccaaacgtctctcagtgccttattttgtgctccatacctggcaggctcacagccctgagtctgagcacgggacctgtccttctccagctaaacccctcaaggactcctcagcgcccaacccagtgtcaggcacacagtatgtgctttatcaatgttgctaggctaaatcacagatgcaggagacatgtattccagcctttcatactacgtcttcagaacaaagtccctgtggcccaagaaaatctgctctatgactgaataaa

SEQ ID NO: 23642 - DNA, 767 bp, Artificial sequence
  DNA replication origin
ccaaatcctattcctcgtggaatttaattatttatttttatttttaaattaaaaaaaaattgagacggggtctcactctgtagcccaagctgatctggaactcctgggctcaagcgatcctcccgtctcagcctcccaaagtgttgagattataggtgtgagccacggtacccagctggaatttatattttaatggggactcataggaaataatcaagtgaagaaagaagcacgtaattccaggcagggaaaatgcgatggagaaaacaggagaggggttagggattaccaagtcaaaggggagtcagagagggtcagacccaggcgaagtgtgggaaggcgccatgtggatgccagagagactacagagaagtgaaaaagcgacttccataaaaagttaaaaccagagaggggctcactgaccccagcaggcctccctaggacagcagcagtgcaaaggccctgaggcagcagggagctccatggtgtgaggaagggaagggagaggccacttgtgggagagacagcacaggccaccagggtcgggggtactgtggtggtaagtgacctgtctcctggggtgacaggcagcagagggaggttgtgagaggagctggggtggtgtggagctggtgcaggggtcctgagggcagactgttcgggttgctgcggtttccagaccggatgtgccggacttagctgggccgcgaggagccattagctgtggaagaatatgaggaagtgggatggacaggaccagggctggc

SEQ ID NO: 23643 - DNA, 877 bp, Artificial sequence
  DNA replication origin
ggtgacaggcagcagagggaggttgtgagaggagctggggtggtgtggagctggtgcaggggtcctgagggcagactgttcgggttgctgcggtttccagaccggatgtgccggacttagctgggccgcgaggagccattagctgtggaagaatatgaggaagtgggatggacaggaccagggctggcctgggtacaggagacagggatgggcggggggtgacagcccagggtgtggctggggtcgggggtgctgggaagctggacaccaggcctgagatggggaggctgatatgctatcaccacgaggcagcttgagttctgcgggttctgaaaacacccaggcagagaggtcttggtgggcatgtgggtatggcggagcttaggatggggatctccggcccggggacctaagtgtaggcatcgccaggagagaagtggtgactgaaggtcacagcagggtgacctcacctgggagggcacttggggcagaggcctgggatgctccaaaggttaatggctggggcagaggcccagggaggccaagagcaggacgtgacacaagggtttcggaaggatccccgattttgaacgcttgtggggtgagaggggtctgggtgagagccaaggagggggtcagggtagacaaaactttcggctgaaatggggaaaagacagcgccaggcaagagtgagtctcgtcgttttgaagatagaaggagcttgagacgctcagatactgatgggatggaggaggcagggaagcggtgacaattagggaccgacaggtgtggagaagcccagagcaaggagcccaggacactggggatgacagagatccagagcctagggtgggaccgccgaggacacggccagctc

SEQ ID NO: 23644 - DNA, 960 bp, Artificial sequence
  DNA replication origin
ctggaaatgtgcccagtgcatctggggacctgagttttaaattttatttcattttgatgaatttaaacttaattagcttgtgacgactgtattgggtggtgcaggcctagaggggagggacactgataacagggatttgagtgctgaaggaagagcacaggaagctctgagcaggaggcaggcatgttccggggtggatgcccctgactttgggttcaagtcttggcattgcagcttagtgagttacttaatgtctcttatgcctgagtttccttgtctgtaaaacagagacaataacagtctctccttttaggttgttgggagggccacataggtgggtcactgcacgtgggccatttgagtgctggccaggccagtcctcagcgcctgctggctctcttcgttgtgacttgatccttgcctgggtggtagggactttcctgtgaatatccggggagatctgaggggtgagagggaattgcccaggggaagcggtgctggggcaaggggaactgcgtgttcaaaggccctggggcagttgggagaacacctgtttgagagatagcaagggaggcagtgggcatggggtggggtaagaggatggggtgggcagggctgagggtggccaagctgaggaactaagtttctctgagagccaaggtcgctggaaggttggagccatcgggcaacaggttctgctatccctttggaaacgtttccctggctgctggggcaggagtggattttttcaggggtgagagtggccaagggggctgtagcaggcgggtgagcagtgatgggggcctgagcgtggctggtggccccagaagtggagagcagtagacacaaccaagaggcccttccgggactgaactcaccggccctggttggggccagatctggactgaaggaggcagggaggcagatgctctggggcctgggtgtgtggtgcagcggctg

SEQ ID NO: 23645 - DNA, 1138 bp, Artificial sequence
  DNA replication origin
cattttggcaccagtatcacctccgtgaacccctgtggtctaagagcagcagtattcaaagtgtggtccccagaccaacaggattgacttcacgtgacctagggacttacaagaaatgcaaatggtcagaccctatcccagactcagaaaccccccaggtgggaccagcagtctgtttgaacaagacctcccggtcattgtgaagcctgacatgtcagcgagcctttgccttccagccatgtttctcaagcttggctacgcattcaaatcattcgaatgagaagcttccaaaaatttggtccccagaccaattaaatcaggatctcagctggttgtggtggctcattcctgtaatcccagcaatttgggaggccgaggcaggcagatcacttgaagtcaagagtttgagaccagcctggccaacagtaggaaccctgttgctactaaaaatacaaaaattagccagctgtggtggcgcgcgcctgtagtcccagctacttgggaggctgaggcaggagaattggttggactcaggaggtggaggttgctgtgatccgagatcacgccactggactcctgcctgggcgacagagtgagactatcatctaaaaaaaaaaatcaggttctcagggaataggatctgggcctcagaactgtttaagctctccaggtgaatggaataaagccccgccttagcaggcgtgagaatgccaatcaaaggccaggctgactgacaaccaccagtgcgtctgggccgctcagctaggactcctgcttctctcaagccatcttcacacgggggcgttcagaacaagctctgcgttctatttccagctccgaggttcctctcccaagcatgaactttgttcagacaagtagcagaacctgccttttcaacgaacacttgcgaagtcggctcaggaaggaaatgtcagtgatgccgaagctgccaactccgtgcttgttgagtagtgattcttgatcagtcatacgggaagagagagtaagaggtgaatcacatgctgagtggtttgtgctgtgaatgtttgctgagctctttggaactctctgggtatgagtaactcaggcccttatgaattccttttgtcgtcttagtctcctgttctgaactgagtta

SEQ ID NO: 23646 - DNA, 1266 bp, Artificial sequence
  DNA replication origin
tccctcccggacggggcggctggccgggcagaggggctcctcacttcccagtaggggcggccgggcagaggcgcccctcacctcccggacggggcggctggccgggcgggggggctgaccccccccacctccctcccggacggggcggctggccgggcagaggggctcctcacttcccagtaggggccgccgggcagaggcgcccctcacctcccggatggggcggctggccaggcgggggggctgaccccccccccacctccctcccggacggggcggctggccgggcggggggctgacccccccacctccctcccggacggggtgctggccgggcagaggggctcctcacttcccagtaggggcggccgggcagaggcgcccctcacctcccggacggggcggctggccgggcgggggggctgaccccccccacctccctcccggacggggcggctggccgggcggggggctgacccccccacctccctcccggacggggtgctggccgggcagaggggctcctcacttctcagacggggtggttgccaggcagagggtctcctcacttctcagacggggcggccgggcagagacgctcctcacctcccagacggggtctcggccgggcagaggcactcctcacatcccagatggggcggcggggcagaggcgctccccacatctcagacgatgggcggccgggcagagacgctcctcacttcctagatgtgatggcggctgggaagaggcgctcctcacttcctagatgggatggcggccgggtggagacgctcctcactttccagactgggcagccaggcagaggggctcctcacatccccgacgatgggcggccaggcagagacactcctcacttcccagacggggtggcggccgggcagaggctgcaatctcggcactttgggaggccaaggcaggcggctgggaggtgtaggttgtagtgagccgagatcacgccactgcactccagcctgggcaccattgagcactgagtgaacgagactccgtctgcaatcccggcacctcgggaggccgaggttggcggatcactcgcggttaggggctggagaccggcccggccaacacagcgaaacccggtctccaccaaaaccagtcaggcgtggcggcgcgtgcctgcaatcgcaggcactcggcaggctgaggcaggagaatcaggcagggaggttgcagtgagccgagatggcagcagtacagtccagcttcggctccgcatgagaggga

SEQ ID NO: 23647 - DNA, 1183 bp, Artificial sequence
  DNA replication origin
cggccagcaccccgtccgggagggaggtgggggggtcagccccccgcccggccagccgccccgtccgggagggaggtggggggggggtcagcccccccgcctggccagccgccccatccgggaggtgaggggcgcctctgcccggcggcccctactgggaagtgaggagcccctctgcccggccagccgccccgtccgggagggaggtggggggggtcagcccccccgcccggccagccgccccgtccgggaggtgaggggcgcctctgcccggccgcccctactgggaagtgaggagcccctctgcccggccagccgccccgtccgggagggaggtgggggggtcagcccccccgctcggccagccgccccgtccgggagggaggtggggggggtcagcccccctgcccggccagccgccccgtccgggaggtgaggggcgcctctgcccggccgcccctactgggaagtgaggagcccctctgcccggccaccaccccgtctgggacgtgtgcccaacagctcattgagaacgggccaggatgacaatggcggctttgtggaatagaaaggcgggaaaggtggggaaaagattgagaaatcggatggttgccgtgtctgtgtagaaagaagtagacatgggagacttttcattttgttctgcactaagaaaaattcctctgccttgggatcctgttgatctgtgaccttacccccaaccctgtgctctctgaaacatgtgctgtgtccactcagggttaaatggattaagggcggtgcaagatgtgctttgttaaacagatgcttgaaggcagcatgctcgttaagagtcatcaccaatccctaatctcaagtaatcagggacacaaacactgcggaaggccgcagggtcctctgcctaggaaaaccagagacctttgttcacttgtttatctgctgaccttccctccactattgtcccatgaccctgccaaatccccctctgtgagaaacacccaagaattatcaataaaaaaataaattaaaaaaaaaataataatcacaagaataattactgtctgttgaatgcttgctatgtgttaggcattatgttaagcactttacgtacatagtctcaataagcttcagaaaagcccaatgcatacgtattactgtattccctgctttttcaagatgaggaaac

SEQ ID NO: 23648 - DNA, 1296 bp, Artificial sequence
  DNA replication origin
ctgctcgcgctccgcggcggccacactcgcgcccgcccgccgctcactcactcgcgcacagacactcgcactctcacacgcacacactcacacacacacacacacacacacacacatacacacacacacaaagcccggggccgccgcgcgcctggcccagtgcgcaagcgccgggcggcagctgcacagagcagggggagccgcgccgccgccgccgccggcagtgcggcctccgggcgccgcggccaccgggcagcgcccccgggcctcctgcgcccccagaggggacgccccggacgccctcctggggaggtggcgaagggcgcacggcgacccccggctctgggcgcgcggtgggggcgggcgtgcggacacgcgcgctgacccttcctcggaggctgcaggtgccgaggggtccatgggagacagccggtctgcggggcgcgggggggtcgcgttccccgggagccagcccagctgcccctgcccagcccccagagcgcggcggcgggtgcagtcgtgcaagtttcttgcgggtctcttgacttctccgagttgaaggcaccggttcgggacgcgaggtgctcttggaaagagttgggcatcgcgcatctctgctggcccgcggccctgttcaaatgcgagctaggacgtcgcctgccccaggctttgtccttttggaaaactagggttgtaggaaggtgcctggtgccaggcagaccaccagagactctcgaccttgagtactaaagagttttctgctcagcaaaagctcaatgatgatcagcatcgtaacagggactcttcctcccgcccccagaagttctcttgtcataaacaaggcgagggggtcttcgctgagcttcaccagaggaccacgatttcaccttaagccattcctgacttcagtaccagactgagaccaggcgctgctactgcccaaatgacccctggtcccatctacaaggagcacttttgaggcctcagaacagagccccggggagaaatctgcgatgatcagggtaacctgggtgccgcatcttgctgttcagctgcagcggaaccggccggaccagagctaatgcgcgcccagaatgaagagggagaccgagagtggcccaaatgtcagcgccccgggcctggagatgacagcccgacagcagccatttcacagctggggaaactgagtcctgggaaagtttaaggttgcagccttaagttgttactcattctagacgtttcccctgagggtttggtctttggggaacacgctactgtggaaatggagagaccgca

SEQ ID NO: 23649 - DNA, 1470 bp, Artificial sequence
  DNA replication origin
gcgcccagggcgcggtgctctcggaggcatgacctcaatcgtcctcaataacccgaggggacctggaagccaagcacaaaaccccgggtcaccatggttagagaagtgacaatgatatgcccaaggtcgcggcaacgaagtgaactggaagctggaccatgagatcccaaagcctgaggtcttcagaggacacgatgtgttgtttccccaaacccagggaggcgcagaggtacagcccctcaagctccaactacaggcctggtccccgcggggtcagcgggctggaaggcctccaggccggccgccccggggcccgcggggtgggaagccccatctctccatctgccctccctgcagagcagctggccgctctgcgggagcagctgtcagggtgcaggagcctctgtccagccgggaacctggagtaggaggccccaccacgcctcctcgagcagagaaaggcggcttgccggctgtttcccaacctccaggccggcgacagaagggacccaggcacagacaccagttctttctttgcacaggggctgaggcaaggaggggagcaactccgggcttcccgcggggaatcccacagtagagggggctgcgggttgttttccagcgtgtgtgtgttggcctgcagctgtttctgccatttttaaatggctccagtcgggcaccgggcaccctgtgtaccaggggagctcccgagacaccgacgacttggatctcaactttggaaagcctccccttctcacggttctgaaaattctttgtcccactggagccaaacccagcccacggccgggcatccggccatcgcagccagccctttccataggaggccggggagcacgtggactttattgattttcctcttgccttttttgttgggtttgactcagaaaggacagctaacttgtgacaccgccacaccggaggctcgcccccagtggcttttagagaccgaggcgctactcgagaaacgacacccccaaacgtaaacatcccctgccacagggcctgcccagcttccaggctcgaaataaagggtcgagacgagcccgcgggcgctgacactcagagccagcgttgcggcggctcctctccctccgggaccccagtgaaggcgtgggaaaaaaataataaagttgaaatcaggcagcggggagttttcaacaactctgacccaacctggcgatctgcttgcgcctcgggcctggcccaggggccgattccgagcagaccccgacgaggccgcggaaaggttcgatccccttaatgtcgaccgggccacgccgggcggacgctaatgtgatcccgaaaaccacgcgcggccgccaccaagtccccctctccccggtgcagagaacaaaaacaacagctccctccgcaaaacaaacacgagctcccggtgtggagaggcagccgcggcccaggacgaacggcttctggccaaaaacatcggct

SEQ ID NO: 23650 - DNA, 1579 bp, Artificial sequence
  DNA replication origin
tcggccgggggcatcccccggagcccggggcaacgcgacaagcgcgcgaggcagaggggcgccggcccggcccggcccgcgcgccgactgtccgcgagcgcgcggcgcggcgggagggggagggctccggccccggcgtgacgtcaccgaggcgtctgggccaatcggctgcccgcgtcggcctcttaaaggcgcaggggaacctttccttagctaggcggaccaaaaaaaaaaaaaaaggggaagcggaggccacgcctcccggccgtgcccctcgccacctcctcctctcccggcgtccgtgggtgctgagggacacggtggccgggcggagcggctcgccggtgtcgcgacctgggagaggcgtcggcagagtggggccgtgctagtcccgcccccgccccgctccgcgccccgggagtcgccctgtggcttcgccgcaggcccggccggctccacgtggtgggtgcgggtggggctcctcggcctccaggccctgctttttccctgccgggcggtaccgagtcctcgcagctcacgcctgagtttgccggacgtggtggctattgtcctcattattctcatcgtattgatgggaacactgggtggctgaataccgacaggatttttctcagacctggagtccacagagctgggaacttgcttcccctgcgcgtccccagctcggcgcagctgttgagtggcagcgcccctgagcccagcgacctccagaccccagctcttttaacttcaactcagcatgctgttgttatttttttaaagtttgacggacgagccagcccccgaaacaattctaaaaggggagtatctgagccagagttttcttctctgtcaaatggtgaacaattccgtttcctcagaaacttgggacagtttaaaaatggctatagtggggcgcggtggctcatgcctgtaatcctagcacttttggaggccgaggcgggtggatcacttgaggccagaagttcaagaccagccaggccaacacggtgaaaccctgtctctactaaaaataacaaaaattagccggtcgtagtggtgcacccctgtaatcccagctactcgggaggctgaggcaggagaatcgcttgaatccgggaggtggaggttgcagtgagccgagattgcgccattgcactctagcctgggcgacagagcgaggccctgtctcaaaaagaaaaataaatacaaataaaaatggctataagttgcttagcaggcaggctggcacaaaatgagcgctaaataaatgtgccacaggttggaggatttggatcaaccagaccagaggtgcctagaaattgccaatagtccaccactatttgacctgcagaaacggcaacttcgcgtggcacaacctaactgacagacacctctagaaagctgtcaaggtttccggggctcaaagccagtctggggtgggggtggcagggcatcagaagagccagtgaggcccatgagccaggaacacccatcctaatcctagcagggcgtccagagtccacagccactcctgcactctgctttgttttattgttgttttgttttttgagacaga

SEQ ID NO: 23651 - DNA, 1554 bp, Artificial sequence
  DNA replication origin
aggaggaggtggcgaggggcacggccgggaggcgtggcctccgcttcccctttttttttttttttggtccgcctagctaaggaaaggttcccctgcgcctttaagaggccgacgcgggcagccgattggcccagacgcctcggtgacgtcacgccggggccggagccctccccctcccgccgcgccgcgcgctcgcggacagtcggcgcgcgggccgggccgggccggcgcccctctgcctcgcgcgcttgtcgcgttgccccgggctccgggggatgcccccggccgagcccttctcatggccgccgacgtcttcatgtgctccccgcgccggcctcgcagccggggccgccaggtgctgctcaagccccaggtgtccgaggacgacgacgactcggacacggatgagccgtccccgccgcccgcctccggcgcggccaccccggcccgggcccacgcgagcgccgcgccaccgccgcctcgggccgggccgggccgcgaggaacctccgcgccgccagcagatcatccacagcggccacttcatggtgtcgtcgccgcaccgagagcacccgcccaagaagggctacgatttcgacacggtcaacaaacagacgtgccagacctacagcttcggcaagactagctcctgccacctgtccatcgacgcctcgctcaccaagctcttcgagtgcatgactttggcctacaggtagggacccccgcgaccccctgaggccccggccggaggcccttgtttgacaaaacaagcgtggagggaagggccgcctggcaaccccgtggcttcatgcattccctttgggtcttcctccttcgggagggtttatggatctggggttccccgcgttgccagaggagccggggtcctggcctcttcccctgccagcagtgccggggtcctttcgggttcacgttccccatccaggccctcccctccagtgtcctgggaccaccgatgttggacgaggaagaggtataaacactggctgcatcttgtgttacccgactctatcgactccttcctccaaacgctttgtgtgtttcccccatatccagcagcggtcaggaccacctgttcggggtgactggaggctggctctgctgtttaatggttgtgtaacacctcggagcctgtttcctcctttataaaaggggaatgactgtagtgtctgcctccaaggggctgttgtggggatggagtgagataggtaaattgcttattccagtgcttggccagagttaggtgtccctgcacctggaggctggcccccttacaacctcatcgggaggcccgcccccatctcgggagggctttgggtgcctcctaagaagacttttggtgccacagctgttggaggtgcagtctgtccttctggcaagttggagggttttctggccggtcctgaaacattatatgagggagatgtcattgttgagggcagacatcccagacaccgttctgacatgtggattcggctctgggcagagattcctcttttccaagtcacagaaaatgcctggccctcaaagatta

SEQ ID NO: 23652 - DNA, 3240 bp, Artificial sequence
  DNA replication origin
  misc_feature (1006)..(1006): n is a, c, g, or t
tgcctggctaatttttgtattttttgtagagacagggttttgccatgttgctcaggttggtcttgaactcccaagctctagcaactcatctgccatggcctcccaaagtgctgggattacaggtgtgaaccactgagcccagtcaaggtagttttttttaggtgttcttacactacgtctaccttcttggccctgctctgtttaaagtcacaggaccataatcttctgaataccaaatctaagactgcctggtacaccccagaggtatgcatgtgcctaggagacggttagttactctgagttatgaggagctggggtgatgattttaagtattcttgttctgggaatggagggtatattctccattttgtgaaattcttggactataggttacattccattttaagctatcacccctcagcatcaccaccatacttgactaaggtgggactgtttgcatagggtaattttgggatgggggaaagggacaatactttgaactctataaacggttgatttggctggagttgaaacaaaattacaacattaagttagactgaggagggctctgtcttgactcttgtttagtttccgacctgcacattttatgttatgttacctatcttcggctttgcttccccagtgtgtgtgttgttgtgtgtgatgtgtgtggggtgtggtgtgtgtggtatgtttgtgtggtggggtgtgtggtgtgggtatgtatgtgttgtgtgtgttgtgtgtatgtgtggtgtggtctgtgtatatgtatgtgtggtgtgtgtgtatggtgtgtgtggtgtgcatgtgttggtgtgtttgctgtgtgtgttggtgtgtggtgtgtgtgttggtgtgtgggatgtgtgtggggtctgttgatgtgtgtgttggcgtgtagggtatgtagtgtgtgtagtgtgtgggggtggatgtctgtgtgtggtgtgtgttggtgtgtggtgtgtgtagtgtatggtatgtgttggtgtgtgtgcagtgngggtgtggggtgtgcatttgtgctgtctgtatgtagtgtgtgtgtggtgtgggtgcgtggaatgtgtttgcagtgtctgtgtattgtgtgtgttggtgtgtggtgtgtgttggtgtgtgtggtgtgtgggtggttatgtgtgtggtgtgtgttggtgtgttatatgtggggtgtgtgtgttgtatgtgtggggtgtgtgtatgtttgcggtgtgtttggtgtgtggtgtgtgtgtgcggtgtctgtgttggtgtgtgtggagggtgtgtgtgttggtttggggggtgtgtttgcggtgcctgtggcatgggtgtagtgtgtgtgttggtgtgtatggtgtgtgtttgtggtgtgtgtgtggtgtgtgtgttggtgtgtggtgtgttggtgtgtgtgttgatatgtgtgtgtggtgtatgtgtgcggtgttggtgtgtggggtgtgttggtgtggggggtgtgtttgcggtgcctgtgtggtgtgtgtggtgtgggtgtagtgtgtgtgtggtgtgtgtatttgcagtgtctgtgtgtgtcggtgtgtgtcgtgtgttggtgtgtgtgtcagtgtgtgtggggtgtgtgtttgcagtgtctggtgtgtggggtgtgttggtgtgtgttggcatgtgtgtgtggtgtgtgtgtgtttgcggtgtctggtgtggtggtgtgtggggtgtgttggtgtgtgtgttggcatgtgtgtgtggtgtgtgtgtgtttgcggtgtctggtgtggtgtgtgtgcagggtgtgggtgtatttgcgctatctgtgtggtgtgtgtggtgggtttgcggtgtctggtgtggtgtgttggtgtgtgtggtggtgtgtgtgtggtgtgttgtgtgtgttggtatgtgtgtggggtgtgtgggatgtgtatgtttgcagtgtctgtgtgtggtgttggtgtgtgttgtgtgtgttggtgtgtggagtgtgtgggtgtgtgtatgtggtgtctggtgtggtattggtgtgtgtgttggtgtgtgggtgtgtgcgatgtctgtgtgtggtgtgatggtgtgtgtggtgtgtggtgtgttggtgtgtgtgtggtgtgtatgggtgtgtgtatgtttgcggtgggtgtatgtttgcagtgtctgtgtggtgttggtgtgtggtgtgtgtggtgtgtgtggggtgtgggtgtgtgtatgcggtgtctggtgtggtattggtgtgtgtgtgttggtgtgtgggtgtgtgtttgcaatgtctgtgtgtgtggtgtgttggtgtgtgtgttgtgtgtggtgtgttggtgtgtgggtgtgtttgcagtgtgtgttggtgtgtggtgtgttggtgtgtgtgttggtgttgtgtgtgtggtgtatgttttcggtgtctgtggtgttggtgtgtgtggtgtgttggtgtgtgtgcaggtgtgtgtgcgatgtctgttgtgtgttgtgtgtgtggtgtgttgtatgtgtggtgtgttggcatgtgtgtggtatgtgtgggtgtgtgtatgcggtgtctgtggtgttggtgtggggtgtgtgttatgtgtgtggtgtgttggtgtgtgtgttggtgtgtgtggggtgtgggtgtgtttgcagtgtttctatggtgtggtgttggtgtgtgtggtacgtatggggagtgtgtgggtatgtgtgtgcattgtctggtgttggtgtgtgattgtgtggtgtattggtgtgtgttggtgtgtttgtggggtgtgggggtatgtgtgtgcggtgtctgtgtggtgtggtgttggtgtgttgtgtgtgtggggtgtgtgggaatgtgtgtggtgtctgtggggtggtgttggtgtatgttgtgtgtggtgtgttggtatgtgttggtgtgtgtggggtgtgggtatgtgtgtggtgtctgtgtgcggtgtggtggtgtgtgtggtgagtgcggtgtggtggtgtgtgtggtgtgtggtgtgttggtgtgtgtgttggtttgtgtgtgggatgtgtgggtatgtgtgtgcagtgtctgtgtggtgtgttggtgtgtgtggtatgttgtgtgtgtgggggggtgtgtgtttgcagtacacactcacacatgcacacttagtgcttgtgcggccgccttgcacaggttccttaggattcctggctctggcttttggatctgatttggaaaggtgttggcaagtagctttatggttcttaagtgccttagcataggcctcgaatccagattcaaatagcgtttgtatttatccg

SEQ ID NO: 23653 - DNA, 1477 bp, Artificial sequence
  DNA replication origin
gtggttcctctttctccacaggtggaaaaggtgacgccggtgccctctgccaacaccaggaacagagacctgggcagaggtcagctccgagtgccaggccagccctgagggtgggattgcgtagctgcagaagcctcatctgctctgcactgtgaagagccgaggactgagggcgggggacggctgaggagggggacggctgaggtgggggacggctgagggcgggggggcggctgaggtgggggacggctgaggacgggggacggctgaggagggggacggctgagggtggggggacggctgaggagggggacggctgagggcagggggacggctgaggtgggggacggctgagggcgggggggcggctgaggtgggggacggctgagggtggggggacggctgaggagggggacagctgagggcgggggacggctggggcgggggacggctgagggtgggggacagctgaggcggggaggttcccctcatgcagcacgccttgggtgggagcacacgtcatgcctctgtgctcagcgtcctgaagggcagatggctgtgggcacaaggtggatagccaacctgaccagagcagtgaggggaggctttctggaggaagtggcgtttaagcaaaggcctagtggatagggaaagccagctcgacaaagcccacacagttccttctgcctggcctgtggtggccccagtgagcagaactcagcctgatcgaggcagtgaaaagccctcaatgtgtgaacagggcatggtggcatgcgtctgtagtcctagctactggggagactgaggcaggaaggtcgcttgagcccaggtgtttgaggttgcagtgagccatgatggcaccaatgcactccagcctaagtgaaagagcaagaccgtctcagaaaacaaacaaacaaaaataaccaaccaaaaaagggagtctgaaggcagggggtacagcagacaaagctggagggcagagggtgtcataccaacagctttaatcacacacaatgaggggagcggcaagacgcagggaaatttagccttacaggctagaaacctcaaagtttagtttgagggtcccctcttcttcctctccgtgagctgaaatgtttcccttttctttgggtgtttacgtcaaacacagtcagacttcagcagcaacacagagaccagaactcccaactgggatcaccgttccaccccgagtttcggtaatatctctatgaccaacaggtggcgctcaagaaacacaaagaagggcgtccaactcaaaatccaaacaaaccagccacggcgggccggaaagggtcgacggcctgcacccccagcccgcccccaaggcaatttcaagtcaagatctgaggaggcaacgcgtgaagttctgtgatgcctcagaaggtggcaaggtggcaatgaatgcgtcaggtgtcacaaaggaagggacaccctggacgactcatgcccagaaacc

SEQ ID NO: 23654 - DNA, 1066 bp, Artificial sequence
  DNA replication origin
cacctgtaatcccaactactcgggaggctgacgaaggagaatcgcttgaacccgggagggggcggttgcagtgagccgagattatgccactgcactccagcctgggcaacagagactgtctcaaaaaaaaaaaaaccaaacaaaaaaacaaaaaagatagagcatagaaaacggactagatcatggccatgtattatttcatgacacttttgtttcatttaagtgtatgtgtgtgcgcatgcacgtgcacaccagggtggtggtggtggtcacaagtttgaaagcctttgggatgggaaaacatccctctgggtcggggggagccccgcactgagtctccccgcctggctcacctggggcgatacgggcattcttcaacaccaaggacacgggctctggtttgggagcaggcactattttgtggggctgcttaggcctgcccccagtcaaggatacaggtttggggtgcacaaaagttaaccgtggctggggaggccgggtgacaggagacagtgccagcccacaaggggccgctgacggggcagggtgatgggtggtgatcacaaggccctgactctggctaaaggtggtggcgggggcatcgtgggtgagggtggcagaggccgtgtgggtgatgacagacggcgctttgttgactccagcaaacttctgtggctgatggaaggtgggtggagccggggggttcagggcagtggcaggaggaggaactaatggtaacacgggggagatgggcggtggggcggggctgggagacagcaggggcatggtgaagacagggaggaagggctgcgggacactcagtggcggctctgagggaccgaagtccgtgggctggataaacgggtcctcagtccgggaggtgtgttcacagccctgctcatccatgtgagccagggatggggcggtagggggcgcgatgaggctgtcaggaaggctcacagtggggagggctgtggtcggcaggatgctctcctgaaaaaggaagaaaggagccaggaagcaatgctggggtcagacaattcctttctagcgctgcacactgcca

SEQ ID NO: 23655 - DNA, 1104 bp, Artificial sequence
  DNA replication origin
gagcggcccgtgggccccgagccgtgcccgccgaggccagactcgcgccgcacccgggcggggccggcgtcctcgcggggaccctgggggaccggggagcgggccgcggggtgcaaaggcacggccgccctggcgacgcccctccctgcacggtgacccagcctccctcacagcagcggcgtcccggcccccaacctacctgagcgtgacgccggggtacgggcgtggagctcgtgcagcggagccagggcggatggcgcccaggtgcgcggagctctcggggctcgggagtgggcggggcttctggaggaggtgggaatttggggcggggttctggcgggggcgggtttggggcctccccggacccagccgcgggtctccgcagcgccggaggctggacgcacgcgtcccgcgcccggtcctggggtccgcacgagccgggtcgggcagaggctgctcctcctccccaggacgccggcgccacacccgccccccgacgcgtgcggcgggacagaagcggaggcgggagtgctgggaacagcctttactgcccacgccctacacggcgaacatgcgcagagcctcctccgccgagcggcactggttcagctggatctgcacctctacggtcaggggctcagggtggtaatcgccttcgtagatcggaatcacggctttcggcttttctgagaaaatttaagtgcgagcatgagccccgggagacggatgggctggcgttctcggccgccctgacccatcccatatgcaagccctggaccctgtcccagcgggagcacagttttggtcctcgggtgttaacagtaataagaaataaaattaaattgtatttaattagatcatttaataaatcgcagctgtttgagttgcaagactggctgctttttgctttgagacagtgtcgtgctccgtcgcccaggctggagtgcggtggcatgatcccggctcactgcaacctccgcctcccaggttcaagcgattctcctgcgtcagcctccaagtagctgggattacaggcgcctgtcaccacgaccggctattttttgtagttttagtagagacggggtttcaccatgttggccagcc

SEQ ID NO: 23656 - DNA, 1288 bp, Artificial sequence
  DNA replication origin
tgttgggcgtctccaagatgaccaggagtgcactgcttccctcggaggagaaccagcaccacagggtggccgtggccaccaaagcacacaccctttacacctgcctcagaggtcggggcttccaggagggagggagggagacaaagccacacaccacaagaggggaagcaggaaagctggggacttgtatcagggatggcttccgaggcaccccgccccgccttcccaccacgttctaagtgctgatttctcccagggacctgaaaagaaggatgaggagacagaatccaccagtgtggcctgcccgagctccacgtagcaaagcctgtcttcagtttctcatttttgtccctctggtgtctccctctgccccagtcccctccccttgacctccactgccaagtcatcctgtcccttcacttctgaccagtctgccgcattggccactgccacagccgccgtcaccagaaaagcaactgctaggtgctagggatgcagtggcaagcaagacagggtcgctgccctctcagaggggagcacaaaacgcataggaaccaggtatgttgagaagttacagtctaatgcagagaattggctgacgcggaggacggatcccatagccaagggtagctaaaaagccctccttgatggagggacgtttgagcaagaactgagtgaggaatggcaccttgcgtgaagacctggggtctctgcaggccgtgggcagagtcaggcagctccagggcaggagagaggggagaaagaagggagacgggggcccagcaggtttacagtaggaagaggccagcccggctagtgaaagagctaagggttttgttggttttttttgagacagtgtctctgtcacccagactctagtgcagtggcacaattatagctcactgcagcctggaactcctgggttcaagcgatcctccggcctcggcctccccagtagctgggactacaggcgtgcagggcccggctaatttattttttgtagagatgtggtatcttttgttgcctgggctggtctggaactcctggcctcaagcgatcctcccgccttggcctcccaaagcgttgggactacaggcgtgagccaccggccagagttttctgagccccctggagatctatgcgggggtgggggacaagggggtctggcagaggcggtgaaagaatctgacctttggtaaaaggccactcctaccgccccttccctggtgggctgcggaaggctggggaggaagcatgaacggcagctggagactgtctccgtgctcag

SEQ ID NO: 23657 - DNA, 1314 bp, Artificial sequence
  DNA replication origin
aagcactcaggagatctcggtcacttaagcttggttctcacacccgtgcatgcttgcacttgcatgttttttaagacaacagcttttgctttagtagttgggcggtcgcaagtgaacactgtccagtggttcttctggtgcccagactcggaggagatgggactgctctcaatgtgtttgttagaaacgaaactgttcgcactataaccccataaccccttacaatgttcagaaaaaaacaagaaggggcttgaaatacccactagtgtgccgcctgctcagcccatctgggtctgtgaaaccacatctgagccctgtgggctgtggtggcgacacaggcagagggcgggcagggttgccagcgccccgcctgggctaggaacgcctgtgcgcagctccctgagagctcggggaccacgcggaggttgtaattggtctctagaccacacctagttgttgagtgccgctgcttgaaaatctcagttctgccgagatcgcagaatacacacaagctacctttgggcaccagagcagacagaaccgcggagcttcagggtggaagattcgtggaaactttgccaagtaagtgaggtggggagagaaggaagccagtgcctgacactgtggggagtggctgggcaaagcagcattggaggtgttgtagggttcctactgtctgatgagctggtgtggggttcttactgtctgatgtcgtctctggtggaagttagcagggctggggcagatgcacagagcacggtggcgggggtgagcccaggatcggattgatgcccacccaccacctggcaccctgcagtcccagctggccagaaggcaagcatgctggaccacaaagcaaagatcctccagctctgctgctggcaagccttggggccaggggactcacagaagagcaggtttgggcctgtgccttcctcctgcccaaatgggtctctctccccttccccttccagccagggccgcagctggggctgcagcttgagtgacgggaaaagaaaggtttactccaccagcgcattagcggcactcacagcattaaaaatgcaggaggtggtgggaggagcgggccagggaggaaaactcatgcagctgcggggcgcggggaagagccgggcttctgcctcctcagcccggatcagagccgaagaacgagggcagtttgggttgagaaggattctccagtgtaaccgagaagcgagcgtccaggaggctgttggggaggtcggcactgtgggcttcctggccttcgtttgctgtttcgagggccaggacctcgtgtgttcccgtccgccc

SEQ ID NO: 23658 - DNA, 1288 bp, Artificial sequence
  DNA replication origin
tgggtacacctcccagacggggtggtggccgggcagaggggctcctcacttcccagtaggggcggccgagcagaggcgcccctcacctcccaggcggggcggctggccgggcggggggctgaccccccccacctccctcccggatggggcggctagccgggcagaggggctcctcacttcccagtaggggcggccgggcagaggcgcccctcacctcccggacggggcggctggctgggcaggggactgacccccccatctccctcccggacggggcggctggccgggcagaggggctcctcacttcccagtaggggtggccgggcagaggcgcccctcaccttccggacggggcggctggccgggcggggggggctgaccccccccacctccctcccggacggggcggctggccgggtggcgggctgaccccccccacctccctcctggatggggtggctgccgggcggagacgctcctcacttcccagacggggtggctgccgggcggaggggctcttcacttctcagacagggcggctgccgggcggaggggctcctcacttctcagacggggcggttgccaggcggagggtctcctctcttctcagacggggcggccgggcagagacgctcctcacctcccagacagggtcgcggccaggtagaggcgctcctcacatcccagatggggcagcggggcagaggcgctccccacatctcagacgatgggcggccgggcagagacgctcctcacttcctagatgggacggcggccgggaagaggcgctcctcacttctagatgagatggcggccgggcagagacgctcctcactttccagactgggcagccaggcagaggggctcctcacttcccagacggggtggcggctgggcagaggctgcagtctcggcactttgggaggccaaggcaggcggctgggaggtggaggttgtagcgagccgagatcacgctactgcactccagcctgggtaccattgagcactgagtgaaccagactccgtctgcaatctcggcacctcgggaggccgaggctggcggatcactcgcagttaggagctggagaccagcccggccaacacagcgaaaccccgtctccaccaaaaaaatacgaaaaccagtcaggcgtggcggcgcgcgcctgcaatcgcaggcactcggcaggctgaggcaggagaatcaggcagggaggctgcagtgagccgagatggcagcagtacagtccagcttcggctcggcatcagagggagaccatggaaagagagg

SEQ ID NO: 23659 - DNA, 979 bp, Artificial sequence
  DNA replication origin
ctgagaagtgaagagcccctccgcccggcagccaccccgtctgggaagtgaggagcgtctccgcccggcagccaccccatccaggagggaggtggggggggtcagcccgccacccggccagccgccccgtccgggagggaggtggggggggtcagccccccccgcccggccagccgccccgtccggaaggtgaggggcgcctctgcccggccacccctactgggaagtgaggagcccctctgcccggccagccgccccgtccgggagggagatgggggggtcagtcccctgcccagccagccgccccgtccgggaggtgaggggcgcctctgcccggccgcccctactgggaagtgaggagcccctctgcccggctagccgccccatccgggagggaggtggggggggtcagccccccgcccggccagccgccccgcctgggaggtgaggggcgcctctgctcggccgcccctactgggaagtgaggagcccctctgcccggccaccaccccgtctgggaggtgtacccaacagctcattgagaacgggccatgatgacaatggcggttttgtggaatagaaaggggggaaaggtggggaaaagattgagaaatcgaatggttgccatgtctgtgtagaaagaggtagacatgggagacttttcattttgctctgtactaagaaaaattcttctgccttgggatcctgttgatctgtgaccttacccccaaccctgtgctctctgaaacatgtgctgtgtccactcagggttaaatggattaagggcggtgcaagatgtgctttgttaaacagatgcttgaaggcagcatgctcgttaagagtcatcaccactccctaatctcaagtacccagggacacaaacactgcggaaggccgcagggtcctctgcctaggaaaaccagagacctttgtttacttgtttatctgctgaccttccctccactattgtcctatgacc

SEQ ID NO: 23660 - DNA, 1103 bp, Artificial sequence
  DNA replication origin
gcagggggcggcgcgggccctctccctttcccggcaccccctgctcccctgccggcttcccggcctgcggggcccgcccagggtcgggtcgggggtcgaagcccggcgtccgggagcggggccgagcctcgcgcgccggagccgtccgggaggggaccgcgggagtctcgggtggccggcgccggaggccgggggtccctggggggctcctccggagctggaaaagtggcggccctgtcagcgccgagccgggccttcgcttcctccgcccgcctcaagatggagcttggactccttgcccctgcgccgccccaggcgccgctctctccctggcgccccgctccctctcctgggccccggggcggatgtgggatcggccggaccccgggaggccgaagccgggcgggacctgttgccccgggcgccgcgcctgtcacctgagcattcctcaggccccgggtgcccggcgcccgcgatccggcatggagggcaccctggcccggcctcccccgctgccccggcttttgttttcctctcaagtggggctgtgattctcggagaccggggaaggctggaggtggccagatcgctctcgggtttccgaaatcacaccgctgcccggtaatccgaaccttctaccgcggcaggggattggcgcggaaggcagatgacacttgttcagaggttattttacaagcagaacctagcgattgcccgaattggaaggtcctgcctttcaaaaatcgggttttgattcgggggtgaatcctgaatccggctgtttctccacttcatgtggcttttccatctggcaggagccgagcgccaccccctcctccctgcacagccccacctctttggtatgaagaaattacacgttgtccgtcatcggtttagatacctgtttttagcaaaacttgggcgccagtgaactgttttttaaaacaaagggtggagaagattctgtaattgtgtgtgtgtgattcagcagcctggccttcttcctcttttaggacagtggcccctagcagctctataagtattaagtgctgtggccactgctgtcattagggttatgattctggctgttcttattatttgat

SEQ ID NO: 23661 - DNA, 1722 bp, Artificial sequence
  DNA replication origin
ctcccggacggctccggcgcgcgaggctcggccccgctcccggacgccgggcttcgacccccgacccgaccctgggcgggccccgcaggccgggaagccggcaggggagcagggggtgccgggaaagggagagggcccgcgccgccccctgctcacctcctcggacgccgccggtcgccgccacctgtcccactgcagcagcagcagccgccgcggccgccgcctcccgcctcccggctcgtcggctcggggcgggggagagcgtgacgcgccgccgccgccgcggggccgggcgggcgcgcgctgccaggagaagacgccgcgcggctcctcccagcgctccgccgccgcgcccgcccggccggcccggccggcccggcccctcgagtccgcaccggccctgcggcccgcgcccggccccgcgccgccccgccgcctctttgtctgcgcccaccgcggccccgggaggaccctggccccggcgcgcccgccgctccgccctcgaaccctcccgagccccggcttggggagcaaggtgcgagggaaaacccacaggcctgctccgaggggcttctcgtcatttctgcaaagtgttcccagaatttgcaagtcacacccaagagccccattcagcctcgacctcagcccgctctttggggctgattcatttgtttgccctccccttcccgccagacaagggtgagaaatcctttgaaacaggctgcaaggcgcttccgaagcaggttaagttggggattgggaaggatcatctctgccctcgcctccctccagggaaagaccctggatgaggcgtccctggagaaaatgctgaaaggaactgtagagcaggttaagcttgggaagaactgtatctgctccccacttccctccgggaacgaccgcgggttaaaaatcctttgaaacgatcccagggtttgctccgttcgtttgagaaaagccccttttattcgccctggctgcttggacggaagccctggttagtgtcccatcctccttcccccctgggatttcctttaaaagcttttgaaagggacaggagggaaggctgcaacagcctgctcggggctggggtagcagagggcggccagcatttcactcccatggaccatggcaaccccagaagccttacatctccagggaggaatttgcagctgtcggggaagcccaggattttgtggtggataagggggcaggggcttcctcctccttgccagtagaagagaataatcggcgggtgacccctctagctgacctttattcaaagcaccgtgctgcctggaccagcaggaagagggaactgctctggtaatgcacgaagttctgaactatgtaaatttgtctcctggcccctcctctccattcatgtctgaaatccctcgaaatgctgttacctaattcaacatcgccctaatttacaggctgcaaggtcaggtggtggtggtactcctgaaatcccatatccatattcctaatctgaaaggcgcgcctcaccccctaatctaaacagtcttcagctgtaatcagcaagctgtggaatcatagatgtcataggatgaggcacagaccacttctaatgggggagttcagctaggaacacttatgggcttgtcttttcttctctactcagtaggctgagcctgtctttattaaaaatattgttttggggctgggtgtggtggctcacgcctgtaattctagcac

SEQ ID NO: 23662 - DNA, 1024 bp, Artificial sequence
  DNA replication origin
attttagctctaaaaggtcatttctttcttttttttcttttctttttttttttgagacggagtttcactcttacagcccaggctggagtgcaatggtgcaatctcggcttgctgcaacctccgcctcccgggttcaagctattctcttgcctcagcctcccaggtagctgggattacaggcatgcgccaccatgcccagctaatttttgtatttttagtagagactgggtgtcaccatgttggccaggctggtcttgacctcaggtgatctgcccgcctcggcctcccaaagtgttgggattacaggcatgagccactgtgcccagcatgaaaggtcattcctatgctgtatttggatttcctgaaggtctcttgtttattactgtttttaattcagagatgcccctgtctgcttcagcactgtgggttctcatttctctgtgggctcctgtgtctgggtgctggggccccttcagtgggtcgttaatcctcttggtcagtcactcggtcagtcaaatccggttgttgatgctttcctacatgggtaaatccccaggtagaagtaggtggaacagcctctgctgccatgggcttgggacatagtgtgtccggaattggtgggttcttggtcttactgacttcaagaatgaagccgcggaccctcgcggtgagtgttacagttcttaaaggcagcgtgtgcggagtttgttccttctgatgttcggatgtctttggagtttcttccttctggtgggttcgtggtctcgctggctcaggagtgaagcagcagaccttcgtggtgttacagctcttaaggtgcatgtctggagttgttcgttcctcccggtgggctcgtggtctctctggcttcaggagtgaaactgcagaccttcgtggtgagtgttacagcttatataggcagtgtggacccaaagagtgagcagtagcaacatttattgcaaagagcaaaagaacaaagcttccacaaggtggaagaggaccctagcgggttgcctttgctgcc

SEQ ID NO: 23663 - DNA, 1093 bp, Artificial sequence
  DNA replication origin
ggcttcacccagtggatcctgccctggagccgcaggtggagctgcctgccagtccgtgctgtgcgcctgcactcctcagcccttgggtggtcagtgggactgggcgccatggagcagggggccgtgctcctcagggaggctcgggccacgcaggagcccacggagggggttgggggaggctcaggcatgacgggctgcaggtccccagccctgccccgcaggaaggcagctaaggcccggcgagaaattgagcacagcagctgctggcccaggtgctaaggccctcactgcccggggcctgagcggccgaccggccgctccgagtgcgggggcccgctgagcccacgcccacctggaactcgcgctggcccgcaagcaccgcgcgcagccccggttcccgcccgcgcccctccctccacacctccccgcaagctgagggagcgggctccggccttggccagcccagaaaggggctcccacagtgcagcggcgggctgaagggctcctcaagtgcggccaaagagggagcccaggcagaggaggcgccgagagcgagcaagggctgtgaggactgccagcacgctgtcacctctcagtagaagctggtagaattcccctggggctcagaaaacagtacctcaaaatgaagccttgatctgcagcctcagaagcaaaagcttttccctgactctcccgtgtcctcctgcctggaagtcccgcttttcccccgaggccagccgtagaaactagaattcctctttcccaacgccagccataaaacctaaaaatatgattctaatttcccctccatctttctgtatcaaaactggccattgaaaaatggcccaccttgtttcactgtagctcataagacccccattccacagcaggtcctgccccataccctgaaggaaggaatgctgttcagagaggccaagaagaatccaggtggacaggccttgccatctctttacactgattgctactgagtccagccacgttaggtgattttttttttagacggagtcttgctctgttgcccagtctggagtgcagtggcgtaacctctgctcactgcaacctccacctcccg

SEQ ID NO: 23664 - DNA, 1751 bp, Artificial sequence
  DNA replication origin
gttcccttcggcacgcccatctcgaggattcatcctctccaacgggtgacgagcaccgcctgccggcggcccgcctctcggcctcttggccacgccccccaccggagggcaaggcgcacgctccgcaatttttctccgcccccgtcttccggcttctcgcgacatccgcccagcggcggccggaatctcgcgataaaggctcattgtctcgcgggagcgctgctggcggtcgggcgctcgggcggccctggccggggagacgagttgcatgtgttggttcagctggcgatagcggcgggagcggagccggcggggcctgtgcgaccgcctgggtaacgaccccaagtgcttctcccgctcccgagaagctcgtagagagtgtgggggaagctgagatgctgcctggcggaagggggccgggccgggcctctccacacccccgcccacaagggccccttctggcgtccccggggttgctccttcgcctcagacctggtcgcccttgtcccctcagtgctcttacattctgcgctcgttttctctcctcatccttcttacgctctggttaccccgccccctcccatgccctttttagactccccaggcccctctcatggcgtttagttgcccccacaccctgcaccccgggcttctccgatgacccaccccttgttcctaggcacttccagcctctctccattcggcgcctttgtagcccttctctcactgcagtttgcatccctcccagatcaccctcagacctttttgctccgtgtctgccgtgggtactcaccccatctttccttccccattgcttcctgtttttctctagtgagtccctctgccccatccttcatggtccatttgctgcttgcttccctgtagacctgtggagcaaggagatgttgtgcctgggattgctcatattttatgaatcgaatgcagcttgtatcccccactcaacaacagacttgaaacagctttggggtggggaggtttctgttgagaggaacactgctcttctggggtcttgattctaaaatagtgagggtgtgttattttccttgcttacaggtttgtgaaatggctgctgacatttctgaatccagcggggctgactgcaaaggagacccaaggaacagtgccaagttagatgccgattacccacttcgagtcctttattgtggaggcaagtgttggtagccacagaatgacttttactcactatacttttatgcattgtaataacagtttgacatttggtaagctttcttccccatccttttcatttggtgagtttgtactgggggagaggagtcctggggaggaggaggcatgaattaacagagtttccccacctgggtgatttgtgtctggctactctgcctgaagaagcttacagtccatttgtaacaggatgtgcaactaggttatttcagcctgaaggtcctcaaggtgtatgctagtctagctgtcaaaggagggcttcttggaagattatgagttaaggatggcaaggactggatgagaaggtggggaacggcgtcccagacaaagcgcacgactatgtaagaaaaagcttgatggctgtctgtgaagaagtgagcagctttgagtttgtctggtgtatcgtatagggagggtggcccgttaaggagtgggagaaggtgaggttggagtgttgggtggtaggacagtgaggaaagtcttcttggtttgaatcatgatatatgtattaggtttaatcaaga

SEQ ID NO: 23665 - DNA, 1628 bp, Artificial sequence
  DNA replication origin
gccaaataataagcattcagtacatatcagctattgtgattctaccgttattctgataaagaagctttttagtgattggaattagagaaaacaggattaatttctccttttggtgcagtgacaggagagtcttggcaaatgttatcttttggggtcagctctagctcttgggctggagggtgaggaatcagttaaagaaaagggtccctggcggggtgtggtggctcacgcctgtaatcccaacactttgggaggccgaggcgggcggatcacctgaggtcgggagttcgagaccagcctgaccaacacggagaaactctgtctctactaaaaatacaaaattagccaggcgtggtggcacatgcctgtaattccagctatttgggaggctgaggcaggagaattgcttgaacccaggaggcggaggttgcggtgaggtgagattgtgccattgcactccagcctaggcaacaagagtgaagctcggttaaaaaaaaagaaaagaaagaaagagaagaaaagaaaagaaagaaagaaagagaaagaaagaagagagagaaagagagaaaagaaagaaaagaaggaggaaggaaaggaaagggaaagggaaaggaaaggaaaggaaaggaaaggaaagggtctctgacctcagacaggttacagtctcactagggagacaagggtcaggattacgtgggcgtcattttcctccttacaggcaggcggtgcctctcccttcaaaagcaagggacctttatgcatgattccacatctgcattccgataggaaagggaaacagcagaaacacaatacccatctgagagctacgcttagagaggactctgggcttttatttatttttttacttcagtcttgtgaccagtaattttaagggaaagccaataataatgtttttaaaaagcctcacgccacccctggcggcatctcctcggtgtactttgctgttcagatccgcctgccttctgtgccagcctaacagcgcccggcctcagcccccattgtccctggagctggcgaggtgtccggttgcggagccggcggcgtctctggaaatgcatcctgcatccccgcatggataacagctgcagctatgtcagaattgcacaaagaggggagagtgtcattgtgtgccttttgacacatacattaagaccaaaaaggaaaaaaagcgtctatctgtgctgccaccgaccagactcatggaggccagattttctccaattaaccagatcttgccctggtgcagacaagacttagtgagttcggaggaggggtggggagagggaattggctggggtccctaccctgggtggaaggaggagggaggggttccccctcccccttcccctaccctcccctccgggtttagggaggggattagaggtggggaggagctgggggggcgtttggcctgtgccccaaccttgtgagtgaggtgggggttggaggtgtgcggggggcggggcgtgtgccggggtcgccgcgggatggggggttggggatgtgcggggagaggcgcgtgtcccgagatcgcggggggtggggttggaggtgtgcgggtggaggggcgcgccctggagttgggggcgggcgaggcgtttgcgggc

SEQ ID NO: 23666 - DNA, 1432 bp, Artificial sequence
  DNA replication origin
aagaacgtgccggcgcgggtgctgagccgcaggccgggccacagcctggaggccgagcgcgagcagttcgacaagacccaggcgagcgggcggcgggcggcgggcggcgggcggcggcgggcgggcgggcaagcggcgtccctgacccctcacgcgcgaacggctggggcccgggaggcgccggccaggggcgggggacggcgcgggggcagggcctgtgtccgcccgggctctccgagagctccgctgccgccccccgccggcctccgcggcccgagccgaccggcgcgcaggtgaaccggaagccgcgctccccgctcccgccgggcgctcgggcccagaggcgccggggctgagggggccggggtcagggtgtgcgcgggccgggagcgccggagctgaggcggcgggggacggagatggggccggggttgggtgtgcgcgagcccagcgcgccgggggtcgagggggctggggatccaggtgctcccggggccggcgcggcccgactggggtccccgaccttccgtgccgctccttgccggctcctgcccccgtctcctaccccctgaaaccgatgcccccacgggcaatttccttaaaggaaattccttaaactcccagcttccttctctcgtgagcggtttcccagggctgcacagtctcctattatttgctgggtgaaaagcttctcgtatgtcgccagacttgtttgcccgagcgctgcccacgtataaataggtgcacaccccctcattaaataccggcgcccgacagacagaaacttcctggggctcccttcctgcgcctcccacgcttgtaactcttccagatgatgcctatcctgggaaggcgttagaaatgaaataagggcgcgggtgtgcgttttgtacttgtgtttgtgccggggacccacgatgcagacgttgctgcgtttctggtttcctgttgctttttattttacaaactcttgaagtgctctcaggcttgggggatgggcggtggaggggggcatacttgtttatttgccaaaataagtcaaccaagactgaaatggctgaaaaattttactctagagataaaggaagccagaggacccctcccactcctgtctaaagcaggttggtgacatttgcgtttgtggcggctatttgcaagttccgtcccacttgtccttgcagagagctatgacttctgcggttgccttcacatctagttagcacacgcactctacaacagctttcgttttgaaatgagagagaacgcagggagaccttctaacctttgtgcttgggattgacccagaaagcgataataaatcctgaggatatcaaggctttagaaatgcgaagtgctggaacccaggtggctgcaaattaccaatttagccttgtgatcttcatcaccatcaactggttcagcccggatagcc

SEQ ID NO: 23667 - DNA, 1515 bp, Artificial sequence
  DNA replication origin
tctcaggtcacaaacattggtggtgggggacagaggtttagcagacctgttccctgcatgagaaataccccatgccccacggagccagggccgggttgtagtgatggtaccgccgtgagccctcctcgagagcacagtcacgtccaggaagcctactcggaaaaggaggcagtagccggggcggggggggaggggtgagactgccataggtggagcgggagggatgctgagattctggccttggtcaagtgtgaaggtgccacttgcgcagctccgggtgacagctgcagaccccactcctgccttcctccgcccctggctgggctgcaggtggcagcaggagcttgacacagtttgacagggtgaggccccacccaggagaggggcagcctatggggcagtgggccacaggccctgggctttgcctaagtttcctgggaatgcctcccaggagagtggggacaatgtgatgtgcacccttcatggggtgccgcaaaggccaggtgggccccagccgggggctccagtctcagctgcttttccccaaggggagatggggccggaggacaccacactgggccatgacctggggctcagggcaccacatctgccaggagagtcaagtcgtgcaggttttgggcaggatggcctcccggagccatagcccagctttggtccttgtcccctgactcctggagctcttggtgttcactgtagttccagctgcaccgatcaggcacagggaagtccttcagaagcttaggttgaggggattcctgtctcccccatcgctccactggccttgaacccaggcagaatcctgttcagtattgtgcttctcccccttggggtggtgtctcctggggtggctgcctggggctctaaacactgctcctttgtccctcacaggccatcagcatcagcaaagccatcaacacccaggaggcccccgtgaaggagaagcacgcccggcgtatccttggccggctcttggacccaggagttgggtgtggatgtgggagcagcgtagtgctgcaggtggcctgcggtcagctgtgccggggtcacaagttccctcactgagcccggggaggagggtcctgtgcagcttggctccttcccatctcagtctcatcacaaaaacgcccccattgggcccaatgatttccttgtcttgccctaactcctgtccccttggctggacactggagctctggtgacccggggttgatgggcacgtgattgggggccggccctcttccggcggccctggcctctctcagccgggtttgctgagcccccgtgctccagtctctgcttccacacttggccttgacattgcaggcatcattctgggcacacaccacgagaagggggctttcaccttctggtcctacgccattgggctgccgctgcccagcagctccattctcagctggaagttctgccacgtcctccacaaggtccttcgagacgggcaccccaatgtgagtagcagctgctgcctctgctccc

SEQ ID NO: 23668 - DNA, 1162 bp, Artificial sequence
  DNA replication origin
gaaatgtggcaagaccacagcccgggcacctcggtggttagagagcctgtggcagggcgcaggttcctgggctcccccagacctgctgctgaagaatcaggactggaggtctgcattttgagcacacacacagtaaggcctgagagccctggggggcctgcaatctggatgcactgcaagacctcaggagttagagatgtccctggtgggcagagggccttggcctggttctctctggagcactgtggggtgctcgtctgcctgggcagggacataggagcagggcaggccctggaccgggtacccacagggaggcctgaccagggcgttatccaacccagaaccactgcccggactcacttcccttgaagcgaggaaaacactgcccatggtgccacctgcagatgcaggcccagctggcccggccgcaggggccgtggggctggaggagggagcagggaggatgtgtccaggcgcccgtcgggacgtgcctccctgccagcaccagcactttaataaagcgtccctgctcagaactggcctgccgccctggacaaagagctctcttctcacaagagtttctttggcaggaatgacaaggaggaagattaagggaaaaagctagagacagagagggtggttggtggaggccaggagaagacgtttgttgaatgaagaagtgcccggtggtgggtcactctcgtgcccaggtccttgaggactcttggacgtgttcacgagccgtggcccctcaccctgtctgtcttcacacagggacatttgcatgaccgctacggacagctggtgaatgtctacaccaagctgctgctgaccaagatctccttccacctcaaggtggtttcctcgggggagtcatggggctgagggacccgtgggcttttcccactgtgacgttatggcacatgttgggacatcgagggtgggatctgtcctctccatgagtctttccattcaccttcttgtcccaactatgactaaaggggagacggggaagccagggcatcacgaagctcctagaacacttcaggcatttccgtggacgtgggcacgggcttccccaggcgtttctgtggacatgagcgctgggcttcctcagtctctgctgtgctggccgggtgctcccctcctcccaacccctcca

SEQ ID NO: 23669 - DNA, 1276 bp, Artificial sequence
  DNA replication origin
ccctggttcagtggccgctgggttgggggggccctggttcagtggccgctgggtggggggggccctggttcggtggccgctgggttggggggccccctggttcggtggctgctgggtgggggggccctggttcggtggccgctgggtggggggggccctggttcggtggccgctgggtggggggggccctggttcggtggccgctgggtgggggggccccctggttcggtggctgctgggtgggggggccctggttcggtggccgctgggtggggggggccctggttcggtggccactgggtggggggggccctggttcggtggccgctgggtgggggggccccctggttcggtggccgctgggttggggggccctggttcggtggccgctgggtgtggggggccctggttcagtggccgctgggtgggggggagccctggttcggtggccgccaggtgtgggggggccctggttcagtggccgctgggtgggggttctctccacagcatccccagtttcccgcgggcctggaggtgacagatgaggtactggagaaggcagctgggaccgatgtcaacaacatgtgagtcactctgcatggctacatagccagttcccctcggcttccccattccttcctaccgcgtctcacgcccaggcgtccgcatggggcagtggggttgaatgagtccgtggctttgttggttgatgctcacgctcccagggacagagggtgaagttaaaagggtggggtgtacttgaaggactgtcgtcctggcagaggcacgctgtctcaccagagccatggtgtcggcggtgcccccgtccccactggagggggcgtctcaggacgagtgggtgggtccacccaccctttttcatttcttcccccacttctcttgcgtagcttccagctcactgtggagatgtttgattacatggattgtgagctgaagctttctgaatcaggtgagccgtaaagaggggatgcgggggtctgagtgtattgctaagtccccagagatgggacgagaagaaaaaagaagacatgagtgatcagaccaactgatcactatgaaatgaccctggccagccgcagtggctcacatctgtaatcccagcattttgggaggccgaggcaggcagattgcttgaggtcaggggttcaagaccagcctggccaacatggtgaaaccctgtctctactaaaaaaatataaaaattagccaggcgtggtggcgcacgcctgtattcccagctacttgggaggctgag

SEQ ID NO: 23670 - DNA, 1361 bp, Artificial sequence
  DNA replication origin
ctgtggcaggtggtggctgacctcttcgatcagacgtttggaccccccaatgggtctgtgaaggacgacaggtgagggctggaggagccgactgggctgggggtggttggaaacgggctcagctgagctgtgctctggacagttctgtctggaaaggccataggtggggaacatgaacccgtgaggtgcccaaatcctgagtggccactgaggaggagacaggttcctgtgctgggtctgttgactgttctggttgacttaacttgaaccccaggacctctgtccccagggacctccagattgagagcttgaagagagaggtggaaatgctccgctctgaactggagaagatcaagctggaggtgcggggtggggatgggtgggggccagggcccctcacggcccaggcagggccccacgtcacacctcctcccgcaggcccagcggtacatcgcgcagctgaagagccaggtgaatgcactggagggtgagctggaggagcagcggaagcagaagcagaaggccctggtggataatgagcagctccgccacgagctggcccagctgagggctgcccagctggagggcgagcggagccagggcctgcgtgaggaggctgagagtacgtggggccttggccacaggggtccaagggtgtgtccccagcccctgccaccccacacggggcatcactgcccctcctctcgcccccagggaaggccagtgccacggaggcgcgctacaacaagctgaaggaaaagcacagtgagctcgtccatgtgcacgcggagctgctcagaaaggtaggtgcagcccatcctccatcccagccggtggcagggcctctcggggatggcagcagagcatgagcccttcccctgcccatgcagaacgcggacacagccaagcagctgacggtgacgcagcaaagccaggaggaggtggcgcgggtgaaggagcagctggccttccaggtggagcaggtgaagcgggagtcggagttgaaggtatgtcccttgtggcacagggccctgccccggcatccccagcccactgccccagtgacacgctgtcctgtcccagctagaggagaagagcgaccagctggagaagctcaagagggagctggaggccaaggccggagagctggcccgcgcgcaggaggccctgagccacacagagcaggtgcatctggctttgatgactggaggtggggttctggggccagtcctgggtggaagtcaggtcctctttcccgtgaacaggccccacctgggtgccactcggtgatcctgggatgcagccctgacccagacccaggggctacatgggagacaggacctaccgctggtcctcaggga

SEQ ID NO: 23671 - DNA, 1224 bp, Artificial sequence
  DNA replication origin
gaggggagtccccagatcccgtgctcacctcaatcctccgcacagcatcttcaatggctgcggatgtggccgccatctccttgtcgaccacggcccccagctcctcctgccgcacatctaggctcttgggtttcagttcctggtgaggatgggagtcagacaggggtagcctccgtccccccccgtcccacgggcagcctgggaaagaggttggggaccacagggatcgaggagggtgcatggtccccaccctgtgtcctgaggctgcaggctccacgcacaaacacctgttcagccaacccagaggtgggtgcagaggtcagaggcaggcccaagcctcccaaacccacactcagctgtgcctcacctggcccagctgaaggatgccctgcaggggtgtccgcaccaggctggcctgcatgtgccgcagagcctgctggtcctgcagctgccccatgagctccagagcccgggccccgcactccctgcaggtgtctatgaggcctggggtgagaaaggaccgtgagtggagccccccccaccgacaggctccataaggacccccaggggagacaagccagtgaggtggacagaacctgccatcccaggacccacttacggtcggcagggtcggtgggagccaggtgcgaggtggcaccgccattgatgatggtatccgcagccaggtgggagaagcgggtcagagctgccaccagggcggaggcgtctgtgcgggtgggtggggccaaggttgggggaggatgacactgagacactagcactgggaccaccgtcggtggccagctatcccaggaggaggaggaagaggaaaggagggctcggcaagacaacgtccaggaggcagtgggaaccacaccacagtgtgtgtggccccgggcccttcagtgctctgccacctgcagacatatggtggcccaggccccagaggcaaaagcctatttgtccacagggcaggggtgggttcctgggaaggagcaggcagggggcatctgcttggcttcccagagaggtccctgctgtctgtaaacctcccaaaaggcaagaggtggccatgggcgctggaactgggacacagcccccgcctccgccctgccctggctacactcacctgccaaggaggtcaggtactgggcgtggccctcctccagggtgctcacggcatccaaggcctcctgggccctgctcaccaggtagtctgcaagc

SEQ ID NO: 23672 - DNA, 2011 bp, Artificial sequence
  DNA replication origin
agctcagaggtcacggggcagccatgggcgcctacctgggtctccatctcctgcttcttcagcttgatgagggacaggccggagaaatccatggtgtctgtggccggaggacaagggggtgaacatctgggcacccacccccattcagcctcgggagccagcagcccccgttggcatctggcactcacctctgtcctcaatctgctcctggcctgacttggtggaggccaccacattggcagccctctcattgactgtgcgagaacattcctgcaggcggctcaggtgggggctgtgcttgttggccttcacctgaggggcgagaggtcagggtgggcccaggtctcccagctcagggcagcagcaggcctgggcttggcagccacagcccaggccaagctgggcccagagcccagtgtgctgctgtcggcgtgcaagctcaccttggaggccgccaccagctgggccgtgctggctgcgatctcgtgggagcagacgatgagctcctcatacttgcccgtgtgaagcaccaccttgtcagctgcctccctgcgggtcaagggccagtcagggccagggtctctgaccccacggacggctggcaccactccacaccccctctactccctgcaccctgttgaaccccaaactgctccaactggcaggaagcagccccctgcccccccccacccagggcaacctacaccagctgtgtggctccccagcccacagccttggaggccgagatgaggccttcggtccagcgcgagttcttggcgtaaaattcctgctgcgtggctgccccctagtggcgacgggagaacagggcaggacatgccagtcaaggacaccaaaggtggaaagtggccctcaagggccctctccccctcactctggccatagggcgcatccctgaggcctccctgtggtagggggtggagggtctcatgcccagggtggcctaggctgggggtcaggctccttgtggactgtgccctgctgccgccggcccctcaccctgccgctctccacgatctccttctgcaggctagtggatgtcgtcaccaggagccggatagcctgccgagaccaagacagcaatgactggtggccctccaggtgcagacccccccgggtcacagcccctcaccttcatcaggtctgtgcaggagttgaggatcctgggggagagaaggagagacttagctgccgctctgcagagcagcccacacgacgccatggcgggcctggccacatcagggctcagcaggtggggagggagtgtctgctctgagccaggccttcctttcccgtgagcagaacagttgggggcagaaccttaggggccacggggagcccacctcggctgggcctggggggacagaaggggggctcacctctcgttcacctccagcttcacccccgagctggcgtggcgtgcctggttcatcatgtcctgcacccaagaacagagccgtgagctggctgggaggaggggaccgtggtcctgggaaagccagggctgcctcctgccctctcagctctgacctcacaggcccctggaaaacgccatctgtcctctgtctggaggctgagagcaggagtgggtgcagcctgtacccagcccagttggggcctccggcccccaaagctccacaggaatgaggggagtccccagatcccgtgctcacctcaatcctccgcacagcatcttcaatggctgcggatgtggccgccatctccttgtcgaccacggcccccagctcctcctgccgcacatctaggctcttgggtttcagttcctggtgaggatgggagtcagacaggggtagcctccgtccccccccgtcccacgggcagcctgggaaagaggttggggaccacagggatcgaggagggtgcatggtccccaccctgtgtcctgaggctgcaggctccacgcacaaacacctgttcagccaacccagaggtgggtgcagaggtcagaggcaggcccaagcctcccaaaccc

SEQ ID NO: 23673 - DNA, 1863 bp, Artificial sequence
  DNA replication origin
cagtgacgtcattaatgcgctcacgcgtcacagcccaatcatagggcccttcccctccctttagaagtcccgactgtccctgacacattccactccaagcgagccgcgacacttacgtcacgtccgcccgcccgcgcggtgatgacgtcacgacccagggctggcgtcacgtgtcccccccgcggggggcggcccttgagggcggcgcttccggtcggcggagcctggtggccgcagcggcggtggcgacgacggccgagacgtggggatggcgggcgccgggagcgaagcccggttcgccgggctgtcgctggtgcagctcaacgagctgctggaggacgagggccagctgacggagatggtgcagaagatggaggaggtgagccgagctgggcttaaggcggcggctgtgaggcctcgagcggggttcgctcctcgaacggtggccggaggcggaggcgaccgcggcgcctccggtcgtgttgaggggactgggctagaaatgggggcgcttggggcggggtgcgggagccagggaaccgcgactggtgcttaggcaggaatagggggcctgagagggggtttgaggcactgaggggaccgagactagggcggaggcgggaaaaagggtcctgagacggggcttggggagccgattgggggtcctgagacaaggttttgtggggctgaggacttaaggctgggtctgaagacttaaggctgggtctgaagtggagattagggagcctggaatgggaatttggggattagagtgctatcgttgggtctaggcggaagaggacggaactggggggatctgagattggtttggtcggaggagcggggagagtaataagggctgagtcggaggcgaggattaggggtgactgagggggaccaagagctagatctggtagaggttggggggtttcctttgagaggaaaggttggggacaaccagggggactgaggcagctataggggatcagagtaggttttgggggactgagtggactatccaaataggactcttaggagaggattgagggttccaagatgggttcgggaggctgagggtctgtagctgagtctatgaggtggttctgaggctctttaagggttgggcgagggtccccagcccagggtttggaggcaggagtccatggtcataccatagccagggtaaggtttgaaggttccatgtatctaaggggtcccaataatgcccctggagtctgacttcttttgaagtggccccagcagagttacgggagttcgtggatgggcctaagggtggcgacaggatacgtttttctgtaagggttgccccctccaccgaggaagggaaggtgggaaatttagtgtggctggctttgtaccactgcgtcccacgtgtctgggactaaggaaggttcctggagcagtttcaggaagaagttaaaatgggggtttggggctggctgccaaccctcacctctgagagtcaagccttgcccagcccctggaaggcatgtgccagctcctgtttctggttatcttccttcacaccttgaggtgtggtttgctctcgggtaactgacttcatccttgcagatttgcagtgtgtgctccctttctctcaacccatttggactcattctcggaaagtctgatcttttgggtctggttctcctccaggcaggtgggcccaggctaatcccagctcttcctggcccacctaccactcctttatgtctctgaagtctgagccttcccacgcctacagtgctgagcctctcacccaggagcccgtgtgggggcttttggctttctttccgaagagggattgttcagcaccaagccagcccccttaaaagagagctt

SEQ ID NO: 23674 - DNA, 1269 bp, Artificial sequence
  DNA replication origin
tgcctaagcaccagtcgcggttccctggctcccgcaccccgccccaagcgcccccatttctagcccagtcccctcaacacgaccggaggcgccgcggtcgcctccgcctccggccaccgttcgaggagcgaaccccgctcgaggcctcacagccgccgccttaagcccagctcggctcacctcctccatcttctgcaccatctccgtcagctggccctcgtcctccagcagctcgttgagctgcaccagcgacagcccggcgaaccgggcttcgctcccggcgcccgccatccccacgtctcggccgtcgtcgccaccgccgctgcggccaccaggctccgccgaccggaagcgccgccctcaagggccgccccccgcgggggggacacgtgacgccagccctgggtcgtgacgtcatcaccgcgcgggcgggcggacgtgacgtaagtgtcgcggctcgcttggagtggaatgtgtcagggacagtcgggacttctaaagggaggggaagggccctatgattgggctgtgacgcgtgagcgcattaatgacgtcactgcggctcgggagagcgcgccatgaggtcataagagcctttttcctccaggaagagagataccgcgatccaaggaaaacaggcagtgggaaggaagttcccgcagcctgtgagcccagcccgatgcacggaacccaaaagacagagacttcatggggaaacaactttaggtgtcattggttacttggaattgtggagctgccacgtcattcatttaacaaatatgttttgagacctactctgtactgggcattgagtatacagttctgaataaagcaaaacggacccctgcttacatggagctaacagaatgaaagaggacgcaaacaaaacaagaaataagtaaaataattaggcgatcacaaataagggaatggacactgaaataagaaaataaaaagacctttagggtagtaagagatggcactttcggagaaggtggcgtctaaggaaatgtgaaggatgagaagggaggaaccagccaccattcctgtaggaagctcaaggcagcaaaaccagcacgtgcaaaggccctgggacaggactaacttggtgcattcaggaatgggaagaaggccagtaaggctggagcattttgagcaaggacccattgagtggcccctttgcatcacctcagaggaaggtgcccagacatccaggtgggccaacctgtgctctttcagaaacaacacgatttagggtgcagtcgctct

SEQ ID NO: 23675 - DNA, 1294 bp, Artificial sequence
  DNA replication origin
gggcgggctttcctggacggggcggggcccccgaggagggggctggcgaagcctccgggtggggacgggcctcctgggggcggggccacagctggccacctgctcacctgtggcaaactcctcccacatctggccaaccaggccctccacactgcgtgctggcctccacctggagccacgggcccatcctgaggggacggaaatggtttcacctgaaggaggccagctttttaactggcctttttccctggagggacagccagccagtccaggagggtgggttatggtcctcattcattcacttattctttcattcgttcacccaacagatatttatccagtgcctacggcgtgccatatgcccttttaagcatttgaaattaaacaattaacaaaacaagatccttgcccttctggagctgacattctagtgagggtgtcagacaacacatataagcaaatgagatatattggaagggaatacattttacggagaaaattggtgcaagatcagggattcggggcattggagaggggaggcagcgatatgtcctcagtgactgccaggtgctgggaacacagctgtgtgtgaaaagacagaaaactcccagccttcatggcgtgaaggggacagaacatcagcaagtaagtgcataaggccattcaggtactggatgcagtaaaataaataaaattgtgtaagtgaaaggtgagaaggcgtgagccacggggagggaggaacatcctacgctaaggcctgcaagttcaaaggctctgaggtgggaaccaacttggccacttgaggaccagaaaagggtccatgtggcctgaaccgtgggaagtgggtgggggagtggacttacggcccagaggggcagcaggtggggctagaactgcccacatccctggatcctctgatcagaggctttgttttttcctgagacagagactccaggatggagtgcagtggcgagttctcagctcactgcagcctctgcttcccagcttcaagtgattctcctgcctcagcttcccaggtagatgggattacaggtgtccgctaccacgcctggctaatttttgtatttttagtagagatggggtttagccatgttggccaggctggtctcaaactcctgacctcaagtgatctgccctccttggccttccaaactgctgggattagagtcgtgagccatgtgtgcccagccctgaacagaggctttttggagcactctctgaattggaaatgtcctctgctacttggtgggacagcttctttagaggggaattt

SEQ ID NO: 23676 - DNA, 1767 bp, Artificial sequence
  DNA replication origin
ttaagggcccgccccgtgcccggaggccccacgcctgcgcacccggctccaaacccctgggaactggccgccgtccgccgcgagtggcgtctggggcgctttcccgcgctctcctaccctccagccccgcgcccttcgcggcctcgccgcctcaagggggcccccggggctgctccgttcccacctcgaccgccctgcgggccggacagcccgccccgcgccttctcgagaggaagcggcggcgaggaggcttccggccggggcgctgcgcgggaggctggccggctgggaagcgcggcgccgctgcctttcgttctgacgccccaggttccgtcccgggcgcgcccacctcccgcagaggcaagcaggggcgccggccctcgagctccgcagcccctcacgcctgtgtctgccgaagctgcgcccacttccaaggctgccctctcggcgcacgcccgcagcacccacgcccccggtgccctgggaagaaggcgaccctcgcgcgcgccgccctcctccccggctggtcctgccctctccatacgactgcgagctccagactgaggcgccctggtctttccgacgcgcccacccagtgactcagaggtcgcaaactcgtgtccgtaggggccagaaagatcttggcagtgagcgcgggcatggaccccaggcccatccggaaggaagccaggattctgctccagctgatacgtgcaacgtggcatggggctggtgccccaccttcccagggagaccaaactcaagactgcaatatggaagccccctgagtttcaaatgtgtaacccaaagcgtggctgtgcgcttcatccaatctcgggcccccaagttgcaactcttccacaatgacagccgcaaacacaaagggatcttgcaaagcactttatatacgtcagcgcatttgactcccaaaacagctctaggaggtaggtgctaaatgaggaaacgaaggcaccaaaaggtgaaggctcacctaaagccacacagctggaagtggcagaagcagaatgggaacccgggcagcctggttcctggccctgccattcacccctctgccatctagaagatgctactggtggcccacccgagtccactggggggtgatgcctgctgctgagggttcacatctgtgctctctggaggcttcccttggctactggaaggcaccctgccctggagataagtgtctgggaagttattcactcctctctggccccctcatccaggagccagtaaccggtggtgtgggcacactgtggtactgtgggctctgcctggagctctccgtggggccagctgaggctggacgtcctctgaagccacttccttgcccagctgctccctcccctcccctgcttccctgactccctcgctgaagccccattccagaccctgcttctgacaaacctgaactaaggcagcatctttgcccatagaatgacccagaagctggcacaccgttgagccaagaagtgcagtaggctgcggggattttatttctgcccccagaccaaggcaacggagccctcacctgcctgccacccccacactgggcccaagcaagctcaggtgagcgcacatacatccaccgtggcgggctcctctcgggtgaagccatcaccgaagccctcatcgtccaccaggtcgggctcacggcagcacatgggacagaggctgttgcgcacagcagaggctcggagccagacgacaaggttccaacgctcaccagtgcccaagggccgggctcca

SEQ ID NO: 23677 - DNA, 1921 bp, Artificial sequence
  DNA replication origin
gccgccgcttcctctcgagaaggcgcggggcgggctgtccggcccgcagggcggtcgaggtgggaacggagcagccccgggggcccccttgaggcggcgaggccgcgaagggcgcggggctggagggtaggagagcgcgggaaagcgccccagacgccactcgcggcggacggcggccagttcccaggggtttggagccgggtgcgcaggcgtggggcctccgggcacggggcgggcccttaacaggcaccgctgcggggactggagtcggcggagaaaaccggggtccccagcgctgggggtgggtgagggtcgctcattttcccgggacggtgacgggtactgggcgtcgccaggccccggccccgctagagccacccttggagcccgcccgcggccggccttgggggcttcggctcaagcgcgtcttcttcgtcgccagcccgcggcgccatggctcacgtcggctcccgcaagcgctcgaggagtcgcagccggtcccggggacgggggtcggaaaagagaaagaagaagagcaggaaagacacctcgaggaactgctcggcctccacatcccaaggtcgcaaggccagcacggcccctggggcggagggtgaggaccacaggcatcggggagaggaggcgcagttactacccggggaagtcgggcgagcagtggtcggggacgctcagtcatgcctctgtgcagccgggcctgagatgtgagggccaggcgccgcaggagccaggaaggggctcctctgggaagctccatctctgttctggaaagcccctcaggaagcgctcaccctgtagccggtctgtgcctgccccaggccagagcaggggacgaaggtttacctcttcccctcctggccttccagcctcaccttctccctgcatcacagagagaagcaagcagaaggcccggaggagaacaagatccagctcctcctcctcttcttccagttcttctagctcctcttcttcctcctcgtcctcctcctcttcctccagtgatggccggaagaagcgggggaagtacaaggacaagaggaggaagaagaagaagaagaggaagaagctgaagaagaagggcaaggagaaggcggaagcacagcaggtggaggctctgccgggcccctcgctggaccagtggcaccgatcagctggggaggaagaggatggcccaggtactgtgctgcccagcacctgagagggagaaggtcgcttcccaaggcctggccaccacctccgtcttcccttccagtcctgacggatgagcagaagtcccgaatccaggccatgaagcccatgaccaaggaggagtgggatgcccggcagagcatcatccgcaaggtggtggaccctgagacggggcgcaccaggtggggagctttcggcctgacttacaccacaggatctgggagtgttggctgaagatgtgtgctctcgggaggagtggggccgggcggggttcctggtgcctgaaaaaggccaaatgtgggcaaaaatacggtcacttggagtaagtagttgcaggggctggaagggcctggaggaggctcttgaaagggctgttgttggccgggctgaggctggcaaggcagagcccagctccactgccttcatcagggagagtgggtgaggccccagggtctgtccactcaaggctgcggggtgggagccctgggacccctctgccggctgcttgtggttctgctcctctggcattaggggacctgcctattccttgctgaacggagaccctcccacccccaggcttattaagggagatggcgaggtcctagaggaaatcgtaaccaaagaacgacacagagagatcaacaaggtgggtgtggcccctctgcctgccatccgcccccagctctgtttgtgatgtacccctcctcctgtgtgc

SEQ ID NO: 23678 - DNA, 1599 bp, Artificial sequence
  DNA replication origin
gcccagctccactgccttcatcagggagagtgggtgaggccccagggtctgtccactcaaggctgcggggtgggagccctgggacccctctgccggctgcttgtggttctgctcctctggcattaggggacctgcctattccttgctgaacggagaccctcccacccccaggcttattaagggagatggcgaggtcctagaggaaatcgtaaccaaagaacgacacagagagatcaacaaggtgggtgtggcccctctgcctgccatccgcccccagctctgtttgtgatgtacccctcctcctgtgtgctttcttccccagcaagccacccgaggggactgcctggccttccagatgcgagctgggttgcttccctgagggcccccgctggccaaggcctgtggacgacgctggcggcccagcctgggcaggtttcagggtgccagtgggaagcctgatgggtgctggtggcctttcccccgtggattggtctctggcccagcccagtctcttctcaggggcagggggtggaggttggggtcaccggcctgcttggcacccccatctgaaagagcagcacttctcagctattaaaggccccctggatagactttctctgttctgtggctttttgtgctgagtgggagggaagggtgctacatgactgccagggaaaaacaagggctccgggagcttttgggcaaagctggggtgtcctctggtggtcgtgagcacaggccacaccagcgcctgtgccttcctcttcaggtcagcctgcctggaccagacctcatgccagctgaaccccaaacccagagagctggctctgaaatgccatgcactcaggcatggagagagtcggcttcccctgccatgttcattccacagatcgcagcagtgcagagccaggtgctggggctgggtggcctgtgtggcaggtctggctctcactgcccagctgtgtcttccactctgaggcagggaggctcacagcacccgtttcactgaggtctgtgagggcaaactgagttccatcccaggaaggagctagaagcaggctaggcctagagtcagccccgcactcacgtgttggcgtcactgtgagtgtcactagcattactgttccatgcccccatcccaccatgccccacggtcgccactgcagtaaagagatccagaaggaagccttcccgcttctttaattggtgtaacagacatgacgttgtatacagagcacactcaggcccaatgatgcggggacagcagggacggatggggagatggggacactgctcacacatggcccagagaaacagacggcacacggacagaccagacgggaggggctgagacgtgaaggctgtgatggggtgggcagtgggactcagaccgagccagggaggggtggggggtctctgctgaatccctctttagaaatcaaagagaaggcaggtggtggggcgtgggggtgtggtgggagtgggactaaggcttctattctaacaggcctggggggtggcagtcagcaaggcctgcctcaccctttggttatgactggtcaggcctgagccctgcagctcagcacccaactctgtaaa

SEQ ID NO: 23679 - DNA, 933 bp, Artificial sequence
  DNA replication origin
ttagaaatcaaagagaaggcaggtggtggggcgtgggggtgtggtgggagtgggactaaggcttctattctaacaggcctggggggtggcagtcagcaaggcctgcctcaccctttggttatgactggtcaggcctgagccctgcagctcagcacccaactctgtaaacatttttggtatttttaaaggacgctgccctccctctcttagtttcagaaagactggtacttcctcaagaggagaatgtgccaaaaggaatctgaagggaggtggaaagcagacctggatacagaagagacttcccatgggggggcaggctgcccaccttgccatctatggctgagggccgctgggagagccccaggggactattgctgttgtccttggcatggctggcggctgggcaggcaggcggggagtgaggagccgtgggggagctgcccccctggggagaggctgagcccactgcccacagggcctcccggcctttattgcaggagggcccgagactcttccaggtgcttctctggatggctggtctcccaggcagcaggcaagacaggataaggtggggccaagagaggaggaggcactggccacagggcccctgacaggggctgtgattgtcgggccaagcaacttcctgctgggagcaggggggtcagatattgcactttcactgcaacagttacatgaaaacttggtccataaaataatcgttgctttatacataatgcctgaaacaacaaaaagctacatcttaaatatgaataaaccctgaaggttccatccctccagacttttttctctgcacaaaataaatagctttcactctgtatagacccacttttgcagaacatttacacgaccctttggctgtacatatctacacacgggaaaaagttaacatcactctgtgcacctccccagccc

SEQ ID NO: 23680 - DNA, 1197 bp, Artificial sequence
  DNA replication origin
tgcacctccccagcccggtccatgcgtcccaacaccagacccaggtcggccgtagcttctcggggacagagcctggtcgctggacaaaggccgaggccaggcaggctctcccacttccgggaaagccgaggagcagcagaggggccgccggagctggccgttgagcgccacagccaaggtcacgcttggtgctggggagagagggcagacggtcagacccagcgtgcaggacagcatggtccttgttcaggcgagaaatgaagtcatggctgcctgccctgaagctgacaaagcaagttgtggcttcttagattcggcatgaaaacggaattggcattaaaaaaaccgaagtgtgtgccccacccaccccagagtagaaattcagtgggattgccggggccaggtgaggcaaggagcccatgcctcgctaagtgggcaggagcagggcccacgggacccagaaccaggctggactccgtcacagtgctgggtgttttcagtgtggaggggctgctctcagtactgaaagagttaagaaaaggaagcagccaaggattgctcgtttaaaaaaacctcatagaaatcagattgagaagtagaaaggcgtagaaacgtgggcgggcggccttgactgatggcagggagcggaagaggcggccaggcccgtccagcccgtggcctgaggctggaaacaacactggcctgggctccaggcggggcaggcagacaggtgggcagggtccggggtgcagaaattaagatacagcctttctctcctgcttgcacgaggctctgccgcactggagccttcagtgtggttgtaggtcctgggtcagcaggtactgagtttcatgcatgtcaacggggctgtagccataggaggtggtaatgggtctccgctctcaaaaatcagtgcaaaaccagtgaggttgaacagttgagaaactcgagttaacaagatgcaggctggacccctgttggagctgctaccaaatgggaggggacctgggagtgagggtggccagtggatggggaggtggcaggctgcgcctgggcccacacctggcaccaggacacttggagatccacacagggcaaaatgtctgggagaacctcccgggccagtctgagtgggaggttctggtccctctgccatcctggggctggtggtccctgccagcttccatgacaagccgg

SEQ ID NO: 23681 - DNA, 2010 bp, Artificial sequence
  DNA replication origin
gggccacatttcacagacgaggggacagtggggactcctctccaaccccatcagatcacagagcaagcaagatgagggcacctttatgctcgggtgtattcaggcttttcaggacattgggatggagggaacatatctgcacattcgtcaggtgaacgaacaggggtctgagggctactgggcagacagtagtgagttgaagaacaccccctacaacccacaggctcctcttgctcccgggtactgggcctcctcctcccagggcaggaagcccccgggtggcatctgccccacagcctgcactgtcccctcttcccaggtcatgaggcatgacaactccagcatcttggagctggatggcaaggaagtgtcggtgttcaccccctcaaagccaagggagaagtggcagcgcaagcggacccacgtgaagctgcgggtgagggtcccccgggcgcccaggcccccacgatgtcaccctgtcaccagcctccgtgtccagatgaggaaactgagttgcagggaagcctgcagtcttatgtaccttcccaggccatgaggttggagctgtcagcccacttcacagacagggaaggcagcaaggcttcctagtttctccaaagccacgtcatcgtgtctgatccagactcagacatgggctgcgcagctcacagctcaagcctgcccctcaggcccacagagcttgagcagaacacagggacccggggtgccctccgaccccctgacctgggcttgccactccctccacagaacgtgacggccaaccaccggatcaatgatgcccttgccaatgaggacggcccccaggttctgacgggcaggttcatgtatgggcccctggacatggtcaccctgactggggagaaggtaaggacacggcgggtaggggtaacatggagggactttggggagctccctgctgccctctggccggggtgcagggggtggagaggccagacacagccagcccgtgaccagcctgctgggcccaggtggatgtgcacatcatgacccagccgccctcaggcgagtggctctacctggatacgctggtgaccaacaacagtgggcgtgtctcctacaccatccctgagtcgcaccgcctgggcgtgggtgtctaccctatcaagatggtggtcaggtatatgcctgcactgggagggcgggataggcagggcgaggctctgggtggttctgatgagcacccccaccacctgccaggggagaccacacgtttgccgacagctacatcaccgtgctgcccaagggcacagagttcgtggtcttcagcatcgacggttcctttgccgctagcgtgtccatcatgggcagcgaccccaaggtgcgggccggggccgtggacgtggtgcggtgagtggcccagaggggcacaaaggggctgtagcaaggtgggtgggctcaggggctcccaccagccaggtggaggaggacagcggagcctctgtgggggacgcctggctcgggcactgggccttaaggacctcagttcagagcccagcacccccaattattagccgtgtcaccttgggcaagcgatgtcacttctcaatgtcggctttcaattcccgcatctggaaggtgaggctggtaagccagggacacagcagcaggggcatctgccgcccagtgcgggcacccaagggcctgctgcagcacgtcattgtcaaccattgtcgtcgttactgtctgagctcaatcagagatgtgctttccaatggcccaagtgggccctggctgggcaggagacagggaggcccaggagggaggaaggggtgaccatgagacgacacctcacccccaggcactggcaggacctgggctacctcatcatctacgtgacgggccggcccgacatgcagaagcagcgggtggtggcgtggctggcccagcacaacttcccccatggcgtggtgtccttctgtgacggcctggtgcatgacccgctgcggcacaaggccaacttcctgaagc

SEQ ID NO: 23682 - DNA, 2622 bp, Artificial sequence
  DNA replication origin
taccttctccccagtcagggtgaccatgtccaggggcccatacatgaacctgcccgtcagaacctgggggccgtcctcattggcaagggcatcattgatccggtggttggccgtcacgttctgtggagggagtggcaagcccaggtcagggggtcggagggcaccccgggtccctgtgttctgctcaagctctgtgggcctgaggggcaggcttgagctgtgagctgcgcagcccatgtctgagtctggatcagacacgatgacgtggctttggagaaactaggaagccttgctgccttccctgtctgtgaagtgggctgacagctccaacctcatggcctgggaaggtacataagactgcaggcttccctgcaactcagtttcctcatctggacacggaggctggtgacagggtgacatcgtgggggcctgggcgcccgggggaccctcacccgcagcttcacgtgggtccgcttgcgctgccacttctcccttggctttgagggggtgaacaccgacacttccttgccatccagctccaagatgctggagttgtcatgcctcatgacctgggaagaggggacagtgcaggctgtggggcagatgccacccgggggcttcctgccctgggaggaggaggcccagtacccgggagcaagaggagcctgtgggttgtagggggtgttcttcaactcactactgtctgcccagtagccctcagacccctgttcgttcacctgacgaatgtgcagatatgttccctccatcccaatgtcctgaaaagcctgaatacacccgagcataaaggtgccctcatcttgcttgctctgtgatctgatggggttggagaggagtccccactgtcccctcgtctgtgaaatgtggccctgtcatgggtgttgtcactcagggccctcctgggaggtcccaggccccgggtacctgtctcagcagaaaggagaccacgtctgttgactcccagtagctggcgtggaagaggtgaggcagagccaccgtggggaaggccgtgagggcgtcagggcagtacagggcgtagtcgatccgcttctggccccaccactttgcagcgactgccaggaggggccgtgactgggctggggctgtatagccccagacagggaccccgaagggtcacccggcccctctggcctgctcagcccagcacagtccccccaccagctatagccaaaagtgagtcttctcccaggctgggtgagtgaggcaagcgggagggagcgcaggcaaaagcacgcagacccaggacagtggtgagtgccagccctgctgaggggctcctgcggttgcgtgggaggaccagtcgccatctgtgggatggtaccagctgtctgtggtcccttcctgactctggtgaccctctgccccgtggcaaccccatctctgccctctctgggccattcctgttctcctatcttcccccaggcctcaaggctgggaaaggcggcacagagatggggttacaattcctgatccccagggcaagggtgctgcccttctcgcacctgggccaccctacgagccctgagacacagcagtgtgggcggggaagcctgggcctccagatggatggtcctgggtgcatctggctctgccactaggggctgggcgaggacaaccttcctgaacaagacaagcttgtaaagtgccccctgggctgtccgcaggagaggcccagcagcagggcctggtttacaggtccaggcttccctaggttctgcccacagctttccccggagcttccttggtcctcatctggcctcactccagctccgtggggtccctggtcccccaccccaccagacaatgccaccagctcccacctcctccctagatggccaagtcctcccagcccagcccccagctccctgttaggccgaagcgggggtctaggtgggcagagcctggcagtgaggggtgctcagcagcagagtgacccccagtgaggggaaagtgtgtggggtggtaccttctccaatgtccagctcagggaggccaggggccctctccaggccagggcttgccttcctggctggagggtgggggccaggggtggtggggctgggggcgggcagggcgagcagggacagacgcctgacgctgggggtatggctgagcgcatcgggggcctctgagaagcaagagcaatggatggctcagccacgcggggatgaccgcactgccacgtctaccaggggccaggcaggacactgggacagtgccaggcctggagctatcaagggcgagcccattggccctcctcacggatgaacacaactgccagcaacccccaccccagcctcagctcctgcatggccaccctgaccacagctgcgagaatccctggcccagcacggggcgcagcccctggcggggactgagaagggaacccgggctgtgcttcaagcaccaagaggcttcatgcaggagctaagcatgaggaaggcggggcccttactaatgcgccttcttccagaatcctcctgagaaggcgaagcttctcagcctagacactgcagagtctttggacttgaccggtctctgctgtggggctggcccgggcactgcaggtgcccagcagcctcc

SEQ ID NO: 23683 - DNA, 1189 bp, Artificial sequence
  DNA replication origin
ccaggcaggacactgggacagtgccaggcctggagctatcaagggcgagcccattggccctcctcacggatgaacacaactgccagcaacccccaccccagcctcagctcctgcatggccaccctgaccacagctgcgagaatccctggcccagcacggggcgcagcccctggcggggactgagaagggaacccgggctgtgcttcaagcaccaagaggcttcatgcaggagctaagcatgaggaaggcggggcccttactaatgcgccttcttccagaatcctcctgagaaggcgaagcttctcagcctagacactgcagagtctttggacttgaccggtctctgctgtggggctggcccgggcactgcaggtgcccagcagcctccctccctctacccaccaggtgccagcagcagccctccctagcttcatcagctagaaatgctcctagacatggccagcagctgtcccctgtgggcacaatggccctggctgagtgaggagggtgaggggcctggtatactcactctgggcgatgctggatgccgtgtagctctcagccatgcctgacacctggctggcgatgctgatctcactggctcggcggaagccacgactggcaggggcagtgcccggcgaggagggggcgccatgctcttggaaggctgcattgtgggtctggagcacatccgctgcaggtggacagggaccagaggccaggtaagagaggccctgcccagccccggagcagtggggaagccagtgtgccagggtccagtgtgcacctagactggaggctgggcagcagctgtgccagagccacctgctcagggccgtgagaggaaggggcccagagctttagcaggtgaggaggagggctggggcagggtggactgacgaatggacacagacacagggcagggaggcgtggcagctgggctcaacctcagtcaccctcctgccccacacacacccctcagcttgtctccagcaccccagtggctccagggcctccagagctcaccctggcctgacctgacccacagcccacagcagaagcagcggctccacccaggtttgcagggcgctgacaacaggtgccatgggtggcttcctggggatgccctgcacatgcagagcacagagagaggcaagccctgagcatccctcacacaggccacagccag

SEQ ID NO: 23684 - DNA, 757 bp, Artificial sequence
  DNA replication origin
tcacacacttcctgagatgtgaaccctgcctgggacaatcgcttttgttcctggagacagtgtacagagcttggaattctctgaggggttcctgagatggcgccattcaagccagggggttgaatagcttgactcttcatttcagcagcacgattgacccctcagtggatcagcagcgattcattccacacgtatttagtgagtacctactattctaggagctgggcataaagacgtgataaaatgttaaaaacttctggccctcctggggcttgtattctagtgggggtagacactcgatagaaaatagtcagtaaaacctgtaagcacatcagatggtgatcagagttgcagaagcaggggaaaggaaggcctcccaagttggggacatttaggcgaagacctgaaggaggtgaggagtgagccaggatggtagctcagggagaaaggccctgaggcaggagcttgtccaggatgttcaggaaactggagtgagtgaatgaggggaagagaagcaggggaggaggtcagagaatattgagggccccgttagatcagggctttgcaggctgtatcaggactttggccctgactctgagtgacctgaagcttcggaaatgtttgagcagtagagggtcaggatccgaattgtgctttaaaaggatggtttctggctatggtgatgagagcaggctggatgggaggaagggaggaagctgggtgattgtggggaaacaattgcaatagggagtttcat

SEQ ID NO: 23685 - DNA, 1587 bp, Artificial sequence
  DNA replication origin
gggtctcaaccagtgaagagttgaaggcacctggggagagggagggcatgggagcaccatgcctttgaaagcctctaggtagcctgagaggactgcagcttagggtatgaatgaaatggtaggagaggaggcagaaaaggtagacaggacccagatcccagggggccttagatacgcagaggaattctttcagattccataaggtgcaaccaaaaccaagagaaaccaagtgacttagttaagctcctgtagcaagttatgggaaaagccaggcctggaaccccagtctctcgactcccgcagtccacttctctcccctgctgcctcccacgcctgagcagctggggaagaccaggagagagaatggcccattcaacactcactacccagagaatctggagtctttgcctggccatcttcagggcagaggatgtactgtcctgttcacttggcaagccactccttacaagaaaaacagcccttcctaactcattgtgtttctctctgcagtgggagagggctggaagtccattccaaccacagaatacagtcccttcatggaaggaaagtaatttaacagcaacagtccaggaatcagacaagctatggtcccagaggcaagcgttggaggggccttctgctccacggagacactgactccacgcagggtactgaccagggcaggagaccagagatgaatcaactccagcccgggagctcaccgtccagcaggggagataaggcagatggaaaagtaactataaaataaggcagacggtgataagagttacacaggagatacagatagcaggcagtgggagttcagagcagagaggagtctgggggatggatgttaggggagattcagatgaaggggagcacttactgccttccctccagaagtggggggtctatcctagcagctctggtcactcccaggtggaggccggggagagagctggttgtggacaaagacagatgttccagtgaggtctcctttgaagaatcccgactctgggtgggggaggcaggtaggccggggtgtttggagaggcacccagcccacacttcagtgggagggagaggagtgcaggatgtctctgcaggagcaagtcggtggaaaggggacaagcctggaggacttgccttgaaatgacatttgcaccgcgcgcactatgttcacctggagtggccgtttgggatttcttgcggggaggcagtgcacactggggcgggggacactgaactttccctctccccaaggccccccgatcagccctgccacggataagaaaggattcggggtgggaagaagacagagccggcaccccattaccacacgaagggggcactgaggatggagacgggccacaccccaaccctgggcccccgacaagcagaggccacggcccgggcctggggacgttcagctggaggcgggaagcagagaaggcgggccgggggctcacctccgcttcctcccgatagccccttcctcgccctggcaccggcactgcccacgcctgccccccgaccgctatgacacttgtccctggcgggggtcccccacgcggtcgcgaccgacgg

SEQ ID NO: 23686 - DNA, 1448 bp, Artificial sequence
  DNA replication origin
cggcgcctcctcaggccgcgcgggggagcggcggcggcggcggcgggggcgcgtccctgcggagtctcggcccggccccgccgcctccgccggaagaaacctctccgactcgggcagcccgcctggttcctcagacctgccgcggcgaccccgctcctccccggctcgcccgtgtcctcagggcccgggactggactcgggggcggcggcgcggatccccgccccgggctcctcgcccaccgtccgcagcagccgagcgcactcgggggcgggaaccggccgacttgcggccactgtgactcttaaaacagcctcattttaaaaaatgaagtttcttaggagcgaaatggtaaaccagggagggcagagcgcagcgggcagctcaccgaagcccagccccgggcgcggtgctcgccacacggtgggtccgcgctctcccctcaggacgcccgggccgcggcccagggaacggcagagccgggagcgcagccgtcccggtccccacctcagggagtagctggaagaggatcacgaacagtttaatccggatgatctggcacgacagggctctccaatgggaagagcccccggtgggggagcgcctggtgacattccttaaaaacatgaggtgtttgttaggttgagccagggtggacttgtttggcaaaatctgaagtcatggaactaaagagagcacacctaaaacttagtgatgtgtgacccatccctacttgtcaccttataaggctgaggagacggcggtgctcccctggaggagagaggacaagctaaaattaaggcggcctagatgactccagatgaagccggggaggccgagcccctgacagctgctcacctcctggggtcacggcagaacccaactgaacgggccaggaaggccatcgttcccgactcgcctccaggtgcccctgaccatgaccacgcagaggaggaccaaggcgtaccaccatcacctagaacgcttcagctccttccctccaccaagaggtgccctaggatccatccagaaagatctgcggagcccacagagtcccaacgggaactgtgctcctggatggacgccccttaacccataactcaaggacttctctatgcctgggacttaaaatcaccaacaacccgctcctgcagccagctagcagaaataaacacacaaaggccacacgccagttcacagccacaagtatttattgagtgcctgtagtgcaagaaagagagatggtccctgctcccgcggagcttacagcttcacgactccagcatctggctagattcagaaacaactgcagcaagcacttgtctacccaccagcagcactgtaaaaagcacatttctcacattatcggtcactgttacagtgaaattgttagatgtaaaaattatccttgaaatctgtagtcatagagatgacatggtacataatgtcc

SEQ ID NO: 23687 - DNA, 896 bp, Artificial sequence
  DNA replication origin
tgtggcctgggcgaggccgctccctggttccaccactttccagactgtgaccccccacttggtaactgcccaagacccgggctcctcatcagcccaagggtgatcctagtacccccagcccaggctggcgaacagcaggaatggggccgccaccatctcagctgcaccctacatctccaagggatgagccgccccggggaaggtcccagcgggaagatgctctccctggctgggccccagcaccagtgttctgaggtcgctatggagcctgttcctcgccaagtgggcggctccccggccatgccccaccaggctgccctgccccaggaggagaagcaggtgtgggcctgtgagcgggaccggctgaagaagcggtggctgtgggaggccaggcagaggggcagccgggagttggcagtgccacgttctggccatgcgacggcggcgccaggacaggcgggaggcccgtgaggcctggaggcagtgccgtggggaggcagagcagccggagcaggacgaggacaggacagagcgcgaggccaggggacagaggcggtggtggaggaggggggaggcaaggacctcgcccagggagctggcgtgtctatgggaggaggtggccaaggggaggtagcctgggcttgtgggcttgcgggcttgtgggcttgccggaagcccagcctcgctgatccgggtgcttgctgtggggctcccagtggtggtgggaggaaaggttttctgggggttgggccctgttggtgggaggatgagagaagggaatgcattccaggctctggctgggccatggcggatcgctgtggtcctggtggcccaggtgtggcctcttgtctccccactggcttggaggcttggcacctgggatgtgccctcccatc

SEQ ID NO: 23688 - DNA, 1148 bp, Artificial sequence
  DNA replication origin
agccagggttctccagtgctcctcccggctcccccagcttgaggccctgaacttccttcctcctctgcccctcccctcacccacaccaagcgagcagctggtgggtttggccagcctggcaccagctgtctgtccccgaggccaagtctgcggcgcccactgtgtgtgtgagagagagaccgtgtggctctgggggcggcaggcgggcagctgccgaggaggactaggtaaattctccatggttaccgctgtttgtcattctgcaggatatcctttacccgctaatggccactgggacgccattgcggggccgcgtgctcctagccacggactcccctgccagatccaggaggctgcgttctgggctgggccctgcttggtcactgactgcagctctggacaggccccaatgttgcatcccatatgtggggcctcaaccctcctgtcttgggatacagagcccttggggcatagactgctaagagtctggtcccctctttggggagggggagacaggcacagaggggttgaggggctttatctggggcacacagaggccatggtgttctctagatttctgatttgatgtccagcgtgcctgtctccagccagggttgggtctcaaatactccaaggccttcctgtcttccctgtcattgagcacagcagagatttgagcgcatagaagcaaaaaggcttggaagctcagcctggtttcgaccagcctatgtggcgctgtggtgtgatgtggcctctaggttctcagcctctggggaccaggacacagggagaggggatgggcagagttcaggccaggagtggcaataattttatctttgggagcagccctgctgcttggaaggttctggttggatgggatggagctctgtgaggaccagcggctgctgcagagctggggatggtcaggtgccttgtagctacatttcattatccatcttatatgctggtcaaaccggaggtggagagcagggttctccatcctgctacagttggtggtgtgggtcctgggcaagggctgttgcaggacccggagtccttgccttggtacaactggctgagctgactcctggcctctctctccccaccccacagctgggagtgtccactcgccttccaccagcatggca

SEQ ID NO: 23689 - DNA, 1920 bp, Artificial sequence
  DNA replication origin
ctcacggggacccctgaagtcctgttctgggctggctggacctgtactcagcttttcttctttgtcctgtggagaattccaggagtgccgagatccccagatctgggctttttggtgcccctcccaaccccccacgggcccctttgcagaaccccagctcccctcctgccatttgcatccaagatggactctccgctgccgccgctgctcctccggcttccttgtcatcatccctcacgccctgcagccctgcctcctgttcacgggttgccaagccgcggcctggccggtggtggcagtggcggagttagacaaagcccccgcctcccccgccccagagccccccaggcgccccaagtggcgggaaggccgccagctccccaggccccgcgctctttgtctggcgtgggggtggggagccgcgcctggccccaggagcttcctggcctctgccaacccctcgctcctgcacactgcgctcattgtctgagatgcgccgagacggccttcgctgacgtggtccctgtgtcctggtccctgtgtctgcaggaaggagtgaccaggagtggaactcggagcccttccgccatctctctccaggactagacacccccccgcccccgaacaagggagtggcctggacagagcactggggtcaccgagctattgctcctcgtcccccagccaaaatgggacgatttctccttcctcctccctctcagccctgcaaaacctaaccccagtatcatcaaatagtaggaactggagcccatagaccttctcttgggaagcactgcctctaacaaatggagaaactgaggactggagggcggggagcctgtctgaggtcacacagccaggagtggcacagctggggctggcacgaagtccagtggggaggacagaaaaggggaggtgaggagcagtgggcagagcagttggggaagaggacgggggcacaccgagggaatgcgagggtgcgtgggaagtggccagcacccctcctgccagggcgctgggatcttgcaaacgcctggggtgctgtgcgcgatgctacccccagcgactggccctggagccagagaggtgtagtgaccaggatcagaacccaggtctgtgccggcagagcctgtgttcgccatgccatgcttgctgccacatcagaagctcaggaaactggggtttggctgatgtagttagggggctctgggggacatcaccctgcccaattcctgcagtggccatggacgtgccagatatcgtgggcgttgtgcgtccccctcccaagcaacccgcccctatagcgcacgtgtctcatcatccgcatgtgtctcatcatccccacgtgggaggcgtggaaactgaggctcggagtggcacggtgctctgcccagttcaggatccaagtccacgtttgcagttccagcccaagctggagcataaccctgggctgcagtggcagcatccagggctggcctgagactcaggagacagctcggaacggtccccgttctcggagagaggggcaggtgccggggtagctggctccctgctttggtctcctctatgctgtgtgccctggggccaccccttcaggtccatttctctaaatcgaggggcctggagccagggttctccagtgctcctcccggctcccccagcttgaggccctgaacttccttcctcctctgcccctcccctcacccacaccaagcgagcagctggtgggtttggccagcctggcaccagctgtctgtccccgaggccaagtctgcggcgcccactgtgtgtgtgagagagagaccgtgtggctctgggggcggcaggcgggcagctgccgaggaggactaggtaaattctccatggttaccgctgtttgtcattctgcaggatatcctttacccgctaatggccactggg

SEQ ID NO: 23690 - DNA, 779 bp, Artificial sequence
  DNA replication origin
ggctccagttcctactatttgatgatactggggttaggttttgcagggctgagagggaggaggaaggagaaatcgtcccattttggctgggggacgaggagcaatagctcggtgaccccagtgctctgtccaggccactcccttgttcgggggcgggggggtgtctagtcctggagagagatggcggaagggctccgagttccactcctggtcactccttcctgcagacacagggaccaggacacagggaccacgtcagcgaaggccgtctcggcgcatctcagacaatgagcgcagtgtgcaggagcgaggggttggcagaggccaggaagctcctggggccaggcgcggctccccacccccacgccagacaaagagcgcggggcctggggagctggcggccttcccgccacttggggcgcctggggggctctggggcgggggaggcgggggctttgtctaactccgccactgccaccaccggccaggccgcggcttggcaacccgtgaacaggaggcagggctgcagggcgtgagggatgatgacaaggaagccggaggagcagcggcggcagcggagagtccatcttggatgcaaatggcaggaggggagctggggttctgcaaaggggcccgtggggggttgggaggggcaccaaaaagcccagatctggggatctcggcactcctggaattctccacaggacaaagaagaaaagctgagtacaggtccagccagcccagaacaggacttcaggggtccccgtgagtgccgctgt

SEQ ID NO: 23691 - DNA, 984 bp, Artificial sequence
  DNA replication origin
ggagcggggcgcggggccccgccgccctggggagcggggtcgtgaagcagcccgggcggggggcgctgcgggcagggccaggacccgcgcgggcgggcgcggatggagggctgcggggctgcggggctgcggggctgccgggctgccgggggccctgaggtcgcggggccgccgggactgggaccaggatggggtcgccggcgggcagcgtactcggaggcccgggggcctcggccgggagcgtgggagcaggggctaccccatgcggtcacgcggggacccccgtaaggtgagcgcggagtgaacgaagttggcgcagctctggggctgctggggcccgcgcgcgggcgtgggggcagtgggtcacgtggacgccccatctgggagcccccaagggctggccctggaaggccctcgatgcagaagccgggaggggctcccctcaagcttcctggggctgcggccgcagccgggcgctcccaggaaactcctccagaagttgtcaggcagcttcgggctgagcccaggggaccgagggagccatggggagtgggcacaacattgagggattcgtaggtgccgggctttgtgacctcactggggcccttcttctctgacacttggtcggaaacagacttcccaaaaggcggttgtgttgcggggcgggatggggggaaggactcgacggggagaggagtggccccgttggtcaccggtgccacgctggctctcctgctcgagttttgggccttgtttgcaaacgttgacctcgtaaccccccaaatcggaagtgggacccataaaaacgatacctaaaaaaaatcttggacactgaggtgtaggggcaggaaagggttaagcgtcagggtgcggagggagagttgaattgctcacttgtgggctcggagtcccaaagagcaaacagccactgtttttttctcaaacattctcacctcctctggggtccgcagaccttacaaagac

SEQ ID NO: 23692 - DNA, 1185 bp, Artificial sequence
  DNA replication origin
gcgcgccgggcgcggcggggccaggccgcgagggcggcggcggcggcggcgaggccgggcggtagcgctgcagccccgcgcccgtccgagcgcccgccgagcgcccgcgcactttttgttgtcggcggctcgggccgcgccggcaaatatggccgtccgcgccctgccgccgccgcagtctcacccaggccccgggtgcggcgcaggggcggccgcaaactttccgcggagccggcggggcggccggggccgggagggggcggcccggcgtcagggggcggctccgcctgcggccgcgccccgcgcctccgggtgcgctcggcgcccgcaacttgccaaagtttggggggctggggtcccggcggcgcctgaggcccgcgcgcgtccgggcggctgccccgcgcccggcgccccgggggtgtgctgggggccggtcccgcggcggctgcgggaggccagggcgaaccggaatccgaagagcactttcttccccttgatggtgggggcagggatggaaaattacctggagaaaatggtggcgagtggtgtatttaagcacgtagatcattccagacgcccaggtctggccaagccccaggattagaataaccgatgcttgacattgatttcaaataaatttcatgtctctgtctgtatgaagtggtttttaaccctttggggatccaagactcctttgagactgacaaaagcttagaggccttctccacccctcacccccctccccggaaaactcatccctgaatcgcacaatttcgtgcgtagactcactccagtatttaagggaagcacctactatgcgccactcactgttccaagcgctgaggatacaagaattgaacttggcaaagtttctaccccctggagtttacgggacaattttagatcctccttcgaccccacccccagcccatccttggatccgattgaaatgtaaccatccagtgtattttggatttggattagatgaataacctgaaggttgtggggttttttggggttttttttttttttaatcttggagttctgccgaagtagtaaagctcgttaaaatacataagatgcccacccttttctgttgtttttaatcgtcatggtttgcagatttaattagacacaggcgtgcaagcatcatctccggatctgatgacaaaggcacccacctag

SEQ ID NO: 23693 - DNA, 890 bp, Artificial sequence
  DNA replication origin
gccgctcctcgcggccgcgcgctccggggccctcgggggcatgttcccgacggcggctccgttgtactcgcttcctctgttcgtcagcgccgggccccgctgtcgccgctcgtggggctttcgggctccgggagccccgctgtcccgggccggaggcacccctcttggaccgcggggcagggtctgtgcacgccggctccgctgggttcgcccctttggcttccgcctcacaacccgggggctgcgggtccgggacccgcggggaaagtaaggaccggatccttcccaagtcctctttcgtgccccagcattgctcccggctctgggcgagggagggaggcaggcgacgcggtcgtccttcctaaatctgaaccccacagcgcggtctcgtacatgccccgctcttggggcggtggggaagccgcgggggacacgtgcaggctcccttcacgcctctccaggcgactcgcttagttctgcctcggcgggcgagctcacctcccagaccctaagaattacccatggaggggaacggcagttggggatttgcttactttgagagcgtttggcataacgagcatccagagttccccaaagcagtggataccggtggtttcccagaagtggtttggggtcggtttaaccgctgaggagatttggatgttcctaaacccttctgattgtttctttcctgaccctggcatccagctcctccccttcccacccctgctttgtgcttctgtttggttaatgtttgcggaccactaacttgatcctcgcacagagaagctctttttatgtgcgtgctcggtttactgtgggaggcttttgttttggggagtcgctggttgagaaacgtgggaaaagaacgggccagaaaatgagagaca

SEQ ID NO: 23694 - DNA, 2037 bp, Artificial sequence
  DNA replication origin
aggccccgcgcgccgcccgccccccgcgcggccgggcccgacacacccacctgcagcccggccaggcccatggcggcgcgccccgcgccctcgccgccgccaccagcgccgccgcggcgccccggggaagggccggcggcgccccacggcgcccccttcccccatggccggcgaggcagggcccggcacccgcgcaccgcggcagccccgggccgcccggggcgaggcacgaagggaaggaggcgcaggcggcgcgtcctccgcagccctcccgcccgctcgcagccgcccaccgtccggcgcccggcccggggagggggctggtaggggcggcgccgccaggccgctccggagggcgggcgggcgggcgcggcgaatcccggctcgggcgcgccccctctcgcgcggcctcagccactcgcggaggaaggggtgggaaacaccgtcatgacagcccaggctcccgcccgccctcccgccagcccgcccggctcctttttccgctggctctgcggatattttgggaacccggtctgtgccagacgaaatcagcagcggtgaacgcgccaggccaggccctcgggtgtgcccggcgctgtgcccaccgagagtttcacaggcattgaatcctccccgcacgcccacgggggcaggtcctgtcggcatcccagcttacaatggtgacactgtgactcaagggatgtgcaggggtttgtcccgggccacagaactaggaagtgatggggccaggtgtcaaacccagaagggctgtacttgaccggtaggaagccctggggagacagagccaggggttataatgatcggtttcctgggcgagtctcttgccgttatctcactgaaacctcacagcagccctgcaaaggtagacaccattattatctcttttcaacagatggagaaagtgaggagcttggccaagttctcagaactagatgggttttcagccccagccaactgaccccagggccttgccctcccagccactacccttcctggttacagatgaggaaatggagtttgggagaagcaaatggtcttgcagaagggtttaacatgtcaccttgttctcctatcccgccgtgagaaaatgcccccataggcagacgaggttcccgtcactctggtggctgtttcagcatagctcactgccctgcaccactactctgtggccattaaggcttgagggcccacagccagattcactgtatttgtgcaaagtcatagatgcaaacaagacacttcaaggcatccagctcctgcagcctggcccatggcctgggagtcaggggctggacttatttccctgcatctgcccagaggtgttttgtgaccatcgccaagtcacttccccagtctgggcctcagtgtcctcatgggtaaaaaccaagaaccttgaattccataatccaccagagcaccttccaacatccacagataagcaaatggctgtttgtagccatcctcccacctagcctccctcgactcccattggaacggataagactgagtaggattaggtggtgacaggtcactgctcagacaatccctcccaaatcagctcatgctttagcatccttcaaggcagggtctccagcccaaccactaactccagtgggctaggtactctgcctatgccctctgcagagcctactacagttgaatatccaaaagattacccagagggtgaaagaggattcgaaagtgacactctgataaccaggttgagccatttgaaagcgtcttctatttctgcaaggcagagaagttttgcagcttaactgccatgagaatcatggttttggagcaggaagcacccacatagatcatcttatccatttcacattctagtataccgagccacaccccacgccccactcatggtcatagctttctctgcatttgagcccccaattgcaggggacacattacaagtctagcacctattcctctcaattctgcagctccagtacctagaagatgtaaatacagatcattcaatgtaagtttcaaaacagt

SEQ ID NO: 23695 - DNA, 2202 bp, Artificial sequence
  DNA replication origin
atggagtccaccacaaagccctttggcatccacgctgcaaccacccttcaaaacagtcctgtgtgtgtgaggtcagactcctctctccccatttacagatgagagaacagaggctcagaagagagcagcaacctatctaagcctccttctttcaggtggcaaacttaagattggaacccaagtcatctgaagatcaaataaaacaatattgccctgtgtaccaggggagatcaagcacagggtgggctcctgtccccagttcagggcttgcccagccctggttctcagatccggccccagaggtcatgccaaatcgtcatttatgacactttctgttagcgaacacaaggcttccttgtatggagctgctggcagccagaggctctgcttctttcagacaagttttaattagaagagagcatggtgaattggggaaagctgacactccccactgcagctttgaaagggaatatttggattagagcaagatgtctaagaggtttcagtttgttttgcaagaccagaccgttttcattaaccctgtattttcgggtttaacattttaactccaaatctcattgcataggatgctgcttcagaaactaacaccaaatgcttgattggcaggaaactttagaaatggggtcaaggcagctaggcgcggtggctcatgcctgtaatcccatcattttgggaggccaaggcaggtggatcacctgaggtcaggagtttgagaccagtctagccaacacggtgaaatcccgtctctaccaaaaatacaaaaattagctgggcgtggtggcggccgcttgtaatcccagctactcaggaggctgcagcagaagaatcgcttgagcccaggaggcggaggttgcagtgagctgagatcgtgccattgcacttcagcctgagggacgagagcggaaatccgtctcaaaaaaagaaaaagaaatggggtcaaggccagctcataaaagggaaggaagtcagttccctacatgaacacattagttaggtctgcaattgcctggtctgtacaacctgaattcatgacttctgcactttcagcacttgtgagcctctctaattgtgggtcaggtatgttatttttgcaactaagcaagacaatcaagcttgaaggatatgctaactcttgtgaaagcagggaaaacctgtcaaaccaacagggcacacaccctgggacaagccattctttcagcagcaagacagaacatggctcaaacctctcgaatctgagactgaaaaggttggataaatacatatgtgcattcttgcagaggacagaggcttctgcaacccgaccagctgggatcagaacgaggccatttcaaaagcttaccttctcgtttcctgtagattccggctaatggtttcccctggcatttgacttcgtgatgtgtaactgagttctcttcctgaagggggaaacgcattccagagcatttgttcgggctcatgtaggaatagatctttgactgcccggtaaatacgttctcctaaaaagacaaaagcatattctgaaagaggcttgaagaagaagatcctagagcattcacgaggaggaggaatacaaaagatgaaaatcagacaacaccgtttttcaaaaactgggctaccaggggatgccagcccccattgtctcaggagagcactggcaggtttagaatcccaggtccagtgaaacgtttcctaaacgcgctggtctctaaatcactaaggggacagctggccagcaggagagtcggctgcaacccaaggtctatataggaagaagacagcctacccgcaacagggaggtcaaaaggacctgggcatgtgaagagctaggctatctttaggagttcactgccctggcaggagccgcagggactcagcacagaaacacgccccggggaacctgattaaccacttggtgctgagggcggctggagggcctgtcagcacagccagagccccatgagcgccggagcctgacccctctcaaatcactgcagccccgcagcctccagggctgcgacgggaggacttctctcagggtgactggggaatctgggaagagcaggagccacagccagcgcattcggggcggccactttgtcgcaagccgcacctgggcgtcagtaagagagtggacggggcggtggggcggttcaggtcactgcgggcgcctctgggcgtggg

SEQ ID NO: 23696 - DNA, 1485 bp, Artificial sequence
  DNA replication origin
tctgtgtgtgtgtgtgagatctgtatgtgtgaggtctgtgtctgtgtgtggtgtgtgaggtttgtgtgtgtgtgtggtgtgagatctgtatgtgtgaggtctgtgtctgtgtgtggtgtgtgaggtttgtgtgtgtgtgtggtgtgagatctgtgtgtgtgtgaggtctgtgtgtggtgtgtgagatctgtatgtgtgaggtctgtgtgtgtagtgtgtgaggtttgtgtgtgtgaggtctgtgtgtggtgtgtgaggtctgtgtgtgtgtggtgtgtgtgaggtctgtgtgtggtgtgtgaggtttgtgtgtgtgtggtgtgtgtgaggtctgtgtgtgtggtgtgtgaggtctgtgtgtgtgtggtgtgtgaggtctgtgtgtgtggtgtgtctgaggtctgtgtgtggtgtgtgtgtggtgtgtgcagtgtgtgtgtatctgcggtggcatctgtgtgtgggtggtgtgtgaggtctgtgtggaggtctgtgtgtggtgtcaatgtgaggtctctgtgtggtgtgtgaggtctgtatgtgtgtgtgtgtgtgtggtgtgtctgaggtctgtgtgtgtggtgtgtgaggtctgtgtgtgtgtggtgtgtctgaggtctgtgtgtgtggtgtgtgaggtctgtatgtgtgtgtgagggctgtgtgtgaggtctgtgtgtgtgtggtgtgagatctgtgtgtgtgtgaggtctgtgtgtgtgtggtctgtgtgtggtgtgtgtgtgaggtctgtatgtgtgtgaggtctgtgtgtggtgtgtgagatctgtatgtgtgaggtctgtgtctgtgtgtcgtgtgtgaggtctgtgtgtggtgtgagagctgtgtgtgtgtgaggtctgtgtgtggtgtgtgaggtttgtatgtgtgtggtgtgtgtgaggtctgtgtgtggtgtgtgaagtttgtgtgtgtgtgtggtatgtgtgaggtctgtgtgtggtgtgtgaggtttgtgtgtgtgtgtggtgtgagatctgtgtatgtgtgaggtctgtgtgtgctgtgtgaggtttgtgtgtgtgtggtgtgtgaggtctgtgtgtgtgtggtgtgtgcagtgtgagtgcgtgtatgtgtgtggtgacatctgtgtgtgtgtggtgtgtgaggtccgtgtgtgtgtggtgtgtgtgaggtctgtgtgtggtatgtgaggtttgtgtgtggtgtgagatctgtgtgtatgaggtctgtgtggtgtgtgaggtttgtgtgtgaggtctgcgtgtgtgctgtgtgcagtgtgagtgcgtgtatgtctgtgtggtggcgtctgtgtgtgtgtggtgtgtgaggtccgtgtgtgtgtggtgtgaggtctgtgtgtgtggcgtgtgtgagtgggtgtatgtgtgtgtctgtgtgggtgttgtatgtgtgtgtcgtgtgtgtttgggggctgaggtcccatgtagacagaagtcagtgccaaagccacaaactcctcccgaccccccg

SEQ ID NO: 23697 - DNA, 1587 bp, Artificial sequence
  DNA replication origin
cgcccccgggcggcggaaagcgggcgcgcccctggccaggccgggattggggcggggcgcgcggcctccctgtggggaagcgatcacccggcctcgcagccgccgccgccaaagtttcccggaggagccgcgggccgcccttcctctccggccccgcgctctgccgcccctcaggcccgcaccgccccgaggcgcccggcccggctccattgagcgcaactcggatcccaacttgggaggcgccgcgggcctgcgcacgcgcgcgccctccccgctgccgccgccgccgccgccgccgccgccgcccactcgggagcagctccgggccgagccgggcgcccagaccccgggcccgcacaccccgcgccgccgcccgtgcccgcgcccgcgcccgccgcccgctgcccgctgcgccctcgccccagcgcccgctgagcgcgcccgcccgcggcccaggctgggcccggccggcccggccctcgacagcggcaagtttgggagttgcacgagtttgcggggcgggggacaggccaggagggtggccatggaggaggagcgggggtcggcgctggcggccgagtcggcgctggagaagaacgtggccgagctgaccgtcatggacgtgtacgacatcgcgtcgcttgtgggccacgagttcgagcgggtcattgaccagcacggctgcgaggccatcgcgcgcctcatgcccaaggtcgtgcgcgtcctggagatcctggaggtgctggtcagccgccaccacgtcgcgcccgagctggacgagctgcgcctggagctggaccgcctgcgcctggagaggatggaccgcatcgagaaggagcgcaagcaccagaaggtgggcggcggcctcggtctgtccgtccgggcagtgggaccgcggggacccaagggctcttccgcattgggcagctgtgggtgcgcacgtgtgtgtgttcagggaccggaccagaggagacccgacgtggggagggagggaggccctggccttcttttgcccgaccaggggtggctggcagataccacccgagagattaagagctgttctctggagttccaatcccacctttaccgtttaatagctgtgtgactttaggtaagttacttaacctctctgtgctttatttcctcacctgtcaaatggtaatcataataggacccaccttagaagaattaaatgggaccatataagctaagtgcttagacatattattctcttccagacatgaaataagcctcttggcctcccgagttaccaagaagatgtgacatcaggcccaggaccctttcttcatcccccccccccccagtctccccagagcaaagggaatgtgacctccagccactgagcttcgtgacccctagtcttcgggttcatatttgcaactttcttcccgggactcccctagcttatgaacctgtggtagcccgtgttctctcctctgattttatccttaatcctcacaggactctatagagactatcttcattttacagataaagaaaccgagggtcacagtgggaggagcaatttgtcccaaattagtggtgagagagtcccagcccccgtgt

SEQ ID NO: 23698 - DNA, 1204 bp, Artificial sequence
  DNA replication origin
gggccgggcgcctcggggcggtgcgggcctgaggggcggcagagcgcggggccggagaggaagggcggcccgcggctcctccgggaaactttggcggcggcggctgcgaggccgggtgatcgcttccccacagggaggccgcgcgccccgccccaatcccggcctggccaggggcgcgcccgctttccgccgcccgggggcgccccggggtacccccccaagcgccgactccgcggcctgcactccgggcccccctctccagccgccggacccgcggcgcccctcacccgtgccccggccgcccctcccccgcccggcgctgactcctcccaccacccggccgccgggaggggtccaggccgccccgggagagggggccgggggcgctggtctcgcgggacgattcgctgctccgggtagcggccccggccttggagagggatggaggggtcacgaggaggtccccgggctggggctcatcccaggaagagaacggggaccccccccggcccgcagacactccgcgcagacccggccaccaggcggacttgcagaggcgcccggagaggggccgacgtgtcgaggaatgctggatccccggagccccagggcgcgcctccccgagccacatccatcactggctccttgtgacatgaacgccacttcacagtagagcgaagcccgcttggcattccagcaccacgagttctcttgtcccaaggccccctgtccatttgggctggccaaatccacttgtccatcagaccccctcccactcccgggagaacgtttcctgaacccagaaccccatccaccctccccgccccccacgcaggagttaaggacccccttgcaaactcacagtcccctgcttgccccatcaggattgctcttagcatcctgagttttcaccgtgtggttgcaggtaggtttccaccgtcagatcttggctccttgagggaagaaatcttaatgcccttgtagccataaagcgcaccccaacgtggcacgtattgattaaaaatctaaaagttggccgggcgcggtggctcacgcctgtaatcccagcactttgggagactgaggtggacgaggtcaggagttcaagaccagcctagccaaggtggtgaaaccccgtctctactaaaaatacaaaaattagccgggcatggtggcgcatgcctgtaatcccagctactcagga

SEQ ID NO: 23699 - DNA, 1404 bp, Artificial sequence
  DNA replication origin
cccgcacctccacgtcgatgtccaggaagccgccctccgccacctcgaagatgaggcccatcttggtgcccgaggtgacccgctcaaagaagcactcttcagcatgggcgtcgatgctaacgaaatagcccgagaccgtggccaggagagcggccagaagcaccagcagttcagcaagcgtcaccatggtggggctgaggccgaagccaggacccggactgcggcctccacagccgccgccgccgccgccgccgccgccccgctgccttctcagccaccgccgcctaagctccgccccttccgcctgcgccaccagtgggggctgatgcgggcgcagtggattggcgggctcccgcagctgccacgtaaagggaggcacggcagccgccgagggacaagcgactctgcgcggcccgagcctggacggcggctccgaaggaccaaaaatttttccctagtcctttctcgtccaagctaaagttcctgtggacttcccaggaaaacgacagtgtccggaagcctctgcaatgccctcttaggattgtccaagaagatggcgaaacatttgcaggcagcgataggagttgagggaatgtgcgggctgaaactaaggtttttttcttttgttttgtttcgtttttgagacggagtcttgctctgtcgcccaggctggagtccagtggcgcgatctcggctcactgcaacctccgtctcccgggttccagagattctcgtgcctcagcctcgcgagtagctgggattacaggcgtgagccaccacgcttggttaatttttgtgttttttgtttgtttgttttttgagacggagtctctttctgtcgcccaggagtgcagtggcgcgatctcggctcactgcaacctccgcctcctgggctcaagcgattctcctgcctcagcctcctgagtagctgggattacaggcgcccgccaccacgcccggataattttttgtatttttagtagagacggggtttcactatgttggtcaggctggtcttgaattcttgaccgcgtgatccgccctcctcggcgtcccaaagtgctgctggaattacaggtgtgagccaccgcgcccggccaatttttttttttttttattttttagtagagacggggtttcgccatgttggccagtctggtctggaactcctgacctcaagtgatccgccctcctcggcctcccaaagtgctgagattacagaagtaagctaccgcgccaggcctgaagccatgggttttgaggggtgtttatttgtttgtttgcttagagatggggtcttgatctgtcgcccaggctggagtgcggtggcgcgatcatagctcactgcagcctccaactcctgggcaagtgatcctcctgcctcagccaacccaatagctggga

SEQ ID NO: 23700 - DNA, 1024 bp, Artificial sequence
  DNA replication origin
cagtctggagccccatagtgcggggccgcggccaggccacaggaagagctcgaggcccgggccgcaccggctgagtgtgcgggcccgcgcggctcggagccgccgccgcccatcgagcccctccgggcgcgggtcggcccgccatggggtccctgttccggagcgagaccatgtgcctggcgcagctcttcctgcagtcgggcacggcctacgagtgcctcagcgccctgggcgagaaaggcctggtccagttccgagacgtgagtgtcgcccgggagacgcgggccgcacctgctctcctggcgcccccaatcccgcgcatcgctggggccctcccgcggggagcaccgaggaagggcgcgccccgtccccattgtccagacggggaagatgacaccccagctcagcggccaaagcttcccggagcgcggggctgactccagggtcgccggccgtctgtgtggtcggcggctgctctgccccagttagttaggatcgcccgtgtggtcttcatcagctccgggcaccgagctcagcgggagaacaaatcccacaaaggcctcttggagtccttttggaactttacgggggttaggggggcgcattaaccaaataaataggtcaaccagaaaaggtttgccataaagaagaaacggggtgatgtgaaggtgattcgggcgggaggtgagtgtgaagggattgtcgaggaagcctcccggagaaggtgatatttcagctgagacccaaatagaaaggagccagccgtggggaagatctggggagagggtccttgttggagggaacaggaggagcccagacagagccagaaatgggaaggagctggatgtcatctgcttgaggagagggatttttgtgttttggtcactgatgcttaatgctgtacataccattgtgtgtaaggacttaagaactcagtcattgtttgtcgagtggaagctgtctccccaacaagtaataataaacatttgtttgtccatttacttgtttattgtttgtctccacc

SEQ ID NO: 23701 - DNA, 1545 bp, Artificial sequence
  DNA replication origin
acaaaggcctcttggagtccttttggaactttacgggggttaggggggcgcattaaccaaataaataggtcaaccagaaaaggtttgccataaagaagaaacggggtgatgtgaaggtgattcgggcgggaggtgagtgtgaagggattgtcgaggaagcctcccggagaaggtgatatttcagctgagacccaaatagaaaggagccagccgtggggaagatctggggagagggtccttgttggagggaacaggaggagcccagacagagccagaaatgggaaggagctggatgtcatctgcttgaggagagggatttttgtgttttggtcactgatgcttaatgctgtacataccattgtgtgtaaggacttaagaactcagtcattgtttgtcgagtggaagctgtctccccaacaagtaataataaacatttgtttgtccatttacttgtttattgtttgtctccaccaaggactgtcaacctctgagagtaagtaccttaacgcagtccttggcagtcattggcatcgataggcatttgttgaatgaacagacaagcttttcttgactgcccgctatgttcaggcactgtttttggtgctggagactcggtggtgagcaaggcagacacagtccctgtgttcctggagcttccagtgtgggaggagacagattaaacacactctgattatgagctgtgataagtgctaagaaggcaaagaacagggtgtggaagggagaccgtgaagcaagtacttactgactgaattgaaatccactcaggcgaacattttatttcctggccaccactttcatctcctgactgtttcccttaatcttcctaaggtgtccttaatttcaaaagggatcagccctacccgagatctgatatccattgatatcagatatctaataccagatcagccccataaggcagttgcaaagtcatggagagactcctgagtgacaggcgagggtgcaggtaagatgcagggcggttcctggttcctggagccacttctgcagttgtacccattcacctgatggatgctgcgctgagctgtgaatagcacccaaaacattcaggcaacagctgcaggtgcagcaggctcctacatttgtaacaggtagatgttttccttccggttagtactcaagccaagacacttatcacacttcagtcttacaggtttgagcaaacgtactaatcactatgaaggttccagtttcaataagcgccactacctccagtcatagagtgtacctgggatccttttcaactgaatgtcagtgaaaggagaagaaagtgctgttcatctttttccagaaggaagtaaaactaaggttgctgcgatgagctcttgtgtggtgctaggttttcagtgtgtcttcagcctgagtttcctactgactttgtggtgaccagatgggatcactgttagtaacccttgcaagggaaaggggggcaggtggtgacttccgtggtgacagctagtgggaagtacctggaaaagaaaggtcattcagctgatggggaggact

SEQ ID NO: 23702 - DNA, 1043 bp, Artificial sequence
  DNA replication origin
aagaaagaccccggaaattccacattttagtagagacctgaagatgaggagtgagctgaaacggggaagagctttctgggggaagccaaaaactgctgtgaagacccacaggtgggcctttggtcagtggaagaaacagaaagaaggaaagatgagattgaaggaggggatgaagctggagagggtggcaggggtggatcaggtcacagggagcctgggaagccacggcagggagcttgcattttatctgacagccatgggaggctgctggagtgttttcaactggagaaagaggaggagagggagggagagagaaacagggagagggatcgagagagagaggtggagagagaggcagagggggagagagagagagataaggaggggggaagagggagagaggaagggagaagcctggagagggagagagaaacaggaagagggagagagaggtgaagagagaggggagagagaggagagagaaggggagggaaaaggagaaggagggagggagagggtgagagagggaggtggagtgagagggagagggagagagagacgggaggagggagagggaggagttagatgtttttgttttgttttgttttttgagacagggtctcactctgtcaccaaggctggagtgcagtggcatgttcatggctcactgcagcctcaacctccctgtctcaagcaattctcccacttcagcctcctgaatatctgggaccacaggcgtgtgccactatgcccagctaatttatttttattttagagacagggtcttgctgtgttgcccaggctggtctcaaactcctgggctcaaatgatcctcccacctcagcctcccaaagtactgggattacagatgtgagccactgcgccccgctagatgttttaaaatagtgtctctggctgccatgtgaattactggatggggttgggccggcagggggaagcagggagactgggctggaggctgatgaagttccatccctgggtgtcacatctactttcatcctggaaaggatggagccagtagg

SEQ ID NO: 23703 - DNA, 965 bp, Artificial sequence
  DNA replication origin
cagggtcctgggagcttgcatgactggctgtgctgacaccgcctgggaagcctggggtccccgcatcctgggctctttccaggctatgttgccccgtaattgtgttctgtggctttgataagactagatcatcactctgctcctccagaacgcagatgtccactgcccttgttcctctggagaaccagaactgccaacggaacaggagacagaacagcagcgctggtacaaaggccagagaaggaaccgaacccatctcaccggggcatcccactgccaggcaaggtcagtgaaagccacaggagtctcccagaccacgccatggaaagacagaagtggaagagaacagcacagacaaggcaaagcaggagaggaaggaaaagcaggagagaagagcaggagacagaggtcccggagggcatggatgcagtgtgggggcggccaggcaggggcccaggcatttgtgctctggtaggaggctggggtgagccagagaagaaagagggggatggagggacagagggggagacacatgcacaagaacagagacagggagacagggaggagacagagagacagggaggagacaggaagacagggaggagacagggaggggacagagagacagggaggagacagagagacagggaggagacagggagacagggaggagacagagagacagggaggagacagagagacagggaggagacagggagacagggaggagacagagagacagggaggagacagcctgagcagacagcaacctggaggctttctgcagtgagcaaatcccccacccctcctgaccccggaaccctcacacactcccacacagacagcagaggagagaaggccccatagtgtacggacaagccagggcaacagccaggagggagggcgcccacacttcagcacaaagcccagtgatgaaagaaaggccctgagtccccgggaaaagg

SEQ ID NO: 23704 - DNA, 1060 bp, Artificial sequence
  DNA replication origin
ccagcccatgggccacgggcccccaccgccgcccgccgggaggaccgagcctaagagggcagccgcctgaaggaacgcgacggcggcgcccgcaggtgaggcggggcccggggtgtgtcgagtccggccccgctcacctggcagcgccggcgggggcggaggggccgggcaggggcggaggggccgggcagggacgggagttcgtggcgaagactttaaaaaccctccccgccgggagacgggggacggggtcctcctgccccacctccggggcttgggagccacgttagctcccccaggggcaggggtggccccgggcgaaggcaactcgggagacggcggagtcggggaaagagggtccctgaggctcggcgacccccgcgcccgcccccgcggggtctgccggccctttctggggagggggctccccggcccgggctccagtccagggtgcggaccggccgcggcgcgcgcccaccccagtgccaagggggaggagaggccggtcccggggcgctcctgtctgccccggggtgggatcgcagggcgagggatccgcattgcaggtgcaccaggagcgccccggggcctagcccggctttgtctgggatgctgtggggaggaggccgtctgaatccacatcgcctttttaaatgcttgttaccacccggggaaccttagagaccctccctgacaagttgtatcgcctcccgtcctggtagcctttccgtaagtacactaccttgccagccccttcctgaagctttgatgcggctttagtttactctgagtaacgatttgcctgtgattcgtgaaacggagcagaatgcacaaacgcagcagagctccaggcttggctactgggctgccgtctgctacggcgagtgagtttctctaacttaggttttcatgctgacctgtattgtttcatttcaagttttggtatttagcagtacgatctagtccactaaggaaaattaggctgccagagagaaaatataaccgcgctctgtagcttaggttgcagtagtcggttttataacaaaatgcaagctaccac

SEQ ID NO: 23705 - DNA, 1094 bp, Artificial sequence
  DNA replication origin
tcggcggccgggctgcagtctttctttctttcccggagggaggcgggggccgggggccagggagcgggctgggggtgggaaggaggtggagtggcttaaagaaaagaaaaacaacccatcccggaggatgggcctcgggatggcggggaaggtcagagcggctccgcgcagcctggcgggtcccgggctgagaagccgcccctcgggcctcgggcggtcggccgcgggcccgcagtgcgggggagcggggccggggggcgcagatggcggccggtgcgagcgagggctgggcagcgggcagggcgaggccgggcgaggcccctcgggagccggactcccgagccaggctccattgttgttggagccgagggaagggggagcgctgccgccctcgtcgcccgtggagccgcgtcttggagcccttccaggcgggtcccgggagaggcggtcatggccgcgccaggggaccggggagccgggcggctgcggaggagccggctgcatggggtgctgtgtgtttttcagggcgccctgcgtccggcagaggaggcgagcatcccgctcaggtgatgaggaacccctcgcgcacccagcgcagaaggctgctgccgccggacgcctccattgtttgaccacaacaagggccggattctcacccaggtaaaccggctgccggcgctgtccacttccctctgactcccgcctccgcaggcgttctcaccccttccaggactcgactgcagttttctcactgtccccggcttctcatgaactccgtataccccctcccagacattttcccgtccggatccatctctccgccacatcacctctcatttcccccagaactcagctcctttgtgaaacctttcttgccgaactctaacaactaaatctccccgggagcctgctccgaactgaactgttctggttgctagattgcttacgggctgtcttattgcaacaaaggagaccagataccgaaaaaagatttctgagctattgccttcttcaaggaacgttttctgatatttacagtttattgttttcacaggctggaacggtttttaggcattttggcttcttatttagag

SEQ ID NO: 23706 - DNA, 1292 bp, Artificial sequence
  DNA replication origin
cgtctgggaagtgaggagcgtctccgcccggcagccacctcgtccgggagggaggtgggggggtcagccccccgcccggccagccgccccgtccgggaagtgaggggcgcctctgcccggccgcccctactgggaagtgaggagcccctctgcccggccagccgccccgtccgggagggaggtgggggggtcagccccccgcccggccagccgccccgtccaggaggtgaggggcgcctctgcccggccgcccctactgggaagagtgaggagcccctctgcctggccagccgccccgtccgggagggaggtgggggggtcagccccccgcccggccagctgccccgtccgggagggaggtgggggggtcagccccacgcccggccagccgccccgtccgggaggtgaggggcgcctctgcccggccgcccctactgggaagtgaggagcccctctgcccggccaccaccccgtctgcgaggtgtacccaacagctcattgagaatgggccatgatgacaatggcggttttgtggaatagaaaggggggaaaggtgggggaaagattgagaaatcggatggttgccgtgtctgtgtagaaagaggaagacatgggagacttttcattttgttctgtactaagaaaaattcttctgccttgggatcctgttgatctgtgaccttacccccaaccctgtgctctctgaaacatgtgctgtatccactcagggttgaatggattaagggcggtgcaagatgtgctttgttaaacagatgcttgaaggcagcatgctccttaagagtcatcaccactccctaatctcaagtacccagggacacaaacactgcggaaggccgcagggtcctctgcctaggaaaaccagagacctttgttcacttgtttatctgctgaccttccctccactattgtcctgtgaccctgccaaatccctccccctctgcgagaaacacccaagaatgatcaataaaaaacaaaacaaaacaaaacaaaataataatggaagaaaacatgccaaaaagtaaacaattgtggttgctggacagagagaaaaaaaaaaaaagaaatagtcaatcatctgtcgcctgagagcacagggggagggacaatgatagggatataaacccaggcattcgagccattagtggcaaccgctttcgggtcccctcccgttatatgggagctctgttttcactctattacatcttacaactgcacagtcttctccgccgtgtttgttccagctcgagctgagctttcactcaccatccacc

SEQ ID NO: 23707 - DNA, 1284 bp, Artificial sequence
  DNA replication origin
tcgcagacggggtggtggccgggcagaggggctcctcacttcccagtaggggcggccgggcagaggcgcccctcacctcccggacggggcggctggccgggcgtggggctgacccccccacctccctcccggacggggcagctggccgggcggggggctgacccccccacctccctcccggacggggcggctggccaggcagaggggctcctcactcttcccagtaggggcggccgggcagaggcgcccctcacctcctggacggggcggctggccgggcggggggctgacccccccacctccctcccggacggggcggctggccgggcagaggggctcctcacttcccagtaggggcggccgggcagaggcgcccctcacttcccggacggggcggctggccgggcggggggctgacccccccacctccctcccggacgaggtggctgccgggcggagacgctcctcacttcccagacggggtggctgctgggcggaggggctcctcacttctcagacgtggcggctgccgggcggagggactcctcacttctcagacggggcggttgccaggcagagggtctcctcacttctcagacggggcggccgggcagagacgctcctcacatcccggacggggctgcagggcagaggtgctcctcacatctcagacgatgggcggccgggcagagacgctcctcacttcccagatgtgatggcggccgggaagaggcgctcctcacttcctagatgggatggcagccgggcagagacgctcctcactttccaggctgggcagccaggcagaggggctcctcacatcccagacgatgggcggccaggcggagatgctcctcacttcccagacggggtggtggccgggcagaggctgcaatctcggcactttgggaggccaaggcaggcggctgggaggtggaggttgtagcgagccgagatcacgccactgcactccagcctgggcaccattgagcactgagtgaacgagactccgtctgcaatcccggcacctcgggaggccgaggctggcggatcactcgcggttaggagctggagaccagcccggccaacacagtgaaaccccgtctccaccaaaaaaatacgaaaaccagtcaggcgtggtggcgcgcgcctgcaatcgcaggcactgggcaggctgaggcaggagaatcaggcagggaggttgcagtgagccgagatggcagcagcaccgtccagcttcggctcggcatcagaaggagaccgtggaaagagagggagagggag

SEQ ID NO: 23708 - DNA, 866 bp, Artificial sequence
  DNA replication origin
gccctctgggaattctgatgcacactcatgtgtaagaacccctgccacatttgatcttcggtaagtcagtctccccgaggaccgttgggaagacgaaagaaagcttctagaaggaagggctttttgctcagtgaggcaccaggcaaattagctttggagtcacttcagtctccacgcagccagggccagccctatgggaggtcagccccagaaatggctgagatcgcaaagagggcaagtttagaggtcagaagaggagagccgtgtcccgaaagacaacggcaagaagcttctggaaggagatgaagaatatggcaggaccacaaaggggccagggaggggcccctgaggcaagcccctggtccccctgagtggaccccactgcatggaagaaacttccttatgggctgagaaacagggaaccagagtggggggtggggtctcttcctggtcatggagaccaggagaattcgaggggccaggggacggggacaccaggcgcagggagacgccggtgggtatggggcagcgatccccagggataggcgaggctctgaaattgtcctctacacagctgtgggtttcacaaaggtggggcctaggtggcgggggcatctctgtatctttatcacctggagctttaccgcctgacatgaggcgaatgcttgacaaacgtttgttgagtgaatgagtgaccaagtgaagagctgaaggaattaggacatggagagagaagggcaggagagaacttgaggtgcaagagaatacatcttcagactgggcgcagtggcacacacctgcaatcccacccagcgctttgggaggccaaggtgggaggatcacttgaggccaggggttcaagacca

SEQ ID NO: 23709 - DNA, 1229 bp, Artificial sequence
  DNA replication origin
gcaaaaaaatgtttaaaaatttaaaaaagtatatatagcatgaagttcagccaggtaagagccaagtggctgaaaggcattcaggagagagagtgagtccttcccagctgatgaaaatgcagagatggcaaggaggaagcacagtttccaggggcccactggcccccgaaatgccacagggtgagtacgccagagagcgtggcaaacgcacaccatttccattcattcctcaaggaagacgcaagtccaggcaaatattctggttgtgtggtttttcagctgaaagtgaagacaaagggcattgagcaggaattaatgcaaggctccaggctcctggcacgctgcccggagctccagaaagggcagagtctggggaccaggcccagccggagggcagggtcctggagtggccagggctcagtgatgctcctggtgcagtcctgagatgctaaaggaggggaggggaagggggctgtctgtcatcccttcaatcagcagtgatgagtaagcacctactgtgtgccggtcaatgggggacagagccagggactagtcatacttggtcctcattcttgggggacatccagtctggggtggggattgggggaagaaaataattaaatgaggtaatttcagagagttataaatactataaaaataaaatgggtgatggggcagagaaagacccgtggagcggctttccacggcagaggccgggccacaaatatccttcagaagtggcttttgaaccgagagcctggtggggaaaaggggccggctctgcaaagagcctgagaaagggtgtcctggcagagaaacagaggtgcaaaggccctgaggcttcctctgttcctgcaaaggctctgaggctagcacactctggaggcatctgtgtcccaggaagaaggtgaagagaggcttggggagatgggtggggaaaaagaagcacagaaaggcaagagaaatgggtatgggagggcgaggagaccaaccgtggagaaccagagggaactgaggaagagagttcatggagggcaccagggaagaactcccagacacatccttgtgtgtctggacaaaggggggtgcaggcgcatggggagcagcccgcaaggcctctgcttctcagtggttcctgctcgtctccacatgcctgggcctggtgtctttgctagctttgtgtgtgcttagttcttatgtccccaattggattatcaactcctcaaagg

SEQ ID NO: 23710 - DNA, 1762 bp, Artificial sequence
  DNA replication origin
ggggggcgcggggcgcgggccccccgctcctccgggggcttctccaccgcgctccggggcccggggcaggcggcggcggggcgagagctgcgcgcccggggacctgcgggcaccgcgagaggcggcgatcaggcccggcgccccccgcgccccggatccccgcgggcctgcagcctgctcgccgccgtgggccgcgctcctgccagcgccgccgccctccgccctccgccctccgcggctcccgcccgccgggcccagcctcgcctctgcgctgcgctgcgatcccgcaggccggcccagccccgaggcgcacgttgccgcccggccctctccgcacctccccggcccgcgcctccttttctaggcgcctcctcctcccccttcctctccccgccccggcctgcgcggtgggcaacagccccggcccggcgcctccgccgaggccctcccgctcctgggcactgcgcgcccagccagcagctggagtcccacgaggcgcgtgtgtcccccactcccggaacaagcaccacactggcgcaccgagggtgccttgtggggtccccaagtcatcccaagacatacgagtaatcatcatcatcctatttcgtggtgctcttggaggttttctccatctcatttgaagtcccaataaaagcagcttgagaaactttattttagagttttctttttctctgtaacttacaatcgatggggaggagggccaccacagccctagtactggcgtctcggttacccgcacacccagggccagctctttgggccttaagggtggaaagcattgggtggaacctgtgggtgggggcggcgggggcgatgagcagcacttccgggaatcccccggcatctggctgttcctgcattttttccaggcaggtcctcgctcatgaacaagggtcctgccggtctttcccttcttttccttcctcccaagagagaagaacacgtgtttcccttccttactgttttcttatcagatgcctggcaaaggatgtctgcatttccagcgcccagccacacagacgccccccaccccactcctgaggatccatccttccattctgcaagcggggcagctgggggtgtccacggactgctttgaaaagcaggaatgtgggagaggctaatagggcgaagagaacagaggtagactccaggaggggtgaaagtgtgcccagacacactcacttccattcagcttacagcagaaagcccaagatcaggggcgggaagccgggtgtcagaatccgctctttggacacccccaaactgagggcagcactttgaagatgttctcaggctcccattccgcacccagccttggccggacctcagaacgggcaggcgtaagacagcaggcccctgccctgtggagggcccagtctgatgagggagcctgtcaatgcaccaggaagctaaggctgtgagtctaagggaaggaacttaatgaggtgctgcaaccaagaatagtcaaagggacaacttaaggctttggagtgttcagggaaggcttcttggaggaggcgattttcaaagataagatctgaatagccaagcagtgagaattagcgcaccatgtggagggaacagcagggcgcaggccctgcagcagcaggagtaaggtgcatgccggacactgacagagggtggggccgcttcctgagagcccacagggtgacaggcatgcacctgtcaccaggtgaatttacagcccatttccatgtcgcccaggaaagaacgctgg

SEQ ID NO: 23711 - DNA, 1164 bp, Artificial sequence
  DNA replication origin
tgggcaggttgctaacctcctctgtgccttggcttccgcctctggaaaatggggctaattggagtgtaggcttcatgggaatatagtgaaaattaaatgaattggtgtaaataaagagcttaggacagttatcctggcacacggtatgagctatctaaatgccaagtatcataacccatgaggaaacagccccgggctttgcttttaagccaaattagaagatcagggcaacacagtttcatacctggcatctagtgagcaggaaggggaaaaaataaagtcaagtagaagagccaagacaagtaagccagccatgctattcttgcggcagccacgggctggcccggatggcagagaacgcttccagaaaaccctctgtaaggaggcttctgggtcatggaaggaaccaaggagaaggcggattccaggtcgtttttctccaagccccactgtgcaaggcaccacggggattcagtcccaaagtgtgcagctcaaatgggcgacagtgccaagtcccagaggctctggcaggaaagctggccccctttagacagcaagatcaggttcacttcaaacagccctggtcacctctatcaactcctggaagtcctcactgccccttccacccgccaggctcccataaagagaccaaagttcaaatttgctgcatgatttggtctaagatagtgactcccagactttgctgaacagtacaatcacccagggagactgaaaccctcctgatgccgagctgcaccccctatcaattcagtgagactatctgggcggtgagtgtgggtgggttttaaagattctccaagtgattccaatgggcgaccaagtttgggacccaccaggctaagaaacaagcaaggcacgaatgaaggtcatatcctgaggcttgaggccggggagccgctcctttccgctgtggggaggaggattttcagcggcggggaggccttttttgccctgtgagtgccaggcaagaatccccggggccccaggaaaggggagtggagccagcacacacgccccagcagtaaagctgttaaggtgggcagggcgcagccagagagcgggcagggatgggcaatcactcatttcaacttgtcatttcctcaggctgcaaaggcgcccgctcggcccatatgcttccccgcc

SEQ ID NO: 23712 - DNA, 1210 bp, Artificial sequence
  DNA replication origin
gctgcagtgagccatgattgcactaccgtactctagcctgggtgacagagagagactctgtctcaaaaaaaaaaaaaaaaaaaaaaaagcctttagaaacagagcctcctggccctgccctgagtgaaatctctacttcaagatgctcactttgctgggctggccctgaaggacccccgagtacagatggacggggttttcttgggttggtggaagaggggaaaggcctgtgaggctgagtctggcggggaacacttccggagggaagagtggggtagggggagggcagaagtgtcaccatgttggcatgaggagaggctgcaggggccagaggtctgttttcagcatcagtttggggctgaatcagcaatgggctgagctgtggggagggggaggtggactgcagggagggggaggtggactgcaggatggggtaggggtccttaggccactttctgttgaggagcaggatggggtgggggtccttaggccactttctgtgaggagcaggatggggtgggggtccttaggccacttcctgtgaggagcaccgggcaggggcatgcccctgatggtctttgcttccacagggagtggaattttgggacagactttaaaacagaccagagaaagaacttcccagcgtggagctgtggggtggatttgggaggggaacagagagtgctttctttgtgtctgtctgatggggctctttctgaaggggctgtggatggcttctgttcccatagaactctctttccccaccttgccaagattcttccagctgcaagtgacagaaaggcagctcaaatggtctgaagcctcaaaatggatttgctggtgctcacaactgagggacagtttcaggtgtggctcgatccaggcatttgaacaatgttggaaagacttgatctttcacatctttgactcctgctctcctcagcatagctccatttccactggtttccaacccccctacattcttagccctcacggtgggggctgtctccacagctctggaggagaacctgggtagggctctcattggcccagtgtgggttacacgcccatgtccaatccagtccttgtcctcagggagatgtggtgccatttctagaagatgtggatgctgggtaggccctccctgccctcctgcagacatctgctattctgatcagcttcctgtgcccctcgacaggcctggccagct

SEQ ID NO: 23713 - DNA, 981 bp, Artificial sequence
  DNA replication origin
ggggagaagccgggaggatggacacgatgagctcggcctggcactcgggcaggaggcgggaagggaggctgccagaccaaggacccgtgtggaaggaggcggctccccgctgcctgccctgacctacaggctaggtggtggtctccttgttttggtgtcaaggactcagtaaaagcatctatttttttagcacttaagctggcaaggcggtaggggcatgcactgttaggtggtggccacccccagggtcaggggaaaagaatgggtccatggagtgcccttgaagcagagaacagccccgagcagtgtgaggacagaggcatcccagcctcagccggtggggacggctgccactcccccagagccctgccaccccatgtgtcctaggctggtggccaaggccatgtgtgagggaagaggggtacctctcttccctgctgctggcctggggtatttccaaaacagccttttcgcacacatgcaggttgcaccgagaggtctggagctgtggctgagccacctctggcggatgttgagccaggaggttgggcaaaggccggatgctgatgccagcgctggaggtggtgatactgggggcggggaaggcctagaaatactttgagccatggccttgccagtgtcccgtgccctccagtgtcaaagatttggggcactgcccgtcgaaatggaaaggttggtgctcagcctctggagcctcacctgcagggcgtccccagctaacacccatccacgcaccacctccaggacgagaacccttgatgtcaaaaccaagtgcccagtggaggcggtgaagctctcggaaatgctgccacctgtgtgaggccgggtctgaactcgagggagtcggagctcagctgtcggtttaaagagacactgaggggaccgggctgccgccctcagcctgcattcctgtgcgcaatcgattccgcaatgacagcaccttactccttcctgcggcag

SEQ ID NO: 23714 - DNA, 1729 bp, Artificial sequence
  DNA replication origin
acatggtgacatttgccaccaactgtcctttacagagctctttctagctttcttttgagaactagacactcgcagcgtcacttcacaacacacttgccagggaggttcagagccaaaggcagggtcaggaggagaaagacaagagctctgcccctcgagggttccgtcgggtttgagacaaggattgcactgtgttatcagagacccagaggggagagaagataggccagggcagtgtgctcttcaaggaagtaatgccccagctgggttttgaagtgtgtataggggttttccagggagatgggggtcaggggaacagcatgagtcttcattttaaagatgcagcagtgaaaaagccacataagacaggggtgggatgacatctttctttgggggcgggtgggatgacctctttctttgggggcgggtgggatgacctctttctttggggggaggtgggatgacctctttctttgggggtgggtgggatgacctctttctttaggggcaggtgggatgacctctttctttgggggtaggtgggatgacatctttgggggcaggtgggatgacctctttctttgggggcgggtgggatgacctctttctttaagggtaggtgggatgacctctttctttaggggtaggtgggatgacctctttctttaggggtaggtgggatgacctctttctttaggggtaggtgggatgacctctttctttaggggtaggtgggatgacctctttctttctttaggggtaggtgggatgacctctttctttaggggtaagtgggatgacctctttaggggtaggtgggatgacctctttgggggcaggtgggatgacctctttctttaggggtaggtgggatgacctctttctttgggggtaggtgggatgatctctttctttaggggtaggtgggatggcctctttctttaggggtaggtgggatgacctctttctttgggggtaggtgggatgacctctttctttgggggtaggtgggatgacctctttctttgggggtaggtgggatgacctctttctttgggggtaggtgggatgacctctttctttgggggtaggtgggatgacctctttgggggtaggtgggatgacctctttgggggtaggtaggatgacctctttgaaggctgaggaccaactggctgtagctgggagacagagtggaccctctgagggcaggaggctgcgagctttccatgcacctgcaaacaaccgcctgggttgggtctaagtccctggtcctcagagaagatacgccatggtgctgagtggtaccaattcagaggcacagagacaggggctgatggtgatgaccgtgagggctgagccctgtgatccactcccatctctctggtctaactggtggctcaacaaggtgctgtgggatcttgggcctcaccgatgtgagtgggtaacccctggcggctggcatgaccaacaccccaacccatcctggattctgggtaggggccactctgtgccctgggtggagggcaggcctgcctgggacagtgccctttgccggccccacactgccatctgcctgccggcctcagaactacagcccagcaccaggctcagccctgttgggacgcatgaaagcccagcgcacagatgagaaaccaaggcccagagggcacccaaagcatccccaagttcacacagatcacagtcaccaagctggaatccaggtcct

SEQ ID NO: 23715 - DNA, 668 bp, Artificial sequence
  DNA replication origin
cgcctccatccatctgtccgtccagagccggcatccttgcctgtctaaagccttaactaagactcccgccccgggctggccctgtgcagaccttactcaggggatgtttacctggtgctcgggaagggaggggaaggggccggggagggggcacggcaggcgtgtggcagccacacgcaggcggccagggcggccagggacccaaagcaggatgaccacgcacctccacgccactgcctcccccgaatgcatttggaaccaaagtctaaactgagctcgcagcccccgcgccctccctccgcctcccatcccgcttagcgctctggacagatggacgcaggccctgtccagcccccagtgcgctcgttccggtccccacagactgccccagccaacgagattgctggaaaccaagtcaggccaggtgggcggacaaaagggccaggtgcggcctggggggaacggatgctccgaggactggactgtttttttcacacatcgttgccgcagcggtgggaaggaaaggcagatgtaaatgatgtgttggtttacagggtatatttttgataccttcaatgaattaattcagatgttttacgcaaggaaggacttacccagtattactgctgctgtgcttttgatctctgcttaccgttcaagaggcgtgt

SEQ ID NO: 23716 - DNA, 868 bp, Artificial sequence
  DNA replication origin
ctgcccaacgcagccccttcccatcttgtccccctgcaggtggcggcgggaaggccaaggtctctggcagacccagcagccgaaaagccaagtccccggccccgggcctggcatctggggaccggccaccctctgtctcctcagtgcactcggagggagactgcaaccgccggacgccgctcaccaaccgcgtgtgggaggacaggccctcgtccgcaggtgggcaccaggtggggacagggctgggctcgctgagcccccaacactgggctgtgaatgctgccggggcactgaatgctgagcgcctgctgcatgcagagctcagactcgggcctgttctgtggaaacgctgtccaggggcctgggcagctgagcctggctcacgaaccatcaggatgcttctgccaggggcacaggcagaggaaaagggtgtggttggggccggccagatcacatgggcctggtggaccatccaggggagcctggacttcctttgatgggtagtgaggaggcgtggagggctttcggaagggaaatgctcatctaacatagggtcagaaggcccctgggagaatagaccagagggacggtgaataggctactgctatagtccaggcaaaagacagcggcagggtgtgaacagggacggaagtagaacaggtgaagagaggcagacggttctgagacctgttcgcaattagaaaggtctgggaggactgttggacagaaacgctgaggcctctgttcccggtgtggtgggcaggcggccagcaggggctgccgggctcacagaggcctcctgggcatctttcgcttcttcccgcaggttccacgccattcccctacaaccccctgatcatgcggctgc

SEQ ID NO: 23717 - DNA, 1660 bp, Artificial sequence
  DNA replication origin
aagctgggcttccagtttgagcgtggccccaggaccatgctaaggctaggcaggatccaggccccgtgcagagaagtcaggacccctgaggccaggcctgacccccacagaggctccagaagcttcttggggcctcagtgtccaggttggacaactgcaactctctcctcagctccctgccccgatacagagggtattgatggggaaccaggctgacccctaaggctccctgactcccagggctgagacagaccctgggctcctccccaccaggctaaggggcagctgaggacacatagtgggcctggcagatgctgagcacaggcctggctgccattcccctgtccacacagtgtgggtggggcttcactccagcctgctctcccccaaggagacagatgggccaagaagccgggtccccgcagggaggaaggcgggaggactggggggcggacagcagtgtgagtgtccgagggaggcggcagcgcttcgggcctagtgggcaggagggccggggctggggggcagagggtacagacacttggggggtgtcagcccagcttcagattagcaaactccagaacgaggtcaaacacgcacaaaaataaagtcacaagctccaaagctcgaggagggggttgtcagaggagcgcggaggagcgaggattaatcacaccgggggtggggacagacgggggcggggcgggggtggcctgcagacctggcgaggtgagtgtgtggtcactccgtccgtcagcagcggttatgggcatagcagcgggcaggctggcactggcattcagagggttaaaagcattggcgctgagcggcggggactcttcccactggtcatatttacccatgagtgcctttctaattatggcctccagccccatgttggtgctggcatgttcctgcaccgcctggcttctataggtcataaggcctgggagagagagacagacagacagacagacacatgggggccggggagggggagccagaggggcgacagagagagagaagggagagagagagggaaggaggaggaggaggaggaggagagagaaatacacagtgagcacatttcggcaaagcaacatatttatttccctatccctccccaccctttttttcctgctgggtggtgataaaaggggagaggctggttccttctacctggggccccggaagctcttgggcactgccagggaggtggggtaggggaggtcagatgcccccaccagcccctattctcattcctattctgtcctctgggaaatcacaagccccgtctgcacctccaatcctagctggggctgttttgtttgttttttttttaaatctcaagtggccttaatggagagggtgggagatgggagggctaccctgtttggggaacaggctgctagaaaattggctcaagccagagctgggggctggctgggggctggggaagggactgagagagagaaggtgaccagatggtcctcccgctgccccacctccacctgtgtgatgggacgtgcagccccgtacctccccaccaagctgggcctgctctcctccctctgcctctccccacccaggagccatgaggagaaagaggtgcagagacggacgctgagggcggggtcatagccatgcagttacggtgcgt

SEQ ID NO: 23718 - DNA, 943 bp, Artificial sequence
  DNA replication origin
gcgcaccctccctccactctaaaccagggccccacacgcttttcctgtacgtggccaaatcataaacgttttaggcattttcgaccacaagtaatctctggcatgtatcgttatcatttttattttttttttaaacaaccctttaaaaatgtaaaatcatttttttagttcatgaattgtacaaacagagggcccgggctagatctggcccatgggccacagtttattgacccctgctctgaattctggttgtaccccagtgccagctacaccactgccccccaaagatgtcctgctgtcttgccatgtctgtcctcgcacacacattaccccccccgcccccaccaaaacgcctccttcaccctggagctcagggccctcccctctctttctcttttgacccccagaggccccacggttcaccagggtgggggtgggggcgggggtgggagtgggagtgtgcgtgagcatgtgcatgtgcctgtgtctacaggggtgtgcgggtgcgcctgtgtgcgggtgtgcatgtgtgtgtgcgcatgtgtgcgggtgtgcatgtgtgtgtgcgcgcgcatgtgtgcgggtgtgcatgtgtgtgcgcgcgcatgtgtgtgggtgtgcacgtgtgtgtgtgcgggtgcgcatgtgtgcgggtgtgcatgtgtgtgtgtgcgcatgtgtgtgggtgtgcatgtgtggaaaggctgctctctaatcatacagccctggaacaaatccccctctgtcacctactgactgtgcccctgtgggcaagtgaattcacttctccaggccttagtttcttcatctgtgaaatggggagaatgctgcctatgtctcctggggggctgtgtgtaaagggtacacgtgagtgcctggaacccactgagcacagcatgtactttcatcagctattattcgttatgtatccgctctgtgactc

SEQ ID NO: 23719 - DNA, 1016 bp, Artificial sequence
  DNA replication origin
aaggctgctctctaatcatacagccctggaacaaatccccctctgtcacctactgactgtgcccctgtgggcaagtgaattcacttctccaggccttagtttcttcatctgtgaaatggggagaatgctgcctatgtctcctggggggctgtgtgtaaagggtacacgtgagtgcctggaacccactgagcacagcatgtactttcatcagctattattcgttatgtatccgctctgtgactcccccatctcctggagcctccatttcttgcctgtgcaatggcaccaggcgggcctcatatgcagctgagctcagacccagctctgaggcaggcagctgacgaaggcctcccgccggctgaccagcaagaggcacccccatccctcgctcacctcttgcccccttcgctgtggggggagccacgggccggggcaccatggtccgggggcgggaggtagaggtcactgggtgggcggcggaggtccaggacggggcagctggccccagggaaggagtagaggggggcgggcaggggtgcgctgagctgctgtgggtggtgccgggtgtagtcctgtgtgatgacctcctgcaggcaagtgggggggcccagagtcaggcagcactctcctgacagaaccttctgggggtggggaggggctagacggagctcggggcagaatcctgggtggggccagcttcctgggtgactgtggacctgcccgccaccctctgggcctccgtgtcccagtgtgcatgggagtggggctgtggtcagcggtcccaagctggtagttggcagatggctgatgagaccagcccatgacactgagaaacctgggccaccaggaaggcctcattgcccgtgaagatgccatcggctcgcatcacaggctcctcccatggattagggggcggtgatggtgccggtgctcggggctttgggatctcaccctcacccacgccctggatccccccagcgccatgccctggatcccccagccaccccgccaggaca

SEQ ID NO: 23720 - DNA, 996 bp, Artificial sequence
  DNA replication origin
cacggggcctgcaggcagagcagagctggtcagggggtgtctgctggccccagggctgctgggcccaaatcccagccccatgcctttgagcctcatgatccagccaattccttggcctttaggcacctctgttttcctatctgcatgatggggccttgagggtcctcactgtgcagggcttcgggggcctgggtactgggtggggcgtacctggctgcttgggccgcagctccccctccaggtggctcttgtcgagctcttccaggtgcttggggagccccttgtcgtgggtcagactgggtgagctcacagggctgacgggctccaccccttcggggctgtagctgctgccgtggtaacctagggcaggcggggggtgcagagtcaggcaccgggcccagggtttcggagcccgaggggcagggctgccctcccagctggctgggaccccgggggggtcaaggggaacccaagctaggggtagggtttgggctcccaaagacagtaaggcagagaggggtgttggggagagacagggaggccaagggagaggtggagagagatgcagagcccgggacagagacagacagagagggagacacagagagagattaggcaagaagggacagagatgggttcaggtggtggaggccgggcgaggccagcgtgagatgggggcagcatgggtctctggggaaggagtgtgtggggcggagtgagaagtgggggtgtggctgggagtgaccctgggtccccggggccccgcctgggctatagcctcggccatcccagtccaacagagaggagccatgaactagggccaaggcaggggtccagaggcagagggctcccctttttctggggtacaggggctggggacagggcaagatgcaagagccagacccagctcctcctcgacagcgcaggtccctgccccgcctcagcttctccttgcaccgcctgcctccacttcccccagtccgacagcatccaggc

SEQ ID NO: 23721 - DNA, 1126 bp, Artificial sequence
  DNA replication origin
cagagatctgaaaatatctttggaccacgagacggggtgggtgcgggccggaagtcttaccatcgcgaggggagccgttggccagcgcacctccttctcgcgcccctttatcgtgagcaatttgacgcatgataatcgcgtctatgaaggtggccgctgtcagggtggtcttacccagagaacggagttccagttcctggatggaaaagggtttactttgagtcttttcccggtgcgggtccgaggccgaggcaggtggcgccggcgggtccgggctggcgtggtgaggtgcgaggttcttcgcaggggtgcgggcgatggtggcgtggccagagacaggaggcactaggggccggggctccgagcccttgctgggggaggaggcgggctccagcccggagcgggctgggggcttggcgaggaaggcatggccggtgtctgctcggggccgctctggccgggcgacccggggggcctccttgggcagcaagacgggctccatgagggtagggtagaccccatcgagggtgccgcccagtgggcagtgggtggcaggtgggaatgtggcagccgggcgaacgggtgaggaggtggaggtggacctgggggaggagagaaggcggtcaggcagtcatgggagctgccctcttcctccaccaccctcgatgagtccccattgccctgggataaatccacatcccctgctgctcccagagtgaaactgccctcctgactgtaacctgccagactctgtgcgtcatggtttgacccatcccactcattcgttcattcattccttgcatcattccaaaacttctgattaagcagctactaggtgccaggcactgttctagacactgtgaatacagcggtcataaaacggatgcaagcatcttaccatctaattcagaaaacagactacgatcacattaacagatatcccaagctctacagagcctggtaactgtgtggaggtagtcaatgaggtaccaggagagaacggcaaggaagctgaggcagggctaggaggtcttcagggagggggcacatgagggagctgggcctgctcaggatacccgaagagctaaaaaagccacgtgaggagtgagagagcaaggggaaggat

SEQ ID NO: 23722 - DNA, 2068 bp, Artificial sequence
  DNA replication origin
ttgacaaaaccaaccaccacgtcctcgtccgagcgggagcgagaccgggatcgagagcgggaccgggatcgggagcgggaaaagtccatcctcacgtccaccacgacggtggagcacgcacccatctggagacctggtagggcatcagagcccccaccccccgctccgggactccttgtgggccgcaagaggcctccccctgctgatgccactgactgtcaccaggtacagagcagagcagcggcagcagcggcgggggtgggggcagcagcagccgccccgcctcccactcccatgcccaccagcactcgcccatctcccctcggacccaggatgccctccagcagagacccagtgtgcttcacaacacaggcatgaagggtatcatcaccgctgtggagcccagcacgcccacggtcctgaggtgggccaggttggcatgggggagggggcgggcaggtggatgggtggtcagtaggaggatgagcagataagaggatgcttggtgggaggtatatgggaggtgggtgggtgggcagatgtgtgggggtagaagaatagactatgtgtgagtagtggatgggtgggtggtcgggttaggtgggtgtgtgggtcagtgggaagttaggttagctgcgtgggtggatggatggatggatgggggggtggtcgggttaggtgggtgggtgggtcagtggaaagatagatggctgggttagctggttggatgggtggatgatcaggtttggtaggtaggtgggtgggtggaaggatagatggccgggttagccagataggtggttgggttaggtgggtaggtgggtcagtgggaggatagatggttaggttagctgggtgggtggatggatggatgggtgggtgatagggttaggtaggtaggtgggtgggtgagaggatagatagctgggttagctgggtggatggatgggtgggtggtcacgttaggtaggtaagtagatgggcaaaaggatagatggccaagttagctgtgtgggtgggtgggtggtaggtaggtaggtaggtaggtaggtaggtaggtaggtggctaagaggataaatgactgagttagccagatggatggatggatggatggatggatggatggatgggcaggtggttgggttaggtaggtaggtgggtgggtgagaggatagatgactggcttagctgggtgggtgggtgggtgggtggtaggtagatcgggttaggtaggtagatgggtgggtaagaggatagatggctgggttaactgggtggatggatggatgggtgggtgggtggttgggttaagtaggtaggtaggtgggaggaaggatagatggccagattagccatgtggatggatggatgggtgggtggctgagttaggtaggtaggtgggtgggtgagagtatagacgctggcttagctgggtgggtggatgggtgggtggtagggttagggaggtaggtgggtgggtgagagtatagatggctgggttagctgggtgggtgggtggatgggtgggtggtagggttaggtggatgatggaatggatggttggatgagtaattgtggggatgagtggatggaggccccagtggatggacgatgagttgggcggtgggatgagtagatggggaggttgtttggtttgagaatagaatctgtggagagggagagactgaatggggactgtgaggaaagactttcccggtcccccacatttagcaaggccagcaaggaaaagaggtgtccctcttgcctggacaaagtcccaagtttctctgagatgggagaggcccctgagtgccctctggtgacacacactccagagactgtgggcagagctgcttcaccaggggggtggggtcacacctcaacacccttccctgcccggaacctttttttttttttttttttgatggagttgtactctgtcgcccaggctggagtgcagtggtacgatctctgcttactgcaacctccacctcctgggttcaagtgattctcctgcctcagcctcccaagtagctgcagttacaggcacgtgcaaccacacccggc

SEQ ID NO: 23723 - DNA, 852 bp, Artificial sequence
  DNA replication origin
tcagtggcatcagcagggggaggcctcttgcggcccacaaggagtcccggagcggggggtgggggctctgatgccctaccaggtctccagatgggtgcgtgctccaccgtcgtggtggacgtgaggatggacttttcccgctcccgatcccggtcccgctctcgatcccggtctcgctcccgctcggacgaggacgtggtggttggttttgtcaagtgtgttggacctcctaggaaacccaaaggccagagactcagccccagggccgaagaagagcctggctttgtcttctggggtgggaaagagagcagggcttctgcccgcccatcccccagccgcctcccatggatgccggggtccccaccccagactgggcagtggcgctacctggggagagtggggagctgctgtggcggctgctgaagggctggggcgcggtggggaggtaggcaaggcggtccatggcggtggctggggtgcctggtgtcgggggcacgagcacaggcaggtgtggcacttgggacaggtcgatgatgcctgcgggaggtgttgggccagggctgtagccacagggaggagagaggccaggctgcccaccggccagatcaccctcctggagagcacggcacacactcctggagccagcagagctggtggcaggcactccctcctcggctcccagcaccagccatggaacccttttctgaatgctcaggttctctcggtaccacctcctcttctgctcccaagcccgagccggggcatctcctgcagctgccctcactggttcccatctcaggccctctgtgccccttcagcctctgacgcctacacaatccattccctgtattc

SEQ ID NO: 23724 - DNA, 941 bp, Artificial sequence
  DNA replication origin
tgttgcccaggctggagtgcaatggcacgatctccgttcactgtaacctctgcctcccaggctcaagtgattctcctgcctcagcctcccgagtagctgggaatacaggtgcgtaccaccacacccggttatttttttgtatttttagtagagacagggtttcaccatgttgaccaggctggtcttgaactcctgacctcaggtgatctgcctgccttgacctcccaaactgctgggattacaggtgtgagccaccatgcctggccggaagacaattttaaaatgtcacagcatgtgatatgaactggagatagggggtctggttagaagcctccccaaggatgtaatatgtaaacaaagacctgagggatggaaagaaacccactaagtaaagatctggaaggcggggacatggcaggcagagaggaggagccacgcaaaggcccccagcaaatactgaattgaccgagctaagcatggccagggaacaaagagaaagagggcccaggggctggggctggggaggacgaaggaatccggctgaatgagaggcaggcagggccccaacaggcaggcgccccaaggccatagcaaaatgtgtgaagttgctagaaggatggaagcagggaagtggaataatatgatttgcatttttagaaagtatccgggtagctgtttgcagagtggattacagcaggaagagggaggggcgtgggggaagctaggtgagacaccacggtggtctgggaggtggcaaggagttggacagggtttggaatcggaggcagagcccacgggcctgcaggtggtttggatgtggtggaaagcgggtggcgaggatatcccaggtgcaaactaagctaatggtggatggggaggcacagcttctccagacaggcgcccaccccactcacgcccatgcacaccccactcaccctcct

SEQ ID NO: 23725 - DNA, 2153 bp, Artificial sequence
  DNA replication origin
gggggaagctaggtgagacaccacggtggtctgggaggtggcaaggagttggacagggtttggaatcggaggcagagcccacgggcctgcaggtggtttggatgtggtggaaagcgggtggcgaggatatcccaggtgcaaactaagctaatggtggatggggaggcacagcttctccagacaggcgcccaccccactcacgcccatgcacaccccactcaccctcctgcaggcgcggcgtgggctcccgcgtggtcacgggcgaacctcgtgggaggtggccggcaaagggtgccccgtggtcctcataggtcagggggctctgccgcggcttacccagctcaggcacaatgaccggggcgccgcgcgcaatggagccccccgagctgctggcggtccctggccggctcttcaggctctcctcgtagcaggcacgttccagtgcccgggcgtcggccatcacatccagcgggtgcacgggtgggaacgtccggccggggctgccgatgagggagcgtacgtcgtgctttttggagccagtggtggacgcgccggtgtcgtacttgagcggggtgccctggggcagaggggatgtaagctctagccctggccacagccatagcccagaccagctgcatcccccttctgagcctcaaaaagtttgtcatctataagatggaagtgacatctgatgcctccagaggcagggagacagagggctttgctaaccctgagatggcacacttgttacttactgccctgcgcaccctgggcctgaccctggtccccacgctccctggggggactgcagaaaggggtaaaaagttcaacagtcaactctccctgccgcgagtggtgggctctctgatggtccctggagtttgcgagaaagaagcccaacaccctcatgtgggtaaaaaacattcctctgttcagcctgggaccctccatggcccacccaatgccaagcagaaaaagtcagcacccagacccaatactacccgccctgaggctttcagccccagggacactgaggtcagggctgaggtgtttgccctccagacagaaaggatggtgaggaaatgggggggtcacagtccagactgggaccttcgtagccaggccaccaggtcccctgcctcttttcagcaggcttcggagacacttgatatggtgggactttagggctttgcaagcaacaaaactctatttagggatgtcttcattactgtcgtaagaaggggaactgcccttgtttttcaaaagaatattctagaatctggaccctgtcttggtcatgcggtggatgcttccaaggactccataattgcctaggggctgagagccaaacccttcccctggcaatcagggatcttactgcttctgccttctccctggcttcaaaaccttcctacaagctggaacccctcccgggacacccaccccagtccttccgcctcacagccccacagccccgtggtggctcccattctccttccccttcacaagaggccacctctgcccatgtggaaggacagtggccttcaggggctttccaccgaacagctcctcgtcctcgtaccatcggcacggaacttcccctactgagctggggccgcctggggggactggggcctcttgtggtgcaacctgctggtgggtgcagtggatgctgcggctgtaggaacatctgaatttgggtttcacaactgcatttgctgcgtgactctgggtgagtcgttgaacctctctgaacctcaatttactcagcaataaaataaggtcattaagaaaacgacctcagagcattgctagggggtgaaacaatgaacgcatgcaacatcctcaggccgcacctggaccctcacaaagattcaacggaggcagttactcgtcactatgtttagtcctgtggccttggaagcctgcctggcctctctgggactcagtttccctccctgaagaatgggaacaatgtgagttcagtagaatcaggtcaggagcctggtgccccctgcgcagccctggaacacgcacagctgaggcccggtgatgagcagctgggtgactgtaaggtacgcgagggctctcagcctcggtttccccatgtggagaggcccagggcagtgccccacagccaccgccacccctcc

SEQ ID NO: 23726 - DNA, 1361 bp, Artificial sequence
  DNA replication origin
ctctcatctggccccccgccccggtgactttgggagagagaaaatcacattctccttcggcccgctggcactttcttcgaggtggctctgcctgggtgttttcttggcagacgaccagagatagtggcttcaattgcaaaaccccgagcctgcctgccttcccctctcttactcttcagagaaggtgcctgggtgcttttttggcagggcctggccttgggagtcccctcccccaagcctcagttttctcatctgtaaggtgggcgtggatggcttattgcaagaataactcagttaatgacgggccacagtgggcgctcagagattagctgccctcctttggatctgctttgggacaccccctagaggtcaccccaagagggggctggagtgcagctccttcagctgtccctctggcattttggaagatcataacagcaatttcacctttgttactttattctgcaagtgactgatggcaccagcatgcgccaggcgccgggggcgctggaaactgcacagacaaggccctgactccaggcacttacattctagtgagggcatggagaaggaaaccattgtttacgggatgagtgggtgatgggcagatggggcatggggagcaggggagagtgggctggtcaggcagggagggcctctggggaggtgacattggagggcaatgagagccttagtgtgagggaaagccagaccccctgggaaccaccagtgcaaaggccctgtggccgcatgagcgtatgtccagtggacagcagagaggcctatagcagggtgtagagtggagtgagcagcccagggcagagagggcggagaggtcagagaggtgggcaggccccacgggtggaagtgacgggtcagggttttatcttggggccttggagaggcaagggatgcctgttcacaaaccagccctccctctccctcctagccctaggatggtggcaaggattgtcccagcttgatgaccatggggaaactgaggcaagggctgggtggagaggggatgtactgttgcaggcccagcatgttccgatgaatgtccccaggcccttattccccctctcgtgccctgccccccaaccggccttcatgagtgggaaggaaaatgacagtgaggagaaggtggcccgacccactcggccccacgtgctggtcaccagcatccccacgcccacccacggacagcccttgaagctttcgtctccactctccagattgagaaaccgaggcacagttggctaagtcacatggtcagagaggggatccgagcctttgctcgcaactgcagggctgggtaggcagggtggggcccctcccagacacatactctgtgccaggcc

SEQ ID NO: 23727 - DNA, 874 bp, Artificial sequence
  DNA replication origin
cccgcagggcacttgcagcctcccgtcctctcccctgcagccccgcccagggccgtgtcctccctccccgagctgggcctggcgtacgtccaccccttgcccagtgtccagcacacagcccccgggtgcaggagtcctcggctgggagtcaggacacctggtttgtcccgccctgtgcgactaggcccaggcccccgcccttggggcctgctttgccctctcagtgaacgaggctggactctggccagcctgctgacctcgtcctggccggcagcccgccacccctccctctgccggccacgactgcgcagggccgggcggacgctggaggacgcggacgagatgcgtcagagtaggccctggcagccagggcctcccgggaagggctggtgggacgggcgggccccccaggcgacccctgctcctggctgcccgcccagtatcatccctcctgcctggcagccccagtgggggagctctgtgttcctggatggacgcaagatgactctcatctggccccccgccccggtgactttgggagagagaaaatcacattctccttcggcccgctggcactttcttcgaggtggctctgcctgggtgttttcttggcagacgaccagagatagtggcttcaattgcaaaaccccgagcctgcctgccttcccctctcttactcttcagagaaggtgcctgggtgcttttttggcagggcctggccttgggagtcccctcccccaagcctcagttttctcatctgtaaggtgggcgtggatggcttattgcaagaataactcagttaatgacgggccacagtgggcgctcagagattagctgccctcctttggatctgctttgggacaccccctagagg

SEQ ID NO: 23728 - DNA, 2918 bp, Artificial sequence
  DNA replication origin
aacaacagctcagacaccgagagcatcccctctcctcacactgaggccgccaaggacacagggcagaatgggcccaagcccccagccaccctgggcgccgacgggccacccccagggccacccaccccaccaccggaggacatcccggcccccactgagcccaccccggcctctgaagccaccggagcccctacgcccccaccagcacccccatcgccctctgcacctcctcctgtggtccccaaggaggagaaggaggaggagaccgcagcagcgcccccagtggaggagggggaggagcagaagccccccgcggctgaggagctggcagtggacacagggaaggccgaggagcccgtcaagagcgagtgcacggaggaagccgaggaggggccggccaagggcaaggacgcggaggccgctgaggccacggccgagggggcgctcaaggcagagaagaaggagggcgggagcggcagggccaccacagccaagagctcgggcgccccccaggacagcgactccagtgctacctgcagtgcagacgaggtggatgaggccgagggcggcgacaagaaccggtgagtgggcgccaggcagccctaaccttggcttttgtctgcagacactgagcagcgactacctacttagacagccgcacccagtctggctctgcctgctttgggggagcccgaggtgtggttagggaggcagacttggagtagagtccaggaatgagagatgcaggccaggaaggggcggaggtgtggccgggaggacctccccaggaggtgacatccaagctgagacccggacagaggaggcagccctgggcagcgctagggagagagtgtgccaggcagcctgctcgcttcctagggccgccctcacaaggtagttcgagccaggtggcttttaacaaatacagtcctggaggccaggagcctgggggcaccatgcaggccgagacgcagcctccgagcctctgggcagatccatcccgcctcttccagctcctggccgctgctggcggtcgtgattgctggcatgccactccgtctttggctctgctgtcacatgaccttcgccctgtgcatctctgtgtccacactttcttcttctgaggacaccaggcattggatgggcagctgtcctaatctagtgcagcttcatcttaacttgattatatcagcaaacagtctatttccaaataaggtcacattcacagagaccctgggttaggacttgaatgtaccttctctggggggacacagttctaccctcagcgtggtgggaacagcaagtgcgaaggcccgaggtgggaatgagcttggtggattcaggtgccaaagggtggctcagggagggggcagcctggcaggacggggggcagctctcacgggggtgggggcactgagtcacgccctggcaggtgggggctgcattttgttctcagggcagtgagaaggcctttacgagcctctcccaagagagccagatgtgatttacccatgaaaccatgtgggggatttgctgggagtgagaggcacagtcaggaggcagctgcaagtgccctggggctggtgatggagatgcgagcgtggtggccgtggggttggggaaaagccacaggttcaacatgtttttggtggctcatctcccatcagccaagggtccagggctcaggatcacaggtgatcaccttggatcacaggtgcagaggttccccttgcaaattcctctccagctggggtggcctggaggaccccagtgtcgtcctgtttgggtgttgatgtctctgaggtgtgttctttcctttctggcctctgtctttgctcctggcctgggtgaccccacatccctgagaatgccaccttttacccattttcagcacagatgctttgggcctcaaggcctccagcccagaaccaaagatggctacccaagttagggccaatctcggttggcagagggcagacccgcggagactgcgtcctgctcacatctggatggctggaggaattgttttctggtggggcaggcaggccattttatttcaactacagtgtggtctgttttctcccctcccaagtcccttggaatggtcctgggcagagcaagcgagggaggaaaatcagacccgcagggtcatgcggggcccttgtctctgccctggggttcaccctgggccatgttaaagggggaagtcctaggacattccctaggaactgaggttcacccggatctctataggttccacaaaacaaaatctcagggtccccaggaaccactgccaacaggaaccgcgcccatgcgtgtgagaagtggacggcctgaccctgaccctgtgatgagcaaaggcctggcctgcgggtttctgagggcaccaaatccctgagcttcttgcccgacagtcccagcttggaaaacagtgttcatggtgtggctgggtctgccctggaggcaggcagccagggccattgtgcctggatagcggggtcagggcagacggctccccgccccgctcctgctggctgtggggacagagtcatagaaacacatgtttctgccttcgccgggggaccgctgaggtcatggggcagccccattgataagctgcctcccagagtctgtattttgggtccatgtggctggccccggactggggagccgggggatcagcttgcatcctgtccgtccccagaacactcaggctaggcctgaggccccgcagggcacttgcagcctcccgtcctctcccctgcagccccgcccagggccgtgtcctccctccccgagctgggcctggcgtacgtccaccccttgcccagtgtccagcacacagcccccgggtgcaggagtcctcggctgggagtcaggacacctggtttgtcccgccctgtgcgactaggcccagg

SEQ ID NO: 23729 - DNA, 1216 bp, Artificial sequence
  DNA replication origin
ggttagggctgcctggcgcccactcaccggttcttgtcgccgccctcggcctcatccacctcgtctgcactgcaggtagcactggagtcgctgtcctggggggcgcccgagctcttggctgtggtggccctgccgctcccgccctccttcttctctgccttgagcgccccctcggccgtggcctcagcggcctccgcgtccttgcccttggccggcccctcctcggcttcctccgtgcactcgctcttgacgggctcctcggccttccctgtgtccactgccagctcctcagccgcggggggcttctgctcctccccctcctccactgggggcgctgctgcggtctcctcctccttctcctccttggggaccacaggaggaggtgcagagggcgatgggggtgctggtgggggcgtaggggctccggtggcttcagaggccggggtgggctcagtgggggccgggatgtcctccggtggtggggtgggtggccctgggggtggcccgtcggcgcccagggtggctgggggcttgggcccattctgccctgtgtccttggcggcctcagtgtgaggagaggggatgctctcggtgtctgagctgttgttgacagtggctgtgcagggcgagaaggaagaggggatgagcagggtctggcggggcctccagaagagatgcatggccctgaccctccggatgaggccgctctgtcgcctgatgccaaaacagccccgaggctcctacacacctgggctgctgcctagagccccacccctgagacaaagcccctgaccaggcccctacccacagctgctgccctcgcctggccgcctttctcccagactgaccctgctggcataacctggttaattcccaaccccaggacctcctggtggtcagcacccccgacagatggagccagcctgagggtggccgtgggcaaaggccttcgtcctgggggtctccatgttctcatctgagctctaaccccggctctgccccgcactggctgcgtgccacgggaaactcaggttacctcttgggcctcagttttcccatctgcagaacgggagaacaatagttcccatctcacagggcggagaagctggcaattgtgagggcaagggcaactgcctggtgactgcctgctgctgcaccaccatcgccaccatcatcgtcacatgacagtgtagaatgcgctcagtgtgagtacagg

SEQ ID NO: 23730 - DNA, 1896 bp, Artificial sequence
  DNA replication origin
agtgaatgaagccatgctgttctccgcatttgacagatggggagactgaggcatagcggggttatccaaggcgcatttggtgaccggggttcaaacccaggcagcccggtactggggacctccaggcagaaaggaaaggaggccatctggtggtgtgtttctattttttatttttggtggttttttggtcactcttgttaagcacctactgtgtgtcagatgctgcacaaagcacttcacctggattctagggcagcggtggcagagtgttccctgggatttgttagaagtgctgattcttgggccccagtccacacgtactgaatcagaaacctcggggcatagtgcagccacctgcactgtcacaagcccttggagtgcttctcatgcaggctcctgccccagacccccttgataactgtgagaccgagaagttaactgcccattttgtagatgaacaaactgagacccagaagtttcatccctggtcctggggccctcagcgttggcctcccaacgtcctgtactctgactgtggaaggaagggaatgacattgctgaagtcaccaggcagaggaaggccaggggttaaggacacaggaagctgggctcagtgctctcccctccacagcgtggccttgggcaagctgattaacctgtctgcctccatttcctcatctgcacatgagagttggtggtcccagtcttagaggtcttaaaggagtcgtgtgtgaagaactcggcacggagcctggcctgtatgcagccagcgttgctgctgttgctattgtttctaaaaagggtggcctctgctctggggcctgaagggaggtgagaagcaggagagactggagggttggtgggggggcaatgaaggctgaagaggccccagcagccccaaaagcctctccctgcaaccttgcccatccctgaggtcaacacctcccactccaggcatcctgggagcctggttccaccaggaggctgatgacttagggcaaggacacccagagtggctgaagctcacttttcaccctgaacaaccccattattggctggccttgaacaggccattggaccagcctgctcagggctattgcaggtcacctgtggccgctggccagagcccagagggagagggctcatcggtccatggagaagggcagtcggggcaggagagcgagcagcagcgaggcctcactgctgtgcactgggcttcaggcccctcttggccacgttgcctcctccctcccctcccactacttggtgctgcctcacttctaactcttctctgacttccttccagccttacatgcctctgggaatgaggtgcccagaggggaatgcagtggcccaggtacgaatgtggccggctggcctggggggtagggccgggccggggcgggcatcccaaggtccccggtcctccacaaggaaccccgcttctgagcacatgcctctttctgtgagcgccaccgtttgtgctccgcggcctctgggcttccttcccagcacagtggctgttccccatgctggtcccgggctcactccagcagaccagtttcccgtctccactgctttgctgattttcactggtacgcttgggtctccgaccgggtttgatttccctgatagcaaatgcaggggttttcaagtatccccattttacagaaaatgggagacattgagactcaaagaagagccgggtgtgggtttgggggctagagagccaggaatgcggctgggctctccttgccatccttgggtgcgtgctttcatcctgccactccgccagcacagatcgcgctcctgctgtgtaaaacccatgctgaggccgttggtgtgggctgtgcccggggcccctgcacacgcactggcctcgttgtccaccgtgcc

SEQ ID NO: 23731 - DNA, 1295 bp, Artificial sequence
  DNA replication origin
ttttcccatccccaggagggggaaatctcggttcagagggtcccgccaactcacccaagcttagaggaccagccaaggggggcaacgcgggcgtggggccccagacttcctgccctccgggtcctctggcccccgtggcgtgggggtggcactgactgacaggccacctgttcgcctgccgtggccctgggagccacgtggcctcacagcccgctcctcagggttcctcaaggacaggcgcagaaggggagggccggggcgtgggatcaagtggcacccggcccctgacctttccctccgcccgcgccagcagcagctgccacttccagaacctggcggacagggccgcgcgtttatttatatttccccagccggggccaagagagcccaggcaaacacaccgggccagagggatcacagacccggcacccgggtgggagagggcgagagggggcgggtctcccatctgggcctgctgggtggggtgggcatggagagctcagggggtggggtgagggtggcccaacaacactggggaggttgacatttccaaactcagtcaataaataaggaggtagctaggagcctggctgggggctggggaccctaattaactccgatcatgggggcagtgggagtgggttgagggcagaggagaggggatggaggtgggggtgggggtcacccagcccttcctgaaaacatacggctcccaaaggagctgggcagagtcatccaggcgcctggccagagctcgctagcagtcttggccagcccttctgctctccggcctcagtttccttaactgccgtgtgaggagccagagtgggtgtcccattagtgccggccagggctgcggggtaggggcaggctggcactggcttcctctggttcctgttctgggaagcccaggcagaggctgccaggcacggagagaaagactttctaccctaccgtgccttggagaccaccccgccagacccagcttgaagcccccgtccacttggagagaccccctgtgcacacagcatcacagaccttcccaggcacagatccaggtcccacccctgcttccaggagagcttcagcccagcagggagagagaggagagggcatgggggaaaggatgggctgggacccccatccactccaggggcccagaactccgactccccagctgcccagcctcaaatcccagatggccacgttgcggtccctgtccctgcacccgcagtcccccatcccctccccaggaccactcactcacatcctctcattcgcgtctccccctcggc

SEQ ID NO: 23732 - DNA, 1520 bp, Artificial sequence
  DNA replication origin
agcgagggagggagggacgcggcgggcggaggctggctcgagaggggcgggcgggaggcagctcctcacaagtccgcctgcctgtggtggcccggggctcctccagcggccgctgccacctctgacgccgtccccaagccgctgtgggcgcgcgaggtgcccttccccgagggtggtgggtggcgggaagttgtcagtggtgcgtgtgggatgcccctgggccaggtatcaccggggcgcagcgtgccgagctcctccagcaccaatgtgcccagtgcggacgctcagcgagcaatgccggccagagcccacagacccccgggccgggcaaaatccaaggacccaggcccagcagggcagccgtgtcccccgcagccgggctcagctctgatcttcttgctgcctgacccagcgagacgcggcaggactgaatgtgacctccagacggaggctcgcggcgggcgggcaggcgggcgggggagcgtggcagaggcccaggttcacaaggggcgggccaacttggcactggctccccctccctctctccccatccgcggcggtggcggcgtcagcagtggtaagaacagatgagggttccagaaaaacagagcttctccacccccggcagacagggagcaaacagcttcttccgccatcatcccccgccgcccgtccccccaccctccgtgtcagttccacctgagctctgccccctgcctggcctgatgctgccgaggctgaccgagccctctgtcggggactgtgggtgggcagggctagcctcgcattccggagggatcccgggatttgaggagcctttgcagggtgcacatgagaccgccaaccatttaggggagggggaagggtttggggatttggggtccccaaagagccctctgctgctgggggggtctcgggaccacagctgcccctttcgtcctcctccgagagcccctgcagccgtgaaggaacactgtgggaaatgccggggagccacccagaaggttgaaagttaactgagctgaactttggatcctagattcaggtcacgaccgacttccctgactctgggatcattaacctgcttttccctttaactcccagcccttccatcctgccccctaaaaatctggggagcagaaggcgtctctggaatgtccctgcacccccagccctcgtcctggggcacgatgccaggggagggcaacaaacctcaaccacatcagggatctgggcctctccacctgagtcctgccctctgccctctgcaggggaggtctcagtgcacttttaaggatgccaaccccgtgaaatcactcctctgcttaaaatcttccagtgaccacatgaagctcttggaataaaatccaaaggccctagcacggcccaggtgacccttaggagccagctccatgaacccgcccagcctctctctgggtcactcgtgtgtgccccagggcctttgcaccagctgctcctgctgcctccacgggttttctcacagatgtgccttgtcttcc

SEQ ID NO: 23733 - DNA, 998 bp, Artificial sequence
  DNA replication origin
tctggcaggcctgggaaagtcggcaccaccggaaggctgtgggcccatcctggcccagccccaagcaggcagcaggtttgaaacaagatacaagccctcggcctgggagctgaaacacagcctggggtgatctggcccgccctgccaccggtccccaccatcaagtgacttcagcacctagggcaggcagctagccctgaataccaacacccaccgcacagcggctgcccctccccagggaccaagcctggctgctcctgccctggaacagccttcccggtcatactgttccctgtgcaaactgtccgagtgccacagcaaggggaacaaggtcaccagtccctccgcaaagagctgggagaggacagacggaggaggcaggggacagggggctgtagtgggagggaggagagagaaagggagaaaggtgggggaggagcagagacctggaggaggaagggtgagaggagagacccagggacagggtgaggaggggagggggcgggggaggaggaagaggagagatgggggagagagagaaggggagagagagagagagagctagagacagagttaaaagacttagatgggggaaagagagagagacgggaaagcacatgcagagaaacagacgagacgtggacacagagataaagacacagagaaatagaaagagggaggaagacatgggaagagaaacagacgtagccacccgtgtgcgcgcatacacacacagagagagagagagagagagaaacctagaaaaatgcaggagattcagagccaggggcttgggcagagcagacccagagggacagagatggggaacagtggagagtggacggcagcagtcgggggcggagcctcggcctccctgggcttccttcttggacccaggccggatgactggagcccaggacgggctgttcccgtctcagtgtcccatctctgcagaaagagaggcccccttggccacatgaacccccatcgctgcggga

SEQ ID NO: 23734 - DNA, 2071 bp, Artificial sequence
  DNA replication origin
atgtggaagccaggcagctatgctctgggctgattggggatctcttctcaaaggacatgcagcaggcagcactgtggttagatgtggagagggacttccttgtcttggagggaaggcagagccccctctctgggagctgctggggtcctcacagctggtccttggggtgaggctggggaatgaggaactgcttggaatgtggttttctctggcggctgcccctccccagggctgacgggcccgcatgttgtacagcacagcttcctgtggtgtggcagtgggctccatccgggctgtctggtgcggccggagccccagccgcatgtggctgctggacactggaagcatggctggggagaactagagcccgactcttaaattttactggatttgtgatttcagttgagccacacatggtgggtggcttccatttgggaccaggcctctgcagaggaggccaggtctgggtggccggttcaccaggaagggaggtgaccgtgtcctcaggggaagtctgtgggttttcttcaggggcccccgtctgctggatagccatgcaactatgtgcctgtctttctgtcgtctgcctgtgtgatgtgtgtgtgtctgttgtgtgtctacatgtgtgactctgtgtatgtgtgtccatcatgtctgcctgcgagaccctgtgtgtgcatctgtttgtctgcctgcgactgtgtgtgtgtctgtcatatgtctgcctggatgaccgtgtgtgtgtgtctgcctgcctgtgtgaccgcctgtgtgtctgcctgcctgcctgtgtgatggactgtgtgtgtgtctgtcatatgtctgcctgcatgaccatgtgtgtgtgtctgcctgcctgtgtgactgactgtgtgtctgtctgcctgtgtgaccatctgtgtgtctggctggctggctgtgtgacttatgtgcctgtgtatatatgtgtgtgtgtgtgtctctctgtgtatctgcctatatgactgtctgtctgcctgtgtgactgtgtgtctgtctgtctgtctgcctgtgtatctgtctgtgtgtctgccatgtgactgtgtgactgtgtgtctactgtgtgtgtaccgtgtgggtgactgcatgtgtgtatgtgactgtgtgtgtctgtgactgtatgtgtgtgtatctgtgtgtctgcctgtgtgacttgtgtgtgcctgtatgtatgtgtgcctgtgtatatctgtctgactgtatgtatgtgtgcctgtgcatatatctgtgtgtgtgtgtctctctgtgtatcttgtgtgtgcctgtatgtatgtgtgcctgtgtatatctgtctgactgtatgtatgtgtgcctgtgtatatatctgtgtgtgtgtgtctctctgtgtatctgcctatatgactgtctgtctgcctgtgtgactgtgtgtctgtctgtctgtctgcctgtgtatctgtctgtgtgtctgccatgtgactgtctgtgtgactgtgtgtctactgtgtgtgtaccgtgtgggtgactgcatgtgtgtatgtgactgtgtgtgtctgtgactgtatgtgtgtgtctgtgtgtctgcctgtgtgacttgtgtgtgcctgtatgtacgtgtgcctgtgtatatctgtctgactgtatgtgtgtgtgcctgtgtgtgcatgtctgtgtgactttgtgtatctgtgtgtgtctgtgactgcatgtgtgtctgcctgtgtgacttgtgtgtgcctgtgtatatctgtctgactgtatgtgtgtgcctgtatgtgcatgtctgtgactgtgtctgagtatatgtgtgtttgtgtgactgcatttgtgtgtgcctgtgtgacttgtatgtgcctgtgtgcttgtgtgcctgtgtgtatctgactgtatgtgtgtgcctgtatgtatgtgtctgtgtggctgtatctgactgtatatgtgtgtgcctgtgtgactttgtgtgtgtgcgcacgcacctgtgtgtctgcctgcatgtgagtgggcaggggggaggcggcgggtgccaggtgcaggagcatcttccgcagtgccccctgcgctctcccaggagcagaagttctgccagcgctatgac

SEQ ID NO: 23735 - DNA, 1847 bp, Artificial sequence
  DNA replication origin
gagagtgagccccaaatttgccccgttattggttctcagggagatgagacccacccgtgctgtatccccagagagacctgtgagctgccaacgtgcatccttactcccccgcgcgcgaggcagcccccgccaacgtttaggttgagcccagtgtgcaggcaagagggttcccagagccgaggggcctgtggcttcccgcccccgcccacatgcaccccggcagccacatctgcccacggaaagatggccacggagaaacagccacagcctccaactaggaatacaggccacagagcccgagaccccgagacctgctgccgcccacaggccgggtgtcagagtgtggcctgtgtggccccaggattggctccaaccaggtgctgtgcatggacctccagcacacccagtcctgctgcggggggagggacacaagcagtgtggggcagctggtggggccaccaggcatggacttcaggaaacccccgggcgggggcggtctcagacttcagggcagggcccatggggtctcaaccaagcaggttacacacaccactgcaggctccaagagaaggaggcacgtcctgggagacgggagtttcagagagagagagggagacagagacccagaaagagagggagacagagacccagagagacagggaaacagagaaccagagagagagagagagacagagacccagagagacagagagagagagagagagagagagagagagacggagacccagagagagggagacagagacccagagacagagggagacagagacccagagacagaggaagacagagacccagagagagggagacagagacccagagagagagagacggagacccagagacagagggagagagagacccagagacagagggagacagagacccagagagagagagatggagaccctgagacagagggagacagagacccagagagagagagatggagaccctgagacagagggagacagagacccagagagagaaacagagacccagagacagagggagagacagagacccagagacagagacccagagacagagggagacagaaacccagagagagggaaacagagacccagagagagagagacggagacccagagacagagggagacagagacccagagacagagggagacagagacccagagagagagagatggagaccctgagacagagggagagagagacccagagagagagagacagagacccagagacagagggagagacagagacccagagagagagggagacagagacccggagacagagggagacagagacccagagacagagggagacagagacccagagagagagagagagagacagagacccagagagggaaacagggacccagagagagggagacagagacccagagaaagagggaaacagagacccagagagagagagacggagacagagacccagagagggaaacagggacccagagagagggagacagacagggagacagaggtgagaaagagacagagactgggagaaggggagacacagagacggagatagatagacagatgagatccaagaaaggacagagacctggagatggacaggagatgagactgagaggtgagactggagtgagagagatgagaaagagaggatcagagagagagagagaggcagtcacagagagacaagatccaaaggaaggggacagagactcagaggaagatgaaactaggagagggaaagagagagaagtggggagagggaaagagacaagacccgaagaaaggggacagggaccctgagacaggcaaagggagggagccctggagagtaga

SEQ ID NO: 23736 - DNA, 894 bp, Artificial sequence
  DNA replication origin
tttttaagtgtttattttgttccaagcagtgtttaggcaatgaagatgcaaatagcttactgcagacaaatcttttctgctgagcttctgtccggcaagcataaggaccacagtctgtaggagggctctggaggcatggggtaagcagcatgtgatgagtttgctggtagaggcactcatggggtgcaaagaagtcagggtttaaaaacacacaccctataaggaaacctagtcttgccatctgccagggcactggagaggagaagcaggacataggagggcaggataaggaggcaggaattatgagagtattccaggggagtccggttggaccctagctgggactggtcctggggtttatggggtactggaaaaggaaagcttgggggcaatcaggggaggcttcctggaggaagggaggtttgagctgaggcctgagagaagcagaggaatgcggtgggaagaagaaaatgagcagagccctgggttctagggagggaggcagcaatagtgaatctggagagggcagaaggggtgctcagggagagcctgaccccggctgcaggggagaggaagagggaggcagatatgcagggcccggataccttgggaagagactgcgggttggggtgatggtctgaacctcctgatcactgagcgccaaccaaaagctgtgacagtgccaaacaatgtgatgtgacttgtctaaggtcacccaggtagggaggggcagggcctggagtagagacccaggagaggaagttggctggatgtgcagttaggactggtctaggaatttgtctgtgtgaccctgggggagtcatctgatgtctctgaacaagaccagagagacctgctaagagtaacctgggttctgactgatccccctttccg

SEQ ID NO: 23737 - DNA, 909 bp, Artificial sequence
  DNA replication origin
gccagggccaggtgctcccggaggggacaggagacagtcctaggtggcacctggggtgggggtggggagcagagagagtgtccccctgaggttttgggagacaggctgggtttgggagggtgggcgagggagctgctggtgcacaggtgggtctggagagacggaggtcagaggtcccaggctgtacatctgcatcctgttcgagcaggagggagctgttgcgggcagaaggcagccggctcagggagatggggagtggccccagagcaggcgggggcctggtgttttgggctctggcataagcatgtttgggaatcacctggtgtctgcacagagaggtccctctggcacagcccactatggggcagatcagagcactcatccaggccctgaggctttggaggtggccaatgtgatgtattctaatgatgggggccttttcccagaccggtgctaggagggaagaaaatgtcaattaagtgccactgccattgggtgaggcggtgctggaggctggtagcattgtatcttcaagcggggtacaaggcattggaggtgtggcagctggaagggggctggctttttcttgggatgcattaacgggagcatagactgttgggccgaggagggcatgttatctcatgttagtgcccaggaacccaaaaggtaaaaggggctgcagatcttgccccttgaggaacatatggccacgtggtgggctggtaggttggaggtgagactcttcaggatcatagctgttgaatgttcaaggttcgtcatggtgagagggtacaggcgtttgagtgtggctgcaaagggaggcgtttagctgattcggtgggtagttcagcccggtccgattgttcaagcgttcctgggatggaactacagagtgtatatgcggtggtg

SEQ ID NO: 23738 - DNA, 1188 bp, Artificial sequence
  DNA replication origin
ccgctgctccgggaagcctctatttataatctgtgtttttttgttttttaaaaaaattcctcctcttcgccatcaccctgcagaagaaggctgaagctgcacatcggattctggaaggcctggggccccaggtggagctggtgagctggggtacagggtcaggggctcaggggagggcgggggtggctggagaggtgggcagggaggcgggagggtgcggcggaggaggaagtcatctattaccaagcgctgcccaggcggcgtccgcggaggaagcaggaaacccaccttcctgatgagaggacggcagatagcgggtgggcgggcctggctgggctgggtgggggtggggagtcttggcagcgagcgcctccggggccacctgcgcactcctgtgcataccgtgaagcccggccgctcgggctgtgaggagagtcacacatccgtaggccggtgcgcttgctccagctgagcgcggagagccggttctctgggtcacacaatctcggtccactcccaggtgcaccgcttcatggcggtgtgaccctgagcgggtctgttaccctccctgtgcttcagtttcctcatctgtaaaatgggaatcctaacagcacctattccactggattacagtgaggaggagctgtgttaatatttttccaacatcgggtgccgcgcctgccttgtaaacagtaagtgctgggcattagctatgatgatgatgatgatgatgatggcgatgatggcgatgatggctgtcactagtgtccttttgctgcggaaagatgccatgtcagcagcagagctggaaagcaggccccaggcctcctggagtccctgggctgaggatgggtggatgcagaagccctagcccccagagaatgggccgcagcccctgcctgccccacagccatctgtgcccactgagctggtcagcatggatggccgtggtgggcactgaaggtatatgctacccacatgtgtgccggatgagggagagtctctgtgtgcatggtgggctagggtgtgcgtgtgagtgcgcccagggtgcagataaaggcttatgccttcgccatgtgtagtggctcatacctgtaatcccagtgctatgggaggccaaggcaggaggattgcatgaagccaggaatttgagatcagcctgggcaagatagcaagaccttgtctctg

SEQ ID NO: 23739 - DNA, 1289 bp, Artificial sequence
  DNA replication origin
agggcccagcgacgtgggcaccgctccccaccagcccagccgacactgccagccctgagatgccttccctcaccctggaagctggttgggttgtctacaattacctcagagctagtgcagccagcgagggaaggaggaggaggaggaggagggagggtgagatagaggcgctcggagataccctttctaggattcttgtgtttcacaatcatgtgattatttctgggctgccccggggcctccccgcctcctccccactcacaactggggacttattaggaaaacaggaacatgtggcgcagggctcggtggccgctccatcaataggctggacctccgggcccccaccccggccctcggtgtgaaggcagacattgtgcctcggccaggcccaccagcccgcagcctgggaccaccagggtccactcacaggaggcctggagggcagcccaggccagccgggtacagggaggtggggggcggaggggctcctgaaggtggcttcatgggggctgtggcggagggcaggggcagaatttgcgtgggtttgggtgccccctgcaccaggctaaactgcgtgtgtgctggcaaatgggtgttcacaggctggcacgcgggcgagcccctgctgtgactcagctgcattggggcagccactcagtatttggcaaggactaggcggacaggccgcagaagtcaccatcaccatactgaaactgtccccagtgaccccaaaccagattggccaaaaggaggtgaccccaagccctgggaaatgtggctgccaacaaaaatttgacgcagcctttgccaagatctcctcgcagggcggaggtgcccaggctcccgggctgcagcagagagaggagggcgtggcaggccagcatcactccccctccccagcccccggagaaagacagcaggtatgtaggtgggctcaagctggaacctagagctgcctccgcctacagcccagagcccggcccaccaagagcagagccatgctcttggccaccttcaggctgagccaaaaccccgagacctgcagcctcaaggtgcggctgggggccagaagagcaggggagaactattacagcgatggtcacttctccaagcacctgccatgagccaagcgtcgggcatacggtgtgttcttaacatgtcaattgcgcataagcgccatgggaggtacaggcaggagtagccccatctcacagatggtgaaactgaggcacagaaacaaaacacagggaagaagcccttcttatgacctccaggatccacggaca

SEQ ID NO: 23740 - DNA, 2872 bp, Artificial sequence
  DNA replication origin
gtgtcccaggtagtattttctctagtacctgaggaagggccaccttccctggctggagggagcctccctcctgcccaccctttcggggctgtgggcttcttccccttcttggctttgtttgttccgtgctttgggggagcattttgatgcccttcttgaagcgaccaccaggggtcgctgtgggactgaggcagttctgctcaaaccgccagcgatggagtctgtaaaagccagcatcctggattttctggcttttcctgtgttcacttcttcttgggcacctttctgggttcatactgatctgctctgtggtaatgtgcaggctgtgcgagcgtcataagtggagcagaaccatgttctgatctcacttgtgatgccctgtcacattgcagaatggggcattggccttccatctgaccttgggccagtgccctaaaccctctggtcttcagcctccctcttgctatgaagcagacggcagcatgatgggatgctctttccaactgtgttaggaggagggggttcatacatggacagatgaggatgaggatgatgggggtgatgaggatgagggtgatgggggtgatgaggatgagggtgatgggggtgatgaggatgatgggggtgatgaggatgaggatgatggggtgatgaggatgaggatgatgggggtgatgagtatgaggatgatggggtgatgaggatgaggatgatggggtgatgaggatgaggatgatgggggtgatgaggatgaggatgatgagggtgatgaggatgatgagggtgatgggcgtgatgaggatgagggtgatgaggatgatgggggtgatgaggatgaggatgagggggtgatgaggatgaggggggtgatgaggatgaggggggtgataaggatgagggtgatgaggatgagggtgaagagggtgatgaggatgagggtgaagagggtgatgaggatgagggtgatgggggtgatgaggatgaggatgatgggggtgatgaggatgagggtgatggggtgatgaggatgaggatgatgggggtgatgaggatgagggtgatggggtgatgaggatgaggatgatgggggtgatgaggatgaggatgatgggggtgatgaggatgaggatgatggggtgatgaggatgaggatgatgagggtgatgaggatgaggatgatgggggtgatgaggatgaggatgatgggggtgaggaggatgaggatgatgagggtgatgaggatgatgagggtgatgggcgtgatgaggatgagggtgatgaggatgatgggggtgatgaggatgaggatgaggggggtgatgaggatgaggggggtgatgaggatgaggggggtgataaggatgagggtgatgaggatgagggtgaagagggtgatgaggatgagggtgatggtgatgaggatgaggatgaaggggtgatgaggatgagggtgatgggggtgataaggatgaggatgatgggggtgaggaggatgaggatgatgagggtgatgaggatgatgagggtgatgggcgtgatgaggatgagggtgatgaggatgatggggtgatgaggatgaggatgagggggtgatgaggatgaggggggtgatgaggatgaggggggtgataaggatgagggtgatgaggatgagggtgaagagggtgatgaggatgagggtgatgggggtgatgaggatgaggatgaaggggtgatgaggatgagggtgatgggggtgataaggatgaggatgatgggggtgatgaggataaggatgatgagggtgatgggggtgatgaagatgagggtgatggggtgatgaggatgagggtgatgaggatgatgagggtgataaggatgatggaggtcatgaggatgataagggtgatggggtgatgaagataaggatgatggggtgaagatgatgaagatgaggggggtaatgaggatgaagatgaggggagggatgaggatgacagtgatgaggatgaggacgatgggggtgatgaggatgagggtgatgggggtgatgaggatgaggatgatgggggtgatgaggatgagggtgatgggggtgatgaggatgaggatgatggggtgatgaggatgaggatgatggggtgatgaggatgaggatgatgggggtgatgaggatgaggatgatgggggtgatgaggatgagggtgatgggggtgatgagaatgaggatgatggggtgatgaggatgaggatgatgggggtgatgaggatgagggtgatgaggatgagggtgatggggtgatgaggatgaggataatgggggtgatggggatgaagatgaggggggtgatgaggatgacagtgatgaggatgaggacgagcagggtgatgaggatgcaggtgatggggtgatgaggaagaggatgatgggggtgatgaggatgagggtgatggtggtcatgaggatgacgaggatgatgagggtgatgaggatgaagatgatgggggtgatgaggatgaggatcatgggggtagtgaggatgaggatgatgggggtagtgaggatgaggatgatgggggtgatgaggatgaggatgatgggggtgatgaggatgaggatgatggggttgatgaggagcacctgtgtgtcaggtgctgcgtgctttgcacgcatcatgagctcatttcaccttcacaacggctctctagagtagtaactcttttatccccattttccagaagaggaaggtaaggcttagagaggtccaggagcttctcaaggctacgcagtaagtaggagtgggagttgggctccagtctcaccagtgcagctgtggagtctgcacagcctctcctagcactgatgctgcctgtaggaaccgtaatgggtaat

SEQ ID NO: 23741 - DNA, 1068 bp, Artificial sequence
  DNA replication origin
aaaagtttattatgcaaaactgaagacagagaggcagaaaagcccctgggctcccctgtgccagctccaggaaaaagcagggcccagcttcacgcactcccaatacaccccctactccggccacaatgacaggttctaggacaggcatgggcccactcatggtgaggaggaaaagcagtttggggctagaaatgcggagaggaggaggaagagttctctctttttgctggccttgaacctggaggaaggcctggagtcaccggcttccttcctgctaacacaccaagaccctgtgaaagatggcagagccaagggatgaaaagggacagggtcctgaggacatcgtgtcacctagatcaagctgttacctgaagctaaccaatgctggacttcagttatgtgagccagaattcatgtttatatttgataggggctgtctgtcccccttagggattttcagagatagtgctatttgtgacaattctaaagtccccaaaacaaagttcggtgaattcccaaggaagtctctgatgccacaaaactccggaggctgaagagcagagaagcatcagaaaacaggaacacggtggggcagagggggcacacacagaaaaatcccatcaaattcctgcctcaggcgcccagctgaattccacacagcagatgcagaaaacctctcaactcgctctcccaggcatcttcccttgctcagactttccaaatctcttcacggcctggagcaattactgcggccaggctggtcaggccccagcaccaagctcatcacacctccaccttgtggtccaagcagagaggagagagagacagacacagagacgaagacagacagacagatcgagaaacagaaatggacatagatgaagacagaaacagagacagaaagacagagacgtggtgacagacacacacaaacagaaagagatagagatagagggacacaaagagaaagagatggagaggcagagacacagacagagacagacacagagactaagagagatcccagagggcgcaccacaggcagaggcattcctgacaagaagaggg

SEQ ID NO: 23742 - DNA, 1030 bp, Artificial sequence
  DNA replication origin
gcagtcagacacagctgggtggctgagtgaccctgggggactgaagcctctggggacactgcctgcgattcccccaccagccctgccatcggcatcctctgtggaagctggagagagaacaagcctccagcctggtatgtcctgagctttactgaaaccacagcaaactcccacagcagcaaaccacaggtgcttaatctgtgcacatcctcaccaccgccaccgtctaggttccactttctgtttcaaagaggagtgaaatcaaagggctgtggagggcactggaggcgtggcaggccccaggctggacacacacgtgggaggtgtcgttctccagccaagaaatggccacgggccaagcacccccaggcgcccttgtccggctgtgagttgtgagttcctgcaagggctgactgggctcacaggaccctggactccaggcgagtgggggaaggagggggagcggatgggggtagggggtgggggagcaagggaatgggggaggtgagtggatgggggaggggcaaggccactggtgggagatgatggcaggcagaacccatgggtgaggggcggctgggaggtgagggggaggggcaggtaatgaaggcaaggacagatggccgcaggcagatgggctgggtggcgctgggtggtggctgggagtggctctgtggtagggaggttgccccaggggatgagcagggagagatggcaggagctgaggaagcagggggtgaaggggagtgagcaggacaggggggctgtttgggtggaaagaaagagagggaggaagaaggagggaggaaggtgtagaaggagagaaggaaggggaggaagggcaggaaggatgtgctggaagggttgggcgtcggggcagggatgctggctggggtacccgagggggcagtgcccgagaggaactggcatcgacaccagtcccaagcccagacccaagtgcaggcggcccaagccccaggccacagagacccccttcaaggccggcagggcccctgtggctgaatctcac

SEQ ID NO: 23743 - DNA, 1197 bp, Artificial sequence
  DNA replication origin
tagggaggttgccccaggggatgagcagggagagatggcaggagctgaggaagcagggggtgaaggggagtgagcaggacaggggggctgtttgggtggaaagaaagagagggaggaagaaggagggaggaaggtgtagaaggagagaaggaaggggaggaagggcaggaaggatgtgctggaagggttgggcgtcggggcagggatgctggctggggtacccgagggggcagtgcccgagaggaactggcatcgacaccagtcccaagcccagacccaagtgcaggcggcccaagccccaggccacagagacccccttcaaggccggcagggcccctgtggctgaatctcacaccccaggaggacgtggtggggctgcagcctcagccatgagtggcctcgagagtccccacagggctagccacaggtctcccctgccatgcaggccctggagggcagccagggctggaaggagcgaggaaagaggaatgtgcctgggggagggcgctcctgcggagggcacagccggtgcaaaggtccccaggtgggaatgtgcctggcgtgtttgaggaactccagggtggcctgggaggctgtacgtgagcggttgagagggctgctgcagggagatgaggtcagggaggtgacggggctggatcacgccggacctgcagcccatggcaaggattttggctttttcctgcttgagacaggagccatggatggtttggagcacaggggggaacacacagggggatgcagtcgtctgcctttataagagccctctggctgctgcttggaagataaactgaagggagtagagggaggcaggagcagggagacccaggaggaggctactgcaaagttactggagagcaatgacgagctcaggccgggggttgcctcaggtgtgggcagaaggctggaattgagatattttagggcagaggtgtcaggatttgctgatggactggaagtacgcaggagagcagggaggtggccagggtggagtccctgagtgccaacaagaacacagctgcatccgccgggggaggttcctgagtgggctctcaggcgcatgtggtctgttggctaggagttcattaactgacctccactttcctgtgacaacttggtgaggcggggactgccccagtggcagggaggccaagccagccaacgaccacacagacaccc

SEQ ID NO: 23744 - DNA, 814 bp, Artificial sequence
  DNA replication origin
tagcacactccctccctgtaaatgtcctcggtgaatgtggacctgaaggaaggcagcgctgcattggagtcctgccctgctgtgggaccgtgggaggtgggctcctgtgagcaccttcctggcaggatcatacagagcacggcgcgcagtagatgctcggcgcagagggtggtcggggcctcgggagttctcagagccgcaatctcctatgtgacgttggatgcctcacctcctgcaggtcccaggagctccacctgcggccagagtcccactcatacctgcccgagctggggaagtcagagatggagttcattgaaagcaagcgccctcggctagagctgctgcctgaccccctgctgcgaccgtcacccctgctggccacgggccagcctgcgggatctgaagacctcaccaaggtaagcctgggcccccagctgggagctcctctcccgcttgaggttctgctgctggttgggctgggtgggaggtggtgggtaggggtgcagggagggggcagctcgggcaaaggcttggaggtgggccaagcaccgggtgcacagagctgggtggcaggaagagggcaggcgctgggtctctggaggtgccagagtgtgggaagaagtggggaaggtgttccaggtgggcagagcagcaagtgcaaaggccctggggcaggaataggcttgtggtcacggggtagctggcgtgagggaggggagagctgggatgggagggcctggggtgccgtggagcagagagctgccattcgatgggggtcaggaccgtcctgtggtcggtgggcagctttcagcac

SEQ ID NO: 23745 - DNA, 872 bp, Artificial sequence
  DNA replication origin
gaagcagaggcccgtggcagagcaggagcacacagggtcctgtgaaatgaggggatgtcgggccgtgtgttcacccttgacctggcgtgggcgtgactcggggtgaggatgggacgagcagggaagagccacgtggccctcagacttccagcgtggaacttcagtggcctctgtgggtttaggcagcagtggggacctccaagctgggctgcagcagggctgggcttctgtgggaagatttgagtccacacctggtgcccctggggcccctgccctctcctcccattcttccttcttctccagctggcagaggacaccctctggtgtgtgcctgtgctgggccagccttactttccttgatccaggtgggaagggaatgaacaggttaggtggtagggtgagagggaggtggggagtgggagggaggtggggtggggagctggagggactacagcaaggggagggccagggctgggtcagagccagctctccatgcattcacttgggatcggtaggccacgttctttctcccatcttctctaggagcttctgctggagacggctgaggtgtggggaattgtgcctatttctcagatggggcagctgaggctgcgaggttgagggatgggctcttgtttactcagccaggactagaagtcgaggcaccaggccccagcccttcatggtaccacggaggtgtcccagggccccagatcaggcggggctggtgaactcaggtgggcgcaggcgtctggaggaggggaggccgaggcagcgtgccttctgtacctggattggtttcctgggcctgccgtcgcaacgtgccacaaactgggcggcttcaagccacagaagtgcattcccgtgatctg

SEQ ID NO: 23746 - DNA, 1126 bp, Artificial sequence
  DNA replication origin
aggatctggtcctggccaaaggaggttctgaggatggatccgggctggagggggaattcagacacaaacgccccatgtcgccgctgcgtctggctgcggtggggtcagaaagggtgggcggcattcatttatttacatacacactgtggtccctgctgagccccgggctagtgctggggacttcttgtgaacccagcggggtccaggccctggagggtctcaggccaggggctctgcccagccctggggagagccaggagatacgaggaagaagaacttccagagggtgaaggcgaggggatggagagtgctccagctggaggcgccgctgagcaagagcagggaggtgagcgccagctggtggggggtgagcgcaggcttgggggtgagcccccgccaggcggtgagcacaggcccaggggtgagcgagggcctgggggtgagcacaggtgccgtttatgtttgagaaattcattgagtgaatatggggggaagtggggacagagtcattcagggccccatgggcccgggtaaggatggattttgttctcagggcagtggggagccacagaaggtggttgcgggggagagtaaagggtcagtgttttacgagcaggcactggggacagcaagagtggatcagggagacctggggaggctcctgcaaatgtccaagagaggggacactgggggatcagggcaacagcgacagagaaggggaaatgggcaggtggatgaaagtcaggagggaggctgactctgcaggccgaggaaacagctcgctgcaggagtcccgctgcacaggcccgctgcgaggaccctgtgcctgtggcataccgagaggtgcctggggaacagcaggtgctcagccatgcagagtcaggagggtcaggcctccgaggagaacaagacggtgcctgggtgaggtcaagggacttgtagatctcaggtggccgggatacccaacggggacaccaagggcccaagcaggcctctgcacatccaagccaccaaccacagccccagggcccctgctggcccctgaaccagctggaggagggctgcagatcccacgcaggcaggtggaggggctccccatgcacggctgcaggggtctgtccctggg

SEQ ID NO: 23747 - DNA, 1211 bp, Artificial sequence
  DNA replication origin
cctctctgtcccccgtccatcggcgtctccgtctccggcctaatggggagccttcctcctgtggctgagttatctgcttgtcatgccagtggcccacccgaggacgataaaagggctttttgtctgcaagcacttagcttcctctgccggggcgatccatcacatctgagggaggccgggaaggcagacagacggtggagtggggcctcctcctcccctgctgagggaacctgatgctcccaggagcccccttgcaggacccaagtggctcctcagcccgaaggcaaggcctgtctgggggccagcaggggtgagtgggagtggggccatgggggcacattgaggcaggcagatgctctgcactcccctgacagaggacagacgctgcccggatgccctgccccaccacacccacttggcagctctgtggggcccctctgggaccctccatgctggagagggtgggtggggggtgcagccttttctgagtaagaaccgtgatggtagaagggggcatgggggagacaaggggggacagacctcagggccgacactcgctatgcgtgcactaagcactttgtggaattacctccttaaatctcagggcgaccctggaggtgggcaccgtccttatccccattctccagatgaggaaactgaggtacagggaggcgatgtggcatccccagggtgcagcagcagagggagggcttggctccaggctcccagcggtacactcttccctgcggacctaggaccttagaagggggctgtgggagcccctggccccaaaagtgggttgcccgtgactcgaaactctgtgagtggattcttcagctgggagtggggtggggaggtgggtgtctgggattgtctatacattggggtgaggggtccggtgtgggtgggggctggggtctcggggtaccctgggcgggtgatcggggacaccgaaggtgtgtagggggaggttttagggccctggcccggtgggatctcacctctcgggggctctgggaggaccggctttaaccccagttggacggggccctgggccctgcttgggtggggaggagagcaattcagggccccctgcccttccctgtctgcgccaccacccttccctctctgccatcctcctctctctccttcccagcctggatgctcagccctgggcgggggctccctgcaatcccttcctcccctccccc

SEQ ID NO: 23748 - DNA, 961 bp, Artificial sequence
  DNA replication origin
ggggttgcagtttcaaagtgggggtcagggtaggcctccctgagaaggtggcctttgagcaaagacctgaagtaggggaggaaggaagcatgtaggtatctgggggaagggtgacccaggctgagggaacagccctgccaaagcactgaggcagcttggaatgggcctcccgggttgcgcgattctgagttacctcgggggagttttcctggaggaggcctctttacttcttcctgagcctttgggggccccccactaggcaggagggaagatcagccctgcaggtcatctgcttcctggggctgggccttgggccctaagccctgggcctcacaaccaggttttgtcttggagggagcaggggaaggaggattgggatttggaggtaggagaaggaggagtgggactggggtgggggaggaggagtgggatttggagggaggaggggaaggagaagtgcgatttggaggtgggggaaagaggagtgggatttggagggaggggggaagaggagtgggatttggagggaggaggggaaggaggagtgggacttggagggaggggggaaagaggagtgggatttggaggtgggggaaggaggagtgggacggtggcggtcccccacaaagtgatgaactcagcagggctttctgcctaggctcatggggctttgaagttggaaggaaagcggcctggtctgggctgtttttcccagcctcctcctcctctgcctctctgtcccccgtccatcggcgtctccgtctccggcctaatggggagccttcctcctgtggctgagttatctgcttgtcatgccagtggcccacccgaggacgataaaagggctttttgtctgcaagcacttagcttcctctgccggggcgatccatcacatctgagggaggccgggaaggcagacagacggtggagtggggcctcctcctcccctgctgagggaacc

SEQ ID NO: 23749 - DNA, 1491 bp, Artificial sequence
  DNA replication origin
cagagccgcccccgtcagggcttcccggggccgggcgtctcccagctcagccccgcagcagcaggtctcactcgctgtgtcacgctcccctgtgctcacacccaccactcactcgctcaaggccgcagtcgcacttgctcactctgctgcactcacattcacactcattcacactcgtgcacacccggttcacactcaccggctcggggccacccacacacattccagctcaggcccaggcccactggccggctccgtgggccctccccgcacagcatcccaccagctccttcatgctcactgtcccccagcaagctcccacgctccccctcaccctcccaggcaggctgggggaacccgggcaccccccattcctctgaagccaccagctcagtccacccacagctggaagaagggccgggcctccatcctcgcgcccctggggctggccaggctagtctcccggcaaagcagatgcacggggagagcaaggaccagttccaaggctcccctctgccaagcccaccatgaccacgcatggcccacaggctgagacttgcccccacctgccagcaccccccttgtcagctcccaaacaagcccacctcctggcgttggcttttaccctcaactctaccaaacgcaccgtcaccctgctctccaccctgctggaaccagaacaagcaccatcttttcctcctccaggaagcccgcctggctcaccccagccacaaaggccaacctgactcgtccattcgccacacccagagatgggaagccaccacccacagccacacagctgcaagaggcagagccagccgacattcaaacccagaggcagcttcgacctgcctcgaccaggacaccatcaaccttcagctgctcaacaaacagaggggacagaccccctgttacctgccaggtacaggggcatgactgcgaacacaaaagctgagggtcttaggggccaaggtcacacacacacacacccaaacaccctccggtacacccataagtgagcaaggtgattgcaaagagtggcccctggagtgacggacataaaccatggcgacccagcagtggtgggagggagggcagggagggcagggagggccccctgcaggaggagacactggagccaagcacagagggccgaggaacaggtgtccatgaggaaggaaaaaagagcactccaggcagaaggcacagcctgtgcaaaggcccaggggcaagaaccagatcagagggttagagaagctggggcagccagagggctggggagtggagaactggagagggttggggagtagagctggagggggatggaggtggagagctggagggggatggggagtggagctggagggggatgggagtggagatggggggatgggggtggagatggagggggatgggaggaggatatgcagggggatggggagtgaagagctggagggggatggggtggagaactagagggggtgggaggtg

SEQ ID NO: 23750 - DNA, 1362 bp, Artificial sequence
  DNA replication origin
gccaagcacagagggccgaggaacaggtgtccatgaggaaggaaaaaagagcactccaggcagaaggcacagcctgtgcaaaggcccaggggcaagaaccagatcagagggttagagaagctggggcagccagagggctggggagtggagaactggagagggttggggagtagagctggagggggatggaggtggagagctggagggggatggggagtggagctggagggggatgggagtggagatggggggatgggggtggagatggagggggatgggaggaggatatgcagggggatggggagtgaagagctggagggggatggggtggagaactagagggggtgggaggtggagagctagaggggggtggggagtggactggagggggatggggagtgaagagctggagggagatgggggtggagatggaggggggtggggagtggagagatggagggggatggggagtggggagatggagggggatgggggtggagagctggagggggatgggaggtggaggggtggatatggaggggaatggggagtgaagagctggagggggatgggggtggagatggaaggggatggagagtggagatggagggggctggagagtggagagctggaggggggtggggagtggagagctggagggggatggggagtggagatggagggggatggggagtagagagctggagggggatctggggtgaagagctagaggaagatggggaatggagatggagggggatggggtggagatgaagggggatggggagtggagatggagggggtggggagtggagatggagggggattgagtggagagctggagggggatggggagtgaagagctggagggggatggggagtggagagctggagggagatggggagtggagatggagggggatggggagcagtgatggagggggatggaggtggagatggagggagatggggagagaagatggaagtggctgggggtggagagctagagggggatgggggagatggagggggatggggagtgaagagctggagggggatggggagtggagatggaggggatgggaagtggagagctggagggggatgggaagtggagagctggaggaggatggggagtggagctggatggggtggggagtggagagctagagggggatggggagtggagagctggagggggacggggagtggagatggaaggggatggaggaggagatggaggggtggggagtggagatggagagggaaggggagtggtgatggaggggtatgaggagtggagattgaaggggatgggaagtggagatggagcaggtggggagtggagatggtgggggggtg

SEQ ID NO: 23751 - DNA, 948 bp, Artificial sequence
  DNA replication origin
gaaggggagtggtgatggaggggtatgaggagtggagattgaaggggatgggaagtggagatggagcaggtggggagtggagatggtgggggggtggggatggagctggagggggatgggggtgaggatggaaggggatggagagtagagatggagggggtggggagtggagagctggagggggatggggagtggaactggagggagatggggagtggagatggagggggatgggggtggatatggagggggatgggggtggatatggagggggatggggagtggagatggagggggatggggagtggagatggagggggtggggagtggagatggagggggtggggagtggagagctggagggggagggggtggagagttggagggggatggggagtggagagctggaaggggatgggggctgtgttcctggccacaggaggggagccacgtgctccagtggaacacataactgagtaggaacagtgtggggcagggccagcgaggacacctttgggtcaatccctgagggctccatggaggcatcgacctcttgccctcccagacccagcctcagcctcttcctgcatggaggatcagaactgtggggctccagcctcaatgctgggcaagggcttggtgtctggactctggagcctttcccaccagacctgcagcagccacaggaacagggcgggccattgcctcggggctcctgtgcctccaggacccatgattactcaagcccagggctcagtataaatcctccctctcagcccagcctcccctgaccagcggccacaccggccacaacagccacacccttggcagggccacatgagggacatcttccagaagggagaaggacgggtgttgattgagcacccacagggcccacagagatgggcgaggtgggcgacagcagcccaggctccactccaggccacc

SEQ ID NO: 23752 - DNA, 951 bp, Artificial sequence
  DNA replication origin
gtcgctggtgctgactgacgctgagtgtggatcccagtcctgggaactctctgggagggctttcttgcctcactgcctccatctgcacagggggaggatgtggggcggttgttaagaattaaacgagttaatcatcgtaaggggcttagcattgtgcggaggcagcgaaaccctgagcttcaggcaccgaggggctgtcggtgcctgtgagggtgagggggctggacagacaggtggacggacagctggcctttccgtgctgccgcgtggggcctccgcggcctcccggcctgggctgcgctccctgccctgtcgtggcccgtgcttggccatgagccaggctgctgccaccccgacagagcccgcgtcccccttccctcccaaaagcggtcgataccccggctccttcctggcctctaattgctcctgccggctgctgtctctgatggcggccccacaccccgcagcgaggagaggggcggcgaggtttctgggaagcctagtccctgctaaatccacggcgctgtcggggtggagaatggagtggccgagggcagagggtcagatgctcggggtcccgtctccccgcccctcactggctgtgtgacctggggcaggtaaccccgtgtgggtctgtttccccacccctgaaacagggtccggacagtggagatgcacgtggcctggcaggaagtgagggctgttattattgtgatgatcgttgtcatggttttttgcagcggctcctccccagtcgctatgcccggtgtcagtgcagccttccttgttgggagcagacaggtggccctggggctggggcgcgttcctgggcagggcacggggttgctcctcagtccccctctggacggggctgcggcccatccccacctccctactgatcccattgcaggccctgatcactcacatccatgctgccagcccccttggcct

SEQ ID NO: 23753 - DNA, 1535 bp, Artificial sequence
  DNA replication origin
agggagcagaaacagcctgtgcctgggatgggtctctcctgcctgtctatgcttcacctatgcatacccctgaactgctgccccaggtaatgtgtggctttgcatgtgtcctgggtgacacggagactctgaggtggggccagttcacagctctgcctgtgtgcatggaactttgctcatctgccgggcccagagagggtccccaggctgaaaggctgttccacgccactcgtcccccacccccaccctcaccctgaccacagaagcaagaacttcccagcacggggcggcgcagggaagcagcgtggctcactctgtggagtatgtggggccactgggctgtttcagtttctgctgcgtttcttgctctgactcagggccctgaccccagccgggccacttgggcttctgaacgcctgctgggctgagctgagctcaccggtacatgagaaagatcccgggctgagctgcccttgcctggcgtctttgggccttggttttcccatctgtgtggtgggggcttcgagggtccccgtgtgtcggtgggttggtgtggagggattgggtgtggacaccaggggctgaaagctgatggggacccatggggaaacctgtgcctcggacccctccagaccagaggctcctgcagagccctgcccatggaagatctgggtcaggggctgccttgtctctgggtgcttctgttgtcactggcctctggccccagcctggtggtcaccaaagcctatgtttcccctgggcctgctgcggaggtgggaggcagggaaggtgggctcttatccagtcctctcatcgtggccctccgagactctgctccctccccctgggccccgcttctgggtgttcgaggtgctggggacattggtgtctcagtagggttgcaggctggcaaggggccctggggaggtggcctggtgaaccccgatggtgagcttcaactgagcactgctgggtgccaggttgtaaatttctcttcagagtagcccctggcatcatccccgttttacagatgggcacactgaggttccgagaagcaaggcaccttcctcaggctttaaaaaatgacagcactagggctggagcgggagccagcctgattttagccacctaatataattgcctccgtttcaccgagaggaaactgcctctgcgaagttgagcagcacacacaggggtcgcagtctcctgccaagatgagatggctcagggatttgatctgggtctcaggcccatttggggcccaccggggactctgtatgtcagccccacttgtgcctggctgtcccctcctgtgtgtgggcaccggctgaatggtggaagcaggtccctcctgggagcaggtcacgggtgctggggctgcatccctgacctaccctgggcccgggcgggtgtggaggcagaggaggatgtcctgggggtttgagtgggggcggagcctgcttgtgaggtggaaggtggggcaactgaatcagtgtgggccaccctcccaccctgaatatccccaggccctcgtg

SEQ ID NO: 23754 - DNA, 931 bp, Artificial sequence
  DNA replication origin
ctcggggcctgggggtggggggcagggggcgctggcagcgcagacacccaccgagggagttggaagctagccccaggagtcctggcccccagcgtctgccattcatgctggatgtggaggctgcctggccccgtttccccctggctgagagggggcgcattcatagttctgtgttcccaacccccatctgagagtgtgggtggagaagttggtgcttcactcggagatgggaggcgggggtggtacctacgcagaacccagccggagggttctcctggggtcctgtctgtgggaagggagattttaaggcagaggagacaggctctcagcccctcctcctgccgctgtctgaactgaaaagccccacaaatgctgcctctgaccgtgggccgggggtgggggtgggggtggggtggcgggggttgagagcttttatttgtgtgtgtgtgttttcccttccctgtttcctcttcacatctcaaacgctaaacagcagcctccccaggtgacacttttgagactggggaactgccggtgggagctggtaactcctgcctgaggtgcccaggggaggggcaaggagggccccaagcttgagctgctgcctggggagagccaggttttttaggcccaggccaagggtgacagaaggtctgtgtccctaggtgggtgcgtgtggtccccagggaagtgatgcttgggaaaggccagctgggcatcttttgagggagcttggagccagggaactgactttacaacccatccggcgaactctcagcctccatgttggaaaaggctgtggatcatacgctagtaataagaaccaacacctactgtgtgccaggaaccgtgctctacgcaaatctgcttgtttactcttcataactcctctatgagttggtgcttttattatcttattttatagatggtg

SEQ ID NO: 23755 - DNA, 826 bp, Artificial sequence
  DNA replication origin
gcacggcgggcgggagggagagacaggctgtacctgggagctgctgtcgcccgggcccaattagcgtggggcgcccggcgttatttttacattgtaggtttatttttttggaagcgagtgtcctcccgccgcctgtcgcgcgctccggctctccgagggtctggtgcaggcagcgggggcggatctgttctgtcggctcagcctcctcccttcctccccctcctcctctcccccgttggtgagaactggttttattgtgattattattatttttccctttttgcagatttggaggaaggatgtgtgagggagggaagaggggaggaggggataaggggaggaccctgtgggcggggtgggggagttctgggcgcgttgggatgtgttaccggtggccttgactttgccccttttcagccagatctgggtccttgcggcagctttgatataaggggctctccgggccagactgcgccgggagggcgacccggggcaggctgtgtacctcgtgggtggcctctttgggggtgctgaggaggggccgagaaatggcaagcagcagtgaggtgggatggcccactctgcacctcagctcctggggtttgactctgacctttgccactttcctggcagtgtgaccctggacagatgcttaacttctctgtgcctgtcaggtttcccatctgcaaaatgagggtcaaaatggtactgagttcacagagtggttgtgagagctgaccgtccggccataagaatcccttggtacttgtatgtgttactatgactactgtgtcggtattattattcctgggttctaagattgggc

SEQ ID NO: 23756 - DNA, 1351 bp, Artificial sequence
  DNA replication origin
ctggtcgggccaaaacaaggaggtggggggggggcactgacctatgacccctcctgtttcagtctgcaaactgctcccctccacacccacttcccttttgccagacattgtcagccccagaggctcccgccagccccccaaaagctcataattaaaagcccgagggggcagagaaggacctggctgcaggggagcccggcaaacccagcatcctggcggaggcgggaggcccgccggcctctggaaaccacgcggctgcctccccaccgcagccattccccgctctccctgggggttctcagatgttgccagatggcagaactgaatctgctgagacgtcactccaaaaaaggaaagttgaactgaaaaaaaaaaaaaaaattcaaactctccaacatcttaggagaaagcagaagaggagggagggagggaggctccaggcccagggctcccagtgccctctgctgttcaaagagatctgccctggttggagagggcaaacctggagggggtgggaggagggggtaaatgaggacactgggttgtcagggcggccaggggggccaggttcctgctggagcggagagtgtctgcctgtgcgtgggggagcgagcacatgtgtgccgtctgtgactgcgtgcttgtgcaggccgggcgtgtgtggctcccagggtcacgctttgggatgtgtgtgtctgtgtgtgtgtgtggggggggcgggggggacacaggctcgttgcattgtctccgcatttgtgtccctgaatgtccccaagtgggacttcactcaacacattcgtgagtccctactgcgatagggcagtgaacaaaatagaaatctctgccctcaggaaactggcattctagcgtctgtgtcctccggggtgctgtgaactcgcgtgggtgtcccagtatttgtctgtgtgagatctgacatctccggtccgtggtgggtggtgagtctgcagtgtgttcgcccgggctgggtctcgggtctggggaggcccagcgtgttcctgcctggagagggctctgcgctactgtctgctcccgtccccaagtgccccactgggcgtgctcctaaaaggccctgtgtagggccctccctgcgcgccccctccccatccagcggccactccagagttataatttaatagctgaaacgcgattccagtgaggtactggggctggagaggaggaggagggcccccgggcccgcaggagaagagggaggggaaggctgggaggcgcttcccccctccttcctcctcggggagctgccaaaaagaaactcggcgtcgcgcccaagtgtgtgcgtgcgtgtctgtgtgtgtggcggcgtgcgcgcgcg

SEQ ID NO: 23757 - DNA, 1392 bp, Artificial sequence
  DNA replication origin
agacgtctggctttcctgaagccaccatgctgaaatgaacacacaagcaggagagcgacgcccgaggaggaccagctgtttgagtctgcccagcccaggtgtcagactgtaaatgaagacggcagccagatgacactgccagccaccagcccctctgactgcaccctccaagagatccagagctcaaaccgccctggggagccactcccgagatcttacccccagaaaccatgaggtagagaatgattcttgttgctttaatcctccaagtttggggggtgatttgttgtgtagtcagagataacgaatacgccaccttcattctgagcattcatcatatgaagtaatacgtcttccttattgcttaagccagaggtcggtgaaaattttctgtaaagggcagacattaaatataattttaggctttccagatcacatggtctctattgcaatgactcagcttgccgttgttgcatgaaagcagccatcggcaatagaaatgggtgggcgtaactgcattcctatagaccttcattaacaaaaacaaggagccagaccataagcagcagtttgttgacccctggttaaagccatttttgagttaagttttctgttacttgcagcccaaaacatactgttacaactatccaatcagagagctccaggcaaagggcaaccacaagaggctctagggtgtgtgcatagttctctggggtgtgtgcctgggctctggggtgtgtgcatagttctctggggtgtgtgcctgggctctgaggtgtgtgtgagctctgaggtgtgtgcatagttctcgggggtgtgtgcatcgttctctggggtgtgttcttgggctctggggtgtatgcctgggctctggagtgtgtgcacaggtctgaaaatgtgtgtagaagtcaggatgtgtacacaggtctgagtgtgttgtgtgggctctatggtgtgtgccaagatctggggtgtgcatgggttctgggggtgtatgtgtgagccctagcattatgcgaatgggctctgggatgtatgcacaggtctgagtgtgtgcatgagcacacaggtctgagtgtatgtgtgagagctctgggggtgtgtgcatgagctctgggggtatgtacaggtcgggatgggtgtgtatgagctctgggggggtgtgcacaggtctgggtgtgtgtgtttctgtgtgtgtgtgagctctggaagtgtgtgcataggctctggggtgtatgcataagcacacaggtctgggtgtgggtgtgtgagctctcggggtatgggcacgggttctggggatgcatgcctgagccctgagcgggccccactcacccaccatcttatctactgagacaagaagggctgggctgttcgttcatgaagtctcct

SEQ ID NO: 23758 - DNA, 1015 bp, Artificial sequence
  DNA replication origin
agtgctgaggagggcctgacattacagagaataatgttccctcctcgctccgcctgcggctccggatggcagagctgtcaacccccagggtcccacgatgggggcggaacccccaccaatccgccgtgccaggaggcgggggaaaaaggctctgaacttaaaaatttcccttctgtaaaaggagggaagagagtgaaggaaagaaggagggagggaggaagaaaaggaaaggaaacaagaaagaggaagaaggttccacgcacgtcttccagccactgcacacgggtaagctggaaggcagagcagagctgagtcacaaggacatcagtatggctcagaaagcattttctctccgctatttcccaaggtcttcaaaacacggggggctgtcagcacagacccatttcacaacaaggaaaccgaggctcagagaagagcggcaccttgcttgaggtcatacagtgtggccacagtagctgggaactaaatctgtgtgtgcgcttgcgtgtgtgtgcgggcatgtgtgtgcgtgtgtgtgcgcgggcatgtatgtgcgtgtgtgtttgcgggcatgtgtgtgtgcgtgtgtgtgtgtgtccgggcatgtgtgtgtatgtgtgtgcctgggcatgtgtgtatgtgtgtgcgcgtgcacgcgcgggcatatgtgtgcgtgcgggcatgtgcgtgtgtgccggcatgtgtgttcgtgtgtgtgtgtgtgtgcgtgcgtgcgcgggcatttgtgtgcggtcatgtgtgtccgtgtgtgtatgtgcgggcatgtatgtgcgtgtgtgtgcgggcatgtgtgtgtgcgcgcgcgagcatgtgtgggggggcatgtgtgtccgtgtgtgtgtgcgggcatgtgtgtgcgtgtgtgtgtgtgtgtgggcatgtgtgtgcaggcgtgtgtgtgcgggcatgtgtgtgggggcatgtgtgtgcatgtgtgtatgtgcgcatgctcacctgtgtgtcaggggtagccctgtctgaatgcagctgccaa

SEQ ID NO: 23759 - DNA, 1387 bp, Artificial sequence
  DNA replication origin
tcaaactggaagaaaggggctgggtggggagagaggaggtcttctctgtgtgtttctcttatatcaggaagcaaaatctttccctgagttcccagcagacttcctttgatgcctccttggtcagaagtgagtcacatgaccacaccgaggcccgtcgctggcacagcagtgcagaacgatcatccagctgtctcaccgcagggctggacctggggctgcccctgtaaaatcgggagcatggacagtggtgtccgggccgtgtctgttcatggacaggcactcattgagcacttactgtgtgccattcacccttattactgccatatcaaaagaaagatcaaaatgaaatgttttggaggcctcttgtttaactctcacattttaccaaagggaaaactgaggcctggggtggcttggcgacttcataagtcacccagtgggttagtggcagaatgcttgcctgtctgttcactgttgtaccccagtccctggagcagtggctggcactcaggaggacctcagtaagtggtggatgggtgggtgaatgtgtgggtaagtgggtgggtaagtgcgtggataggtgcgtgggtgggtgggtgcatgggtgtgtaggtgtgcaggtgggtgcatgcgtggcgggtgtgtgggtgcgtgggtgggtacgtgcgtgggtgggtgggtgcatggatggatgcatgcgtgggtgcgtgcgtgggtgcgtgggtggccgggtgcatgcatgggtgtgtgcgtggctgcgtgggtgcatgggtgggtgggtgcgcgggtgcgtgggtaggtgtgtgggtgcgtaggtggatgcgtgggtgggtgggtggatggataaatgttctcaaggagctgctgggtggagacaggagtcagaaattgtggtggtaaccacagcaccacacttgtctaactatctgacttccatccctcctgctgcgagcttagctctttgtgggtacaccttcatggcagggcagaggggagctggtcgccaccctttttgtggtctgtttctttaaacaaagtcccacttccacttctggggagcttgcaaagccctgtcccgggtggccctggcgggcaagttgggcgggtgggcctcagcccccaggaggtattgagaggcccagggagagggaaaccctgggcacagtcccagggagagctacgccaggaggcagcagcggggagggctgggcagtggggtgggaagcatttgggggttctgttttcagttcctgtcactgccctaagctcccctcacatctgggggagccttgagagatgatggggggccctggagctccttgcagagccctaggcactacgggtgctcttaggttctaacaagagctgggcttctcaaaactgcaca

SEQ ID NO: 23760 - DNA, 920 bp, Artificial sequence
  DNA replication origin
atagtaagtgtatacagttgtggggtgcatgagatgtgttgacacaggcatgcaatgtgacgtaatcacatcatgggaagggcgtatccaccccttcaagcatttagcctttgtgttacaaacaatccagttacactccttcagttatttaaaaatatacaatcaagttattcttgactatagtcaccctgttgtgggatcaaatagtaggtcttattcattctttctctatatgtatatggtttttgtatacatgggcatgattgattaaaccacaggccattggtgatcagtttgaccttcagcctctctcccctcactgctggaggttggggactgggctgaaagtcccagtcctgtagcgctgacttggtttttcctgagaccagtccccatcctgaagctgcctaggggctgctggccaccagtgagtcattggcaaactaaacactttggagattccaaggattttaaggcagaagaccaaataaatattttacacgatcacagtgggagggggttggagggagatggaggtggagagctggggggcctcgcagttaggattttaagtacagtgggaaaccactggagatttttccatcagggagggctgcgtttgctgtttctgctgtgggagaggctgcgggggcaggcgtggatgctggaggtctggctggaggcagtggccctcctcctggtgacagatggtggtggtggtggtggtggtggcctgggccagggcggagcagtggatgaagaagggacagatgcggggtgtatttttaggggctggagctcatagaacatggtgctaaactggatgtgggaagggaggggtgaggacgcgtccagtgagactctcaagtgtctgagcctgacggccagggggagggaggggctgctttttgtttgttagt

SEQ ID NO: 23761 - DNA, 858 bp, Artificial sequence
  DNA replication origin
aatcggggcccatgtgtgccgttggggtgagggtgcggagaaatcggggcccatgtgtgccgttggggtgagggtgcggagaaatcggggcccatgtgtgccgttggggtgagggtgcggagaaatcggggcccatgtgtgccgttggggtgagggtgcggagaaatcggggcccatgtgtgccgttggggtgagggtgcggagaaatcggggcccatgtgtgccgttggggtgagggtgcggagaaatcggggcccatgtgtgccgttggggtgagggtgcggagaaatcggggcccatgtgtgccgttgggaatgtaggatggtgcagctgctgtgtggaggcccccccaaaatttaacatagaattaccatatggtggggcaaccccacttctgggtatcaaagaaatggaagtgggaacttgaagaggaatctggccaccgcgttcattgcagcgctgttcacgatggcccaacggtgggagcaacccgagtgtccgctgatgggtggtgggtaagaagctggggcccatccacacgttggaataggattcagcctggaaaaggaaggacgtttggacgcacgctgcgacatgcacgggccttgaggaagttatgcgagtgaaataagccacaacaggacaaataccgtacgattccatttgcatgagctccctagagtagccagatccacagagacagaaaagagaatggtgggtgccaggggctgggggagagggggtgcagagctctttttcagtgggtacagggtttcacttttgcaagatgaaagagttctttagatggatgttgctgataattgcacaacattgcaaatgtccttaatgccactgaac

SEQ ID NO: 23762 - DNA, 1064 bp, Artificial sequence
  DNA replication origin
ggtggttcctcaaggtttgaggagtttggtagatggtggagccattttccgagacgagaagatcgggggagggaggttgagagcagatggagtgtgggccttaactctggtcctaaaatcaagcgaggacaactcaacaacaagagtcagacaaccccattaaaacacggaccaagcacctgcaaagaagacatgcaggcagccaggcgcggtggctcacgcctgtaatcccagcactttgggaggccaaggtgggcggatcacaaggtcaggagttcgaggccagcctggccaagatggcgaaaccccgtctctactaaaaatacaaaaattagccgggtgtggtggcaggcgcctgtatgtaatcccagctactcaggaggctgaggcaggagaatcgtttgaacctgggaggtagaggttgcagtgagccaagactgtactccagcctgggcaacagagcaagactctgtcttaaaaaaaaaaaaaatgcagatagccaacggggacatggaagtgtgctcagcgacactcgctcatcgttagggaaatgagaatcagtgagacacactcatacccattaggatggtcacttgagaaaacagaaaatctcaaatattggtgaggatgcggagaaatcggggcccatgtgtgccgttggggtgagggtgcggagaaatcggggcccatgtgtgccgttggggtgagggtgcggagaaatcggggcccatgtgtgccgttggggtgagggtgcggagaaatcggggcccatgtgtgccgttggggtgagggtgcggagaaatcggggcccatgtgtgccgttggggtgagggtgcggagaaatcggggcccatgtgtgccgttggggtgagggtgcggagaaatcggggcccatgtgtgccgttggggtgagggtgcggagaaatcggggcccatgtgtgccgttggggtgagggtgcggagaaatcggggcccatgtgtgccgttggggtgagggtgcggagaaatcggggcccatgtgtgccgttgggaatgtaggatggtgcagctgctgtgtggaggcc

SEQ ID NO: 23763 - DNA, 927 bp, Artificial sequence
  DNA replication origin
gcgcaatctccgctcactgcaagctccgcctccctggttcatgccattctcctgcctcagcctcccgcgtagctgggactacaggcgcccgccaccacgcccggctaatttttttgtatttttagtagatacggggtttcaccgtgttagccagcatggtctcaatctcctgacctcgtgatccgcccacctcggcctcccaaagtgctgggattacaggcgtgagccaccgcgcccagcctcaagcaattttcttgcctcagccttctgagtagctgggattacacgtgcgtgccactacactcggctaatttttgtatttttcgtaaagatggtgtttcaccatgttgggcaggctggtcttgaacccctgacctcaggtgatccacctgccttggcctcccaaagggctgggattacaggtgtgagccaccacgcccagcctgactcagtcttgaagagctctctggctgctgtctggagaagggagtgtcgggggccaggctggaagcggggaggcagagaagatggtgatttgagccaggtgggggtagttttctaaatggaaagaagggaacatattcgagttttttttcagggagagtcaacaagataggtcagtggactggggtgcgagggaaggagaggaatcaagggtggttcctcaaggtttgaggagtttggtagatggtggagccattttccgagacgagaagatcgggggagggaggttgagagcagatggagtgtgggccttaactctggtcctaaaatcaagcgaggacaactcaacaacaagagtcagacaaccccattaaaacacggaccaagcacctgcaaagaagacatgcaggcagccaggcgcggtggctcacgcctgtaatcccagcactttgggaggccaaggtgggcggatcacaaggtcag

SEQ ID NO: 23764 - DNA, 1280 bp, Artificial sequence
  DNA replication origin
agtgtgatgaagctgccagcaggcctgggcatctgtgtccttggtgggggcagggagaagagacagggactgggatgctggggccagggccagagccccgctgagatatgaggtccccttccaccctgggaggtgtgtggggaggagcttcctcgaacccctttagctgggacggatggaagaatgagcagctttgcatttccggcagcgtctccagctttcctggggctttctcggcttgtgttattgatgaactccagtgcgtgaggccattggagccttagaggcctgtttcccctggacaggtgactgcctgggccagaggcagcactggcatggtgccctcttgctcctggctgggagtgacacggggcgtggggcgctttgcattcatccccagctgtttgggcacatttacaaccctcattttacagatgggacaaaccccagtggagaatctgctccgggcagctgtttatgaaccacctgaatggggcacacaggactgtgggaggaggaggagggacccccagggctgaagtggcagggaaagctactcatcctttcggcccatgtttactgctcacaaattgtgggccaggtctcgtgccaagtgttggagctacagccgtggacaaaagagacctggtcctgctcacggcagctacgctttagcaggagggatgggccatggagaagcacatggaagaggtggggtggcgagaagagctaggaaggggacgaggcaggtgagctgacatggagccactgctgggaaggggactccttctgatgtgggagtcaggagggcctctcagaggaggggctctatgagctggggagcagctggcaaagagcacagcaggttcaaaggccggaggtgcgaaggagcctgctgtgttggaggaagagggagcaggccagtggggttgggagaagtgactggagggggtgaaaggggacaggcatgtgggggccttgcaggacacctggaggagttcagatttggttttcaattccatggagggttctgagcagggaagagccatgatctgactcagtattttttttttttttttttgagacagagtctttctctgtcgcccaggctggagtgcagtggcatggtatcagctcactgcaacctccgcctcccgagttcaagcaattctcttttttttttttttttgagacggagtcttgctctgttgcccaggcgggggagtgcagtggcgcaatctccgctcactgcaagctccgcctccctggttcatgccatt

SEQ ID NO: 23765 - DNA, 881 bp, Artificial sequence
  DNA replication origin
cagaaaagtggcaggggtggatggcacaggccctgggccaggttaggacctggctgtgactcctaggggacgggtctggccatgtcagggctttgaggggaggaggtgctaagtgcaatcttgatgggctcccatggctgcttattgagaaaccccactggggagcaaggatgagcacagggaggccagtgaggaggcggatgcaggaatctgggggagaggtgatggtgccttggaccagaggtgatggcgcctcgggcgtggtgagaagtagttggaatctgggtatatttagatgatgaagctagaaaactttctgacgggttctctgagggaagtggagagaacagagtcaaggctgagtgcaagatgttggcccgggcaactggaagatgggggggctatgatggagtgggaagctggtgggagccacaggtgtggccgagggtgatgaggagccagccggggcgagcgtgagctgcctttgaccccgagttgagatacggactctgctgttggacactcgggggtggggttcaggggaaaggtctgggcccagggataccaatttgggagtggtcaggacagagatgccattcaggcgcaaggctggaggagcccaccccagggatgagggatgaggacacacagaaaggatgcctggagctccaccagcaggaggcaggaggccagggagatgaggaggcatcagcaggcaagaagacagagcagccaggaaggtgggaggaaaacccagagaatggagatttaaagcgcctcaagggtccttctagaagcttccagagaaggtgtaaggaacttcacccaaaatgccaggaagtgaacaaggtcaggcccctcccgttccttccccctcccca

SEQ ID NO: 23766 - DNA, 1858 bp, Artificial sequence
  DNA replication origin
gctgccgtcccggatccaccgtgcctctgcggcctgcgtgcccggagtccccgcctgtgtcgtctctgtcgccgtccccgtctcctgccaggcgcggagccctgcgagccgcgggtgggccccaggcgcgcagacatgggctgctccgccaaagcgcgctgggctgccggggcgctgggcgtcgcggggctactgtgcgctgtgctgggcgctgtcatgatcgtgatggtgccgtcgctcatcaagcagcaggtccttaaggtgggtgagggagaccccagggggtccgcgcacggacccgggctgttgggcgctgggcgccgggaggacccgcgcgttgcggtgggtgggcgaccgcagcggaatcggcgcccgggcctggcgccgcagagcacgagggaggccaggcgcttcgggaggggctgctgcccgcctccccaccaccctcaccgccccagactgaggctaggggggaacccaggggctttgctggaggcgcaggccagggttggggaggcctggacgggagaccacccgggcgcctgacccgccctaaagggtctgggcgcccacgacggatcaggagtgtggacaggttgcttccgtggtgccgcccgaaggagcccaagagtgtgtgaacgtctgctttcacagcagccggtagcagggtccggtaaaattagagctgcactttgcttgtatcctgtgagcccaggaggacaggaaccttctgtgagacccacgtgggtgcccagctcacatggtaggtgctcagctgagcatcctccactgcccagaatctccccataggaaccctctcccagaggcagaatgcgcgactctgttctccctgctcactgcctccatgattcagtctggaaactataagccgcttttctccccagattcatgcagaggcaggcagcagcccaaggtcctctgagtgcacgcagccttaggtctttcctctgatcctaactttgcataccattgccctttcaaccagggagacagattaggcggtcagctggtctgcagacggacagactctgccctgggtgcctgggtggcctgtttgaatgagcctggagttagggaagggctgggagattgcagagtatcacatttgaactaaaagccatttagagttttgaagccctgggaacccacacatgcagtggcggggaggggaaactggggctcactcttatcaaagttctagccagatgcagagctggggtgaagatgtggacattgtcactctaatggacgtcttttccccttggcctgcctctttggactgggtttcttaagaatggttccttgtccacatttcatgtctgttccctcattcacagagcgaatgaatgagtgaatgaatgaaggatctgcttagatctggctgccacacttcttgggacccagctagctggccttaaagatggagcaacatatggtctctctcaaggtctctgggtgagcagttgtctagggcatcttagccacgttgtgtctatttttgatttttcaaatcttgtcccgccaaagcctgtaatctgactgcaaagaggtcccggtggatggtgacactgtctctggggatggcaggaaaatcagcagaatggcctcttctcccccatgacagctcagaggctttctctgttacactgagggagctttatttttctgtggcctactcatactgaaacgtgtgtgtcagtgacagccttgtggctgctgcagtgccaggaccccactgtgtgtatgcagggtccctagaggggctatcactcaggcagttcaagcatgtgaccctgtgctgtgagtgagcacctggtctcttgctatgggagtgtgg

SEQ ID NO: 23767 - DNA, 1125 bp, Artificial sequence
  DNA replication origin
cctcttcattagaaagtggggacttggtttgggttaactaagcttccctgtgcatcagttttcatttctttctttctttttctttttcttttctttttttttttttttgagatggagtttcgctcttgttgcccaggctggagtgcaatggcgctatctcggctcgccacaacctccgcctcccgggttcaagcgattctcctgcctcagcctcccgagtagctgagattacaggcatgcgccactacgcctggctaattttgtattgttagtagagacggggtttcgccatgttggtcaggctggtctccaactcccgacctcaggtgatccatgaagtccacccgcctcggcctcccaaagtgctgggattacaggcgtgagccacctcccagttttcttattgtaaaatggagccattgtgtgcaaagcactcaggacaggggccagcacctagaaggctcctcagtcattcattctagaatatttactgtgagcaggcattccctgccaggccacgttctagagctcaggacgcgtgggggggggggcccgcctcacgggttggcatcccagttggagcacatggtcagaatgcaaggacgcaaatgaacgtgaacctgccagggggtgctcagtcatagggtgatggtggcaccagcgttacgaaggatagggccaggcggatacctgggagaacagaattgcctgtgcagggtgtatggaggccctggggctggagcctgcggggcttcttccagggacagtgaggctggagatggactgcggagatgagggtctagaaggtggtggcggggcatgtggaccgttgtaagggctctggggttcctgggtgggctggcgaagtcctactcacagtgaccaaccatgatgatggtcccgatagaggaggagagggaggaggagggaaaaggaagggtgaggggctcagaggggagagctgggaggaggggagacataggtgggggaaggggtaggagaaaggggaagggagcaagagggtgaggggcaccaggccccatagacgttttggctcagcggccacgaggcctcctcagctcccgccccaaaacggaagcgaggccgtgggggcagcggcagcat

SEQ ID NO: 23768 - DNA, 1374 bp, Artificial sequence
  DNA replication origin
gcgccgggttttggcgcctcccgcgggcgcccccctcctcacggcgagcgctgccacgtcagacgaagggcgcagcgagcgtcctgatccttccgcccggacgctcaggacagcggcccgctgctcataagactcggccttagaaccccagtatcagcagaaggacattttaggacgggacttgggtgactctagggcactggttttctttccagagagcggaacaggcgaggaaaagtagtcccttctcggcgattctgcggagggatctccgtggggcggtgaacgccgatgattatataaggacgcgccgggtgtggcacagctagttccgtcgcagccgggatttgggtcgcagttcttgtttgtggatcgctgtgatcgtcacttggtgagtagcgggctgctgggctggccggggctttcgtggccgccgggccgctcggtgggacggaggcgtgtggagagaccgccaagggctgtagtctgggtccgcgagcaaggttgccctgaactgggggttggggggagcgcagcaaaatggcggctgttcccgagtcttgaatggaagacgcttgtgaggcgggctgtgaggtcgttgaaacaaggtggggggcatggtgggcggcaagaacccaaggtcttgaggccttcgctaatgcgggaaagctcttattcgggtgagatgggctggggcaccatctggggaccctgacgtgaagtttgtcactgactggagaactcggtttgtcgtctgttgcgggggcggcagttatggcggtgccgttgggcagtgcacccgtacctttgggagcgcgcgccctcgtcgtgtcgtgacgtcacccgttctgttggcttataatgcagggtggggccacctgccggtaggtgtgcggtaggcttttctccgtcgcaggacgcagggttcgggcctagggtaggctctcctgaatcgacaggcgccggacctctggtgaggggagggataagtgaggcgtcagtttctctggtcggttttatgtacctatcttcttaagtagctgaagctccggttttgaactatgcgctcggggttggcgagtgtgttttgtgaagttttttaggcaccttttgaaatgtaatcatttgggtcaatatgtaattttcagtgttagactagtaaattgtccgctaaattctggccgtttttggcttttttgttagacaatgcagatcttcgtgaagactctgactggtaagaccatcaccctcgaggttgagcccagtgacaccatcgagaatgtcaaggcaaagatccaagataaggaaggcatccctcctgaccagcagaggctgatctttgctggaaaacagctggaagatgggcgcaccctg

SEQ ID NO: 23769 - DNA, 1375 bp, Artificial sequence
  DNA replication origin
ctggaaaatccacctcgatggcggggagcggccagcccacgcgatctagaaggtgggagccagtgagacagggaccctcctgcagctgccctcccgagtcccatccctgccccacccgagacacacacgtccgggggcaggggacaggaccgtgtgtccgagaagcccacggctgcaggaggctcaggttgcccaggacactgccccaactcacagaacacgctggcccggtgacacagcacccgcccccgctcggggcagtatgtaggggctggttcctccaggggcttgtcaaactggcagtaagagggcagcagggccgggatccactggacctccacgctagagacgcctgggggccgggggaggaagctggggttacagcggcaccctccgtgggaggggctgccatgcctctgccccagggtcccagccacacccccattagcgtcaccatcgggggacaaggggctgtccgcaggcctcggcacctttcatgtacatcttagtggtctccacgatttcctggtagaccacaaactcggggagctctttgaaaaggacggagctggggtggatgaagacagggtcgtcgaggagaggggtctgcagagaatggagagtgatgtggtcagggaagaacccatgcccaggggctccgcatactttcaacccaggagaagaatctgattatccactccagccgcaaaagtgggagagtgctccatctgccgggaaatgcggcccatccacacgctggagtctgatccagccgtgaaaaggaaggaagtgccgggtgcaatggctcacgcctgtaatcccaacactctgggaggccgaggagggtggatcatctgaggtcaagagttcgagaccagcctggctggtttcaccatgttggtgaaaccccatttctactaaaaatacaaaaaattaactgggcatggtggcacacacctgtaatcccagctacttgggaggctgaggcaggagaattgcttgaacccgggaggtggaggttgcagtgagctgagatcacgccattgcactccggcttgggcaataagagcaaaactccttctcaaaaaaaaaaaaaaaaggaagcaccgacacctgccatggcgtggatggggcttgaaagcatcacactaagtgcaagaggccagacatgaaaagccatgtatgttaagattccactcatgccaaatgtccagaacaggcagatccacagatggaaagcaggatcatgaaaacgggggtgacggggaactggggactcacagcttacatatgtggggtttctttgttgggtaataaaaatgttctaaagttaactatgataatggttgcaaaactctgtgaaaatactaaaacc

SEQ ID NO: 23770 - DNA, 1446 bp, Artificial sequence
  DNA replication origin
gccggccgagcatgggcgcgcgcgcctcaggcgggcccctggcccgggccgggctcctgctgctgctgctgctgctgctgctgctcgggctgctggccccgggcgcgcagggggcgcggggccgcggcggcgcggagaagaacagctaccgccgcacggtcaacaccttctcccagagcgtcagcagcctgttcggcgaggacaacgtgcgcgccgctcagaaggtgggcgccgggcccgcgcccgcggtcaccttgccccggtcgccacgcacctggctaccggggccgacctgggaggagcgcggcctccggggctgcccgcccggccagcgcgcgggaagagggggtccggcctgcgcctcggggcctgccgcctgcggcccccgccgggcctgaccagtgcgggtctgggcggccgggcctcggggcgccctctcctctgcgccgcgcttctccttggaccttgcctccgcggtcggcgcagccagagtctctcccggctgcgctgacgcctgccgcgcgtctcattcattcattcaccgcgtttgaatggctcctactgtgagccaggcagcacactggcgctctcggtccccacgcggctgcgccctccccagctaccccgggtttgtcctagcctcgcatcccgacccacttcccctgggaccttctgccccactcctcctcctgctttgaagatacttggagttgtttttactttacaggaaaagaagggagcaatgcgatttgctcggtggctttgggaaaccgagcacctactgtgtgcggggcctttcgcgtggagccttttgtttagtttggggaggtcccggatcctgcagcctcctgggaagggtgttgagtcccaggaggatcgcagggggttttccccaattcctgctctctggagctaggtgcgataggggtgccattccgggccgaagtccgccgactagctcttgagaaggaggaagttactggggacagttgtgtgtggtattgcggttcctttgctgttccctggggaggagggggctcttgcttgccgccagccttcctggggttttggagtcagagaagtttgggttcaagttggagctctaccagttggatgactttggggaagtgacttcacttctttgagcttgtttctttatttgttaaatggggatagtaatcattccccttcattgcgaggttgtaattatgactagttggtaccttcctggcccagaatcatggctaaaaagttaaagttttctgctcattgagagggagtggggaatagaagggaatatgaaggccgaaatcagattgactgcatgttcttactggataacatgaaaggttaatttgttaggaaaacagtaagttttgacctccctctcctgtgggcaggggcacctcttgcacaggtgggtctgtgtcttcatacatgtagggg

SEQ ID NO: 23771 - DNA, 1386 bp, Artificial sequence
  DNA replication origin
ccgcaggcggcgcccacagccgcccggaagcggtccatctgcgtgttcttcttactgtcaggctcccacatcacctggcactccaggatctcctcccgaccggggcgctcctccttggacatggcggcggcgggcggccggggctgcgacgagggctggggaccaggggccggggctgaggcgagggccggggacctgggaccggaggaagcgacggtcaggagcgcctggcgggctgggtcagcgacggcggcggcggggaacaagggactgaacggccgccgccgcctcctgcgggccgcttggcccaggccccgccccgcaggccccgcctcgaatccccgcccccttccaggccccgccctcccgcctgtaaccctccgctgagtgcagcgccgctcaaaggagtgctcgcagccgccggctccagcgcccgcggccggggggcgtgggggtgaggggcgctcacgagccttggccccagctccccgacctcacctggagctggagggcgttagggcagccggagaagccaggcgtccgagcccgctgtttcctacacgtgtacatcattcattcgctatttcttcctgcaggtctttactgagagcctgcggcattcggaggactttgggagctttgcggatacagcagcgaacaaaacaaaattcttgttctctgtcaacaggagaggaggggtacaggtgtgaggaagacgggagacgattaacaaataagtacatcgtgtacatacacaagataatgtcatagtataatacaataatatacatagtatgccaatgggtatcaaaatacacatttgtgaaaggaaaataaatcttggggccccactactaagctaaagggaaaagaaaagctgggaactgcttagggctaacctgcctccattctattcaaagtcacccctctgctgagttaaatgcacacctgattgcctcctttgcagaggctaattgaaaactcaaaagaatgcagccatttgtcccttatctacctatgacctggaaggccccctccccgccttagctttttttttttttttgagtctcactcagtcgcccaggctggagtgcaatgtcccaatctcagctcactgtaacctctgcttcccaggttcaagcgattctcctgcctcagcctcctgagtagctgggattacaggcacacgccatcatgcccagctaatttttcgtgtttttttttttgttgttgttgttgtttgttttgtttttttgagacgaagtttcgctcttgttacccaggctggagtgcaattgcgagatctcggcacacggcaacctccatctcccaggttaaagcaattctcctgcctcagcctctcgagtacctgggattacaggcatg

SEQ ID NO: 23772 - DNA, 1334 bp, Artificial sequence
  DNA replication origin
atgccgcaggctctcagtaaagacctgcaggaagaaatagcgaatgaatgatgtacacgtgtaggaaacagcgggctcggacgcctggcttctccggctgccctaacgccctccagctccaggtgaggtcggggagctggggccaaggctcgtgagcgcccctcacccccacgccccccggccgcgggcgctggagccggcggctgcgagcactcctttgagcggcgctgcactcagcggagggttacaggcgggagggcggggcctggaagggggcggggattcgaggcggggcctgcggggcggggcctgggccaagcggcccgcaggaggcggcggcggccgttcagtcccttgttccccgccgccgccgtcgctgacccagcccgccaggcgctcctgaccgtcgcttcctccggtcccaggtccccggccctcgcctcagccccggcccctggtccccagccctcgtcgcagccccggccgcccgccgccgccatgtccaaggaggagcgccccggtcgggaggagatcctggagtgccaggtgatgtgggagcctgacagtaagaagaacacgcagatggaccgcttccgggcggctgtgggcgccgcctgcggcctggcgctgggtgagagtcgggcgcgcggccgggcctgcgggggatgggcgggagccgtgcagggtggttgggtggtctccccatggctagtttcacgcttctggggctggaggagccacttgatggcggggaggccttctgactgcggggttccccccagtcttggggaacatcacccctccacagcacctcctggcacttcctgactctgcagcgtctcctctgcatgtgggggtcaccctctccccgggagtgtcacccctcgggagggccagctgcctgttgaccgtgtgaccccttgctaggctttcctacctgtgaggtgctccctggagtcttgacctccggcctgtgggggcttcccccggacatagggcctttttgacttgcagctcttcctctgtttgtgggggtcccttgccagtccccagtgccgtgcactctgtccccctgacctccctcatctccagctgcccctgctggaggccagcacctagcaggatggtcaggcaggaggccctgtccacgtgtctacactcccagcccccaaacagaacctagtaaaagactctctttccacccatcaccttgaacctcagaaactgcctctctcggtgcgggtggggcaaaggctccttctccgtggggtaaccgctccgggtgctcttcctgagctctagctggcttgcccaactaccagctccacccctcc

SEQ ID NO: 23773 - DNA, 857 bp, Artificial sequence
  DNA replication origin
attatccattcatccatccatcttccattcatcatccctcatacatcatccatccgtctatacattcttctctctgcctacccattcacccatcatccatctctccatccatttatctatcctccatctgtcatccgtccattcattcatccatccatcctccattcatcattcctcatccatcatccatccatccatccatctgccagccggcaaatatatgaggacccttgatgtgcagggcatggtaaaaggcatttggtaaagcaaagaacaagacaggcaaagtcccagccctcatgtgagaaccagatactagacggccagttacacaggtgattattcatttgcagttatgctaagtttggtgaaggagaaatacagtgtgctttgcaggtaactagttgggggacctgagttcaccgggttgggggcaagacagccttggagaaggctgctctgaggaagtttcatttgagtgaagagctgcaggatgagcgcacactgagtggagactgctggtgtgcgtggaggagtgttcagcagatcagacagctgtgcaaaggcaggaggtgattaggacaactgaggagtcggaagaaggctgctgtgaccagatcccagggagggatggggagcagagggaggagagcccacggggtcattgtcatcagagcatggagaatggattgcagggggatggtggggagttgacaggctggcagcaggcgattcatctgggcgggggctggtggtcaggatcctcaggcagttcaaggccagcccccttcccactctgaccttggctctcagagaaaccttttggacatctgctacctcccatacaccctgaaccc

SEQ ID NO: 23774 - DNA, 1255 bp, Artificial sequence
  DNA replication origin
cagaggctcacatctgtggaccagactgaagggcagtggtcactgaaggggcagcatccccgtctgtcctcaggatcttgtacgagatccgttggaaagacaggaaaaccgaggctgggagcgtggagtgacgggtgcaggggccactggctctgctctctgggttgtgcctggcgatgggaagcttcctctcctccctgcccctgccagacacacagagttgcttggaacaagtgtgttctgggcagtggaagattatatagttgtaaacagacatgagggagctcccggcatgccaaggaagagctcccaggtgtgctgttaggtggaaaaggcaaagtgcgggacactgtgtcacaatgaacaaaatggcattaataaatatgtgccggcatcagcaagaaagacgttcacaggaaactgctaggaccggctgcctcttgggagaactgggtacaggacagggagagaggacggcttttcatagtatctgcttcagagttctggaccgtgcaaatacattgcctattaagcaccaaaattaaaaggtaatagggcatagtgggtgggagggagcggttctgcttgggtgttttagccagaagcagggtcttgtgctgtcccctcagctgaggcattcctgaaatccgatcttgaacgtgagtcccagctacagtcttgctctgttgccagtgccccacccccaccacatccccctcaccccgctgttccctgtccctcatgaggctgggctagcacccgtcctggaagggttaggccctggtcttttgctcgttgactctcttctcaggaagggtcacttctcttctgcctgaagctggtgggcctccgtggtgcccttgatgtcctgggcaccgagagcttgagggcagacaggagtgtcagggttttcctctccagactacaagccacgctcagctcttgggggagagggacatgggggcatggctcatcacaggggagtggggggaaccctccaaagtctgcttctcccaggaaagaaaatggggatctgctggggcttcttcctggcagcgtctgagcagcgcgtgggccaggtaccagattcctggtactgtatgcctaacagagagcacccgctcccccgtgtctcccctgcagggcaccctcatccagcatctgaaggagcacctgctgcacggcaacatgaccagcagtgacatcctcctgtgctacaccacggtaagggcttccccaggtgctggcctgtgct

SEQ ID NO: 23775 - DNA, 994 bp, Artificial sequence
  DNA replication origin
cttattgacacattcgatcaaagagcatttattttgtaggcacagacaagataatttgaaaagatgaattttcttcttcacaggggtgtgtttctgggttctagtgaggggactattctggacagaattagggccaggaccccggggactttgtccagtttgctagtagtggggcaggtgtggacgttgtctgggttgcccagttttgcccgtctctgaatggggccattgtctaagatggttctagagggcaggggcctcgtgggcgagcaggcttgtccttctaaggaagtgcatgggttgggtagcactttgtcgggatctgcaccccgtgtgtgctggactacgtgctctgagccaagctccctggggggtcctgggggccacacagcagcgaccaggggccagcacgctctgtcctcatggggctggcactgggagggggaaggtaaggaaaagacagaggccaacctcaggctctgaggagtgctgtcagagacctggggtcagggagtcctcgagagtcctcgagaggtcttggcatttgggctgaggccgaaaggttcaggaactacttttgcaggactggggacgtgtacttcaggcagagggaaccacgaggagatgggcctaagatccatgtgttgtggaagctgggaggggcctcctgtggaccgagtgtgaagggctgatgcggggctgggggcaggagcaggggtcagaggggcggggacttttggagctgcttggagggtgagtttttccccgagtggaatggaacagcagtggacactgaatcaggagaacactgatctggttcatgttattaaaagggcagtgtaggccaggcgtggtggttcacgcctgtaattccagcactttgggaggctgaggtgggtggattaccatgtcaggagttcgagaccagcctggccaacatggcgaaaccccgtctctactaaaaatacaaaaaatacaaaaattagccaggtgt

SEQ ID NO: 23776 - DNA, 1777 bp, Artificial sequence
  DNA replication origin
gacgcatgcgccggcgctggcggcgcttcctcggctgcgcctctgcgcgctctcctgggctcggccgtgcgtggctggggagctggggcggccgaggctcagcgccccgcgccctggccggctgccccgcagttggcccgagttgcgcggcccccgccgccgccgccgccgcggctcctgcgccccagcgcccgtcccatcccggtcgcgccgccgccgccgccgccgcctctgccatcgccatctgccggccgcccctcgagccagcgagagagtgagcgagcgagcgagcgccggggggaggaggaggaggaggaggagtaggaggaggaggaggaggagaggagcggagggcggggccgcggccgggggaggggccgcccgggagccggggcacaggcggcagcccggccagtaggcggcgggacgcgccactgctcggcggttcgggggagggcgcccggccgggaggctccgggagcccgccgggggtcgcgggcgctcgcgggtacaggggctgcgggaggggtgcgcaatgcagagaggggatgcccagctagatccggcgtcttggggcgcagcggtaggagttgccaaggtcgaggggtgaggaggccagcggagggtcaccgggatggggcagcgacctctggagaggtggtgtctgccggggccagagactgcaagactgagcgcggacaggaggtcccgggttaaatgtggcacagctagggagtgcctgtgggagaggggagaggagagaggggagggcctccgggaggccgaggctgtgtgcagagcctctgcacggcaccgggatgggggctaggggtgcgcaggctgggtgcggtgacctgaaacacagcgaaggcggcctggggatggccacccgggtgaggcagggtcccttatttacccaggctagaggatgcgccttcccatttcgcgcaggccctaggagcacgcggaggcagccaggagttctcctgggaagggcagattccctggcggtcccgggaatgagttcccagcgcagggtcaggcagtgacggagcggaggtgttgcgcagggccgggtactaggtggtcgaattcttccatccaggggcagggacgcagccagagtgcggagggaggtcacaggtcacacggagccccagtacctattatcccagaaaccactgatcctcctgggcgccccacccccaaccagggcaaagccacggggggctaagccgaatgaatgagtcatgctgggagcatgtgggggagcctccagcagcgctcagatgccttcaagcttccccaccacgctgggaggacaggggatatggggggttgcccacctgggagggtggcttggagtcctggctccgccccagcccccaccacaccagccacttgctctgccatctcagttttccatgaaaaagtgggtcaaactctttgaaaatggtcaataaggcagcgtggggtgatgaaaagacagatttggggaaggctctggagtcatggagtcttggctgagaatcccagctctgccgctccttagctgtgcaagctggggcgagtcccttattcctccctgagcctcagttttctcatctgagagatggaaggcattgcacatcacctggtgtccccaataacacatacaaagcccctgacctaggaagtcggaactcatttaaaggagtcagtgtcaacattatcattctcatcatcatggccattattatgatagatctgattttcctctgcgggcccagagctcaca

SEQ ID NO: 23777 - DNA, 770 bp, Artificial sequence
  DNA replication origin
ccctccccgccctgccttgggccaaatcccccccaggtcccagttcctccaggggttttgctgggcgggggcgtcgacgcagcccttctccagtgtcttgctgcccgcggtcgcacagtggtgcgttcccgggacacctgcgggccccggagatgtctcggccggcgctgtctggcttgtccgcagcccctccccacgccccgcggccctcccctgctttcacactgccctccccaagctacccaccctcgccaaatggcctcctcttggccaaagagcagcccgctgcgcgcctcctgcaaacgcggtctactccagcgccctgaccccaaggcgggcgggagagggtagccgcggccaagcagtccaggacgcgccggggagcctggaacgcggtgctgtccagagccattgcctgggcaccggggagctggactccctgctgaaccagctcagctgtcgcccaatcctagtgagtgggaaaagcaaaatagtcaggtattgtctgtcttcgctggagtttggaaagctttctacccaccttggtgtggctacatgttggttctatagaaagcgtatcctaaaatgacaattcctcccctccccccaccccatgcaagcagtggagaaaatcctaaaggctcagatgaaccccgggaacagtcacgagcagccttcatgtgcttttgaaatctcagttctccaaaccttttaaaatcaagacccatgatttgggaacaggtagcttttgctttagaaaatctctcccc

SEQ ID NO: 23778 - DNA, 1350 bp, Artificial sequence
  DNA replication origin
tggtgatgggaaaggggtggtgatggggatgggaaaggggtggtgatgggaagaggtggtgatggtgatgggaaggggtggtgatggggatgggaaaggggtggtggtgggaaggggtggtgatggtgatgggaaggggtggtgatggtgatggggaaggggtggtgatggtgatggtgatggtgatagtgatggtgatagggaaggggtgatgatggtgatgatggggaaggggtggtgatggtgatagtgatggtgatggtgatggggaaggggtggcgatggtgatggggaaggggtggtgatggggaaggggtggtgatggtgatggggaaggggtggtgatggtgatggcaaggggtggtgatggtgatggggaagggtggtgatgggaaggggtggtgatgttgatgggaaggggtggtgatggtgatggggaaggggtggtgatggtgatggggaagggtggtgatggggaaggggtggtgatggtgatggggaaggggtggtgatggtgatggggaaggggtggtggtggtgatggggaaggggtggtgatggtgacggggaaggggtggtgatggggaaggggtggtggtggtgatggtgatggtgatggggaaggggtggtgatggtgatgggaaggggtggtgatggtgacggggaaggggtggtggtggtggtggggaaggggtggtgatggtgatggggaaggggtggcgatggtgatggggaaggggtggtggtgatggtgacagtgacgggaaaggggtggtgatggtgacagggaaggggtggtggtggtgatggtgacagtgacggggaaggggtggtgatggtgatggggaaggggtggtggtggtgatggtgatggtgatggggaaggggtggtgatgaaagcaggtgcttcttcctgtgctgcaggcaccatccaggcctttccctgcatgaacttgatgggatgctcaccactctggcaagtggacactctcattattcctagtttacaagggaggatctggaggtccagagatgctaagtaacttggctgaggtcacacaggattaggatcccagcccaggcactggtctgtgtcttacccagcacctcacgcaaccaaatttcactctctagccttgtgcggaatggtgtggcccggcctctgaaccagccaggcttatactcccaggtggtgggtagtcgttaagctcctttgatgtgctagcctttgccgagtctttcacttcctttctgttccctctctctttgcaacaaataaatgtattaacgcaaactaaggcttagagccgtagaaatcaaacacatcagagtcaactctgtaggcaact

SEQ ID NO: 23779 - DNA, 1145 bp, Artificial sequence
  DNA replication origin
gataaatactgttagatggccagagtgtcttcctcgccttgtcctgtgagtctcgtaggtgcctgctcattcgcttggtcattcattcattcattcaacaggtattaatgcaatggagtctcctctgtgtcaggcagcatccagactctggggatgtataaatgaacaaggccaacaaaaatctcagctcttgcagggtggacagtcagatcggggaggcagatgagaagctagataggtcactaaaatattcagcatgttcaaagcagtaaatgctgtggagaaaaataaagcaagaagtgaggttgggtgtggggtagggagatgctgtcatagattgggtggtctgaggagacctgggcaggaaggtaatgtttgaacagagatccagggaacttaaaggggcaaattgcagggctatctgcgggaaggagcgagtgcaaaggtcctggggcagaagccatcaggtgtgttagaggagcagcagagctgctgtgggggccagagcagagggaggggatgtggactgccgatgagggtgatcacatggtgccgtgggccatggcagggctttgaacttttgccctgattaaaatggggatgctttggagggtttcagcagtgaagtgactggaccaatttccattttaaaaggttctccctgttgtggtacaggaggcagactcatgtgggtagtgtgaggtggggggcggggcaggaaggaagctactgctgtcgtctggtgagcagtcatgggagcttggggtggcaggggaggtggaggggacagggaagatactagctatattttgaaaatagagggctggtgtggtggctcatgcctgtaattccagcactttgggaggccgaggtgggcagatcgcttgagtccaggagtttgaggccagcctgggcaacatagtggatcctgtctttacaaaagataaaacaattagctgggcatggtggcatgtgcctgtagtcccagctacttgggaggctgaggcaggaggaccacttgaccccaggaaatcaaggctgcagtgagctctgatggtgccactgcactctagcctgggtgacagaacgaaaccctgtctcaaaagagaaagtacaggagaatcacttgtgcccaggtgacagag

SEQ ID NO: 23780 - DNA, 1055 bp, Artificial sequence
  DNA replication origin
gagggagaggaggggacgcatccatttccagggaggagggggaggagggacgcggtcatttccagggaggaaggagaggaggggatgcatccatttccagggaggagggggaggagggatgcggccattttcagggaggaaggagaggagggacgcatccatttccagggaggagggggaggagggacgcatccattttcagggaggagggagaggagggacgcatccatttccagggagaagagggaggagggatgcggccatttccagggaggagggggaggaggaacatggccatttccagggaggaggaggagggacatggccatttccagggaggagggggaggagggacgcatccatttccagggaggacggggaggagggatgcggccatttccagggaggacggagaggagggacacggccattcccagggaggagggggaggtagggtacatccttcctgctgcctctcttctgtgctcatgtgcatgcagagaagcagaaggaggggctcactctacctccccctcctcctgcctgccctctggtctcccatcaatgccagtgcactggcagcgcccagccagaagccagcagcaagagaacccaggtgaagccatggattggtatgaaccacccccaccccaagcacacagcagggaagaaaagagaggaaggtgagtggaagtgagggccagtggagaaaaactaacatgctgggtagtcgacgttccctctggtgtgaccccaagctaccttccagattcaccccctgcatcctctgtctccactctgcagggaaccacttggctcctctgaactacatttccccatatcccctttcatgtgtgtttctcgttagggttggccacaagaagattcctgggaaattctggagggcagaagggggcatgttgaaatattaatccaatgcaggttttgcacattgaagatgtcttcccctagatgttttttggccttagtttgagcaatcactagctgggaatgccctcctcaaagtgctcccagcagtctggccatggctccag

SEQ ID NO: 23781 - DNA, 1033 bp, Artificial sequence
  DNA replication origin
atgggtggttggaagggtggatgggtggatggaagggtggatgggtggatggaagggtaaataggtggatggaagggtgaatgggtggatggaaggctggatgggtggatgggtggatggaagagtggagggtggatggaagggtggatgggtggatggaagggtggatgggtggatgggtggatggaagagtggagggtggatggaagggtggatgggtggatagaagggtaaacgggtggatggaagggtggatgggtggatggaagggtggatgggtggatggatggatggaagggtggatgggtggatggatggatggaagggtggatgggtggatgggtggatgggtggatagaagggtaaatgggtggatggaagtgtggatgggtggatggaagggtggatgggtggatgggtggatagaagggtaaatgggtggatggaagggtggatgggtggatggaagggtggatgggtggatggaagggtaaatgattggatagaagggtggatgggtggttggaagggtaaatgggtggatagaagggtggtggatgggtggatggaagggtaaatgggtggatggaagggtggatgggtagatggaagggtagatgggtggttggatgggtggatggctggatgaatggaaggaaggaagaatgaatgagtgagcacctccccacagccgcctccctctgccagcctgcctgcttggctactacctcagcccccaccctggtgtccatgactgggtctctcccacttcctatcaggcattctcccaaaagctgtgtgtttatcttcatgaagtagaggctgacttgctacccaaaatgtcaacagcaaccaacacaatccaggatcacacacctgtggcagcaaagtcctaaatcataagtctggggttgaatcccaggacagcagcaccttctcagagggcaccaggggcactgcgtgggcaattccatgagtgcagatgcttcaactgcccagtccatggctgtcacaggtaagattacaaggccag

SEQ ID NO: 23782 - DNA, 1506 bp, Artificial sequence
  DNA replication origin
gcaatgagctccaggaggtgagggaggagccaggcactacctctgggaggtgagagaggagccatggaagtacctctgggaagtgagggaggagccaggcgctccctctggggggtgagggaggagccaggcgctccctctgggggggtgagggaggagccaggtgctccctctggggggtgagggaggagccaggtgctcccactggggggtgagagaggagccatggaagtacctctgggaggtgagagagaagccaggcgctacctctggggggtgagggaggagccaggcgctccctctgggggggtgagggaggagccaggtgctccctctggggggtgagggaggagccaggtgctccctctggggggtgagagaggagccatggaagtacctctgggaggtgagagagaagccaggcgctacctctggggggtgagggaggagccaggcgctacctctgggaagtgagggaggagccaggcgctacctctggggggtgagggaggagccaggagctacctctgggaggtgaaggaggagccaggcgctacctctgggaggtgagagagaagccatggaagtacctctgggaggtaagagaggagccaggcgctacctctgggaggtgagggagaagccaggcactacctctgggaggtgagacagaagccaggtgctacctctgggaggtaagggagaagccaggcgctacctctgggaggtgagagagggagacatgcattacctccaggaggagagggagggagacatgcagttacctgaggatataatgttgaaggcagaaggaacaagaagtgcaaaggccctgagacaggagagtgtgaggtttgaggaacgtatggtagtcagtggctggagcagaccaagtgagaaggagcaagtgaggtcagagtaaggaagaaggaatatcacggacatctttatgggtcatggtgagaactttgtcttttactctgagtgaaacgggagtgtatatggttaggagcaaatgtgatctgacttaggttttaacagactcattactgcaacgttgaaaacagattgagaagaaaaggaggaggagaggagaccccaaactacaccatacactgatgttaaagttcatgatgtattattctctggacctgtttccttttcaacaacattgagtggggagcctctgtcccacccacatcctgagactgatgtgagtataacatgctccattgtaaaagccagttcttcccatcattttatgctacgaggattcaagtcctggtgctaccacatgctagttagggaccctggaccaattatgtggcctctctgtgcctcagtaagatggggatactaatagcttccattccaaaaggcttctgtgagaattgaacaacataatccttatctagtatatagaacagcgtgatccagcataggaccccagtgaatattgtcagccataccagtagcttttgctctggcaacaaataacaccagatc

SEQ ID NO: 23783 - DNA, 1453 bp, Artificial sequence
  DNA replication origin
ttcataccgagtcggggagggtgaccactcacagagagaggcctgaatgaagggagtgaaataaaagttttcttcctacaaataagtgggagaaagaaagagggagagggagagggagagaggtggagagggcaggggagagagagagagggagaatttattagcaagtaggcattacttactaattctcatgcatgtaaaagtaccttgaatatgtgtacagggtctggacagaatttcattcaactttgtataataaagtggaagagagaacaatgaaaaattctcttctttttaagagataaacagatgtactctgggattgtttctggtattccctgtgggagacacctgagctaattccagaggcacgtccccacagctccaaggtcaggagctcgtgatccttgggttgtgaaatcaaaagacctggcgcctcctggacagatgatatttcaaggagatgccctcaggagggtggggaggcagttcctttctcattaaagataatttcaccattttacttttacacaggcagagggatcaatgacccctgcacaggctaggaggtgggagtgcattttgtgtgtctgaaaagcatcagggaagccagagtgggaaggaaggaaagaaaggagggaggacgggaagaaggagagaagagtgtcacagaaggagggagcagagaggaaaggagcggggggcatacaggagagaaagaagagggaaaaagaagagagaaagagagggagaagagatgatggatggaggaggacaaggaaggaaggaaaagggagaggtgaagggagggagaggagaagggagagaggaagatatggggcagaagagagaaagaagagaagagaaaagaagagaggaaccaaggatgaaatggaagaaagaacagaaagaggaaatgatggaaggagggagagagaaaagatggaaagtagggagggggagtgtgtgtttgttcctttttaatcctgagtaatagtccatgctgtggatgtgttgcagtttgtttaaccatttttttcccttgaaggacatctgatctatttccaggttttggcaattatcaataaagctgctgatactgtttggatgtcccctccaaatctcatattgaaatgtaacccccagtgttggaggtggggcctggtgggaggtgattgggtcataggggtggttttctcatgagcggtttagcaccatactcttggtgctgttctggagagagtgagtgagttcttggagacctggttgtttactcgcgtgaagcacctccctctcttgctctgttgcttctgctctcaccctgtgacatgcctgcttttgttttgcctttcaatgtgagtaaaagctccctgaggcctcccagaagccaagcagatgcctagcatcatacttgtacaacctgcagaaccatgagccagtaaagactctttgc

SEQ ID NO: 23784 - DNA, 1177 bp, Artificial sequence
  DNA replication origin
atgagaaatggcttaaacagcaataccaaagatgctcatgagaacaagtcagaggaaggggatttatcggaacttttagttgctcaactatgtcctttggcatttaaggtctttctttttattctatttttatcagtctatggctgcatttgcaggttttctccccatggttgcaggaggctgccgcagctccagacagcagcacagctcacatatcataagggagcagggtgggtgaagatgaaatttgcacgttgcatctttctttttatcagagaaatttttccccctagaagattctggcagacatcttacatctcatttaccaaaagctaggtcaatgtggctacctgtgactgctagagaggctaagaaaacaaacttctgtgattttcttaagaatgagtgggacctgggccctgcctgcaacaaagacagacactggaatagcatctgtcacagcaattcgaagagaaagaaaggcggggagggagagctatagggagggagagagagggcaagggggaaaaagagagagggggagaaagaggtagagaaggagaagagagagggagagaagagggaggaagagaaggcagaaagggagaggaagtggggaagaaagaggagaaaaagggaggtagttgggggaagagagggagagagacggggggaagagataggagagaaagagaggaaggggagagagagggagagagggctagaaaggagaggagcacaagagagggagagagagaaggagggagacagaagaaggaggagaaagaatggggaaggaaaagagagaggaagagaagaagcgagcaagaggagagaagggaaatggaagaagggagagagcgagaaggggagagagatcaagctggaaatgaaaatgcatgttgtggccacagcattacggtacttgggtgccaggctgcagaacgtgtgcagcacttccaagggaataggtaatatggatatgaccatacagacatctagacacattcccacataactggtgtgttcaaattgtttgtagctattgcctagaaataacatctgtactgttgcatgtgtaggactccatgcccttgtatgtcatatgtgtgaatctgcatctgtgtgtgtgtgtgtgtaagtatatgtatgtgaagagtgtgctatagaagtcttt

SEQ ID NO: 23785 - DNA, 909 bp, Artificial sequence
  DNA replication origin
agcgttggggatagagggtaggggatagagggagggggatagagggtgggggatggaggggggatagagggtgggggataaagggagggggatagagggaggggatagagggagggggatagagggtgggtgatagaggtagggggatagagcgtgggggatagagggtgggggatagagggggggacagagggtgggggatagagggaggggggatagagggtgggggatagagggtgggggatagagggtgggggatagagggagggggatagagggtgggggatagagggaggggatagagggaggggatagagggagggggatagagggtgggggatagagggtgggggatagagggagggcagccttgcctctgattgctaatgggaggcaggctggggtgggctccagtgcacaagtcctggcttgcatggctcaactccctacagtgctgagggaggcgatgctggactttcttaccaggacaggtgagggtgggggcttgaaaggggtcaggggccaaccattaaaaatggaatcagactctgtatcacagcagtgatgtagaatattaaactcagctctcaggacaccaaaaccactagggggtttctaccccacagcagctgccatatacaacacggtcatggagacacacacagaccatatgcaggcaacagcttgcattttgaatattactcaccactgtgagtcctgggctgcatcactcctcactggtgagcctgtctcctaggcactctggggatgatcaaagtacctgtattgtaggactgtcctgagaagtaaatgagagatgcttaacttagagcctgctgtgttgtaaatgcataaacatggaactcagttaatcatcattcactcaacagcatcggtctatcttcctgc

SEQ ID NO: 23786 - DNA, 1901 bp, Artificial sequence
  DNA replication origin
ctcagaaatcaaacacagttaaagtgcatttattctctggtcacattggggcttcacaaaatagaagaaaacacccctgtcactttaggaggctacaacccagtgagagtttattttatgactgtttcttaaagccaggtttacactagccaaatgaaatgaagaactgggcaattatgaatatagttcatttccagagacaaaataattctatgaagttgctgcagtccggcctatcagaaccaacaattctgttattttttagcttggccagttttcccaggggtgtttccccactgtggtaattgaagctggctgagaaaaccagtgggctgccggcagagcctgaatctccagccccagggagctgggagctctctctagctggggagagctcttcagattgacttccaacccccttaggctcggttcatgtttctctagtgtctccaggcttgtggggggttggggggtgggggtgaatgatggatttataattttttctggatcgttctctattgtttctttttgtttgatctttttttgtgtgtgttttaatgcaccggggctcaggtcgtcctctggagttctctggtaaggaggaatgttggtgacaaataggaaagtcaggcttcctttctgatgttggccagagacagtgagggtgggagcaggacctgcctgggccatgtgggcaggatgggaagaggtgggggcactgccaggcactgctggcttggagaaggggttgcagctggactctgagactttccttgtgaggtttctgatttcccaagagttggcttttgatctgcggcattctggaaagaggatcagaatcccgccctcaggaggcccagacccccctagggcccaagagacccctgcatcagtaacctgaacaggtgccactggaaggacagaagagaagacagagctttaaaaatcagtgggaaaggacgagggggcggggcagaggagtccaggacccctctgcctgcttctgcacagaaaggactacaagggcagggataagtctggggcacccgtgtttgatttcctgagtccccctagacttgcacacaagtgcattgaggaaagaaatcaaacagcgcaggaaaagcatggattgaaaaataaaatgttcctctatccctatgtgccattcctttccctttcccgaggtcatcactgttaagtttctggtgtggcatatgtatctctccccgctttttgtgcatcttgttaccgcgccccacccccaccccatgtacaaatgtcactatagatctttctgtgctaagccacatgggccccttaacctcccacgtatctctccccacttttttgcatctggggacggcgccccccacctcagccccatgtgcaaatagatctttctatactaagctgcatgggcctctttacctcaggtgttcccagcaatcaagaccagagcagggtgtgtcccacataggctgggggttggagagtgctgccccccccccgccccgcagggcctcgggagggtgaaggggccgactgggtctctgctccctgggaatctggccggaattccacagggctgcagggcccgccgcccagcgccaagaaagcgggtggccacatcgaagtttctcaacgggaggagcggattcgtctggagacgccgccttctccccgcgcctcttcttccagcactgccacacgggtcctggaaggatcctgcaccctctgctcagtccccgctcagtctctgctccgggctgggggctttctccacctgcccgggcgggggcgccagaggggaagaggggggactgcagggaaaggggcgggttcggggggactgtgcggggcaggaggtggtggagccggcggttggcatcgctggaggcaga

SEQ ID NO: 23787 - DNA, 1017 bp, Artificial sequence
  DNA replication origin
gggctggggcggctgcggggcgcgggggagatgccgaggggctgggctggggcagggtctgcaggtgcggcgggcggatcagcggcacccgctgcagacgcggtcggcgaaacgtcgtcccggccccagctcgagcagcggctccgggtggacctcgcagggatgcggagcggccggatcctgccgactcgactgctcggggccgccccagggtgtgggcggccggcagggaccgcgggtgagcggtgggcaggtctcaggactctctccggacgtgcggtccggggccgcgccgggtgctgggcgcgctacccagccaaggtgaggcaggagcggcgtctgcggtgctggcgctcggcttttgggaagctcccccactccgccccccaccgcggtctctgggggtccaggcggagggagctgaccctggagtttggagatctagagggggcgcaggtgcacctggagcgccggtgcagggctcctccgctccgatgggcgggtcccgctgggagtggcggcgcctttggggccagctgggggctccagcctctccaaggtgttgtctgagagcggataagagggtgtgggtaagagaaaggttctgaggatccacggtgtcccacttcctatccctatgtcagccaaactgtggtactagaacgagggacagcccggtgtctggttcattttggctccaaccgttgagtacctccctgcctcagctcagatcacctgtgcgaatagaaaatggcagtaacctttgcgtagcatccctatagccattccccaccagacacaggtgcctgtcagggtctcagagtggggaatcacatcctgttttcctggaaccctttccacctgagagctcttcaagccgagccatgaacacgtgcgactgaacattgctgagagaaacggaaaagttgcttttgctttcctagatgcctcacgcacagcctctagttccctggaaacccatggcctttgaagctgatggctcccaactagacccag

SEQ ID NO: 23788 - DNA, 839 bp, Artificial sequence
  DNA replication origin
agagagagaagagagagggagagagagagagggagagagagagagggagagagaggagagggagagagagaggagagggagagagagaggagagggagagatagagagggagggagagagggggagagagagagagggaaagagagagaaagagagagagagggagggagagaggaggagagagagagagagggagagagagaggagagagagagagagggagagagagagagagaagagagagagaggaagagagagagagacagagagagagagagagacatgcccaagactgcaacactatgtccatacaaattagcacacatagaaacatgttttaatacccacaatataaatcttttttattcccatgaactcagttctgagtagtctccaaacattggcagctcagtatttcctgggttccacaaagcctaggctggtcaccaatgtggtcatgcatttaggggcaaggcatggccactgccatcttagctttgacactcacctccttcagcacaggggtgaggggctccagctcccttatgtctggtaagaaaccccaagccccctccaggcaccctagcagcagacttgagaggaagtggatattcccttctaggtggggtattggacaagcgtgggtgtctgtccaggagcagcattgaaaaggcaggagctagtggcaaggtgaggagggtctttggaatctcaggatggtcccgttgtgaccctattacaggtcaaatcccctgagcacttgttccccaacaaggctgtcctttctctccaggaaaggacacgtggttgttcatggcttacacactgagacagtgtgc

SEQ ID NO: 23789 - DNA, 1269 bp, Artificial sequence
  DNA replication origin
ctcaggagcccagctggcctcacccagtggatcccgcaccagggccgcaggtggagctgcctcccagtcccgcgccgtgcgccggcactcctcagcccttgggtggtcgatgggactgggcgccctggagcagggggcggcgcttgtcggggaggctcgggccgcgcaggagcccatggtgggaggggggaaggctcaggcatggcgggctgcaggtcccgagcgctgcccggcggggaggcagctaaggcccggcgagaaattgagcgcagcgccagtgggccagtactgctagggagacccggcgcaccctccgcagctgctggcctcggtgctaagcctctcactgcccggggccgccagcgccggccggccgctcggagtgtggggcccgccaagcccacgcccacccggaactctcgctggtccgcaagcgccgcgcgcagccctggttcccgcccatgcctctccctccacaccaccccgcaagctgagggagcgggttgcggccttggccagtccagaaaggggctcccacagtgcagcggtgggctgaagggctcctcaagtgcagctggagtgggcaccagggccgaggaggtgctcagagcgagtgagggctgcgagggctgccagcattctgtcacctctcatcatgagatcggatggatttatcaggtgtttccagttttgcttcttcgtcattttctgtcttgtcgccaccagataagaagtgactttcgccctctgccatgattgtgagacctcctcagccacgtggaactgtaagtctaattaaacctctttcttttgtaaattgcccagtctcgggtatgtctttatcagcagcgagaaaatggactaatacattcactaacagttaacagaaagcccattaaaatcatgaaccatccaataatagcaaatcttggccaggtgtggggaattatgggttattactgtctgctggtggaagttgaattggcatagttacagtgcggtaactattcggtagtatctattgaattatttaataagtaagccctctagcctttcaagtcaacctcttctaataccttgagaaaaacgcacatgcatgtataacggagagacccagaaacacatcccatcattgttggcaggactgaaaagttggaaataaccagtgtctatcattgacagaagtggctgataaaactttatatctctgactgggcacagtgctcacacctgtaatcccagcactttgggaggccaaggcgagtggat

SEQ ID NO: 23790 - DNA, 1850 bp, Artificial sequence
  DNA replication origin
ctccatcactcaccagccagctgtgcaacttggggcttcttcagttctctcttctgtaaaatcgggccaataataagccgggactgtgtattacattatttagaagatgcaagccacttagaagagagggtgactagcagttgatgatgctccgtcttttttttttaaatatcagaattgttattctataagcacttggtcagggcgggggttgcagcatggatagaattctgtcagcaggatctgattccttttaatgctttgcaaaataacattcccagtacctgcaaagaactgaattcagccaacaacatagatgggcttggaggaagactctcccccagagcctccagaaaggagcatgactcagctaattttgacctttgtgagggaaaaaagcaggtgacctaactaaatcatgatccacccaggcttctgacctaataactgtgagataaacgcatgggcgctactttaagctggtatattttttagtaattttacattgtaatggatacactatggaaaggaaaccaaagaaaagaagcagaagaactgagagagatgctgttgccaaggctcttatagaacatatgcaggttcttatagaacatatataggtattagtgatgatgttggtgatggcaatgatggtggttgtagcaaagttcatggtggtgaagagggttgctggaggtgatgacagtggtattggtggtgatgttggagatatgtagttatggtagaaatggtggcgatgatagaggtagtaaaaattatgttggaggtgatggaaatgatgatggtggaggtaataaaggtgatgatggtggaggtaatggcagaagtgttggaggtgataacgatggagataatgaaggtaatgatgctggaggtagcaatggagtttttatgggtaatagtagaggtgatggaggtaatgttggagttggcagaggtggtggaggtgatgatggtgaaggtgatagaggtgatgatggtggaggtagcagtggagttgttattggcgatggtagaagtgatgaaagtggtgttggagttggtggaggtgatggaggtgatgatggtggaggtgatggagctgatgatgatggaggtatcagtggtattggtggtgatggtagaggtgatagaggtgatgttggagattgtggaagtgatgaaagtgatgatgatggagatgatggaggtaatggaggtgatgatgatgaaggtagcagtggagttggtgataagtgatggaagtgattgtggtggaggtgatggagatgatgatggtggtagcagtggtattgctagtgatggtagaggtaatggaggtgatactggagatggcagaagtgatggaggtggtgatggagattatggaggtgatgatgttggagatagcaatgctcttgttagtgatggcagaggtgaaggaagtggtggtggaggtgatggaggtgatgataatcgaggtagcagtggtattgttggtggtgatagaggtgatggagatgatggaattggtgaaggtgatggagatgatgatggaggtagcaatagagttgttattagtgatggcagaggtaatgcaggtgagggaattgggggagatgatggagatgatgatggtggaggtagcagtggagttggtgatggtagaggtggtggttgtaggggtgttagcagtgatggtaatggtgggatggtggtggggtgtcactaatggtggaggagtgggcctgagcaactggggcatctgtgagaaatgtgcgcttcaaaggaagatgagtttgggggatgtgaggctggtgcttctcaagagagcatttgatataatgctt

SEQ ID NO: 23791 - DNA, 2065 bp, Artificial sequence
  DNA replication origin
gctcccaaagtctctgtggaagggatcccagaaaataataattattctagtataagtaggtccatgcaatgcttaggataagtatattccataacacaaaaggtattcattgcttgcctgacatcccaattttatctagccacctgtattttctctagcaatactgctcacgttcctttgaccagaaatagattcgtggccccaacaggtagcaaaggggatgtgaagtgtggccaggggctgggcaactgcttcacagatgagctccacactacagaaggtggcataaagctctggtgattaaccagctgtccctgccatgccttgcgtgtgtgtgtgtaagtgttgtgtgtaagtgtgagaatgtgagagtgtatgagggcgtgtgtgagtgtgagaatgtgtgtgagggagtgtgtgagtgtgagaatgtgagggtgtgtgagagtgtgtgagtgtaagaatgtgtgagggcatgagtgtgagaatatgaaggtgtgtgagggtgtgtgagtgtgagaatgtgagggtgtgtgagggcatgtgtgtgagaatgtgagtgtgtgagggcgtgagtgagaacatgagggtgtgtgcgaatgtgagaatatgagtgtgtaagtctgtgtcagaatgcgagggtgtgtgagggcatgtgtgagaatgtaagtgtgtgtaagtgtgagaatgtgagggtgtgtgaggtcgtgtgtttttgagaatgtgtgaggacatatatgtgaggacgtgtgtgagaatgcaagggtgtgtgagggcatgtgagtgtgagaatgtgagagcaagtgtgtgtaagtgtgagaatgtgagggtgtggagggcgtgtgtgagagtgagatgcgagcgtgagggcatgagtgtgagaatgtgagggtgtgtgagggagtgtgtgagaggatgtgagggtgtgtgaggccatgtgtgagtgtgagaatgtgagggtgagggcgtgtgtctgagaatgtgagggtgtgtgagggagtgtgtgtgagaatgtgagggtgtgtgagggcatgtgtgagagtgagatgcgagcgtgagggcgtgtgtgagtgtgagaatgtgagggtgtgtgagggagtgtgtgagagaatgtgagggtgtgtgaagccatgtgtgagtgtgagaatgtgagggtgagggcgtgtgtctgagaatgtgagggtgtgtgagggagtgtgtgtgagaatgtgagggtgtgtgagggcgtgtgagaatgtgagggtgtgtgagggcgtgtgagaatgtgagggtgtgtgagggcatgtgtgtgagaatgtgagggtgtgtgagggagtgtgtgtgagaatgtgagggtgtgagcggagtgtgtgtgtatgtgtggtagagtgtgaccagtgttagtgtgcgggtgtgtataggtgtgtaagtgtgaatatgtctgtcactgtgtgagcaaaagcatgtgtgtatgcgttaggtgtgtgagtgtgtaggggtgagagagtgttagagtatgtctggatgtcggtgttagagtatgtgtgtagctgtgtgtgtgaatgtcagcgagtgcatgtatgtgcctgcgtgtgagtgtgtgtgactgtgttagagtatgtgtgggggctgtgtgcatgcgtgtgtgcatataagtgtgtgtgtgactggcactctgtgtggtgtgtgtgcgtgtgtgagactatgagactgttagagtatgtttgtggggggttgtgtgcatgagtgtgtgtatgagtgtgtgcatgtgtgtgtggcactgtgtgtggtgtgtgtatgtgactgtgtgtgtatgagtctgtgtctgagtagcgtgtgtgtgtgtgtgtgagtgtgtgcgagtatgtgtgtggagctctgtgtggtgtgcgtgtgtgactgtgtggcactctgtgtgtggggtgtgtgtgtgagagtgtgtgcgtgtgtgtgtgtggagctctgtgtgctgtgcgtgtgtgactgtgtggcactctgtgtgtggggtgcgtgtgtgtgagagtgtgtgcgtgtgtgtgttcttggtcattcgaatcagtacgctcctgcagcatctctctctgtt

SEQ ID NO: 23792 - DNA, 1010 bp, Artificial sequence
  DNA replication origin
cactcccgcagcccggtcggccgggcccgctgcgtctctgctgtccgaggcccgcccctgccgggtccacgccgccgcagctccggctctggctctggcggctccggctccgccgctgctcgcgctccggccgggacaacttttctcccgcagcctccgcagcctccgcagccgccggcccgccccgcccccggccccgcccccgcccccgcccgggccccgcccccgccgagccccgcgaccgcggacagattgagggtgcggtaggagagagttcgcctgcccgccgggaggggcggcagatggagaacccccccgcccgggctagggagggtgtgcccgggaaagaagaccgggagaggagggggcgtctccccaggcggctgggacggctcctccgggggtccgcgcctttccagagaaactcagcgttcgcagactcctgcccgggtgcccaacggacagcggcccgtggcccggagggtcctgcccagggacccgacgctcaaggcggagctggactccttctccccaccctcccgtggtcactgcgggacctggtggtcgtcacgccccattcctcaacttcaggtggccgctgctttagcctggagggctggggacatctggaatgcaaagtcccgcgcagctgctgcggggagagctcctaactggatcactgagcgcggaaaagcagcgcgcagcggagcgtgaaggcggggtgcgggctcaagacagatgcgggtgtgcacctgtgcgtgtgcggagggggcgaggcacgagatcacagcggtgtctctgggaaggggacgagaacgcagaggggaagaaaggatcatttttcactgcatgtctgtggggcttccactccccaatcatctccccgccgcccatagcatgtgttttattatcttttcagtgggtggagaatagcccctctctagacttgctcctgcaataggcaatttctctgcagactcagacaaggaagatccgccctcccccccccc

SEQ ID NO: 23793 - DNA, 1235 bp, Artificial sequence
  DNA replication origin
gcgggggcggggccgggggcggggcgggccggcggctgcggaggctgcggaggctgcgggagaaaagttgtcccggccggagcgcgagcagcggcggagccggagccgccagagccagagccggagctgcggcggcgtggacccggcaggggcgggcctcggacagcagagacgcagcgggcccggccgaccgggctgcgggagtggccccgggcatggggcggccggcgggggccgcgggcgggcgctgcgcttcgggctggcggcgggctgcgtgagcggccgggacgcaggatgcgctccgagggtgcggcccccgggccggcggcgccgctgtgcggggcgctgagcctgctgctgggcgcgctgctgggcaaaggtaaggccggggcgggtgcctggcgcgccgacgcatgcgaacttcccggttccgggggagctcggggtgagggcagccgaagcgaggggtgcggcgggggcctcggcgggggctcggatcccatcaacagcgcctctgcgggtgccgagccgcccctaatccagaagggcgctcccagctgggcgccgggatccgggcaagttaggctggtcccgagtcccgaatctcccaccccggaccccccagacccagagctgccccgcggatgaggagggggcgtggctgagggacacggtgtttgttccccatccctgagttccgtgcggacctgccccagccccagcacagtcaccctgtggaactggcatccaggagaggtgctccgctctgtgcgctccttcctcccggctgtgtgctccctgtccacagctccccatccacagcttcggcactgtggggctggtgctccaggagggaaggcccggttctttgcatcccctttccgcaaccgctagggtctctgtgcgggccctagaggaacgctcactcatcgcgcagctcaccagggaccccagcttggcagaaaccaggggctctctgcgggttctctcaaatgagtcctttgcggtgggggagcgcggatggggaggtgggtgcgtccctcgcgacgggaactacctcaccagcggtcctgtccggggctccttcacctcagtgtcctcttctctacaatgggagtgacggccctgctttgggttggaggaatttaaaggagttaacgtatggcgcccgcagggctcacgaaaggtagccgtgtggtttttccgaccttttttattatgtgcgtgtgcggccg

SEQ ID NO: 23794 - DNA, 1457 bp, Artificial sequence
  DNA replication origin
gcacatgggtgccctgagccttcgcgcggcgccgcgggtccagtatcggccccaggctctgagcagagaacactcaaagccacccttctcccgcctaatgctctgaggctgagctagaaatgcgttcagagagacaagttgtcaatggaggtttaaaagtagcgtttgcttttcaaaagtcattctgcaccgcctgaaaatccagaaaaatctactttccttgaggctgcgctttcccagatacaccaaccagacaagtttgctatgttttatataagtgttcctttcttccaagagctccaggtagggaggagggtggggtgagagaggggggggaagaaggagtgagagaagagggaaagagagggtggggcgagagaggggggaaagggggtgagagacgagggaaagggggggcaagtcgggggtggaggagtaggagaggggggcacttttctattttatttgaaagagtcaacagtcacgatctggtgcctgaattctgctgttaattagctctaggttccagcgtttctaggattcagttttcctagatgcaaagtggccattgaagaattcccttcccaacctacctcccagcagttttttgttgataaaatgactgaatgggtagtaaagcactttgcagaggaaggcggtgctaattgagcagggcgtgaccgacctcctccgggttttcaccccttgcccttgagagaatttaaccaggcgaactggatgttccctttaaagcaagtgtggactgttcttcattaaggctcacattccgtgtgtgtgtgtgtgtgtgtgtgtgtgtgtatccagaggattttacttttgattacgagagtggctgttacagatgtccatgtgttcagtgctgggggcagtgatttggctggaaaggcaactgggactggatttgaagctgatatttgcacaacaagggaaagtgctgaaaactagggacgtagcgaagccccacccctatcccaaaccgcctctgccctctagctaagtgcaaccttgatttgatggggctttctttccctgctttttgctttacaaagttcaccacgtgatttgggggtgcataagggcctgcaacttatcatctgcaaaatacattttccgtttgtttctcatgatcaaaagcagcagttcattcccccctcggattcctccacacgtaaagcgtttgcaccgtaagatatcttctagagaggaaagtttgctgaccttgtttacatttctgctgtctttaaaaaaaaaaagccatctctgtctcttcctgcacacggatttaagtgctgatttctggaatccttgaaaccactgattaatttttaataccaattgtctgtttatttttgactgtggatttagaggctttgcaatttgtcagggttcggaaaaggcagaattgttcttgggaggttccataaataggacagggc

SEQ ID NO: 23795 - DNA, 1536 bp, Artificial sequence
  DNA replication origin
accagcagcatctgcatcaccagggatttcttaaaaatgcagattcccaggtctcaccctagacttgccaaaccagatgctctggggtgggactcagcaatctgtgtttcagccctgggcagattaagcccttcagaagatgtggatgtttcctcgagtttaagaaccatggttctaaaattttacaacaggatgattcatccatgcaaggaattagtgtaacagggacccgagatgacaataaggtagtttgttatcaagagcatcaggcattttcaagataacatggcctgcagtgggtgactggtgatccccaaaagatacttcaacatcctggaaactgtcaatgtgaccttctttggagaaatgatttttgcagatgtaagtaagttaggcatcctgtgatgagatcatcacagactttctaggtgggtccttaatccagtaacaactgtccttattggagacacaaagaagaggctgggagcagaagacacgtgaagatgaagacagaggctgaagtgaagacgaaaacggaggctggagtgaagatgaagatggaggctggagtgaggatgaagatagaagctggagtgagaattaaaatggaggctggagtgaagatgaagacagaggctggagtgaagatgaagatagaggctggagtgaagatgaaaatagaggctggagtaaggatgaagatggatgctggagtgaagatggatggtggagtgaagatgaagatggaggctggagtaaggatgaagatagaagctggagtgcagatgaagacagaggctggcgtgaggataaagatagaggctggagcaaagatgaagatggaggctggagtgaaaatgaagatggaggctcgagtgaagatgaagatagaggctggagtgaagatgaagaaggaggctggactgaagatgaagatagaggctggagtgaagatgaagacggaggctggagagaagatgaagataggggttggagtgaggatgaagatagacgctggagtaaggacaaagatggaggctggagtgaagatgaagatagtggctggagtgaagatgaagatggaggctggagtgaagatgaagatagtggctggagtgaagatgaagatggaggctggagtgaagatgaagacagagtctggagtgatgctgccacaagccaagggatacctaaagccagaaaatgccagaaaaggcagcagatccttccctagatcctccagaaggaaccaaccctgtagtgtctcacagtcctggaggctagaagccccaaatcaacatttctattgttttaagccactacattttggataatttgttacagtagctccaggaaattaatgcactgccagacttcatatatatgtgggctcctggtcatgtgaacctcaagaatggctacatcatcagggaccattttataactaacagcaaatgggatgaaaaacactgttcccaggcaaaggagcctgcacacctgctctcaaataaatccaggccgaagctgacccccaga

SEQ ID NO: 23796 - DNA, 1247 bp, Artificial sequence
  DNA replication origin
gcatcctctgagaaatcagtttaaaggctgcaatttcgtcttagagtaaactgtttaggtgggatccctggactgagggctgtggggaattgaataacactgtgttcacgctggaaatggaaaacatcatccttgttgaaaaatagttttagtcccagaagcctccctgtgctgaagtgttacaaagcaaccgtgacagctgttctttcactttctccaattccgagccttgcttgggagggagggtggctccgggttcaccaggtgcaggggtgggaggtccctggctacctccatttgcaccgtgcaatgtgcattctttcaagaaacacccaccaagcacctgcaatatgcaaggcagttcttaaaaaatggggggcacagcagccacaaaacaaagaccccatgtcccgtggagctttcattccagtgtgtgtggggttggggggcaggggatggggggagagttacagtggctctctgtggtgaatatgcagcccatagcacgtggctcagcactgagtgatgctcccgagatgtcagctgtcacggactcataacgggcacatccccttttatgtggcgcccccctggggtggggacactgcccagagtctgtgtcaagctgtgcagggcgaaggactcagtgctgacccaggagcaaatgattctcagactccacagagttcagggacgcctgcggtggaggtgggggctctcccttggctgatttctttgttccctcttgtttcctcagtgggtggtgggggaggggcggtgggtgggccggcattgagagcaggtcttatgttggggtacagaaggagccccattgctctctaactcaggagagccagaggttggagctcaggctcctaccacacctgccagcattctttccatgatttggtaggcaagcaggaagccttaggctgtgacgagatgagagagagatggaaactaaaatgcactggaggtttgaagctgtacaggagagggaaagagtctgcattggcccctgtactatgtctctcatcttcagaattgttcaagggattggaacctggtggaatgagtggagaaagagatggggacccgtaattagggtgcagatgccctgagctgggtgtcgaatgtgcctcagctcacacagtcctcaaaacaatgccgtaaagtaggcaccggcctcctgcagaatcaggacctgccccagtgcacagagctgctggagcaggaccggaacccag

SEQ ID NO: 23797 - DNA, 1455 bp, Artificial sequence
  DNA replication origin
ggctcccaggggtcagcattgagcaggggagaccagtccagaggcagatgatacatccaggtgtgagatgatggggctaggctgagactggaagtggtgaggtggggggagactgctgcatttgagatgcatttcgagggatggcacagatgggcaggtgcgataccagagtgtgcggcaggcctggggagacctggctgatgccaggattctgcacctgcacctgaacctgcacctgcacctgcacctacacctacatcctagatttctcctgcagcagcagctccgtggccacctcaagtggtgcagctgctggccgtgagctgtccagcagtttcacagccatttttggcctccttttcatggcactgaccaggacccagcactttctgggcacggaggcctgactcctcggcggagggagctgggacactgcagagcagagctgcagggcggggggaggcatcagacctacagtacctgctgtctggggttgaaggcagcaggacaggggacccagggctcacaggggctttccgaatgatggtcacaggattaatgttcacaagataatgcctggggtgccggtgcttgggcacaggaaccttatgtctgttatgctcgttgctgtttccctagagtggcactcaccagtcccccagggagtgtctggtgggagactaggaggcaagagactcaagggtaaaatgagatagagacaaaatcccagctgtcagggagccagcattccagactggggtggttgggggagagggataaatatatacacaaatgaaaacataaggaagataatgtcagataatgatcagacagaacaataattttgtcaaggctaaaatgagagagagatgaaattccagctgtcaaggagccaacattccagatttcagcggggaggggagtaaacatacaaacaaatgaaaacataaggaagataatgtcagacaatgatcagacaaaacaataattgtattggatatgccaaaaatcagatcaggcaatgtgctggaatgggggcagggaacgcagctgtcagcaccatcttggggcaggagggcctccagggatgaggtgggcaaggagtccttaatgaagaggaggaggaggtgaggtgcctctcaggatggcacagtgaggacaaagatgccgggtgaggagagctggcagcatctgcaacaaggcttgcacacagtaggtgcttactagggagaggcccttggtggctcctcccttgactcggcaggctggggtggcagtggggctggagtgagcgtttccttctgtatgcagcaggcctgagctatttctctgtgtgggtcgtgggcatctctagctagcaggtgaggtctgagaatcttttctcagaataaagtttttaaaggcatgcagtaagatatgtgtgctcacacaggaaatcaattgtattgaaatgca

SEQ ID NO: 23798 - DNA, 1249 bp, Artificial sequence
  DNA replication origin
gtgctggaaggggtttgcctggggcggggtgaggtctacacacacagtgatggccacagtggctttaaagaaaagagaggccgggcgcggtggctcacgcctgtaattccagcactttgggaggccgaggcgggaggatctcttgagcccaggactttgagaccaggttgggcaacacagtgagacctcatctctaccaaaatttaaaaatttgccctccgtggaggcgcacacctgtagtcctagcagagaaaggaggattccttgagcctacgagtttcggaggctgcagtgagctagggtcacaccagtgcactctagcttgggtaacagagtgagaccccacctcaaaaaaataaataaataaaatttaaaaaatacgctgagcgcagtggctcacgcctgtaatcccaacactttgggaggccgaggtgggtggatcacctaaggtcaggagttcgagaccagcctgaccagcctggctaaaaatacaaaaattagccgagcgtggtggcgggcacctgttctctcagctagtcgggaggctgaggcaggagaatcgcttgcacccgggaggcagaggtgcgatgagccgagatcgcgccactccactcctccagcctgagcgacagagcgagactctgtctccaaataaaaataaataaataaataaaaaataaatgaacgggacccttctatgttcaggccctgtaagttcagaccagaaggctaggaaagagcagttgtttgaggagctttccagacatggggattcgcaggtgcagggccctgggccaggaagctgagggaaggggaagcccccgttgttgccttagcttcctttacaaagaagtgggaaaacactcatattgcgtcttcgtggctttaaaggagttacgggctaggttgggtcggaaagctcagatgaaaatgagtttgaatcaagttagcatcaagctgctcccctgcaactgtaactgccaagaagtgagggaggaaccactgcagctcttcaggaggggcaaggacgtggccaccaagtattatatgcagaataggccgcctttaagagcaatagcaaagtcagatcgtttcagaaaatataaaaaaaagtgggaagtgaggtggaaggctggggccggatcatgtgaggagtgttaaagcgttggggatacagtcgagagctttactgggttccagcagggagtgatttgtgcagagcaggcactacagctggggtagcaggtca

SEQ ID NO: 23799 - DNA, 1007 bp, Artificial sequence
  DNA replication origin
gcggcggcggctggggcgttcgcgggccggcgcgcggcgtgcggggccgtgctgctgacggagctgctggagcgcgccgctttctacggcatcacgtccaacctggtgctattcctgaacggggcgccgttctgctgggagggcgcgcaggccagcgaggcgctgctgctcttcatgggcctcacctacctgggctcgccgttcggaggctggctggccgacgcgcggctgggccgggcgcgcgccatcctgctgagcctggcgctctacctgctgggcatgctggccttcccgctgctggccgcgcccgccacgcgagccgcgctctgcggttccgcgcgcctgctcaactgcacggcgcctggtcccgacgccgccgcccgctgctgctcaccggccaccttcgcggggctggtgctggtgggcctgggcgtggccaccgtcaaggccaacatcacgcccttcggcgccgaccaggtgagccgcgcccccgcgcgctgtccctgtccctgtccagcccctgcccagccccagcctcttcccctgccccagtccctgcctctgaccgcggagggagccccttgccccggggggcttctgtctagtgccgaggaatcccgccagcaggtgggccaagactggaggtaccggtgtgatgggtgctggaaggggtttgcctggggcggggtgaggtctacacacacagtgatggccacagtggctttaaagaaaagagaggccgggcgcggtggctcacgcctgtaattccagcactttgggaggccgaggcgggaggatctcttgagcccaggactttgagaccaggttgggcaacacagtgagacctcatctctaccaaaatttaaaaatttgccctccgtggaggcgcacacctgtagtcctagcagagaaaggaggattccttgagcctacgagtttcggaggctgcagtgagctagggtcacaccagtgcactctagcttgggtaacagagtgagaccccacct

SEQ ID NO: 23800 - DNA, 1316 bp, Artificial sequence
  DNA replication origin
tagagcgccaggctcagcaggatggcgcgcgcccggcccagccgcgcgtcggccagccagcctccgaacggcgagcccaggtaggtgaggcccatgaagagcagcagcgcctcgctggcctgcgcgccctcccagcagaacggcgccccgttcaggaatagcaccaggttggacgtgatgccgtagaaagcggcgcgctccagcagctccgtcagcagcacggccccgcacgccgcgcgccggcccgcgaacgccccagccgccgccgcggccgccgccgcccgccgcgcgcccagcagcggcgcccgctcgcccgcaccgcccccagagccctccatgcgacgccgccagctgcctcgccccgccgccgggtcacctgtcccagaacccagggccgccgcccttctcgcgagactgccgggcctgagatgtccctattgggcgggctcgccgctgctcaacgccccactcgccggaacttccggccccgccccgggcactaggcgaggaggtggccggtattctggatcactgcgtgtcttggggagcttgggattccgcagcttggcggccgagagcctttgtttgcctttttgagacagggtttccctctctcgcccaggctggagcgcagtcatgcggttacgcctcactgcagcctcagcttcccaggatcaagcggccctcccacctcagcctcccgggtagctgggaccgcaggcgctcgccgctgcctgtggctaatttttaaacagttttttgaaatggggtctcgctttgttgctcaggttggtctcgaactcctggcatcaagcgttcctcacgtctcagcctcccatagtgttggaattacgtgcatgagccactgcaggcagtcggactaagggagtttaaacaaagaagccggagcctggccctcttcgggcttcggtggggcccagtaggcagccaaaactcacactgagacggcggctgctctccaggcgggtttgctcaggctgcccccgtgctccctgccctgggcttcagtcctggagaggacccggtttctcaacccgtgcatcgttggcactttgagcgacgggactgtcctgtgcgttgcacgatgttcagcagcagctttggcctctgctatccactaggggccagttccaccccctagcacctcaggttaacaaccgaaaatgtcttctagactttgccgaaggactcctgggggcaaatacgcccccattgagactcactggcttagaacaaggcaagctccagcctgtttcaggctttcccagagactgcccctacaccatctatggttg

SEQ ID NO: 23801 - DNA, 1629 bp, Artificial sequence
  DNA replication origin
gaggccaatgcgccggccgcacggagacccggggacacgcgcgccacgcagaaggcaccgacccccgcgcgcccggcaggcggcaccggcccatccgtttgtgcgcgcggctcgggacggccccggcgcggctggagggggcctggctgagcgccccgcgtccccgggtcccgcgtccccgccccccggcccccggcccaggcttcgtaggccccggcgccctgcacctaccgaacgcgctgggccgtgaccgcgttgccggtgtgtggccgcagcaccgccaggaacaggagccgcatgccgccgccgccgcccgggccatcgaccggccccgccgccgccgaccaggccccggggccggcgcagacgcggacggcgggggagccggggcggctgggtctgtcccgcccgcccctccccgaggccgcgccccagctcgcaggttccggcgccaggcggggagggggacaggaaccgggggcctcgggcggcgcgagccctgggtgcggggtggcgcgggtgtgccccgtggggtccatcaccagggtagccgcggtctgtttccacctggaccaggaccagcggtgaccacagtcccttccacggggaccaggaccatcggtgaccacagtccctcacacggggaccaggaccagcggtgaccacagtccctcccaagaggactaggaccagcagtgaccacgttcccttccacagggaacaggcagcggtgaccacagaccattctcacggggaccaggaccagcggtgaccacagtccctcccaaggggaccaggaccagcggtgaccacagtcccttcccacagtgaccaggaccaggggcggccttggtcctttcccacagggaacaggagcaggggtggccatggtccgctcccatggaaaccagtgatggcttccatgggcttcattgggaaatcagggcttcacggaacaccgggttggctgcaggtctgtgcccaccgggaccagcagagacctcgggttccgtcccacagggtgctgcagagaggggctctcagcctcattttccatgacaacctgagtggggccttggtccgcacgaagcccaggattcctttctagtcccattccagggaacgtggcatgatcagtcccaaattccttcccaggctagactaccctaaaactaacccgaggaggggaacatggggactgtgtgaggagacagtagaaacccatttcagggccgcacctgtcgggtgagaaagatgttggagaggggaacctggggttcatcagggtacatgggctgcacctggtctggatctccaaactaggataccttgagtgagagaaatagggaactgaaggaggcctctggcaaaatgccatctgtggatttaaacaagcactccccaaaacagctgttaagtgtttacaaagatgcacatgtatttacagatgtgggacattctagtgggtgcccaatatttccattgaccttcaaacttgattttctgtcatcccctaaataccttccagcctcaaaaaggtaaagtgggaatgaagaaagccatgacatgggataaccaccgtcagtggcaggtctccggcctccctacgcagcatggtgacccccaggc

SEQ ID NO: 23802 - DNA, 1101 bp, Artificial sequence
  DNA replication origin
cggccccggggcctggtcggcggcggcggggccggtcgatggcccgggcggcggcggcggcatgcggctcctgttcctggcggtgctgcggccacacaccggcaacgcggtcacggcccagcgcgttcggtaggtgcagggcgccggggcctacgaagcctgggccgggggccggggggcggggacgcgggacccggggacgcggggcgctcagccaggccccctccagccgcgccggggccgtcccgagccgcgcgcacaaacggatgggccggtgccgcctgccgggcgcgcgggggtcggtgccttctgcgtggcgcgcgtgtccccgggtctccgtgcggccggcgcattggcctcgcgctctccggaggggactgagcaggtgaacaggcccggagcctgtcgtggaggggcccgggaaggcctcgctgcagaagcaggatgggagcaggatccgcagggatgcgcagcggggtccgcggagctcccggcgggggcgcgtttccaggccggggaccgcggtgccagccctgccctcgcggatcgggtctcggctgtgtgccggcgtccggggtcctgtccccgaagtccctttcccacctcccctctgccctgtctattctcgtcttcctggctggttagctccttcacactcatctttttctgcctttgtcttatttgtttacttgttggtctgtgttctggtcgctggaacgcaagcccggcgggggcccggggaggggccgccgcgttaatcccgccgcctcccacccgcacagcgggcgctcggcctgtattagccggataaacatattccttgaggcgaagcctgggaagtgccaggattagagcctgcagcttaacagaagccgtgtgtgtgtgtgtgtgtgtgtgtgtgtgtgtgtgtgtgtgtgtaaaagcggacttgcttcatgaaatttcccgatttacttcccttctgtgggcctgtttccccatcaatttatttttttgaaatggagtctcgctgtgtcacccaggctggagtgcagtggcgcaatctgggctcactgcaacctccgcctcctggattcaagcattctcctgcctcagcctccc

SEQ ID NO: 23803 - DNA, 938 bp, Artificial sequence
  DNA replication origin
ttacatgggatctaagcacccaggcaggagtaggcgatcctgtcgttttgccgcgtggcactcagcaccagaacctgtgactggcatgaaactgtcagagactacttgctaggcatggggacaaaatccgacaggtgccaatgattgggcgggatgactgctgtcatctgcgactttgaaaagaaaaagaaatgagagcagttaaagtacaagtgtgtggcgtgctgcatcgctcactatcagatgaaaataaaaaaacacgccctctggaagggttgcgccttgtacgccggggcataatcatcccttccagtactcactgagcacccagtccatatcagagtccctgcgagggacagctgatgagtaaacatgcctgactgctgccctcgggaagcttccaggctggggactggtgtttatagatggcaaagagtgcagtgtacacagacacaggtgcggggacagaggaaacccaaatgggaaccccagtcacagtgggtggccacgaaaagtccttccaaggtgatttcaaccaagaaacatttgaggaggtgccagccgtgggcgcagctcggttagagacagagggtgagcaaagctcaggtgccggacagagaagcctggaacgaggagggggcagcgcaagctgtgcaaggcctcagaagccaggccagcagtggcattttcttctaggtgcaaaggggaagccaccagagggtcctcagctgcagtggatagaagcggactttgacttggtgcctgtggctgcggggagggagtgggcgggctggaaggaggaggctgctggaacagcccaggcaagaccctacagcccctcggtccgggagtgcagtggagatggggtccagctgcgtttgcagacagagctcaggagaagtgggacagatgggaagtggggctcaggggagagggcg

SEQ ID NO: 23804 - DNA, 2024 bp, Artificial sequence
  DNA replication origin
gcaagtgagccagaggtgctgctgtggttttggctggagcagctgggggtgccgttcatgaggtgggcaagtctggggagaggtggcttataggaggtagctgagagaggagcggtttggagggggtaggtgaggtaggagtggtttggaggaggtagctgagagaggagcggtttggaggaggtagctgagagaggagcggtttggagggggtagctgaggtaggagtggtttggagggggtagctgagagaggagcggtttggagggggtaggtgaggtaggagtggtttggaggaggtagctgagagaggagcgggttggagggggtagctgagagaggagtggtttggagggggtagctgagagaggagcggtttggagggggtaggtgaggtaggagtggtttggaggaggtagctgagagaggagcggtttggaggggatagctgaggtaggagtggtttggagggggtagctgaggtaggagcggtttggagggggtagctgaggtaggagcggtttggagggggtagctgagagaggagcggtttggagggggtaggtgaggtaggagtggtttggaggaggtagctgagagaggagcgggttggagggggtagctgagagaggagtggtttggagggggtagctgagagaggagcggtttggagggggtaggtgaggtaggagtggtttggaggaggtagctgagagaggagcggtttggagggggtagctgagaggagcgggttggagggggtagctgagaggagcgggttggagggggtagctgagaggagcggtttggagggggtaggtgacataggagcggtttcgagggggtagctgagggaggagcagtttggaggaggtagctgagacaggagcagtttgcagggggtaggtgaggtaggagtggcttggagtgggtagctgagagaggagtggcttggagcggggagctgagagagaagcagttggagggggtggctaagagaagagtggcttggagggggaagctgagggaggagcagtttggaggaggtaggtgagagagtagcggtttggagggggtaggtgaggtaggagcggtttggagtgggtagctgagagaggagcagtttcgagggggtaactgagagaggagcagcttggaggaggtagctgagggaggagcagtttggaggaggtagctgagagagcggtttggaggggtagctggtactgctgttgccccactggtgttcccttgtcctctctcggcctcagagcccggcctttctcaggggtggcaacttgctgagatcaaaaagtctgcaccttctggctttcctggcagtttggtttaggcatgtgactaagtcctggccaatcagataaaagtggcatcttcggaaggaacttccaggaagggcctttaaaagttctggctcagccgagaggggcccacctcttacctctccttccggctacctggaatggctatatggtagttggagcttcaggggccactttgtgacctttgggtagaaaaagccttggtccctgattacttcatggggtctctgtgtcaggcctgagctgtccatctttcaatgccttttatgtgggagaataaggcccgttatgtttatgcagctgttattttgtgatttccgttctgtgctgctgagtctactcttagggggaggaatgaacagtagaacaaaaaccaagaacccgtgtggttagaatgagttacaggtgccttttaggtacccatccagaggtgtggaatagatacttacatacacatgaatggagcttagggctaactcattgattaattattaatcctgttgccacacaataagaaacaaatctctttttcatgtcctacaaattactttcctcatgagcttgcaaagccaaataacaaggactgtccttcaagaaatgttccagacgaaatgtatttgtaccataacgaccattacaaatcaactggtcactccatttgcataggtacaatatctgggcgat

SEQ ID NO: 23805 - DNA, 2115 bp, Artificial sequence
  DNA replication origin
ggcacggtggctcacgtctgtaattgcagcactttgggaggccgaggtgggcagactgcctgaggccaggagttcaagaccagcctggccaacatggcgaaacctcatctctactaaaaatacaaaaaattagccggccgttgcggcgggtgcctgtaatcccagctcctctggaggctgagacacaagaatctcttaaacccgggaggcagagggtgcagtgagctgagattgtgcagttggactccagcttgggcaacaagggcgaaactccatctcaaaaaaaaaaaaaaagactatatatgtatataaagtctcttctctcttggaacttacatgctaatggagagagacaaatacaagggatgtgtacgtgagttgtgtgtgcgggtgtgtgagtctgtgtgtggggatgcggatgtgtgtgagtgtatgggggtgtgtgtgggtgtgtaggtgtaagtgtgggggtggggggaagtgagtctgtgtgtggggctgtggatgtgtgtgtgggtgtgtgagtctgtgtgtgaggtgtgggtgtgggtgcgggtgtgaatgtgtgtgtgcgtgtgggggtgagtgtgtgtgggcgtgttggtgtaagtgtgggggtgtggggggatgtgagtctggggatgcagatgtgtgggtgtgagtgtgagtatatggggtgtgttgggtgtgtaggtgtaagtgtgggggtgtggggagatgtgagtctgtgtggggttgtggatgtgtgagtgggtgtgtgagtctgtatgtgaggtgtgggtgtgtgggtgcaggtgtgaatgtatgtgggggtgtggggtgagtgtgtgtgtgggtgtgagcatgtgggtgtgagtgcatgggtgtgagtctgtgggggatgtggaggtgtgtgtgtggggatgtggatgtgtgggtgtgtgagtgtatggggtgagtgtgtgtgggtgtgtaggtgtaagtgtgggggtgtggggggatgtgagtctgtatgggggtgtggatatgtgtgtgggtgtgtgagtctgtgtgtgaggtgcgtgtgtgaatgtgtgtgggggtgtggggtgagtgcgtgtgggggtgtgagcatgtgggtgtgagtctatgtggggggtgtggaggtgagtgtgtgtggggatgcggatgtgtgggtgtgtgagtgtatcggggtgagtgtgtgtgggtgtgtaggtgtaagtgtggaggtgtggggggatgtgagcctatgtgtggaggtgcggatgtgtgtgtgggtgtgtgagtctgtgtgtgaggtgtgggtgcaggtgtgaatgtgtgtgggggtgtgggggtgagtgtgtgtgggtgtgagcatgtggatgtgtgtgggtgtgagtgtgtgtgggtgtgagtgataagtgttataaagcaaaataagtaaggcgagcagaatgcctgcagcaggggtgctcttatttacgtggtagtcagagaggggtatttgagaagatatctgaaggaaatgatgcagaaagacacaaagaatcacaggaaagagtgtttgaagcaagagtgatgagctgggtgggcaggaggacacagtgggaagtgacattagagagcagacagggaccaagaatggggtagggcgagtttgactttccctctaagtgatatgggagtaatcagacgattctgaagacaggagaggcacaatctggcagatgtcctaaaagaaacaatctggctgctctgcaacaaatacatgagagagagtcaaagacggaagaggagagaccaggtagcagaccatcgcaataattcggggaggtttggggcagaagagtgccataatctgacttgtttttagtagatttatctggagcagggcaagagtggatcaagggagaacaggtagaaaatcagtgcaataatccccagagatgagggtggtgagaagtcctcagaggctgacagagccagaagggtttgcttatggactgactgtggggaagggtttgctgatggactgactgtgcggcgtgatggaagcggaagagtccaggtgactccagggtcttcagctggagcatcgggataaatgaagttgtcattgacggagacggggaagatggctgtgtgagcgcacta

SEQ ID NO: 23806 - DNA, 1342 bp, Artificial sequence
  DNA replication origin
tcaaaactgaagaagttagtccacaaggaagggttcaggtggcacaacaccatttaaatttcaagagaagcaagtctggtctgctgggatattattaagggagtctgtggcaggcagagtcaagcttggcaaagacgtcagtgtcctcatccctgcagactgtgaatgagttaggttacatgacaggggaaagtgaggttgctgatggaattggagtcgctaacagctgatgttgagatggggaagctatcctgattattcaggtggggcagtgtaatcaaagagcccttaaaagtggaagagggaggcagaaaatgagaatcagagggaggtgagactagaggaaaaaagtcagagatgcaacacggctggcgctgaagatgcagggaagggtcttgggacggcctgcagatggaggaagggagtctcaggcttgcagatggagggaggggtcttgggggcctgcagatggagggagggggtctcaggcctgcagatggagggagggagtctcaggcctgcagatggagggagggagtctcaggcctgcagatggagggagggagtctcaggcctgcagatggagggagggagtctcaggcctgcagatggagggaggggtctcaggcctgcagatggagggaggggtctcggcctgcagatggagggaggggtcttgggggcctgcagatggagggagggagtctcaggcctgcagatggagggagggagtctcaggcctgcagatggagggaggggtctcggcctgcagatggagggagggagtctcaggcctgcagatggagggagggagtctcaggcctgcagatggagggaggggtctcaggcctgcagatggagggaggggtctcggcctgcagatggagggaggggtcttgggggcctgcagatggagggagggggtctggggcctgtagatggagggaggggtctagggcctgcacatgtgggggcctctggcagctggaaagtcaaggagagatattcccctagaacatccagaaaacaaggcagccctgctgagaccttgattttagcccagcgcaactcaggtttgtttctaacctacagaactgtaagataacacatttgtgttgttttaagccactaaatttgtagtcctttacagcagtggtgggaaactaatacagattctgagcccatatcctagctctctgttctcagtggagcagcccagagctcttgctgtcctgccggtgagaccccctcagacctcaggacaggctccgggtgctgcctccgcacaaaaggtgtagtctcaggtgtggcctgtggtctccagcaagctgtttcccctcct

SEQ ID NO: 23807 - DNA, 2182 bp, Artificial sequence
  DNA replication origin
tcacatcccttgtaagttggattcctaggtattttattctctttgaagcaattgtgaatgggagttcattcatgatttggctctctgtttgtttgttattggtgtgtgagaatgcttgtgattttcgcacattgattttgtatcctgagactttgccgaagttgcctatcagcttaaggagattttgggctgagacgatggggttttctaaatatataatcatgtcatctgcaaacagggacaatttgacttcctcttttcctaattgaataccctttatttctttctcctgcctgaaaaagaaaaagaaaaaaaaccctcaacagggaccagatgagcctgttcaaagaataaaagaaggccagtgtggctggagtataatgaggaagagaagggatgaaatggcaccagcccagagacttaggaaggggcttgattgtggggcttgctaggaccttcgtttgatcccaaggtgtgatcagaagcagctggaggactttttgccagggagtggtaaccatctaaaggtcattctggtgctgggtaaaaaacagactggggctgggatgtccaagagtgagaggaggtagagctctgtttggagacatttgcttacccaggtgagatgtgatgattcttttaatttgggtggtgatagcagagacagagggagtagagggatctgtggtgcatttaggaggtcaatcttaatgttgggcaatggattggatgtaggaggttggctgataagaactctgaaaagttgagataggagataacagacgttggtctcattggcagagtggtcctgtttaatgctggtaaactggatgaggtcactggtgagagggcacagagagaggagaggagagaaagggaagggaggggaggggaaaaaggggaagaagagaaaatgaagaggaaaggagaggaagggaaggatagagaggagaggggaggggagaggagataagagaaagggaaaggaaaaaagaggggagagaaggagcgaagaggaggggaagtggaggtgagaaaagaaagggaagagaggggaagggcagaacaggagaagagaagaggagagaagagaaaggaaggggagaggagggaagaggagaaaggaaaggagagggatagaaggaaagagccaagtcctgatccacaggtacccagcccctgacaggctgtgcacaggaggaggagcgagccaaggaggctgagagaggagccccagtgtggccgtaggacatccattagctaagccaagaacatatttcaaggaggcaggagacatctatgcctaatgctgcttcttggtcagtaaagatacgagtactgaaatgaccatccaatatggcagcacaaaggccatcatcagtggccttcacaagagaagtctacatagaggagccaagacaaaaatctctcagagcagattgaaaagggagttcattcagtcactcagtgcacctatttattgggcacctactacatgccaagccaggcagtaaatgtaacagacaaaggtcccccattgcagtgcttatattatacttgggaagagatcatgaatgagatgagtcctgtgagggatgtgtgctacaaagtagaagagaaagattgtaagagggacagctgtgcctgggaggggaggaggtagaaatttgggttaggctggtttgagaagacctggctgagaacatgacatgtgaaggaagagagggactgagcatgtggatttctggggaaagagcactacaagcagaaagtgtagcaaccgcaaaagccctgaagtgggagggtgttgaggagccccaagcaggccaggacagctggagttgaaagacatgaggggagaagaggagagtggcatcacagaagccatggggagcccgaacggcaggaccctccgtgcgcagccatgagggccgggagggacaccggggcttacccccagggcaatggagagggtgtgggtgaggaagtgcagacagttctttcagagggtgtggtggattacttaccatgcttatagttctaggtgccaaattcggaccaaaatcacatttccccaggagatccgccccacattttgcccattttcaagagccaccttggctcccccatctaccacaacactggacatttgttcttttagcttcctagcattcaaaccact

SEQ ID NO: 23808 - DNA, 978 bp, Artificial sequence
  DNA replication origin
tgatggtggaggctctgcagagtcccggcgagtgatgatggtggaggctctgcagagtcccggcgagtgatgatggtggaggctctgcagagtcccggcgagtgatgatggtggaggctctgcagagtcccggcgagtgatgatggtggaggctctgcagagtcccggcgagtgatgatggtggaggctctgcagagtcccggcgagtgatgatggtggaggctctgcagagtcccggcgagtgatgatggtggaggctctgcagagtcccggcgagtgatgatggtggaggctctgcagagtcccggcgagtgatgatggtggaggctctgcagagtcccggcgagtgatgatggtggaggctctgcagagtcccggcgagtgatgatggtggaggctctgcagagtcccggcgagtgatgatggtggaggctgcaagggacaccctgatggtgaaaactgggtggcaccggttgatgtgttggctatggagccatcaatgcttgctgatggattgaacacatgtggggaggtggaattaaggacccgtgcttgtaagtggagtagaagacattggtttctactccttggttcttctgcctttggagcagacatgggattgagagccttacagcaaggaaaacgagactagaaatgcacagctggcagtgggttgtctttgggatccaggcctctgtcccttgctttatatccacaactttcctttggtctcacatgggtggaggctttccttctcccaatgactttgagctcgagcttcgctgtgtgcattgctttggccaaggggctgttggtggatgtaaaaggaggtgacactgaacacgtgcttatggggttaggttttccctctggtgcttctgccatgattatgagaaaaatacgctccagtggcctgctggtcctggagaaaaaggaagcatctggaatgggcctgagcccaacccaaaagctggaact

SEQ ID NO: 23809 - DNA, 1581 bp, Artificial sequence
  DNA replication origin
aggcgcagcggccggcctgggatgggggctgcgggccagggagccccgggccgcccagcgagcccggccacccgcccggggggctccgagccgcctctgcccgcgtcccgggctccgcagccccgccaccccggcgccgcctgcgccagcgcccgctagccagcccgggagcagctggagccgccggagccctgcgcctggaggcgcccctccttgggccaccgggggccactcttcgctcgggtaaacaggaaaggaaataccccctgtggattaaaatttaaaaaaaattctgttggggtcgaaggagggaggtggggtttgcctgcgcgcgtgttggactccggagagcaactcaggagcccgcgcggtcgtcgcctcccggcctggccatggactggcgggaagagggagcagggcgcccgggctgctcgggcccctagccgggcgctccctcgccaccggccccgctgcgggcctctaggggactgagacggtctcttgttcgcctggacggcgccggggagcggaggatctgcgctccgggtctccaggatgtgcccgtctgagatggggacgctgtggcaccactggtcgccggtactcatcagcctggccgccctgttttccaaaggtgaggacgccgcggccgccagggcccggggactaacttcgcctggagtgagtgtgtgggagtgtgtggaggatgggggcggccgggagagagggctcgtgtgcaagtgtgtgtgcgcgcttgtgtgcatgtgtgtgtgcgcgcgtgtgaacgtgcgctcgtgcggcagccaagctcctcggacgccccttggccgaaggtgcttgtcctggagcacttgggtgggaggccttaggtgagactactaaggagccgaaaggaaaggaaggctgtttcctgaaagccttttctgtaaagggagagggcgtggggacccttgagaggaaaggtggcctctggagggccgagccggctgtcgggggaggaggggattgagatgaccagggagatttctggaatttgggattgactttccctggtggcactgacctatttggaaataattttggagcactcctgttgtatgggaatactattttgtgtattataggctgccaaaaatatagcctggggggcggctctgaagaagggggatgggtttctccaggtctgccgctgtgaggtttgggcacagggtctggcgctcacccttccgtagggtgctgggagcagcagcggccccgcagggtgcacgtggagtttcagctacaagttgtgacccgaattttcccagcggagccctgacttgaagccatgtgtcaaggcaggaattcctcaatgtttcctcttctcttctgccagcatccctgtctgtcatgggaagagcaagtttggaagctctggacagtcattcttccttgaagagaaatggtgtgatttgtgcgggagattctttctcatgattgacctgggctgcttgtgtgtggttcccccacccgtgcccctttcctgcagatagatacactgggaggagagtgaagcgtctcagcagtctctaatacgtgctg

SEQ ID NO: 23810 - DNA, 1031 bp, Artificial sequence
  DNA replication origin
cgggcccggctggggctcgcggggctctacgcgcgccgagcgcactgcaggctccggagacgcggggctcccccctgcgcccgggggaggcgggccagatgtgcgcggaggagggcccgccggctcggggacgcggccgagcaacgcagctgcctcctgccagcaggcgcgggggctccgctccgcaaggaccgcatccggaacggaacggaggcgatcgccacggtgcccggagccggctggggctttcgccttaaaaatttgtctgcttttaaaaagccccaccctttcggagtgacagctgtgagccccaatccgcaaagtaaatcccacctccccctggccgccccacgcccagcctcccggccaccctccctgcgagcgcggacgcgcggtggcggcgggcgagggctcccagcgcgggcgcaccccggggacggagccacccactctcccaacaggtgtccagctggccaccggcctctcgtcgtcatcaaaacctcaggcccaggggaggtcctccagcccgggggcacctgaggctcttcgccagggagagcgcaaggatggctggagaagggccctcgccccgccctgcgcatctcccagggatcgcagtgaggaagtctctgacacgccacactgaggtcatgctggccccaagccccttcccagagcgatcccccaagttagtgtccctagaaacatgtcgtgtgctccccagggctcactgggaaaggaaatggatccattaggagacaacattgctttgagaagataaaagacatgattctcaacaccgcccggaatctccaactaagacattcccacaccaagatccctaagcaccgtcctgtaatttgtagcccaagaactgctttgctccacgagagcctttaaattaaccccatcaaagctcagagggaagaaaagcattcagaatttttaaggaatattgtaaaccaacaagccctgaatctaatgaggtgaattcacctcagtagataaaaatgggtcgttatcatctgact

SEQ ID NO: 23811 - DNA, 843 bp, Artificial sequence
  DNA replication origin
tgctgttgggggcccaaaatataggagggtggtgatgaagacaaggatatctgacatggatgggccactgcagtccatgacacacctctgtggattagtcataaggtgttttcctgcctacagactcgacacttcagtccctgctttctgctcagccaaggtttgtgcagtgcacaacctgctcaactgtactgaggccttgaacccaggagcttgtattttaatgagaaatacacagcacatgcagggataccaagataacagggcttggcccttgccctttgggtcctcaaaagtcaggtgaaagaataagcaaatccccctgggttccagagccaggttcttgggaagttacttggccacgatgggccttgagctagcctcgagggtcaagtgcagaccttgacaagtcgagagggtgacatattctttcaggaggaggagggagcaaagtcagagcagaagagggaacagctggtggtccagcgtggcagggtttcagcagaggagatgtccagtagtctggcatggtagggtctcagcagaggagggaacatcccatggtctggtgtggcagggtctcagaggagggaatgaatagcagtggtctggcgtggcatggtgttggcagaggaggggacgtccagtggtccggcatggtagggtcttggctgtgggatgctggactgtcacccgtgggggtaccgattgccaggatgtggatttggggctttattcttgtggcggtagggaaccaggaaaggtactcagcaggggcggcaccagtgctatggtgtagtgtgatcatgagatctgagacagacattccccaaaaccttctca

SEQ ID NO: 23812 - DNA, 875 bp, Artificial sequence
  DNA replication origin
tgcagggagggcgcagctggagaggcctgtgtgacccccgtagagtgtgtgggtgtgggtgtgtgtttcacagtgtgtgaagatgcatgtgggtgtgtgtgaggatgtgtgtgtgtgcatgggtgtgtgtgtaaatgaatgccccactgtatgcatgcctgtgagcgtgtacgtgtgtaaatgtgggagtgaatacgagtgtgggattgcgtgagggtgtgagagagaggatgtctgtgtgtgtaaggggaacaatcttagcctacacggcaagtcggccataaccacagcgacgctccccacgtgtggggctgctgtgtggatggtgctgggcctggcgatgggatgtaacttgcaccctggcttggaggggtgtgtcacggggggtgtgtcacggggtgtgtgtcacagggtgtgtgtcacggggggtgtgtcacggggtgtgtgtcacggggtgtgtgtcacgggggatgtgtcacggggggtgtgtgtcacggggtgtgtgtgtcacggggggtgtgtcacggtggctccatgagaggcctgagagcagcaaccacagccaagtgagcaaccctcagcagacagcagtgtcccagcagtgagccgctactacacaccagccgtgtgcccagctctccccagggccccagatccaacacaaaggagagggagccgcgctcatcttcatggaaggggatgaagccaaacccgccgtcgtcactgaggagggctgcgtgggaggcggtgccgatggggtggaggtgaggatgacatgaagggtggcaccctgcatttttgagctttctctgtgccaggcaccaggtttcaatcgtgcctccttaaacctgcacccagccctgcaagctaggtgg

SEQ ID NO: 23813 - DNA, 809 bp, Artificial sequence
  DNA replication origin
agctgcagaattcaggccccgccctgcagtgaccagcctgtccgggctccggggttcagtccaggtcaggccccacggccgctggtattgggccgggctgccaggtctggaagtgctggggagaaggagactgcagccaggcacccgcagggctgggctgttacggtgggatcgtgagaagggccctgaacagggatctgagccccctgtttagctgcattccttaaaagtggttgtgagtagacggggtctctaggttgaggtgtgagctcccgtcccctccgtgatgcctcacagggcttgttgtgcgcgagggaatggtgtcctccggcccagcacacgggcagcatccaaggcactgggtcaggcgaccaaggagctacctgcactttcgccagcccagacaggggacgggacaccggaggtctgctgccagtggggcttgcgtgtcccctctgaggccagacctgggggtctgcacggtgcagggagggcgcagctggagaggcctgtgtgacccccgtagagtgtgtgggtgtgggtgtgtgtttcacagtgtgtgaagatgcatgtgggtgtgtgtgaggatgtgtgtgtgtgcatgggtgtgtgtgtaaatgaatgccccactgtatgcatgcctgtgagcgtgtacgtgtgtaaatgtgggagtgaatacgagtgtgggattgcgtgagggtgtgagagagaggatgtctgtgtgtgtaaggggaacaatcttagcctacacggcaagtcggccataaccacagcgacgctccccacgtgtggggctgctgtgtggatgg

SEQ ID NO: 23814 - DNA, 1645 bp, Artificial sequence
  DNA replication origin
cccgggcgacggcaaatgccagcccatcgagatcccgatgtgcaaggacatcggctacaacatgactcgtatgcccaacctgatgggccacgagaaccagcgcgaggcagccatccagttgcacgagttcgcgccgctggtggagtacggctgccacggccacctccgcttcttcctgtgctcgctgtacgcgccgatgtgcaccgagcaggtctctacccccatccccgcctgccgggtcatgtgcgagcaggcccggctcaagtgctccccgattatggagcagttcaacttcaagtggcccgactccctggactgccggaaactccccaacaagaacgaccccaactacctgtgcatggaggcgcccaacaacggctcggacgagcccacccggggctcgggcctgttcccgccgctgttccggccgcagcggccccacagcgcgcaggagcacccgctgaaggacgggggccccgggcgcggcggctgcgacaacccgggcaagttccaccacgtggagaagagcgcgtcgtgcgcgccgctctgcacgcccggcgtggacgtgtactggagccgcgaggacaagcgcttcgcagtggtctggctggccatctgggcggtgctgtgcttcttctccagcgccttcaccgtgctcaccttcctcatcgacccggcccgcttccgctaccccgagcgccccatcatcttcctctccatgtgctactgcgtctactccgtgggctacctcatccgcctcttcgccggcgccgagagcatcgcctgcgaccgggacagcggccagctctatgtcatccaggagggactggagagcaccggctgcacgctggtcttcctggtcctctactacttcggcatggccagctcgctgtggtgggtggtcctcacgctcacctggttcctggccgccggcaagaagtggggccacgaggccatcgaagccaacagcagctacttccacctggcagcctgggccatcccggcggtgaagaccatcctgatcctggtcatgcgcagggtggcgggggacgagctcaccggggtctgctacgtgggcagcatggacgtcaacgcgctcaccggcttcgtgctcattcccctggcctgctacctggtcatcggcacgtccttcatcctctcgggcttcgtggccctgttccacatccggagggtgatgaagacgggcggcgagaacacggacaagctggagaagctcatggtgcgtatcgggctcttctctgtgctgtacaccgtgccggccacctgtgtgatcgcctgctacttttacgaacgcctcaacatggattactggaagatcctggcggcgcagcacaagtgcaaaatgaacaaccagactaaaacgctggactgcctgatggccgcctccatccccgccgtggagatcttcatggtgaagatctttatgctgctggtggtggggatcaccagcgggatgtggatttggacctccaagactctgcagtcctggcagcaggtgtgcagccgtaggttaaagaagaagagccggagaaaaccggccagcgtgatcaccagcggtgggatttacaaaaaagcccagcatccccagaaaactcaccacgggaaatatgagatccctgcccag

SEQ ID NO: 23815 - DNA, 1002 bp, Artificial sequence
  DNA replication origin
agccaggtgtgtgtgagggcgccacagtgagtttaattttagatatgtttcatcgcagctgcttgaaggtgagtaggcagtgtgtcagggagcccttgggaaatgaggcaccagctcaggggacaggtctgggggagcaccagagttagagctcagagtgtggtaggagccatgggagaggaggtctgtcagggaaggaggggctgacccagaaggggactcagggcaacaacatctgggtcaggagaaagcagagaagggaggagtcctccatgcacagaaatccaggaaggaggaatttctggaggagagtgggcaacagtgtgacacgctcctaggacatcaaacaggataggaggggcagttagcccagccatttgaccatggacggtccaaggtgactttttagacataagttccattagagaacgttggggatttgagacacagactggttgcaggtttggggggcggggtgggggaaagggcgcttgggccacctggtaggagggtagtcatagcttgagaaaccttggagggaagggcagtgaagggggtggggggcattcggctcctacagagaagtcctggctgcaagaattaagaggaaggaatgaataccaagcgtccagtagaggtgactctttgggaaggaagaaggattttgttccaaagaagagatggggatcactgtggattttgtttataatcagagagtgtggatgttgggggcattttggcttatgttctttattttttcttgtggaggagagagcagaaatcttggatttaatgggtgggaaatttgtacaaatccggagcagccacccagaaacatatagagaagttttgccgtgtgaattcatcttcaggataagccatgtgtgttcttgcttagaagatgacgatggatattatggccctgggggcctttcacctccagatttgggaaaatgccttttaagaactctttggagaaaacaggcttaaagaagatgggct

SEQ ID NO: 23816 - DNA, 1442 bp, Artificial sequence
  DNA replication origin
gtccgcctgcagggggctggcactgggggaactgcaggagtcaagccagggaaggccgggggtctgggcgaagcagaagaggaacagggcggggcctgggtggggctggccggggcctgtggggagggggcagggcacgtgttgggtgtctgggcggggccaggcggggtcttggggggacaggggcggagcctgtggggcgggggcggggcctgtgggggcctgggcgtggcgtctaggcagggccaggcggggtcttggcgggatgggggcggggcctatggggaggggccagggcatgtgcggggtgtctgtccggggccaggcggtgtcttggggggccaggggcagggcctgtggggcggggcgggcctggcttgttgggcctgtgccgggtgtccgggaggggccagacggggtcttggaggggcggggccggggcctgtggggcggggctcctctggtcccgccccggccacatcagaaaccgccgtttgcggggcagccaatgagggcgtggcgcgcgccgctttccgccgttactgggcgtatggcgtacagacacgaggccggcgcccgggaggcggtgttcatccgcccgggaaaagagcgcctgttgctcgctgcccgcgtgtccctggctctctcgggaacccagcgccgaaggcgaggtgggcgcgggccgaaggaggtcctgggaggtcggcggcgcggagggatctccgcgggagccgttggggctgttggcctcgggctgaggtgcaaggaccaggactagggcgagggcagcggtccaaggtgcggggccaggctgaggtgctaggtgtgcgggggccgggatgcgggggcggcggctgggggtccgggatgtggaggtgaggctcgaggtgcggggaccgggttgcgggggcgaggtcccaggtgcgggggatgcaggagccgggtgcggggtcgaggtcccaggtgcgggagatgcaggagccgggtgcgggggcgaggtcccaggtgtgggagatgcaggagccgggtgcgggggcgaggtcccaggtgcaagggatgcaggagccgggtgcgggggcgaggtcccaggtgcgggagatgcaggagccgggtgcgggggcgaggtcccaggtgtgggagatgcaggagccgggtgcgggggcgaggtcccaggtgcgggagatgcagaagccgggtgcgggggcgaggtcccaggtgtgggagatgcaggagccgggtgcgggggcgaggtcccaggtgcgggggatgcaggagccgggtgcgggggcgaggtcccaggtgtgggagatgcaggagccgggtgcgggggcgaggtcccaggtgcgggggatgcaggagccgggtgcgggggcgaggtcccaggtttgggagatgcaggagcctggggtgcaggggccggggtgcgggggcgatgtatcagg

SEQ ID NO: 23817 - DNA, 1240 bp, Artificial sequence
  DNA replication origin
taagaaatcagctaacaacatgccttcaaatcagtcagacaaatacggtgtcatccttaaatgtaaaatcatctacagtttctccttactcaacctactcaattttttcaaaggataagggatattccacagagttctttgcctttcccctccaccccgacaccttagtggtcctcttggtttcagaggctcagcaatttccccttctttacttctaggcaggatgaaaccaggttcatgacattggtctttttttccagtttgaaattagtagtaaaaatacaaaagtaaaaaaaagttggggggtggggggagaggttgctagaatatatgcaaaccaaacaatggttactgcttggatgggaactgggatgagggagttgaaggaattgtcaatgcttggatgggaattgggatgagggagttgaaggaactgtcaatgcttggatgggacttgggatgagggagttgaaggaactgtcaatgcttgggtgggaagtgggatgagggagttgaaggaactgtcaatgcttggatgggaattgggatgagggagttgaaggaactgtcaatgcttggatgggaagtgggatgagggagttgaaggaactgtcaatgcttggatgggaactgggatgagggagttgaaggaactgtcaatgcttggatgggaattgggattagggagttgaaggaactgtcaatgcttggatgggaagtgggatgagggagttgaaggaactgtcaatgcttggatgggaactgggatgagggagttgaaggaactgtcaatgcttggatgggaattgggatgagggagttgaaggaactgtcaatgcttggatgggaactgggatgagggagttgaaggaactgtcaatgcttggatgggaactgggatgagggagttgaaggaactgtcaatgcttggatgggaactgggatgagggagttgaaggaactgtcaatgcttggatgggaactgggatgagggagttgaaggaactgtcaatgcttggatgggaactgggatgagggagttgaaggaactgtcaatgcttggatgggaactgggatgagggatttgaaggaactgtcaatgtttggatgggaactgggatgagggagttgaaggaactgtcaatgcttggatgggaactgggatgagggaattgaaggaactgtcaatgcttggatgggaactgggatgagggagttgaaggaactgtcaatgcttgga

SEQ ID NO: 23818 - DNA, 1903 bp, Artificial sequence
  DNA replication origin
ggctgaggcaggaggatcacctgagcccaggagtttgaggctgcagcaaactatgattgtgccattgcagttcagcctgggtgacagagcgagactcaaaaagaaaaaccaaaatgaaaagaagacattcttcaggaaagggacatggaggtggaaaacgactatgcattccatatggagaaaagggaaattgttcccttattttagaccatgcaaaaatcaactcgctctactctagagatttaaagttataaacttctaggaaaatacagatgaacatatttctgactttgggttagagcaaaagttttaaaacacagaaaactctgtctataaaagaaaaactggcaaatttggacaaggatatgctgtaaattttattaagttcaaaaccaactaaaaataaatagtaattaatactgacccatgtacatttgttaaaactttttcaacaggcaagggaatgataatttcaacagcatccactttggcagcagagaggtcaggagacaggaaggggtggtgtgcatgggtgaatggagacaggaagggggtggtgtgcatgggtgaatggagacaggaaggggtggtgtgcatgggtgaatggagacaggaaggggtagtgtgcatgggtgaatggagacaggaagggggtagtgtgcatgggtgaatggagacaggaaggggtggtgtgcatgggtgaatggagacaggaaggggaggtgtgcatgggtgaatggagacaggaagggggtggtgggcatgggtgaatggagacaggaaggggtggtgtgcatgggtgaatggagacaggaagggggtggtgtgcatgggtgaatggagacaggaagggggtggtgtgcatgggtgaatggagacaggaagggggtggtgggcatgggtgaatggagacaggaaggggtggtgtgcatgggtgaatggagacaggaaggggtggtgtgcatgggtgaatggagacaggaagggggtggtgggcatgggtgaatggagacaggaaggggtggtgtgcatgggtgaatggagacaggaagggggtggtgtgcatgggtgaatggagacaggaagggggtggtgtgcatgggtgaatggagacaggaaggggtggtgtgcatgggtgaatggagacaggaaggggtggtgtgcatgggtgaatggagacaggaaggggtggtgtgcatgggtgaatggagacaggaagggggtggtgtgcatgggtgaatggagacaggaagggggtggtgtgcatgggtgaatggagacaggaagggggtggtgtgcatgggtgaatggagacaggaagggggtggtgtgcatgggtgaatggagacaggaaggggtggtgtgcatgggtgaatggagacaggaaggggtggtgtgcatgggtgaatggagacaggaaggggtggtgtgcatgggtgaatggagacaggaagggggtggtgtgcatgggtgaatggagacaggaagggggtggtgtgcatgggtgaatggagacaggaagggggtggtgtgcatgggtgaatggagacaggaagggggtggtgtgcatgggtgaatggagacaggaagggggtggtgtgcatgggtgaatggagacaggaagggggtggtgtgcatgggtgaatggagacaggaaggggtggtgtgcatgggtgaatggagacaggaaggggtggtgtgcatgggtgaatgcagacaggaagggggtagtgtgcatgggtgaatggagacaggaaggggtagtgtgcatgggtgaatggagacaggaaggggtagtgtgcatgggtgaatggagacaggaaggggtggtgtgcatgggtgaacggtggctattgccatggtttagttccaggattgggagatgggctcaagggggcttatt

SEQ ID NO: 23819 - DNA, 1410 bp, Artificial sequence
  DNA replication origin
ccagccgtgcttcctggggggcggcctctccgggccgggctgggggtcgtcgttcctgaggaggccaccagggcccacctgctccccaaagtcctcctccacgctgctctgccgggtcagcgtccgccgccgggccagcagcggcctcgggcccctcctgcagggacagtgaccagggcctgggctgcacgcggccacggtgtttccgaagccaaaccgcgactcgtcctcttcactcccacagtccaggccgctgtccgggctccgggtggccgagcggctgaaccgacagcccctgtcttccagaaggaagtcctccacgtgggggacggcccccgagcccctgtgcttcaccgggaaccaggagccccgaggggcctcgtcgcccctgtagggcctgccgggcctgggctctctggccagccccgtcctggccctgggggacggccctgcaccctgcttgtgtagcagcccacagcactctccgtcctcttccgctacttcggggatactgaaaagtctcttcctgtggggctggtggggaaactcgggctgctcccagaaagtgccttccgaggtcctatggtcagtgcagtccttacggggtggtgtgtcaagaacaggcgcgggaaagagtgtgtggtcagcatgaagtgggggccaggggaggaaagaaaatacagacagaattagtcctggaggcaccgaggggggggaagcatgcgtctactcaggccgggggcatgccgtggagggctctgcaatgaaaacagaatgggttacggggctggggcggggtggaggctgaggcagagcacacgcagagccagcgggccgggcaggagccagcgccatgcatccagccaaggagagggcaggtgagatcccggcggcacatcaggccccacagtgcccacggtaccgctgctgtagatggtgggtgtggccacggtgccaggggagactgcccgggggctacatcctcagaaaccctgagggcagctgccactggaggccgtgtgtgactggagacagttcaccagacacggagcctgacccgtccctgtccatccactgggccaacttcccttccagcgctcggcaccctctgcaggactttctagttaggctgacgtgtcacccttctccctaagatacaagctgcgtgaaaccacgccatccccggccccaccaacagcgcccgcacaccatcgtgcagagtctgtgtcagcaaaggactggggtccgcctgtctcctctgcatcctgcatcaagtccctgagagccacacttgagccatcacagtctccagtgggtggcacagagctggccacaccgggagctgcttaaccagaccagtgtccatgacttttatactgcccgtctgcacgccatcactctctgccgggg

SEQ ID NO: 23820 - DNA, 1502 bp, Artificial sequence
  DNA replication origin
cgcccgcccctcatcctctcaccttttcttctctcttttctctccctctaccctctgcccggaccgcatattccccatcttaccaccccatgaaactgagcaaaactgaaagatgaagagaccaggtctgatgacatcgttgaacctgagaatccatttctgcgtgtgtgtgtatatgtgtgtatgtgtgtgtaaatgtgtatgtatgggtgtatgtgtgtaatgtgtgcatatatgtgtatatgtggatgtgtttgtgtgtagatgtatatgtatgtatgtatatgtacatgtgtatgtgtgtatgtacattgtgtgtgtatatgtgggtgtgtgtgtgggtgtgtatagatgtgtgtaagtgtatgtatgtgtgtagatgtgtgggcatgcgtatgtgtgtatgtgggtgtgtgtatgtggatgcatgtgtatgtatatatgtgtatatgggtatatgtgtatgtgggtgtgtgggtgtgggtgtgtgggtgtgtatgtatttgtgtatgtgtgtgtatgtgtgtgtgcgtgtctgtgggtgggtatgtgtgggtgtgtgtgggtctgtaggggtgtcggtgggggtgtccatgggtgtatgtgggtctgtgggggtatgtgtgtgggggtgtgtttttgtgtatgtgggtgtgtgggggtgtctgtgggtgtgtgtgggggggatgtgtttttttgtgtggggggtgtatgtgtttttgtgtacgtgggtctgtgggggtgtcggtgggggtgtttgtgggtgtgtgtatgtgggtctgtgggggtgtctgtgtgtgtgtgtatgtgggtatgtgtatgtgtatctgtctatgtgagtctgtgggggtgtctgtgtgtgtgtgtatgtgtatctgtgagtctgtgggggtgtctgtgggtgtgtgtatgtgggtatgtgtatgtgtatctgtctatgtgagtctgtgggggtgtctgtgggtgtgtgtacatgtattcatgtatgtgggtctgtagggatgtgtgtgtgtggggtgtgtgtgagtataagcacatccgtatctcccaccagctgtgttactctgaagaacaccaaccttgcaccaccatccccgggcatggctaaccctggccgtacctgcaccaccgtccccgggcatggctaaccctggccgtacctgcaccaccgtccccgggcatggctaaccctggccgtacctgcaccaccgtccccgggcatggctaaccctggccgtacctgcaccaccgtccccgggcatggctaaccctggccgtacctgcaccaccatccccgggcatggctaaccctggccatacccaagaccatggggggatgatacatggggtgtggttgaagcatgaattctgagaaatgctgacctacatgtgattgtcccaactacaccttcttcctccaacacagacacgtccctccagtttacttcccactctgagacctcattcccagtcactggggtgagcctggggacccacctctg

SEQ ID NO: 23821 - DNA, 1635 bp, Artificial sequence
  DNA replication origin
tgaaacaaacccagatgaattggggattctctaaataaaaggcaaattaacttaaaataacagcgaagaactcattaaaaaatgaaaataacattagagttggagaagatagccagacactgtaatattataattatgatatgaaaatgattcatgcatcagtggcactgtgcagtttaccaacactttcatacacgttttattcgatggccattaaatgttaggaaaacagagaagataaggtccccagtctcaatggctgagtgaggtcaggcaacatgcccaaagtcacaagcttatgaatcggtggaaggggaaccagagctgagacctcctgacccgtcctgcgcagttttaaccacaccaggtcacgtggcccctcatggtcagggtgcagaggtccaggaacccaatccaagaccctgacagcacccagcaggtcagcctagagggctgtgcaccaggaactgacatgggccaccctctaacacaaagctcggcagtggaacgggacaagagctctggaagaaggaatagcatgcgccaaggcccagaggcagggaggagagagatgaggttggcagggaccagactggttttaacctgatctcacaagctgtgggatgtcatgaaagagttttaagccagggagcgacaggatcatgtttgcgttttacaaagagacctcgtgggtgctgtgtggatggagcttggtggaggagttccagcaaaggagtttggtcggggagtgacttaggaggctgtggaaatgcgggttgcctggctgcagggatgagggactgaggtgcaggaggaccctcggctttctggcctcagggtgagcaggcggggacacaagtcactgagtgggggttttcagggggatctgcaggggggtctggatgggtagatggccgagacacagaagctggcagagtgttctcggaggaggaggaggaggaggagggagcgagaggaacaggagcccccaggccacgccttcaggagtgcccacacctgacgctcaggaagagaagcttccccagggagcaggtagggaagacacaccctgagagcttgagagggaagccgcggaggccaagagggaaggtgaacaccgagaagggtggaagaaggtccctggctggtaagggcacggagaagaagtgggagatcctacggctgtcgtgacaacctcgtcggtgctcctgcgtgtgggccctggaggccacccgacctcgtgggtgttcagggcagacgctgccacgtactgtgtggatgagaccaggggacacgtcgggaatggggactcaacagagacagaagtaggtcaggggtcacgcagcgctggaggcgggggaggagggacaggtgatcactgatgggaatgggttcttgaggggcgatgggagacgagggacaggtgatcactgatgggaatgggttcttgaggggcgatgggagacccccacatgtggccgtggcatctgtgagcacagcagtggccctgggcggcacactgcaagtgggtgaactgtgcagtgaggaccatctctccgtacagctggcgaaaggaaggatggtgatgaatgtgtcagcctcaccctggacctcgggtgggaaggacccaggagc

SEQ ID NO: 23822 - DNA, 907 bp, Artificial sequence
  DNA replication origin
ggtgttaattaataatcaacattagttatttcactaatcactaaccaattgaaaaagaatagtgttgaaaaattaatccaaaagaagaacatggagaacagagaggttaagtaactactctaagaccacacagcgggccagtatcagagctgggatttgagcccaggtgttcaggctctttaatggcttttgctggcctgaaatgctggaagcacttttcccccaaccttccctgccagcccctgatgtgggcagcgtggagagctccaggggctgggaggaggcccatgtggctggagaagggggtggtggggacagcagtgggactgagctccaagaggccatgaaggcggcagtttgattatttggcatctgtgccgagtgacccattgtggggacagggacacagtggggcaaggtgcctgctcatgttccaggggaaggagcagatagcaggcaagggagccggccagtgcactggggatgaggatgctcaggaggaaaataaggcaggtggagaacatggtgtatccaggaggggccgggcggccaccaggcttcagtgcgaagtggcatctgggcaaaggctggaacgtgagagtcaggctagcagggagagcaacacgtgtgaaggtccagaggcgggcactggtctgctctttagaaacagcgcgaaagccagggtgttacagcagggcatgagaggcaggcagatggtggtggcagcggcatcaggaggcaagaggcagtcaggtggccctgtgacagcatgccgctttactccccaccgaggggctttcagctgggatgcgacatggggccaggggtccacttcggggggcatcgggctccttccggccaaggacacctaagtgacagtcgccggcagactctggagagatgtttc

SEQ ID NO: 23823 - DNA, 758 bp, Artificial sequence
  DNA replication origin
ttgggtgcacatttttttaaattgggaggtttttttttttctcaaagatctggatgttgaacaaggcgggaaagggggcaggaagtcaagaatgactgtcagctttgcatctggaggagctgaggggatgatggtgtccttggccgagatggcacagcttggggagggaacttgtttgaggaagaaaatcaagaattctatttcggacaggctaaatttgagcttcctcctgtacatccatgtggggataatgagtaggcagttgggtatgagtggcgggggggcgggggacggggatgaagggttcatttggaattatgtggcaattaaaacctcaaagctggctaagatcacctaaggaatggtataaatagagccgtggcccctccaggatttagagatcagcgggaggtcattgcagaggtcagggggagagaccaggtcagcgcgccccacgggggccagagtccagggcatgtccaggaggagcagccctggtgtcgggtgctgctgagggatttggtccagtcagggcacgaaagtggccatgggttcgggctgcagggactcctcggctgccttagtgggagaatctcagccgagtgacaggagggaggctgactggaagggctggaagagcgtgtgagatgggaggcagatacatgggcagtggctggagggggatgagggctttgcagaaacaggtaagatttggagagatagatgctgaagccaaaacaagccccagcaaaccttgt

SEQ ID NO: 23824 - DNA, 1351 bp, Artificial sequence
  DNA replication origin
ggggaagcgtttggagctctgaggggagcctctggatagttgccagggatgatgggggggtgctgggggtggggggtggggatgaggagtgacccctccagggatggtggtggggggagtggagggggtggggggtggggatgaggagtgacccctccagggatagtggtggggggagcggagtgggtgggggatgggggcgaggagtgacccctccagggatagtgggaggggagtggagggggtgggggatggggatgagtgacccctccagggatgatggtggggagtggagggagtgggggttggggatgaggagtgacccctccagggatagtggtggggggagtggagggggtggggggtggggatgaggagtgacccctccagggatggtggtggggggagtggagggggtgggggatgggggggatggggatgaggagtgaccactaaggggtatgaggttctttttggagtgatgaaaatgttcttgagttagatggtaatgatggctgcagaactttgtgaaagtgccaaaaccatggggcactgcacactaaaatggtgaccttcatggcatgtggattccatctcaattagaaaagaatgatgccatctcgattagcaaagaaagatgccctattctctgactaccggccctgaatgtgaaccaagctggtcctgcggttctcagcaagctcaccatcctgcttctcactgtgtgctctaagttttcaggatgtaaccctcaagagaggaggtgctaccacataattctttaagcagctgcctcgatgactgtgagttttctgagggcacacaccgtgacttatccaaccctctgcctttagtgcctgggacacaggttcagggcttagtgaatttaatggagggtgtgccgtgaatccctgggaggaaggagcttagcggagagtctgttggattaaaaagccatgaaagatggttctcagtgaggccaacttgccctccaggggatatttggcaatgtctgaggacacgtttgattgatatgactggggaaggggaggccagggatgtaaaaccctctcccacgcgcagatccgtgcagatcagtctcctacagcagattatcacctggtcccacgtgtcagtggtactgagctcagaaaccgtgtgtctgtttcttatcgctgctgtagcaagtgatcccacagtgtctcggtggcttaaagcgacgtagtcatattctcttacagttctgggggtcagaagtctgagatgagcctcacagggctacgatctggtgttggcaggactgcgtgcctttctgagctttggggagaattcattccttgcctttccagct

SEQ ID NO: 23825 - DNA, 1188 bp, Artificial sequence
  DNA replication origin
tgatggaaatgtcacatgaatattgcttaaaagggttggaggggaagaattctattcctatatctgcctggagagtttaactcacaccatagcagcaaacagcccccaacctctcaagtgtgtttcttgcctctgcggcatgtccattgggttggtgggaacttctgttcactgttgttcctcagggaccccagcaactctagtactgtgagcattgtaggctactgccgggggtgggggtggggggtgtgattctggaggacttggcacagggcatctgggggtggggttggggggtgtgattctggaggacttggcacagggcgtctgggggtgggggtggggggtgtgattctggaggacttggcacagggcgtctgggggtggggttgggggatgtgattctggaggacttggcacagggcgtctgggggtgggggtggggggtgtgattctggaggacttggcacagggcgtctgggggtgggggtggcggtggggggtgtgattctggaggacttggcacagggcatcagcactcaggtcttctgctcacaacgcatgggtgagacctggccgcatgggcctagctaatgaaggggtctaggaagttgtcttccctgtgagtggacagagggaaccaggcttggcaagcagtgggtgacggccacagtgcctagagcacaaggaggtggtggcagaggggttgtgagccctggggtgggcggtggggctgctcagggcttccgatgccctctctggagtccttgagaaaagccagggaccactgttcagtcttcctgtgctcccagccgtttgaactttgatgtgctgcagatggctggagcttgtgagacctcagaccagaaaggggaagctgcctgcggcctaccaggttcagcgatgcatctccatgtctctcacacacactgggagcttttatgtaaaagataaaatgatggcaaccacagacttctttaaaaggaaataacttgccccagaattctctcatgtcattggcaatagaatgagatgagaatttgactctgttgtggggggttttcttaggctgactggagaataggagctccttgaggctgagttcctagggaaggaggtagctcgccatgtgtgtggtgtccccctcggtgatgaacatgggggttgtggatgtcaccgcccaccgcc

SEQ ID NO: 23826 - DNA, 1422 bp, Artificial sequence
  DNA replication origin
aatgaggaggaagggagaaggggaggaagggagaagggaagaagaggggaaggagggaaggagtgagggagggaaggaaggagagagggaagaagggagggatggagggaggaagggagggaggaagagatggaagaagggagggagggagagaatggagggaggaaaggagggagggagagaaggaagaagggaaggaaggagagaacgaaagggagggagaaagagagggagggaaagaaggaaaaaagggagggaggaaaggagggagagagggaaggaagaagggagggacagagggaggaagggaaggagggagggagggagggagagaaagaagaagagggaggaagggagggagggagaaaaggaagaagggagggaggaaaaaatgagggagggaggatgggagaaaaaaaggaatgagggagggaaggaaggagagagggagggaagggaggaagggagggaagaagggagggagggaggaagggaggaggcaaggagtgagggagggagtgagggagggaaggaaggagagaggaagaaaggaaggcaggaaggagggagggagaagagagagacaacatccctgtctttcaggggagaaaagagacttgacagtttcctgccccagctggaaacagatggctcacttaaactggataatttgaagagcatgaatagaggaattgtttacagagttgtcacaggatacaggaatcaaaaagacagtgatgtttccacaggctggcaaaatctggaagcccacccttgtgagaagagagaaggtatgaagcggcatgggaggagagcaatgtggggcaggcgctgtgggtttggggaaagggatgaagcttccagcagggaggaaacagccaccaccctgcttccttccagccaggacccctggtgaggggatcatgctgagcccctacacagctgcaggcggaggactggtcgtgaaggaaaggtggaccttgtgattagaggtttggggcttggagccaggtgatatcagcctgacccccagggagggcgggggctggagctggagtttgatcacctggcaatgactcccatcaatcacacccatggaatgaagccccagtaagaactctggccaccgaggctcaaggagcttccttgccagtgatagatgggggtggtgccgtgtcctgaggatatggaaacttcacatttgggaccctccctcagacctggccttgtgtgtctcttgacttgtgtcctttatgacaaatctgtaataagtatagcactttgctgagttccctgagccattttagggaattttcaaacctgagggggttgtgggaattcctcaggtttgcacccagttgttcagaagcacaagtggcccgaaaccgctgcaatccctgaaaccacctccctggagcttgt

SEQ ID NO: 23827 - DNA, 836 bp, Artificial sequence
  DNA replication origin
tttctcagcacctagagctgtactgggcatgaaatagatgttacttgaaggaaagagcccaggtagcacagtcagcagcagaggcagcatgtgtcgccctgtctgacatcgcgagccttttcagagacccaggggctgctaccagctaaggcagtgtgcagccattcagcaaatattcatcagcacctgctctgcgcgaggcctggctctaggtgccctgagcaagccaaacagggaacttgctcaccggaacttaggttctagtgcagaagatcgacagtaaaccagccagccgaaaccccatacagctctgaaatgagagcaagagaaagactgtgaagaattgggcgcacggtattgggatagagtggccaggaggtggtggaggtaggggtgttcaccacagtggccagggagaggccaactgaagggaggacggcatgtgaagaaggtggaggagtggggagaagacccctggctgtgggagctgtgagggcagaggccgtggagcaggagcaacttggcagtttaagggacagagtgaggggtcgagtgcagagtgtgtcgagctggggagattggtgggaccgaggtagagaggagggcagcggccagaatgtgtcgggtgtgtaggtcatggcggggagtatttggagaggagtgtgggaccctggttaagtttaagagacaggtgttctggttcagggaggcaaggagagggcagagaaggaaggctgtatttgggtattatctgggaattagggaagcagtaaggaggagtgtgggttgccagggtagaggcgagagattaggaatacattttacatccagaaagg

SEQ ID NO: 23828 - DNA, 1284 bp, Artificial sequence
  DNA replication origin
cgtttttgattgttcatttttaattcctttcttcgttggtaacttgcccaggctcaacctgtgaaacctgtctctggtacgtaggcgttgatgtccctcatcagtttttaaatttattgtttctattttacgtctgcttcccaggggttgtccccttgtctacatatgtcagcggtcagccaatagctgacagaggttgagctgcatgcccttgagcctctgctgatgcacctgtgtgagggtggggagcgtcttcagaggggagcctgtttttgagtccgcctaggcccttactttctcctgtacccccatggtcgatgagggagtaggcgtgagcctgttcttctctatctgtatcccctttcccgccaccctcagcctcctcttgctttgtgcccaggtgccaggcctgagggccgcatccacccctcatctgcgctcggattcctgaggctctgcggtgggaagaacaagcagcaggaggggcggagggcgcgccttcactgccagcttgctttggacccacgccccgggcttggtcactgcctgaccacagttcccaccaggaagagacccaccttccctggcctccgaatattctgtttctctctggtcccttctggcctagggtggtggggacttcctgctgtcgctggtctctgggtccttaacatctgtcctttgttgcttatctctgcccccatctctgagagtagcccttccagtcaggccttttcatgtaaatcgtccttctcactggcttgtttcctgcggggatgctgaggactcaggggtggtcccaggtgtcggcccaggcagacaggtcagtggtgagatcatttgctaggaggagaaaacgcaggggaaagtgtgtttgctggtgaataatcaagagttgtgctttgtaaatggtaaacctggacatagaagtcaaaaattaaatcagccattgaagatatgaggctagagctcgggaaggaggcgctgatgacggaaaatcagggaagcatctgtgtagatggtgccccaaaccacagactagaggagaccaacccgggagaacgtgggaagagagaaggggctcaggactgggagctggggcattgcagaactagaggcctggaggaagacgagggttcagcagaggagcctgaggtggaactgaggggagggcaaggatgggaaagagtacggggtcctcaagtccaagtgaaaaaaaaggttcaagaaggagggagtggtcagtcagggaagctgcccctgggaaggccaggaagagggggc

SEQ ID NO: 23829 - DNA, 1453 bp, Artificial sequence
  DNA replication origin
aagcgctgccgccgtgtgggtgggtgcggggcgcggcgcgggccgggcatgcgcagagcgcgcggggcgcggttgccgtggcagcgccggctccagggagggctgctggcgccgggccgggaccgcggggcctgaggcggagaccggagagcccgaggcccggccggaggcagctcgggacaggcttgagcggcggggcgcgctgcccggccggcggggatgcgggaccggctgccagacctgacggcggtgagcggcagccgcgggtagcggttcaggcccggccggggcggcgtctggagggcgggcgggggctcggggcgtcttgggcggggctccgggagggtccccagggcggggatctccggcgttctggggcgggggctgcgggcagggtctcagggagtcctgagcggggactgctggtggggtccccagggcgggggtcccgggagtcctagggtgggggctccgggcggggtccccagggcttcctgggcggagtcctcagggcgggttggggcaggaggagggagcggggaaggtcccggcctcgaccccctcttcgagcgtggctccctgtccgtcactccgcttggcggattgtatctggcgcttacccagccggagcccactggcctaactgtggtccgccccacggggtccccgcagctggcgtcagccccggggagcaggccgggtcctcttggtcgctgctttatccctggggcttcacaaaggactgtgcaccaagcgggaggcaacagatgggtgtgaaatgtgggcaccttagagtgctgggtgcttggggtggggcgagcgcgaacagcagcttgtgtctgatctcccagtagtttgctttggaaactgggaccgtgtgttgactctgaacgcaccttacgcgcccagcagccgggcacacagcaagttactgtttactttagcaagggaaaagcaggtcactaaaaattttggaaggatttcgatgcattctacacgtgtaaaggtgacaggactgtgcatggtgcagtgacagcggaatgatagtgatggtcgtgcactttccaagcttgtctaacccaggacggcttaggccagcagaagtagttatgactttttccctttacaatacaggtactaattcatgctacgtgtgtgcacagatagagcctctggtctctaaattgttggcagcctcagaacaggggtgctaaggcccacagccctacgacacccactgcatgtaatgaattattctctctcctctgctgctagaatggagctgttatgtacccccgagtgggagaatagagaaaagagccacttaaatcattatctgtgttctgtggttcagatgaggagctctggttgagaaaggcaatgatttcatccttaggatcatggaaattatgctttatattcattccaaggaagtttcttcacggtgattttt

SEQ ID NO: 23830 - DNA, 1239 bp, Artificial sequence
  DNA replication origin
cagacgtggtcaggcacgcggcttccaggcgctggccagcctgtccttgtctgtgccccgtggggtgggggttcttgaggtcctggggcttagggtggctcgcgtgcgcgcaggacgggtgggtgacagaacgaatgaatgaatgaatggggtctaggcccgtcctccagaggcagcccgctgttctgtctctccagatcgtagccttcacgcccccaggaccagggccagttggagagcgaggaaccagagagggatgcacccacccagaaaaacggctacttattttttttaagagacggagtctcgctacgttgcccaggctggtctcgaactctcaggctcgggcgatcctcccgcctcagcctcccgagtagctgggactacaggcgcgcaccacatcaggggtaattttttaaaaatttttttgagagacagaatctaactatgtctcccaggctggcctcaggggatccacccgcctcggcctcccaaagcgtccggcttctcaaagcgtttcataggttggcagctttggccgctgcatgctacagacaaaatgatgaaatactgtttgcagtctggacgcgtctaccagccctagttaccaacggggacggaatgagtaagtgctcagcttcccagccccctgttggcctgaagctgtaagagcccaaacaagcttgagctagagggacccgacttcctgggcgcccctgccgacatgcagacagataaaggcccaaatcagcgcagtcaagcgcctcagaagagtccaccatggggagagagccgcagtgaccgaagagtcctccctgcagtcctgagcacacttgcaggcgagtccgctaggaaccccagtgacgcaaattaggcacaaagcaggcgacaaccggcctgctgggaacgcaagtccgagctcccccagaaccctcaggggaaccccaagcacctctcagacgctgctggcgggagagcagaatctaacagtaaaacgggaatgcccattgcttgtgaccccggatttccatttctagggagaggccccagagttaaactcatgcctcacgcatgtgcacaacatttaatactgtataacatttaaaaggaatgacggtcatctgtttcaacagggttagatagatgtcaaaaggatagtgttgagaaaagaagaaagaggtgataacagctttataaagtctaggccacctgtaatcccagcactttgggagtccgagg

SEQ ID NO: 23831 - DNA, 949 bp, Artificial sequence
  DNA replication origin
gtccgccacccgccccggccctggccccggctccgacccctatcccgccgccgccacccctgtccccgcccggccgtgccgggcccgccgggtcgcgataccttccagaagcgtctccgcgcccgtccgactgaggctggaaagatggcggaagcgcaattcaaacgccggagacgcagccgacgccggcgcgagagcaggggcggggccggcgcggggcggggttgcaaggggcggggcaacggcgcggcgcccgcccacgtggcccgcgcgtgcgcgcacgcacgcaacgcggttcggtcggccgctcgggcggtcgctgcgcttagggtggggcgggaggcgcggtggaccgcgtgggagggcgagccgggagcgcgtacgcaagccggccggtggggaccgcgtgcgccgacgccccgggcgggctcccgggcgcgcatgcgctgaaagcgaggcggcgcgcccctgagcgggagacgttgggcgcggcccgacggtcgcggctctcctgcctcccgggtgggaggcggtactcgctcgggcagacgtggtcaggcacgcggcttccaggcgctggccagcctgtccttgtctgtgccccgtggggtgggggttcttgaggtcctggggcttagggtggctcgcgtgcgcgcaggacgggtgggtgacagaacgaatgaatgaatgaatggggtctaggcccgtcctccagaggcagcccgctgttctgtctctccagatcgtagccttcacgcccccaggaccagggccagttggagagcgaggaaccagagagggatgcacccacccagaaaaacggctacttattttttttaagagacggagtctcgctacgttgcccaggctggtctcgaactctcaggctcgggcgatcctcccgcctcagcctcccgagtagctgggactacaggcgcgcaccacatca

SEQ ID NO: 23832 - DNA, 1024 bp, Artificial sequence
  DNA replication origin
cggcggcgggataggggtcggagccggggccagggccggggcgggtggcggacccaggggcagcgggcggctgagtaggtgggtggtgcgggcccggccgggccggggcaggagacgggcgtggggtcggcgctagcccccgcgaacccccgtttcatcctccgctctcatccccgtcccggtcccagtcccgttcccatccctacacctccggccgccgttccccgggccccgccgccccggatgccggccccgcccgccgccttcccgctcccaggcctggccgccatggcgccgcgggcgggaggcctttgtggggcgggcacgtggggcgctgggggcgcgggagcggggccgccatgggctgcggggccgcgcgagcgctcgcctccgtcctctgcctccgcaggaacgccgcgatggctgcgcagggagagccccaggtccagttcaaagtaggtaaccctgcggggcgggaggcggccgagcccgaccgcgtgcgactcgcgggtccctcctcctggggccacgatggctgtaatggggccccgcatccacattctttgttttaagtgagcctgtggtggttaaagttccgtgactctgggatcttgagaggtgaagtgtttagggtttacttccaaaatgtgtttttcaacagcttgtattggttggtgatggtggtactggaaaaacgaccttcgtgaaacgtcatttgactggtgaatttgagaagaagtatgtaggtatgtgctggaaaaccttgcttgtggaaatatgtgagaaatgggtaagttcatccactcaatcgcatcgtttccgtttcagccaccttgggtgttgaggttcatcccctagtgttccacaccaacagaggacctattaagttcaatgtatgggacacagccggccaggagaaattcggtggactgagagatggctattatatccaaggtaggcatttgtaacttgctgaacggtttttgagaggttttgtgtacttcagtcttcaaggttatagaaa

SEQ ID NO: 23833 - DNA, 1517 bp, Artificial sequence
  DNA replication origin
ccaaaccacggagacactataaagatcagtagtgagggtgtgggtaggatgagtgggtttcatgcggagggtttttagggcagtgtataacgttatcacagggatacatgtcctttcacatttgtcaaaacccacgaaatgtgcaccagcagactgaaccccagtgtgaactgtgggcgataatggtgtgtcactgtaggttcatccgttgtaacaaatggaccactctagggggatgctgatatgggggaggctgtgcatatgtggggagtagggggtgtgctagaatcctctatactttgcacccaattttgctgtgaacctaaaactgctctaaaaaagtctatttaaagtaaagcaacaacagaataagattttagtataaataagtctgttataaaatagagaacacccatcaatggataaaagtcaagatttttatgttgatcaatttataagtgaagtgacttacaaaactttttttttgaggtcaggttaaagccatctcagcaacaagtaatggagttgccagtctccgaaataagccacgtgggtagagagcaaaccgttaataacttcagcatttctgtgcacagaaccagggaagtaatgtctttaaatacagctgcatcttgaaatatctgccactaattcaggcacattgaaattgctgcattaaactactgaactataatagaagcctctgcaacctttattctgagtttactggtcctatttatagcagaggatcagaaaaaaaatgtattgctatctggtgtgaccgtgacagtgacgtgtgtctggcgtagtaggtgaccgtgagggtgacgggtgaccgtgacagtgacgtgtgtctggcgtagtaggtgaccgtgagggtgacgggtgaccgtgacagtgacgtgtgtctggcgtagtaggtgaccgtgagggtgacgggtgaccgtgacagtgacgtgtgtctggcgtagtaggtgaccgtgagggtgacgggtgaccgtgacagtgacgtgtgtctggcgtagtaggtgaccgtgagggtgacgggtgaccgtgacagtgacgtgtgtctggcgtagtaggtgaccgtgagggtgacgggtgaccgtgacagtgacgtgtgtctggcgtagtaggtgaccgtgagggtgacgggtgaccgtgacagtgacgtgtgtctggcgtagtaggtgaccgtgagggtgacgggtgaccgtgacagtgacgtgtgtctggcgtagtaggtgaccgtgagggtgacgggtgactatgagtgatgtgtgtctggtgtaatagtcgaccatgatggtgataggtgatggtgacagtgatgtggtctggtgtaacaggtgaccgtgatggtaatagatgaccgtgacaatgacatatgtctgatgtaatagttgaccgtgagggttacaggagaaagttgtaccgtctgtttccacgggaacatctgtagagcatgtttggctaatgtttctcttagtgcacattggaaccatgccattctgttt

SEQ ID NO: 23834 - DNA, 907 bp, Artificial sequence
  DNA replication origin
tactgggaagtgaggagcccctctgcccggccagccaccccgtccgggagggtggtgggggggtcagccccccgcccggccagccgccccgtctgggagggaggtgggggggtcagccccccgcccggccagccgcctcgtccgggaggtgaggggcgcctctgcccggccgcccctactgggaagtgaggagcccctctgcccggccagccgccccgtccgggagggaggtggagggtcagccccccgcccggccagccgccccgtccaggaggtgaggggcgcctctgcccggccgcccctactgggaagtgaggagcccctctacccggccagccgccccgtccgggagggaggtggggggtcagccccccgcccggccagccgccccgtccaggaggtgaggggcgcctctgcccggccgcccctactgggaagtgaggagcccctctgcccggccaccaccccgtctgggaggtgtacccaacagctcattgagaacgggccaggatgacaatcgcggctttgtggaatagaaagggggaaaggtggggaaaagattgagaaatcagatggttgccgtgtctgtgtagaaagaagtagacatgggagacttttcattttgttctgtactaagaaaaattcttctaccttgggatcctgttgatctatgaccttacccccaaacctgtgctctctgaaacatgtgctgtgtccactcagggttaaatggattaagggcggtgcaagatgtgctttgttaaacagatgcttgaaggcagcatgctcgttaagagtcatcaccactccctaatctcaagtaatcagggacacaaacactgcggaaggccgcagggtcctctgcctaggaaaaccagagacctttgttcacttgtttctttgttca

SEQ ID NO: 23835 - DNA, 1587 bp, Artificial sequence
  DNA replication origin
ccctcacctcccggacggggtggctggccgggtggggggctgaccccccaacctccctcccggatggggcggctggccaggcggggggctgacccccccacctccctcccggacggggcggctggccaggcagaggggctcctcacttcccagtaggggcggccgggcagaggcacccctcacctcctggacggggcggctggccgggcggggggctgatcccccacctccctcccggacggggcggcttgccgggcggggggctgacccccccccccggacggggcagctggccgggcagaggggctcctcacttcccagtaggggcggctgggcagaggcgcccgtcacctcccggacggggcagctggcctggcgggggctgacccccacctccctcccggacggggtggctgccgggcggagacgctcctcacttcccagacggggtggctgccgggcggaggggctcctcacttctcagacggggcggctgccgggcggaggggctcctcacttctcagacggggcggttgccaggcggagggtctcctcacttctcagacggggcggctgggcagagacgctcctcacctcccagatggggtcacagccgagcagaggcgctcctcacatcccagacggggcggcggggcaaaggcgctccccacatctcagacgatgggcggccgggcagagacactcctcgcttcctagatgggatggcggccgggaagaggcgctcctcatttcctagacgggatggcggccgggcagagacgctcctcactttccagactgggcagccaggcagaggggctcctcacatcccagacgatgggcggccaggcagagacgctcctcacttcccagacggggtggcggccgggcagaggctgcaatctcggcactttgggaggccaaggcaggcggctgggaggtggaggttgtagctagcccagatcacgccactgcactccagcctgggcaccattgagcactgagtgaaccagacaccgtctgcaatccccgcacctccggaggctgaggctggcggatcactcgcggttaggagctggagaccagcctggccaacacagcgaaaccccgtctccaccaaaaaaaaacgaaaaccagtcaggcatggcaggctgaggcaggagaatcaggcagggaggttgcagtgagccgagatggcagcagtacagtccagcttcggctcggcatcagagggagactgtggaaagagagggagagggagaccgtggggagagggagggggagggggagagggagagggagagcagaaatcttaaatgaaattatgtgcagaccaaatacaagacatctacgaggcaggctcagcctgtgtgccatccctgtgggacccctggtgtagacctgttttggggtatctggctggggaccctggggatgagtcatgcagatttacccaaaaccccagtgatctctgacctgatgagaagtcaaagtttttggcatccattatacaagttagtttctttcttttttcttttcttttcttttcctttctttttttgagatggagtctcgctctgtcaccca

SEQ ID NO: 23836 - DNA, 1454 bp, Artificial sequence
  DNA replication origin
agtgaatgatggggcagcacgagggaagcgctgcgtgaggcggccgacccgaggtggagcttccctcctgtctcactggtggaccctctcggtgggaaaccgcggggatgaaccgatctctaagactaaggttcaccaggcaccacagggggcgtcctccacagcaggggcaaggcgggatttaaccaaaacccgagccgatgcccctcatcccggcgtgaagggtcagacatgcagacacctgggagaatgcgggcctcagccctgcaatctaaccacgtggctgtgattcagtttactgccaccctgccttcctgggagctggaggagtgggagaggagggggctgcctgggcgggagagcggataggcgtgaggcccctgggtgaggcaccctggagacccgctctgtgcacgagagggagaagccataccagacaaaacaaatcactttccactttccaaattccagagctcctacctgccggccctgcaaggatgggatgtgggtgtgtgtgtcggtgtgtgtggtgtactgaggctgggtatgtgcacatatgtgcctatatgggtgctggatgcaggtacatgcactgggtgtgtactgagtgtgtgtctgtgctgggtgtgtgtgcactggttgtgtgtgtctgtgctggctgtgtgtatactaagtgtgtgtgcctgtgctgggtgtgtgtgcactgagtgtgtgtggactgggtgtgtgcacactgggtgtgtctgtgttgggtgtgtgtgtactgagtgtgtgagcactgggtatgtgtgcactgggtgtgtctgtgctgggtatgtgtactgggtgtgtgagcactgggtgtgtgtgcactgggtgtttgtgtctgtgttggtgtatctgtgttgggtgtgtctgtgctgggtgtgtgtgcactaggtgtttgtgtgctgggtgtgtctgtgctgggagtgtgtggactgagtgtgtgtggactgagtgtgtggagtgagtgtgtgtgcactgggtgtgtgtgtctgtgctgggtgggtgtagatggggtgtgtgtggactgattgtgtgtggactgggtgtgtgtgtgtctgtgctgggtgtatgtggactgggtgtgtggggactgggtatggactgtgtgtggactgagtgtatgtggactgggtgtgtgtggactgtgtgcactgggtgtgtgtggactgggtgtgtgtggactgtgtgcactgggtgtgtgtggactgggtgtgtgtggactgtgtgcactgggtgtgtgtggactgggtgtgtgtggactgagtgtatgtggactgggtgtgtgtggactgtgtgcatgtgcatgtgcatgtgtgtgtatgcgtgtgcatgtatgctgtgtaacctcactggctgtgtggctctcctgcagccctggcactcaagctgtgctctcatctcctgcctcccctctctgcccgtgccct

SEQ ID NO: 23837 - DNA, 2619 bp, Artificial sequence
  DNA replication origin
gtaggcgggacagtgttcgggaggcagggatctcgtcttctcccgaaacctggtgccatcatgttggtctctgggcatcagccccaggcagggagggcgacaggaggatcctgaaactctgttcacaaggggctccaggaggagaagagcggggcagcctctgtcagcgcacgcccgggagctgcggcagggcagtgctgtacagggacccccccccacccccgcctccctgcccgggcacatccggcccacaggccagcctcgctcagcacacggctgtacctggatcacgcccatgcccaccgggttccttcttacaacagctgagagggatgtggggatttacagttggggaaactgaggctcagggaagtcaccatgctgcccaaatccacagcggagttgggattagagttgagtctcattccgaagatcatgctttctccttgggggacaaagcaccacagctgccggcaccaggcggccagcgagggagctgccctgcggtcctcagggcgggcacaggctgagatgtgaccaaggtgatagcgcccgtcctggtcagtgctccctgccttgtccatatccttcctggtcagtgctccctgccttgtccatatccttcctggtggtgctcccgccctggttggtgctccctccctggtcagtgtcctccctggggagtgctccctccttgctcagtgtcctccctggtgagtgtcctccctggtcagtgtcctccctggtcagcacttctcccaggtcagtgtccttcccggtcagcgtcctccctggtcaatgctccctcccaggtcagtgtcctccctggtcagtgctccctctctgctcggtgtcctccctggtcagtgtccttcctggtcaatgctccctccctggtcagtgctccctccctggtcagtgtcctccctggtcagtgctcctccctggtcagtgtcctcctggtcagtgctccctccctggtcaatgctccctccctggtcagtgctccctccctggtcagtgtcctccctggtcagtgctccctccctggtcagtgtcctccctggtcagtgctcctccctggtcagtgtcctccctggtcagggtcctccctggtcagcgctccctccctggtcagtgtcctctctccctggtcagtgtcctccctggtcagcgctccctccctggtcagtgtcctccctggtcagtgccccctccctggtcaatgctccctccctgatcagtgccccctccctggccagtgtcctccctggtgagtgctccctccctggtcagtgtcctccctggtcagtgccccctccctgggcagtgtcctccctggtcagtgctccctccctggtcagtgtcctccctggtcagtgccccctccctgggcagtgtcctccctggtgagtgctccctccctggtcagtgccccctccctgggcagtgtcctccctggtcagtgctccctccctggtcagtgtcctccctggtcagtgtcctccctgggcagtgtcctccctggtgagtgctccctccctggtcagtgtcctccctggtcagtgtcctccctggtcagtgctccctccctggtcaatgctccctccctggccagtgtcctccctggtgagtgctccctccctggtcagtgtcctccctggtcaatgctccctccctggtcagcgctccctccctggtcagtgtcctccctggtgagtgctccctctctagtcagtgtcctccctggtcagtgtcctccctcgtcaatgctcctccctggtcagtgctccctccctggtcactgctccctctttagtcagtggcctccctggtcagtgtcccccctaatcagtgttcctttcctggtcagtgtcttccctggtttgtctctaaggcagggaggacggagcccattgagggcaggggcgagtcctgtgaagatctccagccctgggtgtggccagtctctgtccttgtgtgctggcctggaggaggggagtcaggtgatccacggcgaggagacattgtggtttggagactgctccggtgtcctccgcacctggagcctggacaatggggggacagctctgaagggcagatgggtgggagcattccaggagcaggcagccccgggcccccttttgcaccccttccgcagccatccagggagccccctgtcgggaggagaggggcagatacagagtcaggtcagcagcctggtgagaggagccatagaggcagtgacataatgtgcaatgtgaggacagttgcaccgccctgtgagctcacgtggggacacttcctctgccgggctggggctgggactctcctccatggctgtgaccgttccagacaagagttagccagccattgtcagtgccagggacgtcacgactgtgcgtggctctgggggttgggtgaagccataaattccccacctcagcatttcttggaagacgtgggtcagtgggaggaggcttggctcagcgtaaagacatcatcaccaacagccacccccaaagaatgacagccctgctgatggcctgcttctccctcaagtaagggtctgagatgaacatctgatacttgcagaaccaggccctgtggacctggccc

SEQ ID NO: 23838 - DNA, 931 bp, Artificial sequence
  DNA replication origin
ggccctgtccgttcactcccagcagggatgcctggctgggccattgtcctcggccccctgtaccctccctaccgcaggccaccttgtgtgggttcatcccaccgaagttcacggagtgcccctgcatgcctgcccccgttcaggctgtgagggagaggacagagccagacagaccgaatcctgccctgtgactctcacatcccagtgctggggacctggggaggtgacaagcaggcagacagacaggcagtgacaggtacatgcaagatcagatcccaaggagcagcacgtgggaggcctgctggcaggaggctgccctgaggagtggccacgtggatggggggatcgtggggcatcgggggagaggcatcacacacctggctggcggcgggggcacaccttcaagtctgaggagcggccaggaggccgaggggctggaggaggcaggtcaggggctacgggcagatctttccgggcccgggggcaactttaagggcctcggctttcccctgagtaaggtgggtgcccccggagggtctgagcagagggacgaagcgatggacttgggctttcacaaaccctgtacagggcagggtgagcaggtagacggggctgccgccaggctcaggataggagtggaggatgttagcttcaggtctgctatggggggcttgctgacagggtcaaggatttgggggctcaaaaagttgaaggacagagtggccactaactgacaagggcatgactctgggacagtccagggctgggagtgaggtcaggagggaggtttggacatgctccgtttgggaggcctgtggacgcccaggtggggaagctgcattggtggtggtagagctggagctagaatggaggacggagatgcagattttgcagttgtctagctgggcacgttgccaccccgagcaaaaaa

SEQ ID NO: 23839 - DNA, 1629 bp, Artificial sequence
  DNA replication origin
tgaagtgggagggtctcgtgaccgcagctcaggaggaaaacgaggcgccggctttgcaggtgggtaggagtttgtgttgtactcggaggctgggagcccctggggcttctgtagggagaggcggtctgagacgcgctttagaagttgacctgctgctctgcggggactcggtgcgggagacgagtggaggctgctgcgtcatccaggtgagaggagagccaggtgcgcagtgagcagaggtgggaggaaagctggttgccacggagatgagggcgtgtccatcactgcaaggctccacccacagcactatcctgggcggaaccttcctggccccacccacagccttagctgattggactgtggagtacatgtgacttcaggctgtgtccttataggttggctggcctctagtgccctgcccatgtggtcatggagtgtctgcacgggacgtcctggagagtcgggtgagtctgccatccaggatggtggagaagagtcctggggtcagagtgggcctgagaaggggctgtgggctgcaccatcaggggaatgtaagagaggctggagccacttgatagagggtggggccatgtacaaggaggtggggctaagtgaaaggaggtggagccatgtgcaaggaggtggggctaagtgaaaggaggtggagccatgtacaaggaggtggggctaagtgaaaggaggtggagccatgtgcaaggaggtggggctaagtgaaaggaggtagagccatgtgcaaggagggtggggctaagcgaaaggaggtggagccatgtgcaaggaggtggggctaagcgaaaggaggtggagccatgtacaaggaggtggggctaagtgaaaggaggtggagccatgtgcaaggaggtggggctaagtgaaaggaggtggagccatgtacaaggaggtggggctaagtgaaaggaggtggagccatgtgcaaggaaggtggggctaagtgagtggggcgaggccactgggagaagaggagccatgtgagtgggaaggtgtcatgtgagtgggaagggtaatgtgagtggggtggagttaagggggcggggtccctgtggttaattctctggtttgtctctggagattcttcctcctggctcccaggacactcaggacctctttcccaaggatggaacctctccacacataccatggccacagtgcaggtgaccccagtgctgctgggccacagagggcaacttgtgcacgcactggcgggtcctatgtgtccaggaggcccgaggaaggagagagtggagacccggatgccgggttcaaggctcaccagggatgcgggcaccagggtgctccctccccagcctctggctgacagcactgaactcagccgcctcgcccggcttctggtggcttctggtccacgctgtaccctcctctgtgggctccgtctctgcagggttctcggagacatcgcagctgctaaatgccaaatgcagaacctgggctgtgggtcccggcctggcttcgtgtgccgcgctttccactgagagccgcgtgactgggtgctacctggggcgagggggtgatgtgaaaacactttctgttcagtttcggggcaagctgccctaactccagatccccacg

SEQ ID NO: 23840 - DNA, 1278 bp, Artificial sequence
  DNA replication origin
catggacctgttcactgattcttttgttcattcattgaacagatatttagtaagcacctgctgtatgccagatgccctctaggtcctggggatgcagccgtgaatgagacagaagctctatcctttctgtagtggatattgtagaggggaaggtagcaaacacacacagtggacagtggatatgtaatatgccacatggtgatcaagactatgaaaacatcagtgagtggaatggagctagagtgggcagggtgccggtgctgtttagaacaggtagggaagggaaggtctctctgaggagctcctcctgcagaggcctggtagggagtggggaagagcctgtggctacctggtggggagtggggagggagcctgtggctgcctggtggggagcaccctatggggaggcacgtcctaggaggaggagtgtcctagagggagggcccggcacctgccagggcccttgggtgggttggggagggcagagcagagggcagcatgacctgggccaggtgatgtgggaccacacccacaatggatggagatagacatcagtggctatgcctgtccctacctgaggtcgcccagctgtaagggtctcgctctcacatcagtgctgagaaccaggggcctcttcagcagcgtcatgcatcgtgtttgctttctttcatttcagacacgtaagcagcacagtgaggccaccaacagcagcaaccgagtcttcgtgtactgcgccttcctggacttcaggtaccctctgcacaggggagagcaggtgggcatgaggtgtccaagcccaggcccgccccatgccagcccaggggaggatctgggtcacccatttctgcagctgacatggttgcgttatgcgaaaatgctggaaatgctggagatgtgggcagggcctggtggcagtgctgggtggaggcctcccctccagaccatgcgaggaggggcctgctgttgcacgatgtgtctggacaaagcctctgaatgcccagggcaactttcaagccagtgcagcagatgctcgggggagctggaggatgctgtccgttggagcaggccctacagccctggctgtccccctcgagggtcttggagcagctgaggaagggggttgggggagtggcttctgactagccacgttggcattttcctgtttgaaaccttgccggctccactggagcaggctgaccatcaggcctgcctaaaactctgaggcctcagcctctgccacttgggccctgactgggacgtcctccccagcatctccca

SEQ ID NO: 23841 - DNA, 992 bp, Artificial sequence
  DNA replication origin
tgggacttgaacccgggaggtctggctctggggctgactgttagtctgcagccctgtgtattgcagtgtagacaggaggctcagcgcctgcccgggccaggcagccacagtctggagactgtggctgagggagcctcagtgttctgtagggcacctcggggcaccggacatgcacgcacagaaccagggctgcaaccccagcaccggcctctgtcggtggcagcaacagacatttgggctgggaggcaggcttggtggtcagcaccacactcacaggggaccagctgtgcacccacctgggccctctgcagcttcaggctccgatggggtgcctgggcctgctgctgacgcctctgctctgctccccgcagcttgcacgcggacaccaggtggcgctgtcgtctatcagctatgtgggctgctccctctccgtgctctgcctggtggccacgctggtcaccttcgccgtgctgtcgtgagtccccttttctaatccacccaacagtctctcggcccctgcctgcacccagatctcaagatggaagagacacgggagaggggaggggctgtggaggtaagagcaccaggcttagctggaaaggtctggaaaggcccccagcccaggcacaggaattctggtggaacccgagccaggcaaaaggggatggccatgggcctggggacacctcagccctgtgctcagatattcactctcgctcccacgttcctcagcacaggcgtgtggtcggctttgagggcccgactgtgcccaagagagatgagaacatgcttggatgggggctggacaataaccaagtaaacaaaagcgagaacaaacatcttcactgtgatcacgccacgaggcagcagggcagagagcgaggggtgcagctaggtcccagcagtggtcaggaagcttacgctgagggagacatttgggccgccatgcggggacctgggagagggtttactgcatgggaacagctatgcaa

SEQ ID NO: 23842 - DNA, 1751 bp, Artificial sequence
  DNA replication origin
tgaccccacgagcatctcttctcgcacggggcacaacccttgaaggtttccaggagctgaacagcccaaggaggctgcagcctcttgtcaggttaatttatggtgtttggaattcattacagactaattctctcatagattcgctgctgacatatttgccacttttgctttcacatcagaacagatacgcggtggctgaagtaacagtacagaatgtcagctgcctggtacccacgccctgcttttcacaaagcccctgaattccctgcgagggacagcctccccagctttcagccctgtggtttgggggtgctaactgaacagtcacacggtcatatgagtgaatccccctctacagggtctggctcagggagggcacaggtccagcctgagtccccatcgtcctccaggcgcaggcctccgtctcagcaggtgggacagggactcccccgtgggcctgaacccctgccgcagccattcggccaccagggggcagagtcgacctcggcctgaagccaacactaaggatgcgaaggcgagctgggcccggtgctgcaactgccaaagaattcctgcaacgccagggcttctgagctccggacttcacagtcagctgcgtcagtgagtcccccttctgcttaggccagtgcatgctgggatttctgtcacctgcaatcggctgggccgtaagagatgcaggtcaggacacccccgatggcagtgagttgtgtggctggaatccctcccagagaccccgccccttctccaggcggggcagcccagagcacaccaggacactgctctcccttgcaccttccctgatgtgccagctgagggggaacctgttatcatcccgttctgcacgtgaggaaggcgaggtgctgaggggctaaactcgctgagcccagcagatggccagggcagatgcgggactggcaggggctttctggctctagaatcttccccgttgccgccccccagctgctcatcaccctggggtgaagaaatccctaggagaactccgtagactccgttcttctacacatgggagctctggggctgggtaaaggccctgtcctgggtcacgagagccaagcgagggcgtgaaaccagagctgccctgagatggcagggacacggagcaagtggaggactttggtgccggccacaggaggcaggagtggctatctctcctgtgacctcaaagcatcctctgggggcagaagggccgtggcactgctggcagcctgaggtcaacttacttgaaggcactggggtctccatggatcttgtagttgtcggcgctgatctgtgagatgactctggtcacagcgatgaggatgccaatgttgacctgcacaagaaaccatggaggaaggtgaggggggcctgggctgcacctgcaggagagctgcgtccgcctggccactgccctcaccacaggctacccctgcccagccagggctcctgggacacaggggcatcactgggacaaatctcaccctgttccgtgggcttttaccaacacacacaacatgcaagcttgcctctgagagcacctgcactgagaagacagcagagacgagttctagtcccaggaacacatccgggcatgagggcatgagcctgggccagacctcatcttagcatttgcttcgttagtgtgaccctgggcaactcacccaggtcctcggagcctcagtgccccaggtgatgagaaggatagtgcccactgtgcaaacgactgctca

SEQ ID NO: 23843 - DNA, 970 bp, Artificial sequence
  DNA replication origin
cccgcctggacgccagccccgagccctcagagcccgctgtccccgcgtctgcccgtgcgggacagagaaacagggtcaggccggagaagggccgcgccagccgggcaggagtccacagaggggccgcagcacttgccacccgggcagcagcggggctccccgagccaggcctctggacgacccctggtcggagggggagtggctcgggctcgcttccgagggtcctggccagcggaaggaggggctcagggacgggcggggagatgccgtcgcggtcccggtcctggtcccggtcccggtgaggacagcggccggctcttcccgtgacccggagggccctgtcggaagcagctggaggacccggagttccccagagtttcctaccagccttcgtctctacccgcccctcgcgccgcagtagagggaagggtgcgttccgctggcggcagcatatgagtatccatgagcccccgtgcctgggtgacactggcagtgtccacatgtagcacataggtaataatcatgtcagcagcctgcgtgtgtgacacctataagtacaggtgcaggtggcacaaacatgggtgatgcagatacacccaggcagcgccacacacagcaccatgcaggtcatacaaggaaggaatccgcagactcctcccacgagcagcggacagacgggagcatgcgggaatggtttaatacacagagcagcaggcccaggtaataggaggtggcacacacaggttgtttacaggcaaacgcacagaagtagcctgcagcagaacgcacacacacgacatatcaggtaaaatacaagactcacgtggcaacacaaatgaccaccagcaaacagatgacaggcacaagtgacacaagatgctgacacacttaggtaacatgaaggcaccatggacacaggaaatacagacagtgcatgccagcagcctgcacggtcataacaacacacgcg

SEQ ID NO: 23844 - DNA, 969 bp, Artificial sequence
  DNA replication origin
gtcttagctgtgggtgtgggggctcctgagtgaaactcgggaggtcccggaaggagggggcgaggccctcagcagctgtggagtctgtgccctgaggccccacactgggaactggggacgaggagacggggacgcggcccgggtcttgacctcctcaggctcaccagacactgcgttcaggcctccgggacggtcctggtggggctcggcccccctcgtcctgcgcctcctctgggcccgcgggtccccagctcccccagccccgccgcgggccgcacctctctggacggcgctgtcaggagtaggagttcagccccagcgcatccgcgccaggacccgggctctgtggccactgagtgcagaacacgccgagcttcggaggtctgggagttccaagtggaatttgaatttttaatctaattgtctgattcgtgaactcggaagctgacgtcacgcccagacgtcccaaggtatgagctgtagatacgcatgtgagcgctggtgggagacgccaggctgggatttccgctcgatctgggaatgagcaatgcaacctaatgacacccggagctcctgaatcacctggggaagatgaagagagacactctctggtgggaacgtctcctagaaacaaggcctaagatggggcgaccacagccccacagctgtgtccagatgcagggagcactcgcctgtgctgtaagtctgtcccacggtggagaaagggcccaaaccccacagccctgcggtccacccttcaagtgatttgggcgtgctctctttcagcactcatgagtcccccagcaggtgggggttgtggggagaatccacatcagcagttaaccccctcactttggtctgtgaagccctacacgctcctctgtcttcatttcctcagcgtcatatgcttgactttctccacccccaacctgctctgcctctgtgattatcttcctttttctttacttc

SEQ ID NO: 23845 - DNA, 1326 bp, Artificial sequence
  DNA replication origin
attattctcagtttgcacagcggggtcctcgtgcacagagtgtcactgtcttggtactcaggggagctcccggtggggagactgggcaggctggatgtgggcggcaggggagctatgggggaccccatccctacaggctcctccccacagaccaagtgcgctgccttcctcaggtgctgacacaggtgcgcagacacaggacagctggggaagggggatagacagagcacagctgtcccgggcccagagccagtgcaggccgcccaccacccgatggagtcagggtttggattagagaaggggccttgctcaggttcaggcctgagcagaaccaggggtttccaaagcgctgggcttgactccaacagattaaagctcattacacccaccttgggatcattcctgccctctgcaggtgtgctgtgctgaagcagtggggccaggtgtgaaacaggaggcatggccaggttggaggggcggggtcaaaccacaggggcggggccacggtgggggtgtggtcagggtgtggtcaagctgtaggggaggggcgggctcgatctgcgggaacgagaggtgtggtcaaggtgtggtcaagtcatggggggtggggccaggatggaggggtggggtcaagccacaggggctggtcagggtggagaggtgtggttacaccgtaaaggcagggccagggtagaggtgagggatcagagaaggaaatggctagaaagagggggtggggataggatggacaggggtggccaagccatgggtgtggagataggggtggggccagggtgaggggaggagccagacagaagggtggggccagggtgaagggcatggtctaaccatggagtgctgtcaagcactgggggaagccaggatggaggggcaaggtcaaaccacaggggtggggccaaggtggagacgtgtggtcggggtgtggtcaggccataggggcggggccacattggagggggctgggtcaggcgtgggcggggccaggctggaggggcagagccaggcagggggtgtggtcacactgtcctgtaacgggagggaggacacacacatcctgacacccagcctttgaggtctccacgggtctcacagcccgtacctcactgcgtccatctcttcccccacttcatgactggccctcaagagtcaggagtgaatgaaccccactgcacagtgtgtgacacatcacatctcatctctctgcgcgtggattccctcaggcttcaggctttatgatgtattttcgttccttcccattcctcctcccattcccctccctgccgttaggaaatcactgagccgtgt

SEQ ID NO: 23846 - DNA, 2324 bp, Artificial sequence
  DNA replication origin
tgtcctcatccccactggacccactctaacccctttccaggcctcagtttccccagctgcagtatttgtgctgggtgagctctaaggttctgcacctgacggtcagccccaggaggtggctggttacaatgacacagaggaggagacagagtgaagagttcgctggggagtggtctttgagaagagacctgaacaaggaggggggaacacgcagaaatccagggaagaacagtccagacaggaagcagcgagcgcagaggcccctgcgctcattcaggaatggaagaagccccagtgaggctgcaggtggtgacctggggagctggtgggggggggggcagctcatgggcagaagcccctgtgaggctgcaggtggtgacctggggagctgggcggggtaggggggcagctcatgggcagaagcccctgtgaggctgcaggtggtgacctggggagctgggcgggggggtggagctcgggcgggggggtggagctcatgggcagaggcctccttggccttgatgggaattttattccaagcactgagagagaacagaagtgtcccactgtgggagggacaccatctgtctccatctggggacggtttgtgcaggggatgatgagatggggagtcggaaagcggaaggagggagacggattacttcatcccagtgggaggagcagggtgacttgggaaccctttatgcccttctccatttacttattcattcattcattgcccatccctcccctctagaacgcattatccaggaaagcaagaaaacctgcttgttttgttcatttctgtgtcctcagtacctaccacgtgcttgaaagatgaccaaaactcagtgaatgtttgttgattgagtgaatgaagaaatgcatgcgcaggtgagtgagtgagtgaataaatgatgcatgggtgagtaaataaatgaatgtacgtgtgggtgagtgagtgagtgaatgggcacatgagtgggtgagtgaatgggcacattggtgaatgagtgaatgggcacatgggtgggtgagtgagtgagtgactgaatgggtgcatgagtgagtgagtgaatgggtgcatgggtgagtgagtgaatgggtgcgcgggtgcatgggtgagtgagtgagtgagtgaatgggtgcatgagtgagtgagtgaatgggtgcatgggtgagtgagtgaatgggtgcatgggtgcatgggtgggtgcatgagtgggtgagtgagtgagtgaatgggtgcatgggtgggtgagtgagtgagtgaatgggtgcatgagtgagtgagtgaatgggttcatgggtgagtgagtgaaagggtgcacgggtgcatgggtgagtgagtgaatgggtgggtgcatgagtgggtgagtgagtgagtgagtgagtgaatgggtgcatgggtgggtgagtgagtgaatgggtgcatgagtgggtgagtaagtgagtgaatgggtacatggatgggtgagtgagtgactgaatgggtgcatgggtgggtgaatgagtgagtgaatgggtgcatgggtgggtgagtgagtgaatgggtgcatgagtgggtgagtgagtgagtgaatgggtacatgggtgggtgagtgagtgactgagtgggtgcatgggtgggtgagggagtgagtgaatgggtgcatgggtgagtgagtgagtgaatgggtgcatgggtgagtgagtgagtgaatgggtgtatgggtgagtgagtgagtgaatgggtgcatgagtgggtgagtgagtgagtgaatgggtacatgggtgggtgagtgagtgactgagtgggtgcatgggtgggtgagggagtgagtgaatgggtgcatgggtgagtgagtgagtgaatgggtgcatgggtgagtgagtgagtgaatgggtgtatgggtgagtgagtgagtgaatgggtgcatgggtgagtgagtgagtgaatgggtgcatgcgtgagtgagtgaatgagtgagtgagtgaatgggtgcacgggttagtcagtcagtgagtgaatgggtgcacgggtgtgtgagtgagggagggaatgcctgcatgggtgagtgaatgaatgcatgcatgcacagatgaatgagtgagtgaattcacatgcgggagaatgactgaatcaacgaataaatgcatgcatgggagagtgagggaatgaatgggcgcacaggtaagtgaatgagtgctgagtggtggtgaccagcagaacagacctgcccgccaactcctgcctgggtcttccgcccccttcatccaagacctgcctgtgtctaggcagaagccgtgcacccctctgaccagtggagcccctgccccgcgtc

SEQ ID NO: 23847 - DNA, 1034 bp, Artificial sequence
  DNA replication origin
gaacaatcgctcaatcccgctggtttaatcatacactaaaagcctagtcattgaaagagggtgacatcaggtgggggttcccctcccctccctgggaagggagcacggagctcacttgtgggtgctggatcctcacagcctcctctgcttctaaaggacgggggaggcaggagaacaggtggggcccagactggggcgggaggaaggtggagctgaccccatggcctccaggggtcggggtggggaagaggtggggcctaggctaggggaggaggaaggtggagctacccgatggcctccaggggtgatgggcaggtgtctctgggataccccttccccgaggcagccactggactaacccgaggagaggggaggggagcggaggggaggggagaggagaagagaggagagaagagaagagaatgctctgccccaggaggcgacggggggtcaggacaagatgtggagggagccccaggagggaagcgctcagccccagcgaggccggagtgtccttgtcgtctgtaaccgagttccttctcatccagcatgtctgggctggggcacccttgacagaaccacatggggtgttgtgttgtggtgctgcggtcatggcgttgtggtgtgttgtgtggttgatgctgtgttgtgatgtcatggtgtggtgtgtggtggtgttttgagttatgttgttggtgtggtgatgtggtgtgtggtgaatattgttgatgttgtgttacgttgtggtgtgctgtggtgtgtggtgcagtttggggttgttttcatggtgtgatgtgtggtgtatatggttgtagatgttcttgctgttgtattatgttgttgtgttatcttgatgcactggtgctgatggtgtggtgtgtggtgttgttttgtgttatgttggggtatggtgctggtattgtatggttgtagctgttgtattgtgttgttatgttgttgatgtgctgtgtctctgtccacactgggcagatggtcctggggacactcctggaaccccctggctcccggcattc

SEQ ID NO: 23848 - DNA, 1301 bp, Artificial sequence
  DNA replication origin
tctttacagaggacatatggtcacgtgtggggacacgatggcaccagtgtcccaagctctgcacagatgatatgaggtcacacatggagacacgagggcaccagtgtcccaagctctgcacagaggacatggggtcacatgtggggacacgagggcaccagtgtcccgagctctgcacagaggacatggggtcacatgtggggacatgatggcacccacaccccgggctctgcacagaggacatgaggtcacatgtagagacacgatagtaccagtgtcccagctctgcacagaggacacacgtcgcatgtggggatacaatgccatacgtgccccgtctgtgatcattgtcacctcccaggcacagcctcactgaggacaatggagtggcctgggaggaccatgcagtcacctctgcacagcccatgtggctggcagctggaatgtggggtaggtcagatgagagccaccctgggacccaaatccccacaggcccctagacccaatccccgatcacacagaacaagccagtaagcgtgtgtcccagataagccaaccgtgctctccgcactcgggatgtggctgccccgcaggggtgggtctcaggggttgacttgggttgaccagatggactctggagcagggcagcagctccgctctggatggagttcagggtttggttggaagaagctggagccaagaggtaacactgggaagggggctcctgggaggggccgatgagagggagagaagcgggaggacatgtatcgctggggtccaggagcagggtcctcacgggacgcgggcagccaggagcaggaggtggggcggcggctgaggggtgtctgctgtggatgatgggggcccagggaggaaggagggaaatgtggagggaatcggaggacagtgttgaaccctgagcatggggtggaggccagggaggggcaggagagatgggtctcatgggaggaaaaaggaaaggggagggggaggtgcggggtctggactgtgggacgtgggctgaggggcgggagcgtagggaggggacgcaggggtgcctgaccttcagctccgtcccttgacctggccgggtgacggggctccagaacccagaacccacctcctgggtgtgtctcagggtagctttgcagcagcaggagagatttaggatcaggtaaaagggtagattcacagcggggcttcaaaataatcaataaaaacatcctcagtggcattaacaacagtacccaaccctacgtggttgtattatatcaatattactcatgatcgacagccgtgat

SEQ ID NO: 23849 - DNA, 1102 bp, Artificial sequence
  DNA replication origin
ccaaaccaactcaggatgggcccagggctcaaatgcccccaaggcccaggcagaaccgtgggagtgcaggtgcccaggggtgacgatagggaacggtggggactgcggagaaccggagagggcttccctcctaagggcagtgaacctcaaagttccctaaacctacagagcccaccaagctcacctctccagggggcttcagtccagtctcaagagtggcacctggtgaagggggttcttgggatgtgacagtgacctccgaagcctggacatttgctctgtaaggagggggtctgggcttttaaaatgtcctgctgagaaaagagaagacacagggtggattcgggcacaagggatgtgacagaaggaacagcccctctgcagcggtggcggttcagagggcccaatcagcacacgacccccaccctggcccctgcagaaaggcaggcctggtgcggaagctgaaactcgaagcctagcgcgaaggccccgcagatgtcagtcgtggggtgcgccagaggcaatgggggccccgtgatgagtgcgaccctaactgggttatgttgatgaacgcagggattttcacatcagagttaggaatggcggtgacaataaactaaggaatggtttccgtggatacagttgacacgcggaatcttgtgtcttagaaagtctgtcttgaggctggttacagtggttcacgcctataatcccaacattttgagaggccaaggagggaggatcgcttgaggctagcagttcaagaccagcctggccagcatagcaagattccatgtttattaaaaatttcgaaaggcacgttgctttgtgtctcaggattgctctgtgctgtgttcagacaacaggaggatgaaaacaaactctccaatctcggggctgggaggaaacagggtgcctattactgtgaggtgggatgaattgatctttcatggaatcctcctgcaatgctcgtgggttcgttccttccttccttcaacaagcgtttcttgcggcatctactacgggccaggtgctgtcctgggctctgcagatccaaaagtgaaagaaacggacaaaatccctgccctcctggagctcccct

SEQ ID NO: 23850 - DNA, 1015 bp, Artificial sequence
  DNA replication origin
gggaggcccagggcgggctccgcgcgtccagccgcgggtgggtgtctgcgccgctgggggttccagagaattctcaaccgtccccctctctccccccgggacagcgtctccattccaacctggcacggacgccaggagctcgcgctacgagtcattttaaaaagaaaacacaatttacgtgtgaaagtcgagacgagaaagctcgcgggtgcccgttaggatttgtggggtgagacgggagaattcacaccagtcccagctgccctccagggaaatagaacccacgaacgtgtcacgtctgcgtttatcgataaccgcgtgtgcgcggaggggctgtgctcagtgtcccgcgtgaggctcccgggagagctccctccccttccgcgtctggctctgggagggccctgggcggccaatcaggatccccattgccttcgccgaagtgctgtgtccggtgcaggcctgtgacccacgtggcctccaacagggtccctgtttatcgcgctgtcgtggtcgtggggtttgaggaagaaagcccagcgctggcgccatttggtctcccatccaagttctaaccgggtccgaccctgcttagcttccgagatcagatgagctcgtaggcgttcggggggcatggccgtagactttggccacttggtaccacggtgggctgaggggctgcgggtgggaaggcgatttgaggagcacatttgcaggcagcagactgtggcttccagaaccgactgtgcccgaggataaggcctgaacttcaacaacctgcaagtgggttgagcaacccgtttcaccgttgaggagacagagcgctggcccagcctggacccggagctgaggtgggtcctgcagaagccgtggggggcccggactgtgcatgggaaaagggccacaccaggggctgcaggaccccttcctgattcccccaggacggggcgcctgtcatttgtctacaacccattttccctgggccttctcctccggcttcccccgcatgaaggag

SEQ ID NO: 23851 - DNA, 1075 bp, Artificial sequence
  DNA replication origin
gtagaaggacgagtgtgtggctactgtctgtttccctgacacagcactaagtctaggaggacagggatcttgtttttcttccgaatggctctatcccaagctttagcagacagtctagcccacagcatgtgctcagtgaactggatgaacaaatggatccatgggtggatggactgaaggatggatagatgggtggaggggtagaaggatgtatggatgggtggatgggtgaatggtggatatgtgggtggatgggtggaagtatgggtggctggggggatgggatggatggatagatgaatggggggatgaatggtgggtaggtgggtggatgggtggctggctggctggatggatgaatgtgtgggtggatgaaagcatggacaaatgggtggatggatggaaggatggatgaatggatgagtggaaggatggatgaatggtggatggggggtgggtggtgggtgggtgtatggatggatgaatgaatgagtggatatgtggaaggttggatggatggatggatggatgggtgggtggatggatggatgcatggattaatgggtgaatggaaggatgggtgaatggtggataggtaggtgggtggatggatggatggatgctgctggcctggtcaggggatcactgacccatgctgggaacctacgtatttcctgttcctccaggtcggccctgtgctgacctttagagcggaataatcttaacctgcatgtgtggaactgggatggctccatggttgcctgggctgaggcttcttcctataaggttggcaggaggatggcaattctccttagctgcagatctacaggctggagcaacaactataaaatacatttccttttgaatagacaaagtgtcctccaacagttcaaaggacactcattgacaagcaggtctccacagtgtccctcggcctccagttccctccccagatgcagctggtgttatcatttctgttcatccctccagcaaatactgtgtcaccaacaaggaaacacatggctatgtctcttcttctcatgcaaatgacagggtggtttgtgtgcggctccac

SEQ ID NO: 23852 - DNA, 1096 bp, Artificial sequence
  DNA replication origin
ccctcccatgggtgacatctgggtcactattcccagttctcagccaccatacacagtgcagccacaaacacacatgtcaggacatcctcgtgtgtttgtggctctttccatatgatataagaattaacttcaaggcccccattccgataagttccttggtcggtacaggacacccatcctgggctgacctcaggaggctcctctgaggaagtgatgtgtggagaaacctggggagaggggaggagccggctcaggaagcttctgaatccagggagctgcagatgcccagtccctgggcctggcaggagcgtggcgtggggagaacagagaggaggtgagcagggaggccccatgagtcggggtgtggcagggccctggggtttatgatagagctcatggggtctctaaatgcggggagaagccgtgtgagggccgcacacagaggtggccgcacagaatgggtcggcacaggcccctgactgagcgctagagaagggggcagagggagggtgggtctggaagccttgcaggaaggaggtggagctgtgaagacgggggaataaggaaggaggtggagctgtgaagatgggggaacgaggatggtgtcaggtgccttcaggacacaggatctgcggctcggtgactgttggatggggagaggagacgggcgtccagcacgtcccaggtttctagtgtcagcgtcgggaggctgcaggcaggatactggaaaagtaaagcattctgggagggctaccagtgcagctgggactcgaagaggctgaggtcctctgagatgacccaggagctgtcgacaaggcagggccacggccaaggccagggtggagatcaaggggtgtcagcagaggggcaggggccacattgggggcttcccggggagcaaggtcccaggatcagcaggtcatcctaggaggtgttgttgagtctggccttcaggggagctgtttcagtgatgccccaggcaccattcatcttcccgacactcaggcagcatcacacgggacaccgatgtccttgagttttaagtcctgggaactggtgttcaagttcagtggactcagatgccccacagagccca

SEQ ID NO: 23853 - DNA, 1406 bp, Artificial sequence
  DNA replication origin
tttgttttcattcaaggctccatcagccggggccctggcaggaaccagagttcactcaaccgttcacagaagggtgccttgcagaggcgcaggcagggtgagcaaggatggcgtggaactcgagggggggtgccacagtggatgttgtcgccacctgtggcctgaggagcagggcaggagccatgctgctgggtcccagggaggccatgcggggcactccacagaagctgggtctggagactgggggtccccgtgaggccatatggggcactctacagaagctgggcctggagactgggggtccccgtgaggccatgcggggcactctacagaagctgggtctggagactgggggtccccgtgaggccatatggggcactctacagaagctgggtctggagactgggggtccccgtgaggccatgcggggcactctacagaagctgggcctggagactgggggtccccgtgaggccatgcggggcactccacagaagctgggcctggagactgggggtccccgtgaggccatgcggggcactccacagaagctgggcctggagactgggggtccccgtgaggccatgcggggcactccacagaagctgggtctggagactgggggtccccgtgaggccatgcggggcactccacagaagctgggcctggagactgggggtccccgtgaggccatgcggggcactctacagaagctgggtctggagactgggggtccccgtgaggccatgcggggcactccacagaagctgggtctggagatgagggtccccgtgaggccatgcggggcactccacagaagctgggcctggagactgggggtcccagctcttgccagcagcacagccccatgcagggagggcacgaggaataaatgccgcgacctcagcctgtctctccagcctgctctgtgccccaggggagactccattagtggagcccaactcaaaatagggagggaagggagcctggatggacagagggccccagtcatcttagggcgggtggagtggggtcgggggagccggatggggcctgcagggcagcgggtcccacccaggcccacctgcagacatcaggggcctcatctgggaatgcggggccaggatgctcttgaacaaatggaagttttggcaactctggactttggggtaataggctgggaccatagagatgtgacccacagctcctgtccatgctggctctcatggccactggtctccctcacttggtctccggcctgccctctgcttccgagtccgccactccccacccagcctctgtcatttgcacgctgttgatgaactgtacagcgcggaggtggaaaatgataatctctccctcctcaaacagctctggtcccactaagcccagtaataaggaggaaa

SEQ ID NO: 23854 - DNA, 1186 bp, Artificial sequence
  DNA replication origin
agagatgccctgtacggacttagctcaggacctgcttgtaagtaaagctcagacaccgtcagtgcccctagcaggtgtgtgcaggtcaaggataaccacgctctgggttaaagggacgtggagctggcgagggggctgacgcctataatcccagcactgtgggaggctgaggcaagtggatcacttgagcccagtttaagaccagcctggacaacatgacaaaacccatctctacaaaaaatacaaaaattaaccaggaatggtggcgcatgcctgtggtcccagctattcgggaggctgagagataggaggatcacctgggccggtggccaagatcatgccactgcactccagactgggtggacagagcgataccctgtctctaaagaataaaaataaataaataataaataaagggctctggagaggccccccaggaagggagcgcacccacttgtcaaatgcaatttcatggagcagtttgctcagaggcccatggagccaggtaggggaatggggagggagtcggtggcaggctgcatgcaggatgagggaggggtgcagagttcaccccatctcctccccacatctctcatctctgccctgctctgtcctaatctctacagccgacctccacacccagcatccctgggctcccacagcctctggcttctgttgggcttggacgaggagggaagagggagagtgggggctttgcttccaggcttctcgctgctcagggctgtggctccatgggtggggggaggactggcagggaaggggctgctttagacagaggatgggggcctccccaggaggggatgtttgtctgggtacccagtgacgggcaacaggcatccacgcagagatccagaaatgccgcaggcagggttgagcctgggtttctgggggcaatgggtcgggggcaggagcatggtgggagcagggaggggggccgcaggatcggcagaaacaacgtgtgcagtggccctgtggccccttggccctggataactgaaatgtaatctcactctcatacatcacaaaggttattgtcgggccctaatcacgagaataccctgggcaacctctgttcaattcctgttcccgagccccagcccggctgtctgagcagcagagtggaagtgagtcccggagtcctgtcatcccttaattattagcagcc

SEQ ID NO: 23855 - DNA, 1054 bp, Artificial sequence
  DNA replication origin
tgggtgtgatgtggagggtgggtgtgggtgtgatgtggagggtgggttggtgtgatgtggagggtgggtgtggtgtgatgtggagggtgggtgtggtgtgatgtggagggtgggtgtggtgtgatgtggagggtgggtgtggtgtgatatggagggtgggtgtggtgtgatgtggagggtgggtgtggtgtgatatggagggtgggtgtcgtttgatatggagggtgggtgtgatgtggagggtgggtgtggtgtgatgtggagggtgcgtgtggtgtgatgtggagggtgggtgtggtgtgatgtggagggtgggtgtggtgtgatgtggagggtgggtgtggtgtgatgtggtgggtgggtgggtttgatgtggagggtgggtgtggtgtgatgtggaggttgggtgttttgtgatgtggagggtgggttggtgtgatgtggagggtgggtgggtgtgatgtggagggtgggtgtgggtgtgatatggagggtgggttggtgtgatgtggagggtgggtgtggtgtgatgtggagggtgggtgtggtgtgatatggagggtgggttggtgtgatgtggagggtgggtgtggtgtgatgtggagggtgggtgtggtgtgatgtggagggttggtgtgggtgtgatatggagctccacctgggaagagccacggcccctgtctcatcagatcaccccaccttttcacccagctcaggatcgcagtataagtcccttctctctggctttctctgcaacctgcagttccctgtccgtcttggccaattcatctgatttgcagatggggaacctgcctggcacgaatcttatagctcccagttcagcattatgaatctctcaaggccaagagcagaatattcagctgcacttttcccacagtacctatgttcccccaaggaaaacccagtttcctttctgtctccttctctctctctgtctccctctctccccaccttccttttgaaaatcaagagcaaagctccctcccaactcctggtgttccctgagcagaatgaaagccagccgtgtgagttg

SEQ ID NO: 23856 - DNA, 2446 bp, Artificial sequence
  DNA replication origin
gtgcggctcacaaatccactcagcctgggaggggtggggaggctgacacacactgactgtctcatgaaagggttggacacaccaagcaaggggaggaatattcatgtcttttccgggagcgggcagtgagcttcctggaaccggagcgcgaccttccttcctccagtcatcgtcatggtgatttccaaccatcatggcactgtgggcgtgtcactgagcatggaaatgagatgataataaggctgaaggtctttttgaagtttctcggtcagctatcttggtttcaaccagtctcagctggtctggttagaaagggaactttttatcctgggagtcctgtttcctaaagataagcagagttagcgcagggtagaaattcagctatgttccataggcattcatcccaggtaacagtatcaatgaaagaacagataaatggatgactgggacgaaacggggagcccaggaatagacccacaaaagcccagccagctgatctgtgacggggaaagctgactctggtgtggcctttccctggtggctggtgtccaggagcaaggacacaggggatgctgggtcacaggggagaggacacagagaaagccagggacacaggggacaggatgcgggggatgccgggacacaggggagaggatgcaggggacacaggggatgccgggacacaggggagaggacgcgggggatgccgggacacaggggagaggacgcgggggatgccgggacacaggggagaggacgcgggggatgccgggacacaggggagaggacgcgggggatgccgggacacaggggagaggacgcgggggatgccgggacacaggggagaggacgcgggggatgccgggacacaggggagaggacgcgggggatgccgggacacaggggagaggacgcgggggatgccgggacacaggggagaggacgcgggggatgccgggacacaggggagaggacgcgggggatgccgggacacaggggagaggatgcgggggacacaggggatgcccggacacaggggagaggacgcgggggatgccgggacacaggggagaggacgcgggggatgccgggacacaggggagaggacgcgggggatgccgggacacaggggagaggacgcgggggatgccgggacacaggggagaggacgcgggggatgccgggacacaggggagaggacgcgggggatgccgggacacaggggagaggacgcgggggatgccgggacacaggggagaggacgcgggggatgccgggacacaggggagaggacgcgggggatgccgggacacaggggagaggacgcgggggatgccgggacacaggggagaggacgcgggggatgccgggacacaggggagaggacgcgggggatgccgggacacaggggagaggacgcgggggatgccgggacacaggggagaggacgcgggggatgccgggacacaggggagaggacgcgggggatgccgggacacaggggagaggatgcgggggacacaggggatgcccggacacaggggagaggacgcgggggatgccgggacacaggggagaggacgcgggggatgccgggacacaggggagaggatgcgggggatgccgggacacaggggagaggacgcgggggatgccgggacacaggggagaggacgcgggggatgccgggacacaggggagaggacgcgggggatgccgggacacaggggagaggacgcgggggatgctgggacacaggggagaggacgcgggggatgccgggacacaggggagaggatgcgggggacacagggcagaggatgcgggggacacagggcagacgatgccgggacacaggggaggtgatgcaggggacacatgcgggggatgccgggacacagggcagaggatgcgggggatgccgggacacagggcagaggatgcgggggatgccgggacacaggggagaggacgcaggggacgcaggggatgcccggacacagaggagaggacgcgggggatgctgggacatgggggaggggacccaggggatgttggggggtactacagggtagagttgggccagaaaacgtcttccataaagacccagatgggaaataccttaatcttcaagggccatgggggctctcccacagctactgaaacctgctattgtgtgaaagccgccaggcagcgcagagaccaatgagccgtgacaggctcccaccggccttccccacagaggacgaaactgggcaatgagagcccacagatacctcctgctcccttcctcctcttcctcctacttccctcctcctcctcttcctcttcttccttcagttccttctcctcctctcttcctcctcctcccccccttcctccccaactcctcctcctcattctcttcctcctcctttttgcccttctcctcctcctcctcctgtcc

SEQ ID NO: 23857 - DNA, 1411 bp, Artificial sequence
  DNA replication origin
atagttcaaatcgaatatgcccagttagatttaacacatatgccatttattatctgctgttcatttcagtctgtgttctgcttcctgaatatgtttacatctgttctgtatatattttggagaaccactgagcattgtgttttggggtgatgtgtaagggcgattttgaccaagcagtttgccctctgtgctagcgttaggacagagtccacatacggtgtgtgggtctgccccataaacaagggatccgttcccatctcaggatgaacatagaggtgtgaaatgagaattctggcagtgccctccctctgcttccgggctccagaaagcacttaggagtctgagctggggccacctgcaggcttgtccacactggagacagcacagctctgtgtcagctgcacaggggacaccatgctgagccaaggaagccagtgctcctctcctgaggaggtggggctgtggggaaagcgggggctgcaggccaaaagcatctgtgacatggagcacacagcgggtcagggtgtggtcaagttataggggtggggccaagatggaggggcgtggtcaaactacaggggcgaggtcagggtggagaggcgtggtcaaggcatggtcaagtcataggggtggggccaggatggatgcacggggtcaaaccacaggggtgaggtcagggtggagaggcgtggtcaaaccataagggcagggccagggtagaggtgagggatcagagaaggaaatggctagaaatagggggtggggataggatggacaggggtggccaagccatgggtgtggagataggggtggggccagggtgaggggaggagccagacagaagggtggggccagggtgaagggcatgctctaaccatggagtgctgtcaagcactgggggaagccaggatggaggggcaaggtcaaaccacagggatggggccaaggtggagacgtgtggtcggggtgtggtcaggccataggggcggggccacattggagggggctgggtcaggcgtgggcggggccaggctggaggggcagagccaggcagggggtgtggtcacactgtcctgtaacgggagggaggacacacacatcctgacacccagcctttgaggtctccacgggtctcacagcccgtacctcactgcgtccatctcttcccccacttcatgactggccctcaagagtcaggagtgaatgaaccccactgcacagtgtgtgacacatcacatctcatctctctgcgcgtggattccctcaggcttcaggctttatggtgtattttcgttccttcccattcctcctcccattcccctccctgccgttaggaaatcactgagccgtgtgtaatgacgatctttttattgggacgtgttcttggagagtgcccattgctgtttccggg

SEQ ID NO: 23858 - DNA, 1092 bp, Artificial sequence
  DNA replication origin
gccatgtgaccagccccgcaccaatcacagaaccagaatacagtggtttccaaccacacccggggctagaggccgctccatagaccaaggacatccgtgggggtcccagggtcccagccaggggtgggcgggctcctgagtgaaactcgggtggtcctggaaagagggggcgagaccctccgtgtatctggagtctgtgccccaaggccccacgtggggactgggaacgaagagagaggatgctgtcgggggctcagcctcctcacacctgcccgggcaccaggcacggccttcaggcctccgggacggtcctggtggggctcggcccccctcgtcctgcgcctcctctgggcccgcgggtccccagctcccccagccccgccgcgggccgcacctctctggacggcgctgtcaggagtaggagttcagccccagcgcatccgcgccaggacccgggctctgtggccactgagtgcagaacacgccgagcttcggaggtctgggagttccaagtggaatttgaatttttaatctaattgtctgattcgtgaactcggaagctgacgtcacgcccagacgtcccaaggtatgagctgtagatacgcacgtgagcgctggtgggagacgccaggctgggatttccgctcgatctgggaatgagcaatgcaacctaatgacacccagagctcctgaatcacccgaggaaaatgacgagagactccctccggtgggaacgtctcctagaaacaaggcctaagatggggcgacaacagccccacagctgtgtccagatgcagggagcactcgcctgtgctgtaagtctgtcccacagtggagaaaaggctcagaccccacggctctgctgtccaccctcagtgcgggggagaggggggatccatatcggcagtcaaggagcgggaatctgaaaaggccaaggctgaaccctgcacagaacccagacctccgtgtgcctccagaaacagccgaggctgggccttccttgagatactcttcaacttcaaggctcttctcacctgagctccttggaagctgtcccagacagctgctggtccctcctctgtccccactgtg

SEQ ID NO: 23859 - DNA, 1099 bp, Artificial sequence
  DNA replication origin
ttgtactgcagcagttgccagggccaggtctcctcctcgcttttatttccttgagctcatttgaggatttctgtggcttccagcccgatccacacaaagccggatcaggatccagaacccggatctcgcctcttccccctctgccgtcctgagcctgggctcatggcctcagtttccctggctgtgaaaggagccgggaaagcgcgggcatcaggagcacgaggggcctcaggacagcgcgggtgaccctgggccaaccgagcctcgatgccagccccaagcccgtggagcccgctgtccccttgtatgtcggcggcagacagagggacagggtcaggtggggcagagtccacagaaggcccactgcactcgctacctgggcagtaggggagccgcccaagccgggcctccgacgtcccctggttggagggcgagtggttcaggctcactcccgagggtcctgaccagcagaaggaggggcccagggacaggtgaggagatgcagtcctggtcccggcgaggacagcggccggctcttcccgtggcccggagggccctgtcggaaacagcttgaggacccggagttcccaggagtctcctgccagccttcgtctctgcctgcccctctcgccatagtagcgggaagggtggtaggaacacgtgggtattcacgaggccccacgcctggatgaaacccagacatcacatcggggtacaaattgtgatggcaaaacacacaagtgaggctcatgagacagacgtcaccacacagacaccgccatacagccagtataggcaaataacccacaaaatgagatcagtagctcacatggagaaacatgaaactgttaacacagagcacagaagcacagcaaacatggggtggcacacacaggtcacagaggacatgcacaggaatcacacctccgcagcatgcatggaccggtgacacacaggagaggatacaaagagactcacacagcaacacaaacaagcaccaacacacgcaagtgacatgtacaagtgacaaaagatggtgatacattcagtaacatgggcaacgtggacacaggtgatggcacaacacacaggagaagcc

SEQ ID NO: 23860 - DNA, 1537 bp, Artificial sequence
  DNA replication origin
tttagaagttgacctgctgctctgcggggactcggtgcgggagacgagtggaggctgctgcgtcatccaggtgagaggagagccaggtgcgcagtgagcagaggtgggaggaaagctggttgccacggagatgagggcgtgtccatcactgcaaggctccacccacagcactatcctgggcggaaccttcctggccccacccacagccttagctgattggagtgtggagtacatgtgacttcaggctgtgttcttataggtcgggtggcctctcgtgccctgcccatgtagcgatggagcttttgcaggggatgtcctggagaatcaagggtgagtccaccatctaggatggtggagaagagttatggggttagtgggcctgagaagggactgtggttctcaccatcaggggcagggccatgtaagagggtgtggagtccctgtgagtggggtggggccatgtgagtggggcggggtcatgtgagtggggtggggtcttgtgagtgggaaggggccatgtgagtggggtggggtcatgtgagtggggtggggtcatgtgaatgaagaggagccctgtgacggttggggtcatgtgagtggggagggaccatgtgagtggggtcatgtggggtcatgtgaatgaacagggcagggccatgtgagtgtggtggggtcatgtgagtggggtggggtcttgtgagtggggcggggtcatgtgagtggggcggggtcatgtgagtggggtggggtcttgtgagtgggaaggggccatgtgagtggggtggggtcatgtgactggggtggggtcatgtgaatgaagaggagccctgtgacgggtggggtcatgtaagtggggtggggtcatgtgagtggggaggggccatgtgagtggggtcatgtggggtcatgtgaatgaacagggcggggccatgtgagtggagccgagttatgataatggggcggggcctctggttaattctcccgtttgtctctggagattcctcctcatggctcccagatgctcagggcttctctcccatggacagaacacctccacgagtcccatggcctcagcaccagtgacctcagcgctgctggttcatagagggcaacttgtgcgtgcactggcaggtcctgcctatttaggaaagagaggtggaggctcagatgctgggttcaagactcaccggggacgcgggcaccagggtgctccctccccagcctctggctgacagcactgaactcagccgcctcgcccggcttctggtggcttctggtccacgctgtaccctcctctgtgggctccgtctctgcagggttctcggagacatcgcagctgctaaatgccaaatgcagaacctgggctgtgggtcccggcctggcttcgtgtgccgcgctttccactgagagccgcgtgactgggtgctacctggggcgagggggtgatgtgaaaacactttctgttcagtttcggggcaagctgccctaactccagatccccacgcaattcagagtactttcttttctttgggttttg

SEQ ID NO: 23861 - DNA, 867 bp, Artificial sequence
  DNA replication origin
tgagcttcatgtccaaggtcacagagctaatgcattgctgagctggaacctgcctcctaggtctgtctgacctgtccttttcataattccacaggggccgccttcctatgagaagaatatctctaggagggtggatgtttgtcccttttgtttctggtgcatcaccagggtttggaatgctgctgggacatagcagtggctcagtaactgaagaatggacagatggatggatggatgggtgggtggatggtgagtgggtgggtggatggatggatgcatgggtagatggatggatgaatgaatggttggatgggtggatggatggatggatgggtgaatggatgggtagatggtggatgaatggatggatgaattgatagatgaatggatggatggataggggatggatagatggatgtttggatgagtgggtgggtggatgtatgggtggatggatgaatggatggatggatggatgaatggatgggtggatggatagatggacagatggatgggtgggtggatgcatgagtggatgaataaatggatgtatgggtgtatggatgaatggatgggtggatggatggatggatggatggacaggtggatgaataggtgggtggatggacaaacgggtgaatggatgatggatggatgaccggtagatggagaaatggatagaaggtagttatggagcttgtacatgggctttcagttctattttttccccctgatttgtgctttctgagttggacttcctgagcctttgccagttctgagtcttttccagttctttatgtatatgtatctgtttgtgcacatctaaaaggggtgaagattcagatgtctccaggggccaggcaggaa

SEQ ID NO: 23862 - DNA, 1151 bp, Artificial sequence
  DNA replication origin
agccggtgcagtgaattagaccgagtgcagtgagtgagacctgctgcagtgagtgagagccagtgcagtgaattagacccggtgcagtgagtcagaactgctgcagttgagtaagacctggtgtagtaagacccactgcagtgagtatgacccgatgcggtaagacccagtgcagtgagtacgacccggtgtagtaagaacgggtgcagtgactatgacctggtgtagtaagacccagtgcagtatgacccagtgtagtaacacccggtgcagtgagtctgacccagtgtagtaagacccagtgcagtaagtatgacctggtgtagtaacacccagtgcagtgagtatgaacctttgtagtaagacccggtgcagtgagtgtgacctggcgtagtaagacccggtacactgactatgacctggtgtagtaagacccagtgcagtgagtgtgacccagcgtagtaagacccggtacactgactatgacctggtgtagtaagacccagtgcagtgagtgtgacccggtgtagtaagacccagtgcagtgagtgtgacccggtgtagtcagaccaggtgcagtgagtgtgacccagtataagaccaggtgcagtgagtgtgacccggtgtagtcagacccggtgcagtgagtgtgacctggcgtagtaagacccggtgcagtgagtgtgacccggtgtagtaagacccggtgcagtgagtgtgacccggtgtagtcagaccaggtgcagtgagtgtgacccggtgcagtaagacccggtgcagtgagtgtgacccggcgtagtaagacccggtgcagtgagtgtgacccggtgtagtcagaccaggtgcagtgagtgtgacccggtgcagtaagacccggtgcagtgagtgtgacccggtgcagtaagacccggtgcagtgagtgtgacccggcgtagtaagacccggtgcagtgagtgtgacccggtgtagtcagaccaggtgcagtgagtgtgacccggtgcagtaagacccggtgcagtgagtgtgacccagcgtagtaagacccggtgcagtgagtgtgacccggtgtagtcagaccaggtgcagtgagtgtgacccggtgcagtaagacccggtgcagtgagtgtgacccgatgcagtaagacccggtg

SEQ ID NO: 23863 - DNA, 1586 bp, Artificial sequence
  DNA replication origin
cccaaagatctcatgacaattagaccatgagcactgagccctcatgatgggatcagcaacctcatgaaagaagcatcacagagctcctcatcccttcctcctcgggaggacacagcgagacggcactgtctatgacccaggaagggtgggccctccccagataccaaagccttcatcttggactttccagcctccagaactgtgaaaaataagtgcttggtgtttaagtcatccagcctatggtatttttcttatattagcccaaactggcaaaatgaatacagtggagtggagtggagtggagtggggtggggtggggtgggttggaatggaatggaatggaatagagtagggtggggtggagtggggtggaatggaatggaatggaatagagtggggtggggtggagtggagtggagtggaatggaatggaatggaatagagtggggtggggtggagtggaatggaatggaatggaatggaatggaatggaatggaatggaatggaatggaatggaatagagtggggtggggtggagtggagtggagtggaatggaatggaatggaatggaatagagtggggtggggtggagtggaatggaatggaatggaatggaatggaatggaatggaatggaatggaatggaatggaatagagtggggtggggtggggtggagtggagtggaatggaatggaatggaatagagtgggggtggggtagggtggggtggagtggagtggagtggaatggaatggaatggaatggaatgacccttgcaagcatacttctgtgatatcacttctatctatggcatatgttgggattctctttaacaaatatctcgggaaggtcacagcctgagagtcaacaagcatttcgtgaacgtgtttggctccacgagttgtgttttcaataactgcaacaatcatcacacaatttctgtgagtaaatgactcactaaatcaggcaggaagaaacttttaatttttatttatttatttttttagagacagggtctcgctctgtcacccaggctagagtgtggtggtgtcaccacagctcactgcagcctcgaactcctgggctcgagtgaccctcctgcctcagcctcccaaatagcttggattacaggtgagcaccaccacagttggctaattttatctttagtatagatggggtctcactatgctgcccaggctggttttgaactcctggactcaagcaatcctcctgcctcaacctcccaaagtgctgggattacaggcgtcagccaccctgcccatccggcccagaaggaaactcttctaaagtgagtaggttgtgctcatccacatgaccagtaacttggtcattctcatccactgaaaaataaaaattcaatgtagaaatgaattagagttatgatgcggcagagcaaacctaagctctcacacgcgtttctcgggaaaaggcattgcttcactcaccatcagtgattacacaatataactgagaattaaactgtttacccccacttcccaaaaaagcctctctcctctaaacacaagctctctattcagagaaacattcccagttgctgcaca

SEQ ID NO: 23864 - DNA, 2603 bp, Artificial sequence
  DNA replication origin
cgggcgctccctcagggaccacccagggcatcagcatggccgcctaaagtcctaaaaatacctgcctgaaaggagcctgcagtcagctccctggtctcccttccctgttatgacttcccagctcctgtttttcccaggaaggacaaccccccccatcccgaatcccccagaggcacgtcctgggagggggcgcagagaccgcagggcgccctccaaatgagactcctgaaatttcccaatccatttccacaaggtgtactttcctttaaaataactctaaaaatttgaatatattaatcacataaataaataacacacaccatattacatatcccatatgtcaatatttacacatgcattatgtaaatcgatttatgccgtatatttatatagatgtaagcatgtatatgcgatggaaatgtacacatgacataatataaatatttgattcctcatgttgtttggaagaattgcctgttactaaaaatgggaccataactggatccagaaaagtattttaacacttggagctctttagacacaagaattacgttgctatttaaatttcaaacacgttttttgttgtggggaatgtaatctggcaattagtaaatacttccaagcattgagtactcactccatggagaaacgggatgcagtgaactgtgaattggagtagaaaggatgctgtggttttccctctgtacatttaagtgtggatggggagaagggagtggctgtggtctcgggtggatggggtgaggggagtggctgtggtctcgggtggatggtgagaggggagtggctgtggtctcgggtggatggtgagaggggagtggctgtggtctcgggtggatggggagaggggagtggctgtggtctcgggtggatggggagaggggagtggctgtggtctcgggtggatggggagaagggagtggctgtggtctcgggtggatggggagaggggagtggctgtggtctcgggtggatggggagaagggagtggctgtggtctcgggcggatggggagaggggagtggctgtggtctcgggcggatggggagaggggagtggctgtggtctcgggcggatggggagaggggagtggctgtggtctagggcggatggggagaagagagtggctgtggtctcgggtggatggggagaggggagtggctgtggtcttgggtggatggtgagaagggagtggctgtggtctcgggcggatggggagaggggagtggctgtggtctcgggcggatggggagaagagagtggctgtggtctctggtggatggtgagaggggagtggctgtggtctcgggcggatggtgagaggggagtggctgtggtctcgggcggatggtgagaggggagtggctgtggtctcgggcggatggtgagaggggagtggctgtggtctctggtggatggggagaggggagtggctgtggtctcgggcggatggggagaggggagtggctgtggtctcgggcggatggggagaggggagtggctgtggtctcgggtggatggggagaggggagtggctgtggtctcgggtggatggggagaagggagtggctgtggtctcgggtggatggggagaagggagtggctgtggtctcgggcggatggggagaggggagtggctgtggtctcgggcggatggggagaggggagtggctgtggtctcgggtggatggggagaggggagtggctgtggtctcgggtggatggggagaggggagtggctgtggtctcgggtggatggggagaggggagtggctgtggtctcgggtggatggggagaggggagtggctgtggtctcgggtggatggggagaggggagtggctgtggtctcgggtggatggggagaggggagtggctgtggtctcgggtggatggggagaggggagtggctgtggtctcgggtggatggggagaagagagtggctgtggtctcgggcggatggtgagaggggagtggctgtggtctcgggtggatggggagaggggagtggctgtggtctcggcgttactggagacactgaggatggggcagtttctaaaatatcaatgttcataatacatggggaattacatttctgcaaccatgtccttatattttaaatgaaagtacttgatgtgaacaagtgaggagataagagtgagggggtggcgagttcgtggaaatggtttaaagcccaccagcatggaggtggtgggggtgcctccaagcacaggtggcaaatcccgcaagacaggagcagcagttaagggggccgtgggtgaagttggggggcggctgattacggaggagcttgtggtgggtgggatcctgtcctagcccagacccagggtctcgggaggatgaaggacagcagatgtggggggtggggccgctcccgcaggtctggacagatccaggctgccagggctgagtcggccaaggctgtgggggcccctgtgttactgaaaccaaagacgattctacctccccaaggaaggtacaggagcccaatggagttcgaatcttccctgagcaccacactctttagaaagcccaaacacaaattctctccctattttaaaaac

SEQ ID NO: 23865 - DNA, 1045 bp, Artificial sequence
  DNA replication origin
ctgggtcactattcccagttctcagccaccatacacagcacagccacaaacacacgtgtgggcatgtccttgcgtgtttgtggctctttccatatgatataagaattaacttcaaggcccccattctgataagttcctcagtcggtacaggacacccatcctaggctgacctcaggagactcctctgaggaagtgatgtgtggagaaacctggggagagcggaggagccggctcaggaagcttccagacccggtgagctgcaggtgcccagtccctgggcctggcaggagcgtggcgtggggagaacagagaggaggtgagcagggaggccccatgagtcggggtgtggcagggccctggggtttatgatagagctcatggggtctctaaatgcggggagaagccgtgtgagggctgcacacagaggtggccgcacagaatgggtcggcacaggcccctgactgagcgctagagaagggggcagagggagggtgggtctggaagccttgcaggaaggaggtggagctgtgaagacggggcaacgaggatggtgtcaggtgccttcaggacacaggatctgcggctcggtgactgttggatggggagaggagacgggcgtccagcacgtcccaggtttctagtgtcagcgttgggaggctgcaggcaggatactggaaaagtaaagcattccaggagggtcatgagtacagctgggactcgaagaggctgaggtcctttgagatgacccaggagctgtcgacaaggcagggccagggccagggccaaggccagggtggagatcaaggggtgtcagcagaggggcaggggccacactggggggcttcccagggagcagggtcccgggatcagcaggtcaccctaggaggccttgttgagtctagccttcagggaagctgtttctgcgatgccccaggcacctctcagcatcgcacagggcagggctgtccttgagttctaagtcctgggacctggtgttcaaattcaatggactcagatgccccacagagcccatgtgcccagccac

SEQ ID NO: 23866 - DNA, 1825 bp, Artificial sequence
  DNA replication origin
agagtgcccaggatagtaacctgggtatatgtttcaccccaacatgcccttgggtggccacatgggggtcgtccagcacagccccaggcagcctgaggccatcctttgtggacacatgggaaggcgggtgggcccggggacagccagccagtgactttatctccattctgcagcagtgtctcagggccacagaggcacccagcaagtgctccccatgggagggtccggcacacaggaggcagcttcttctcagccacttggctccaaggaggagcagggtcctgagctgcatcagagcccagccgcgtgtgccttccccgtgtacggggctgtggggccggggggcggcgtagagaccccctgaccaggcctggttcaggctcagggccctgtgggaggaaaatgattttcaaacacaagcccctggctttcctgaatgggtctgggtgggcaggggtggggcagtcagagggaggagggagtcagagaccaggaggctgctcaccccatggggcggtgcctgggaagcagggcctgggatgatgctgcacactgaggtactgtcaaaactgggggcagtcagtccagatgcaagagagtgtttgaaaggatgacgctggccctaacctggggcagaggttctccctgttgcaaagtcagagggagaatcttgtgagttggacacatcaatgtattgagtctcttttgcagcatggggtaggtaagaatgtgggagtggcggaggaagggaaagggaattgggtgtggaggagctggaggtcccagtgggtgccaggctggggatgagaaggtgaggagacagataagggtggtgaggagacagataagagtggtgaggggacagataagggtggtgaggagacagatgagagtggtgagtggacagataagggtggtgaggagacagatgagggtggtgagaagagagatgagggtggtgaggagacggatgagggtggtgaggagagagatgagggtggtgaggagagagatgagggtggtgaggagagagatgagggtggtgaggagacagatgagggtggtgaggagacagatgaaggtggtgagtggacagataagggtggtgaggggacagatgagagtggtgaggggacagatgagggtggtgaggagagagatgagggtggtgaggagagagatgagggtggtgaggagagagatgagggtggtgaggagagagatgagggtggtgaggagacagatgagggtggtgagtggacagatgagagtggtgagtggacagataagggtggtgaggggacagatgagagtggtgaggggacagatgagggtggtgaggagacagatgagggtggtgaggggacagatgagggtggtgaggagagagatgagggtggtgaggagagagatgagggtggtgaggagagagatgagggtggtgaggggctctgaggggaacatggtgcatgaccagcaacagactctccagcccctgggctcacgtggggacattgatggtgctcagctcttgcgtcttccctctaggaatccacccggcagaaaatacacctgtgtgagctaagaaatagactccaggacatcctctctggctctgtgagattcagggtcacattgagctgccctagtttccatctgcagaaggcagattaggtgaacgacacccagctctaccacagaacactggcaaaaaaaaatcgattaggtttaagggggttctgtgtgctctgatgttgaaggattccatgggctaaagctccacctgggaactggacttgacccatcaagcactatctgcaagccc

SEQ ID NO: 23867 - DNA, 2316 bp, Artificial sequence
  DNA replication origin
cggcccctactgcgggcaggaagcagcgcgggagggggaaccgcagggcagacccgggccggcatcgcctccggggacgggcccgctgtgcccgggaggggtcagggccctagaggcggcggcagcgcgtggaccaggccccgactcagggtcccgggcaggagcgtggacttcgtgcattcggaagccgccggtcgaggctcggtggctgctgcgggggcagcgggtggggagggcaggacgcacctctgtctacacccgcttcacccgcttaacgacacgaatcagcgtcctccgcgcagggacccggagctggctggaggcgtccgcagaagacccgcgccggggccgagggccgcgtgggggccgcagacttgcagggagcgcagccccaggtgggcagggccgaggcggggacctgaagccggggagggaggcccagggcgggctccgcgcgtccagccgcgggtgggtgtctgcgccgctgggggttccagagaattctcaaccgtccccctctctccccccgggacagcgtctctattccaacctggcacggacgccaggagctcgcgctacgagtcattttaaaaagaaaacacaatttacgtgtgaaagtcgagacgagaaagctcgcgggtgcccgttaggatttgtggggtgagacgggagaattcacaccagtcccagctgccctccagggaaacagaacccacgaacgtgtcacgtctgcgtttatcgataaccgcgtgtgcgcggaggggctgtgctcagtgtcccgcgtgaggctcccgggagagctccctccccttccgcgtctggctctgggagggccctgggcggccaatcaggatccccattgccttcgccgaagtgctgtgtccggtgcaggcctgtgacccacgtggcctccaacagggtccctgtttatcgcgctgtcgtggtcgtggggtttgaggaagaaagcccagcgctggcgccatttggtctcccatccaagttctaaccgggtccgaccctgcttagcttccgagatcagatgagctcgtaggcgttcggggggcatggccgtagactttggccacttggtaccacggtgggctgaggggctgcgggtgggaaggcgatttgaggagcacatttgcaggcagcagactgtggcttccagaaccgactgtgcccgaggataaggcctgaacttcaacaacctgcaagtgggttgagcaacccgtttcaccgttgaggagacagagcgctggcccagcctggacccggagctgaggtgggtcctgcagaagccgtggggggcccggactgtgcatgggaaaagggccacaccaggggctgcaggaccccttcctgattcccccaggacggggcgcctgtcatttgtctacaacccattttccctgggccttctcctccggcttcccccgcatgaaggagtttgctgcgaagcacggaattccagcaaggctgggaaatccacgcaggcccagcgcccagtgccccagggccccagtgctatgggtcccacaggatccgctatttggggtgaaggccctgggtgtccccggggggcagagctgggctctctcctgcttggagaagggtgtgcttttgtttcagagctgtgggagcagacaacatttctgaaggttgcaatttttgttttttagcaaaaattcctttctaaaatgtatgagcccgagcaacacattcatttttgtgatacggagtgaaatcaggcatgaatttttcacgtttcttttctcattcattgggcgttaggtgtaccactcctcggcttgtcaaaatgttttaatttgtggatttgttttttaaaagtgtacgattggcagggaagtggaggagggtttccctcctgagaacacccaccacgtagacaggaggccccagtgccagctcgggacttgggggtgggaagtatttaactgggatggggaatcccctgcatgacaggttcctgtttcctggctcacctggaggctcctgcagttggccagatgagaccctgacgtggaaacaaatctctcgggcacaggcacacttcagggtgagtgcagccttcacaggggatggggcctcactgggctctgaaggccagggccacctcctcctcctcctccttcccagggactccaggaatcccctccccattcccatcccccaaacctctatcctccatcccaggctttaaagaggtgcattcacctgttgaagatggtggtccaggcaggaaaagagcaggggctgctgctgacttgttccccaggagcacaggagaggaggctt

SEQ ID NO: 23868 - DNA, 1997 bp, Artificial sequence
  DNA replication origin
gccctcattttcctcccatcagatgatgcccagcctgggaaggcactgagaccgcagcggagtgggccagggggcagtgagaggaggggacgtgggtggggcagggctggggcactggaggagcaggtcaggcagggcccgtcagcccagaggcaccccaggactcaagcctgcagccgaccctgctctcctagccctcactgcagctgtgggaaggggaagcatggagccctccctcaaggtcagtgcagcgcctggcttgagctcaccatggtgactgtcccctgctgccaccattgcagtcactgccctggtgggcagcctggaccccagctccactgcgcatggactgtgtggtcttgggcagtgccaagctcagcctcacgggcctgtggggacggtcacaggaggtccacgtgccaggcccagggttcatgcacagggttaccaccactgcgaggttgcctgtcccgtcttgtacccggctgtccatgccctcatctcaggcagcaggacaaaggcaagtggaactgagaggggagagagaggccagagtcccctgcagccctgtccccaggaccagtgccaagagcaacctcagaggagggacctgggagtggctggttccagtccccacccccactccgatgggaaagtgaccccgggtgacctgccaaggtcacagggcagagctagggcgaggtctaagcacctcatgtctgagcagaggaacccactcaaggcccaccaggacccacacggccagtgttgtcatcactgagacatagagacgggggcccccgagccacacagctggacagtgagaaaaccaggctcccagcagtgagctggccgcatgcccagggccttccacagctccacacagcccagcctccaaaccaactcaggatgggcccagggctcaaatgcccccaaggcccaggcagaaccgtgggagtgcaggtgcccaggggtgacgatagggaacggtggggactgcggagaaccggagagggcttccctcctaagggcagtgaacctcaaagttccctaaacctacagagcccaccaagctcacctctccagggggcttcagtccagtctcaagagtggcacctggtgaagggggttcttgggatgtgacagtgacctccgaagcctggacatttgctctgtaaggagggggtctgggcttttaaaatgtcctgctgagaaaagagaagacacagggtggattcgggcacaagggatgtgacggaaggaacagcccctctgcagcggtggcggttcagagggcccaatcagcacacgacccccaccctggcccctgcagaaaggcaggcctggtgcggaagctgaaactcgaagcctagcgcgaaggccccgcagatgtcagtcgtggggtgcgccagaggcaatgggggccccgtgatgagtgcgaccctaactgggttatgttgatgaacgcagggattttcacatcagagttaggaatggcggtgacaataaactaaggaatggtttccgtggatacagttgacacgcggaatcttgtgtcttagaaagcctgtcttgaggctggttacagtggttcacgcctataatcccaacattttgagaggccaaggagggaggatcgcttgaggctagcagttcaagaccagcctggccagcatagcaagattccatgtttattaaaaattttgaaaggcacgttgctttgtgtctcaggattgctctgtgctgtgttcagacaacaggaggatgaaaacaaactctccaatctcggggctgggaggaaacagggtgcctattaccgtgaggtgggatgaattgatctttcatttaatcctcctgcaatactcgtgggttcgttccttccttccttcaagaagcgtttcttgcggcacctactacgggccaggtgctgtcctgggctctgcagatccaaaagtgaaagaaacggacaaaatccctgccctcctggagctcccctg

SEQ ID NO: 23869 - DNA, 1109 bp, Artificial sequence
  DNA replication origin
gatggctgcacccgggacagtcacagtcgaagccgcctggaacacagggcctgaccacccaggagcagccacaggaagacagaagacacgtggtcacacatgaggacacaatggcacccgtgccccaagctctgcacagaggacacttggtcacacgtgggaacaggatggcacccacaccccgagctctgtgccctgatcactgtcacctcccaggcactgcctcactgaggacaacggactggcccgtgtggctggcggccggcacgtaggctaggtcagatgagagccaccctgggacccaaacccccacaggcccccagacccaatccccgatcacacagaacaagccactaagcgtgtgtcccagatgagccaaccgtgctctccgcactcgggatgtggctgccccgcaggggtgggtcccaggggctgacttgagttgaccagatggactctggagcagggcagcagctccgctctggatggagttcagggtttggttggaagaagctggagccaagagatgacactgggaagggggctcctgggaggggccgatgagagggagagaagcgggaggacatgtatcgctggggtccaggagcagggtcctcacgggacgcgggcagccaggagcaggaggtggggtggcggctgaggggtgtctgctgtggatgatgggggcccagggaggaaggagggaaacgtggagggaatcggaggacagtgttgaaccctgagcacggggtggaggccagggaggggcaggagagatgggtctcatgggaggaaaaaggaaaggggagggggaggtgcggggtctggactgtgggacgtgggctgaggggcgggagcgtagggaggggacgcaggggtgcctgaccttcagctccgtcccttgacctggccgggtgacggggctccagaacccagaatccacctcctgggtgtgtctcagggtagctttgcagcagcaggagagatttaggatcaggtaaaagggtagattcacagcggggcttcaaaataatcaataaaaacatcctcagtggcattaacaacagtacccaaccctacgtggttgtattatatcaatattactcatg

SEQ ID NO: 23870 - DNA, 1258 bp, Artificial sequence
  DNA replication origin
ctggtttaatcacacactaaaagcctagtcattgaaagagggtgacatcaggtgggggttcccctcccctccctgggaagggagcgcggagctcacttgtgggtgctggatcctcacggcctcctctgcttctaaaggacgggggaggcaggagaacaggtggggcccagactggggcgggaggaaggtggagcaaccccatggcctccaggggacggggcggggaagaggtggggcccagactggggcgggaggaaggtggagcaaccccatggcctccaggggatggggcagggaagaggtggggcccagactgggggatgaggaaggtggagcaactccatggcctccaggggggatgggcaggtggctctgggatcccccctcccccaggcagccactggactaatgcaggggaggggaagggaagggaagggaggggaggggaggggaggggaggccaggctctgccccaggaggcgacggggggtcaggaccagatgtggagggagccccaggagggaagcgctcagccccagcgaggctgggagtgtccttgtcgtctgtaaccgagttccttgtcatccagcatccagcacgtctgggctagggcacccttgactgcacgtgacagaaccacatggggtgttgtgttgtggtgctgctgtcatggcgttgtggtgtgctgtgtggttgatgctgtgttgttatgttgtggtgtggtgtgtggtggcgttttgagttatattgttggtgtggtgaagtggtgtgtggtgtatattgttgatgttgatgtgttacattgtggtgtgctgtgtggttgatgctgtgttgtgatgtcatggtgtggtgtgtgggggtgttttgagttatgttgttggtgtggtgatgtggtgtgtggtgtatattgttgatgttgtgttacattgtggtgtgctgtgtggttgatgctgtgttgtgatgtcatggtgtggtgtgtgggggtgttttgagttatgttgttggtgtggtgatgtggtgtgtggtgtatattgttgatgttgatgttgtgttacgttgtagtgtgctgtggtgtgtggtgctgttttggggttttcatggtgtggtgtgtggtgtgtatggttgtatatgttcttgctgttgtattgtggtgttgtgttatcttgttgaggcagtgctgttgatggtgtggtgtgcggtgttgttttgtgttatgttgtggtgtggtgctggtgttgtgtggttgtaactgaggatg

SEQ ID NO: 23871 - DNA, 2120 bp, Artificial sequence
  DNA replication origin
cctcaggcctgaggggtgtgactgttctgggcagcccaggcacggtttcctgggatatagggcactgcttcagctcaggcctggggtgcgtgactgctctgggcagcccaggcactgtttcctgggatgtagggcactgcttcagctcctgcccaaaggggtagagggaggggtaggcagagtggcttcacgtccacctggccccaccgggaaggctataacagctgcaccagttctgcttggggatgttgggccattgggctggggtggttccacaggagccacccttattgttccagaccatgacacactccagccatgcttccagttccaagatggcagagcacagtagccacgtgggccacgggggtgggcactgtgttgcttccttctctgggggagcacagccacgtagactccaggcagctccctctgctgagcttagtgcctggggggactacagggaccccggtggtgagggctgtgggcgtccatggtggtggtgagggctgtgggcgtccatggtggtggtgggggctgtgggcgtccatggtggtggtgggggctgtgggcgtccatggtggtggtgggggctgtgggcgtccatggtggtggtgggggctgtgggcgtccatggtggtggtgggggctgtgggcgtccatggtggtggtgggggctgtgggcgtccatggtggtggtgggggctgtgggcgtccatggtggtggtgggggctgtgggcgtccatggtggtggtgggggctgtgggcgtccatggtggtggtgggggctgtgggcgtccatggtggtggtgggggctgtgggcgtccatggtggtggtgggggctgtgggcgtccatggtggtggtgggggctgtgggcgtccatggtggtggtgggggctgtgggcgtccatggtggtggtgggggctgtgggcgtccatggtggtggtgggggctgtgggcgtccatggtggtggtgggggctgtgggcgtccatggtggtggtgggggctgtgggcgtccatggtggtggtgggggctgtgggcgtccatggtggtggtgggggctgtgggcgtccatggtggtggtgggggctgtgggcgtccatggtggtggtgggggctgtgggcgtccgtggtggtggtgggggctgtgggcgtccgtggtggtggtgggggctgtgggcgtccatggtggtggtgggggctgctggggtcctcttgctttcctcctcaccccagggagaaacttctcgtgggtcccagctggtcccagttggggcatggggtggtggaggcccagcatttccttcccgatgtggccatcctgagtttctgtgctcaccagcatttctgtgactcctctgatgcactccaccgctctctctctgttactttcattccagtgctgttgtgtgttcattgttctggctgtctccacgaggggccgagcacaaggggcttctagtcagccatcttgctgacccatgtatatgtgttttgtatggttgaaagaaggccatgatcaaagtgtgatttcacaaataacatggtttaattgccatacaaagagactccttttttcacaatgctcaaagatggggaggatcatgagaacaaatatctcagggaatacactcaacagatgaggtacgttttgtctagggttcagttattaaagtccagttgctctagggtggaagcaggctgctggggacgtagagtctaactgaagtttgaggtgcacctttctatgagaagttattgggagagacagtttgaccagcacagcagagatctggggcgacgcaccaggtccctcaacactagcgagtggtgttgcttgtggacgaggcttcaaagaacagatcagaggctgacagagtagcccagccacagcctgagctgtcaatgtgtctgttgaaattacggatgtatatgtgttttggggtccagtactcacatacgtggtctgataaggtgtgatgtaagatcttcctgggcttgggcttattctccattttctcatcacagcaaagcatgtgccactcatgtagcacacgaagtgtttggaatcatgtcacagctgcatggccaagtggcctgcagggtccatcc

SEQ ID NO: 23872 - DNA, 905 bp, Artificial sequence
  DNA replication origin
ggcacattgagcagtttgggtccacctggataacgagcgtgaggctgagccagggagtccccctggcagcttctgcagcagagggccccgcagccctactcctgggatctgtcctgcccaggcaccagcaagcaggacgggaggggagggataggggaggggaggggagagggggaggggaggggaggggagagggggaggggaggggaggggagcggagagggggaggggaggggagggaaggaaggaaggaaggaaatcagtgatgcaaatgacccatgcaaagactctccaagaaacactgtactcagggccagaagcgcaggctgcagcgtctgttacagacgaattctgaaagaagatgccaggtagggcacctcagggcctggagggcctcacaggaagggctcaggcctgtctgcctttaccaagtacatgttcactctcttaggtgtttgtaggggagtggccaagacagccacgtggctcaggtgtggaatgaagctagaccaggtggaagccgaagggtcggcctctccaggcaggagagaaggatgatctaagggcaggtgcaggccagaatgtctggaaagcatttctggtgcgggattgccagtttggtgacgtggactctgggaagcaaggggacaggggacagcagtcagagctgagctgctgcccacagagcaggctccactgcccagaggctaagcggtatcaccaagcggcggacaactggcaggtcaggaagaagtgccactccagcctggacaacagagtgagaccccatctcttaagaaaaaggaagaagcagcaccagaagctgcgccccctagtcttaactgtctgggaggctgaggcaggaggttgcttgaggtcaggaggtgaaggctgcagtgagctgt

SEQ ID NO: 23873 - DNA, 1509 bp, Artificial sequence
  DNA replication origin
tgccgggtcagtgctgtggtgaccgtcctcgggcagatgctgcccacatcctcctggtgcagcgtctgcaaacatttttatctttgctaaatcagaaagatggaaaggtcttgatttttattgcatttcttcagtgatgagtcaaatggcacagtttcccttctgtttcaaaatgcgtttccattgctttgtgaactcaaccatgtccattcctgtgtgtggcgatggagttctttttcaatcataacaactctctacatgttaggggacttagccttctcgtattagttattttgtaaatgtttgccccaatttgtcatcgctgttttgacttgaaggtttttttacatggaaaagtttttgtacgtatgtagtctttttttttttttttttttttttgccaaaagcctcgagcacctgatactcccagttggtctcccatccaagtactaaccaggcccaaccctgcttagcctccgcaatcagatgcaaccgggcccgttcaggcatggctgttcgtgtttgccgtggcccgtgtttgccgtggctgttcatgtttgccgtggctcgtgtttgccgtggctcgtgtttgccgtggctcgtgtttgccgtggctcgtgtttgccatggcccgtgtttgccgtggcccgtgtttgctgtggctgttcgtgtttgccgtggcccgtgtttgccgtggctcgtgtttgctgtggcctgtgtttgccgtggctgttcatgtttgctgtggctcatgtttgccgtggctcgtctttgccgtggcccgtgtttgccgtggctgttcgtgcttgccatggcttctgggcactgctcctgaggtgggctctgtgtgtgcagaggtgaccttgctttgcctcaggtttgcgcctccaagttttacacaccctccttgtttgctgggtcgttttccactgtaaagggtcggggatcatgagccagaaatctgcatcttgatgcagggagatcgttacgtgggaccggacgtcagcaggatcgtggttctacccgtgcaccgccaagtggacgtttatgccggcggcagctaggatcgtcggagagggcaacacagacttggccagcgtctggaacatcggggaatcctgagggacctaccacgccctgatatagtgatgtttttgtttggtgcgttggtgctggaagggctggggcacttccctggtagaagggagcaggcatcagtgcctggagcaaggaagactacgaagactacccacccagccctctaaccactcgtctccagagttgccattcatgatggccagtgtcccccggaaatgagtacagtggtgtcacactctgcacagaccccctggtaaagtcaacagcacacatgcactctaaatactggagccaggtgtggtgcacgcagttgaggtcccagctacttgagagacggaggcaggaggatcacttcagcccagcaggtcgagactgcagtgagctgtgatcacgccactgtgctgccgcttg

SEQ ID NO: 23874 - DNA, 954 bp, Artificial sequence
  DNA replication origin
gtatttttagtagagacggggtttcaccatgttggccaggctggtcttgaactcctgacttcaggtgatcagcccgccttggcctcccaaagtgctgggattacaggcgtgagccaccgcacctggcctcatccgggattttgaccaagtgcatcaggacaacctggtttccagagcagagacccagccaaagcggctgtagtcaaggaaaggaagcgtatgggtatgggctcaggaaacggtggcgtcctagcgtgtgccaaagtcaggcagggctggaccaagtctcacagcaacagcgtcagaacgcggtttctctcagtccatctctgtgtggggcaaagacggcccagggcagctcctgtgcatccttccccctcagcaggcccagccagagacagactctttctcaaccaatggtcccaaggccacctctctctggattctgggtcaggacctgatcgtggggccaggggcagggaagtgagctgaagccctgggctggaagggattctctacaggaaatcagaggtgctgaagtcagaggaagggagggtggatggcaggcaaagctgggtcgaggactcagaagagggaacgcggccagtgcccccactgcatcatggggctcatacacatctgagacttggaacaggacgctgttgaggggctgtagctcggtgctggcaaggggcttcaccgcggggcttgctggcattgaagggagatggcttgtttatggagcttgggcgacagtggcttgggatgtacaaatgtgagaagggccttacaggcaggccactgttctccccagaaaggcctggtggcggctggtgaactggagatgcttggttagacatcgggaatttgaccttcctcaaagcagctgcctggcaccatggctgctgtgttcccttcaagcctgccaccccattcggacatctgaaagccgct

SEQ ID NO: 23875 - DNA, 1129 bp, Artificial sequence
  DNA replication origin
aggcttgaagggaacacagcagccatggtgccaggcagctgctttgaggaaggtcaaattcccgatgtctaaccaagcatctccagttcaccagccgccaccaggcctttctggggagaacagtggcctgcctgtaaggcccttctcacatttgtacatcccaagccactgtcgcccaagctccataaacaagccatctcccttcaatgccagcaagccccgcggtgaagccccttgccagcaccgagctacagcccctcaacagcgtcctgttccaagtctcagatgtgtatgagccccatgatgcagtgggggcactggccgcgttccctcttctgagtcctcgacccagctttgcctgccatccaccctcccttcctctgacttcagcacctctgatttcctgtagagaatcccttccagcccagggcttcagctcacttccctgcccctggccccacgatcaggtcctgacccagaatccagagagaggtggccttgggaccattggttgagaaagagtctgtctctggctgggcctgctgagggggaaggatgcacaggagctgccctgggccgtctttgccccacacagagatggactgagagaaaccgcgttctgacgctgttgctgtgagacttggtccagccctgcctgactttggcacacgctaggacgccaccgtttcctgagcccatacccatacgcttcctttccttgactacagccgctttggctgggtctctgctctggaaaccaggttgtcctgatgcacttggtcaaaatcccggatgaggccaggtgcggtggctcacgcctgtaatcccagcactttgggaggccaaggcgggctgatcacctgaagtcaggagttcaagaccagcctggccaacatggtgaaaccccgtctctactaaaaatacaaaaattagctgggcacggttgtgcacgcttgaaatcccatctactcaggaggctgagacaggagaatcatttgaatttaggaagcagaaattacagtgagccaagatcgtgccactgcactccagcctgggcaacagagcaaaaaaaaaaaaaagaaagaaagaaaaaacaatccgggatgtcctgtgaaagtccccacctcct

SEQ ID NO: 23876 - DNA, 996 bp, Artificial sequence
  DNA replication origin
cccgcgccctccgcttcgcgttccgcagcccggcgccctccgctctccgcggcgcccccgccggactgagccccgcgcggcagcctcaagcggcggggcggggccatgcaaatgtatgctaacgaggccggccgccttaaagggcccgcgccgcctcggacgctgccacccccgcccgccccgccgtgtccgcgacgggactgggtccgcggcatcacagggaaggcgtttccccgggtgtcttaggacgctcttggggcggcggggacgcgcgggatgggcgcggaggcgggggtcggggcgcctgcggggagctgaccctgactcccctctccggccgcgctcccgggtccaccccccacggcgccgaggcccgggttcagacccgggttcaggccccggagccgccgccgcagcgcagcaggtgggcgcttggtggagcccgcggaccgcgggagagggagggtggggcttggggggcgcgggggactggagggcgagggcgggtgttgggggggctggggtcctcggcggaggctctgcggtccctgcgggcctgggagcgagaatgttaacttgtaatgtttgttggagcgcagcgtgtgcctggcacatgcccaggagttacataaataatttcatttacttacaacatttatgagatgaaaactatgatttccatttcgcagacaaagaaactgaggcccaaagaaatgaagtaacttatgggaggtcctggagcgggcaagcggcagagccagggtcagagcccgagcaggcgcttgtgtggattgaactcgtgcaagttgcgtacaggctgcccaccgagtgggagatcttgggagagggcagggggtgaggttcaagggtaacccttgcctttattcagcttctcctcgtgctggacagcatggcttcccctccttcccaggccctcctgctccaccaccccaaatcgcagctggtactgtcaggactgaggtctcattctacgga

SEQ ID NO: 23877 - DNA, 1760 bp, Artificial sequence
  DNA replication origin
ggccttgttcacgtgcatacggggggcgctccggggcgggccctcccctccagccccggctccagccctgctgggtgcagctctgtctgcagctctgagacaaaggagcacttctcgtccctggcgcccagacctgaatatcagtccactccgggagcgcctccggcgagcgggcggaggaggagtccccgctcccgcccagatcccggcctcctcgtccctccccgcggggaagccgcccgcccctgggcctgagctcggcccgcggttccccgagggccagcagaggacgccccgcaccgccagtgtgagcaggaagccgcggcaggacggaggctccacgccaggccgggcccgacacggagcggggctccaggcagggggctgcccgcagcgtcctccctctccggctggacaccggggccccactcactgcccccggccaggctggggagccacatcctccgctcggtgctgtcgcagggcgcggggcgggtgacccccggggtgccaggagagaccgaggcgcaggtaccagccgagaggagggcgcctgacccactctctccgggcaggggggcaggtgggtggcgagaaacttccaaaccgcactgggtctgatcagccaacatggctcggccgggggtccatcctcctgagtgtgtgggccccaccttgagtccttccctggcattgccccggccccttctgcggcaccctcggacctggaaggcgggcctgggttcacctccctccacagctggagaccccaggcccccagggcgtgattctcagtgggggatccgggagatccgcacctacaaaagggtcttgaggaggtggaggggggcaccccaagttcacaggctgcctggctggaaggaagccactgtggggacctgcaggcacctggacgcgggcagcagggacagtggccagcaccctcccagatggcttcggggcctggggcaaacggtggccaaatcggcttcccatccagaccccctggccaagtcctgccaaccacaggggctgcgggtgccacccaagtggcccctccatatgcctcgactgcctgaaatacacctgcgctgacttgcttggaccccaaggttttggagctcctgaatgtccactgcgctgggcgaggggccctgccaggaccccactgggagactgtccgcggacgagggccaggccgagtacttgtgtggggcggggaggcctcggctcctggcccgactccctgggtaggagtccattgaaggcagcggtggggcaggagcctcagaaggaaccaacgaacccagcgggagttcacccggccgccccagcgggggggcgctgaccccacgacgtgtgctctaaatcttccgggtccacaggagacgcgagtcccggctgcggaacaggggagggggctgtaggaagaggccacgtcgctgcccccaggcagggtttctaagctgagctggggacagctactgggtgtggagtgaggaaggctctccccgcgcccccggctcagcactgtaccagggcaaggcagggccagcctggccgacctggggtggaggggaaggaggctgagggccaggtccttgtccagtggggagctgggggccagcatccctgtgcccccaacaccctcaaccgagcaaactcgggggctcaaggctttcggggtgcccccactccgtagcccctgcccttcctcgctttgtgggtgcgtgctcctgcccccgccactcccacccgga

SEQ ID NO: 23878 - DNA, 1188 bp, Artificial sequence
  DNA replication origin
agcggggactcctcctccgcccgctcgccggaggcgctcccggagtggactgatattcaggtctgggcgccagggacgagaagtgctcctttgtctcagagctgcagacagagctgcacccagcagggctggagccggggctggaggggagggcccgccccggagcgccccccgtatgcacgtgaacaaggccgggattcaggctgctgggctgcggagccgggctttcaggagcccccggcggggacaaaagagcgcactgtccccccgggggtccttggcggggctgcttgtccttgtgggcctgagttttttgtctttctgtgttttgagtacgacatacagcgagcagcccagggtctccacaggcgtccgcctccctcccgcccctggttcctgggcacggatgggacgcggctctccgtgccttatttttgcacggtggcaccgtgggccgtgcgattgcagcttcgcacgctatctggagtgtctgtgccggagccgcccgtctattcacctggttaagccaggctcggcctgcagcctgcttctggccagaacttcccggactcgcggcgagagtgtctcgggatctgggtcctgggtggcagttgtgtggtggcagattttgacaagctgctctaaagtttctgctccatttctcctctcggcagcacagcctgtggctgtcatcaccgcgcccacggcacagtggcagctcccttgatcttctgtaggaggtggggtggggcggggcaggtggggggtactgctgaggttgtgggatgctgggccagatggtgccaggtggcagccgccctccatgtcctggcttctgccggtggcctctgggttcctggccctcaggaccttgtcatcgccctggctggggccagggtgtcccctctcaccctgcagctgctcccagagcttcaggcgagcacccccagccaaaaccaagacaggcaggagggttagaccatggcctgatttcgccatgagagacgtctgactgtcccttgctccgcggtccccttctgacagccgtcttcatggctccggggatgttgtttgccttggacgtgggctttgccacccaactaagtgccgggcctcagtctccctgtctgcgcaatggggccagtgaggacaggctgccgtgcgatcagcggaggtgcttccgatggt

SEQ ID NO: 23879 - DNA, 991 bp, Artificial sequence
  DNA replication origin
gaaggctggagaggatctggggggggacgggaagggggaaggctggagaggatctgggggggaagggaagggggaaggctggagaggatctgggggggacgggaagggggaaggctggagaggatctggaggggaagggaagggggaaggctggagaggatctgggggggacgggaagggggaaggctggagaggatcggggggacgggaacggggaaggctggagaggatccgggagggggatgggaagggggaaggctggagaggatcttgtgggggaacgggaagggggaaggctggagaggatctgggggcactgcagggtgttccctgacacagtgtcttcctgggggttccaggggcactttgcgcatgcgtgagtttgcctccttgttggcagcagatcccgtgggacgcttgccctggctgtggacgcagggcaggtgtcagacgcatgcagggcggcgtttctgtcacgcagtgggtgggagcctcctgggcacccgcctctgggattcgggccctcctgggcacccgcctctgggattcgggccctcctgggcaccgtctgagtgggacaggacggcagggacaggacggggtgtggagcctggcttcccctgtggaccctgcagtaataagcaagtcccctcctcatgttggccccaagggctccacgcgatctggcccacctccttctccaccccgccccctgactctgtcacacccgctcctctgcgctgtgtgttttccctgccaaagggcctttgcacttgctgtccccaccaccgtgagcatgtgagcaccgccccacgcatcacctggacagctccttccgtgtcccccaggatgttccctgagcacccatttcatcagccctccagcccatccctcacccccacacagcacagtggtcacaggcggagacccggaagccaacagcctgggctgagctgaggatacatgtccgaactccctgtgcctccgtgtt

SEQ ID NO: 23880 - DNA, 1362 bp, Artificial sequence
  DNA replication origin
ccgctgtaggtgctggagatgcccatcagcacattctgcactttttagtcctttgttaagatcacagctcaacagggccactgtgcctcatggttacaatagcctgtcacctcctccaggaagcactctggagtttcctcacatcatctatgatattggatgatgaccccctgccccctcaccagggaagggtccacacaggcaggtgcctttcccacccaggccagctgctgcctgggttgggccagcaggtgctgagaccccttgggaggacaactcaccccccagccttcccgtctataagctgaggtcatggctggtagctgcactgagtggcccatttactctgtggggttcacggtggcggtttggggcaccccccactctggtccccagggagctgggcagcctggccacgaggccacatgcatttcaggaaagtggagccgggcctggcaggcagcactcccagtggctgtggaatgttgcccaatgtttggaagcaggtggtttagttgcaggtgtgagcggccagcctgcttcaactcatagaaccagggccccagcaccagcccgggacaggcagccccgcccatgataaacaggcactgtcgcctgtggccccagaggcactggaatttgagcatagaatggcatcgaatcttggggggtggtgggtctgtggggcagggctggtgggtgcctcctacctaacacgagtttgtgctcagggggctgtgccccaaatctcaggctaggcatcctgggaggggccgtcttgggggctggagtgagagggtgggaaccacttcctagtttgccagggacaccccaacagaacaagccttgcaggtttgggagccaccagccttcgggtggacacaggtagaagtggccacctgccccagggggcctcctgagcccacgaggcgccctcgcccagccctgacctgtcctgtgctcccagtgtgggtggaggcgcggctgtggggaggcctgagcctgcagggaagaggcggcaggcagctcaccaggcagctcaggtccatctgggagggggcggctgattcctggctagggcttggaaatgttgacccaggctaatggggtggtggtggtggcaaggtgggcttgttagctaaggggagtaggggttaaccaggcctggagcacagtcctggggcaaacccccccactgcagccagcagctcagggcaaatgtggctgcccctccccacccctcctctcccgccaggcctctaccctgacccactcccacccacagtgggtagggggatgcctgctgtaggatggccgctggggtgggggcccagactccccgctccaggtgtccccctccct

SEQ ID NO: 23881 - DNA, 1355 bp, Artificial sequence
  DNA replication origin
gctgggatctcaggcataagccacagcaccggccaagcctgggctcttatctcccccatgaatgtacagcatggcccaattccttaaactggtgtctgagccacagcctttctcagctggggtcccagaccttggatgctagacttccctgtcacaagtcagctgagagcctgcatttgacactggccacatttaagagccttttgaaggttccctagcattttgcggtctcaggaggcgtggggtggggcagggttgccatgagtggttgtacaggtcgtgcacggcacaagctcacaccatctaagggacatcagatttatttatttattcattttttagatggagtcttgctctgtcgcccaggctggagtgcagtggcacgatctcggctcactgcaagctccgcctcctgggttcccaccactctcctgcctcagcctcccgagtagctgggactacaggcacctgccaccacacccggctaattttttgtatttttagtagagacggggtttcaccatattagctaggatggtctccatctcctgacctcatgatccgcctgcctcggcctcccaaactgctgggattacaggcgtgagccacagcacccggccagggacatcaggtttattaagacacttttccggcagctgcccagggaagagacaagaggtgccttgtgggcagatagggggctgggagggggcctgcccggaagcagtggtggcccgtggcaggcttctcactgggtaggaccgggccctctgttgcaccccctcaccctgctctctgccctcaggagtggctaagcaggttcggttacctgcccccggctgaccccacaacagggcagctgcagacgcaagaggagctgtctaaggccatcacagccatgcagcagtttggtggcctggaggccaccggcatcctgggtcagttctccagggggcagcgggagcgccgtggcccccgtcaggtctgcgcccgtcggccatgccccctctgatcaggcacagtcccgtcttatgcttgaatgaacctgggtcctggcctggtgtagctcagagcctggggctggtcccccaaagatgacgtgggaggagggggcggctcggaggctggtgccagagtcagggctcccacccttgcggatgctcgggatcctagggtggggagtgagctgggctaggctctgagctccatgctttccctgcagacgaggccaccctggccctgatgaaaaccccacgctgctccctgccagacctccctgtcctgacccaggctcgcaggagacgccaggctccagcccccaccaagtggaacaagaggaacctgtcgtggaggtg

SEQ ID NO: 23882 - DNA, 1003 bp, Artificial sequence
  DNA replication origin
gcagcgggagcgccgtggcccccgtcaggtctgcgcccgtcggccatgccccctctgatcaggcacagtcccgtcttatgcttgaatgaacctgggtcctggcctggtgtagctcagagcctggggctggtcccccaaagatgacgtgggaggagggggcggctcggaggctggtgccagagtcagggctcccacccttgcggatgctcgggatcctagggtggggagtgagctgggctaggctctgagctccatgctttccctgcagacgaggccaccctggccctgatgaaaaccccacgctgctccctgccagacctccctgtcctgacccaggctcgcaggagacgccaggctccagcccccaccaagtggaacaagaggaacctgtcgtggaggtgggtgtgtggccagggtgaggagcggggcctccgtggaggtgggcgcgtggccagggtgaggaacggggtctccgtggaggtgggcgcgtggccagggtggggaacggggtctccgtggaggcgggtgcgtggccagggtgaggaacagggtctccgtggaggtgggcgcgtggccagggtggggaacggggtctccgtggaggcgggtgcgtggccagggtgaggagtggggcccccatgtctccgtgtctgggcctgctgtagatatccacaaaccagggtacttcagacagcagcaggagctctctccccactctggaggccaggagtccctgcaaaggagtaggctggatggtgccctggggaggtagagggagcatctgtccagggttctatccagctgtgcagttgctggcagccctcgatggaatcaccagcctctgcctccaccctgccctgtccgcgcgcagcctcctctcccgtgtctccaggatgctcctcggatttagggcccaccctgatccagtgtgacctcatgtcaacccctcatgacatccacaaagaccctatttctttttttttttttgagacagggtctcact

SEQ ID NO: 23883 - DNA, 969 bp, Artificial sequence
  DNA replication origin
aaaaaaaaagagccagacacaaaaggttgcatggctgcattagaggcccatctatgaagaaaggaggtcaggggttgccaggggctggggggatgggatgggcgtcgggtctccttcggtggtagtgggtgatgaaaaagttctggaaccagatagaggtggcatccacacaaccttgtgaatgtcctgaacgcatagaagtacacaccttgaaattgtgaatttctttctttttttttttttgaggcagtctcactctgccacccaggctggagtgcagtggtgcgatctcagctcactgcaacctctgcctcccgggttcaagtgattctcctgcctcagcctcctgagtagctgggattacaggcacctgctaccatatccggctaattttgtatttttagtagagacagggtttcaccatgttggccaggctggtctcaaactcctgacctcaagtgatccacccgcctcagcctcccaaagtgccgggattacaggtatgagccactgcatccggccaaaaaagtgaattgcatgggatgtgaattttactacagtggaaacgatgcatggatgtcagagcatgtgaagcggcaaggacgatgctgaggccgggagggtccgggcggcaggggcagcactactgcagggtgtggtgggcggtgtggagggcagctggggctgggtataagtgaggtgaccgcgtcggcctctgatgcacgtgtgctgtctccccggggcaccagctcccaggacaggggctctgcctcacttcctgatgtgaacccagcagaggggtccctggtgcctgacttggctactcttgggtttcccaggcaatctacatacctctgggtgcctcagttttctcatctgtaaagtggggacagtagtcctaccttatatggccacaaagatcagatgatttaagacgtgcaatgtgatttgcacaggcctgggacgcca

SEQ ID NO: 23884 - DNA, 1395 bp, Artificial sequence
  DNA replication origin
gcacagagcagctggtttgcttgtgcactcagcagatgcactctgagcacctactgtatgccccgtcctgaggcagccgctgtaggcacacagagggcaaaacgatggaaagccctgccctcgttctagtcaggccacagtccacccgcaagtcaggaggagctgatgccagtgccgttcggtgtggtcagaaatgaaggacaatggggagaggtctccttagggagatgctgtacaagcagaaactagggaacagtgttccagcccggggaacggccgtgcgaggcaggagcagccctgccgagtcccaaaaacatcaaaggggctgcagctggagtaccaggggcctggaggaggctcgggacagaagcgtgaggggccgtggctgctagggccggcctgcctctccctggtcggccccggtgcccaccgttccaggaaccacctcgtggcagtgttacaggaagcactccttttgcctccaagtctccgggaagggcaggaaagggagacagtagcaggggcaggtgggggtggcagggctgcaggacagagacccccatgctgggctgaaacacccggagtttccctcacagtctggaggccacgagtccgaaatcaagggctaggcagggtgggtcccctctggaggctgtcccaggcctctcccacatccagtgtcaccctcagccacatccctcctgccaccgcctctgtctccacccggccgtctcctcccccatctccgcatcttctcttataaggaagccgggccttgattcaggtcccctagtcctgtttgttttttgttttttgttttttgtttttctgagacaaagtctcactctgttgcccaggctggaatgcaatggtgtgatctcagctcactgcaaccttcacctcccaggttgcaattctcctgcctcagcctccctagtagctgggattacaaggtgcccgccaccactcctggctaatttttgtatttttagtggagacagggtttcaccacgttggccaggctggtctcgaactcctgacttcaggtgatccacccgccttggtgtcccaaagtgccaagattacagatgtgagccactgcacccggcctgcctaatcccatcttaactcatcttaactaacacatctgcaaagaccctctttccaagtaaggtcacgtcctgagattctgggtggatgtgagtttggaggacgtcattcaatccaatgtggcagccactcccacagtcacgggcgggaccccgtttccttgccgaggtaaagggtgttctgcgtgtctgtcaggggaaccacttcctgtaactccatcgcctgcccggccctcagcatttgactccgtcacccccatcacctgggagccctccggtgactgtt

SEQ ID NO: 23885 - DNA, 2127 bp, Artificial sequence
  DNA replication origin
accaggcagcagtgtgggtggggttggtggcgccggcacagagaggggtgggcccccagcccgagatgctccctccagggccggaggaggctggcggcggtgcggcctgactgggcacccttctggagcggccacccctcggctcgtcagtcaacacagtccctcactaggggacagctccgtccttgccacctgagcctgcccagccctggcggacagtgccctctgctggccttccggtgccagggtggcccgtcctcatcccgcgccagcacctcccccagggactccggcacagtccttgccctctgtggccaggctgtcccaccgcctctgtcctctcatgggctcgcgctgtgtgtcatagcgtcagggcctgggccgctgtccacagggcgcctggtgacagtggcggcagcagcagcagcatggtggcagccaccagtgggcctggggcccccgggggagaggatgccccagaggtgcatgagcagacctcgtaaccgtcctccgagcggctctggtcatgttgtcctggaggggcgcggggcccctctgccgcgtccacgcccgcagccacagatccatcggcctgtgagtctccacacaccagccagtcccgggccgtggactgtgggtacccgggtgccacctccagctcgccatccagcactttccagtactcctggccacggaagaagtaggaggcacctgagaagaggagggagagctgagctcaggggagggctgcagcaggaggggctcgagccggacagcgaggagggagcgttgggctcagggagggctgcagcggaaggggctcgagtcgggccagacagcagggggcttgcacaagactgcagtggggggtcagaccagacggctggtggggggcggctcgtgctagatggcagggggtgcccagataatatctgagatggggtcagcatctgctcagctgtgggcagctctgcaggcatggtcacaggcctgggaagctccagaggagcctgctggggcaggggatggaccaggagaccctcagagtctctttcccttactggatatttattgagggcccactctgtgcagggctgttccaggtgacaaggatgcagcgttgaaaacaaaacagaggatgctgccgtccctggagctgaccctgtggggaggtttcttctacactgtgggacgtggcaggggtgatgcccaggagggcgtttggcagggctggggccggcgagggaggggctgtgtggacatctcaggaaagtgtgcccagacgaggcatggccagtgccaaggccctggggcaggagcgtggctgggggagcagcaggggcgagggagtgctgagggcggggagaacaagggcagctcgtgggccaggccttcggggagcgactcggggacgcctgcagggtcggcagctccaggcgaggggctgggaccctcagagcccacaccgaccggggccgtcctcctttcagggaacctcttggctgccctgtagtgatgcccctctcctggtggggaaaccaaggccgcatggcccgtccccccagctggcactcaccgtcggaccagcgcatggcgtcgtccagcgtgctggggacacccctccacagggggctctgggcggggtagccggggtccatgtgcctcgtgtggtcatcgtagcgccagtacagctggtccttaaagaaataagtcctgtcattgtgggcccaggagaaggcagcgtcgatgccgccaggcgggaggctgaagtcggagacggggcgcgggtatccttcctctacgttattgtccttgaacacccagtacctgtctcctgggggcgagagaaacagctgtgggccggggctcggccccaccccgaagggcaggaggctcctgcctttccttctcctgtgtcagccgcccttgccctggcccctcacctgggcttgatgggacagcggccacactgcaatcaccccacatcacaggggccacatggatacttagtgagcacctactgtgcccagtccgggccatcccatccagcctgtggacgctgccggccacccctttaccgatggaaacaacaactcgggccaaaccgaggcccacgacatgccatcc

SEQ ID NO: 23886 - DNA, 1155 bp, Artificial sequence
  DNA replication origin
gacaggagggaggtcggtctttccacagactggtctgacaggcagggactcctcctgctccagggagcagatggtgaacaggcgggggacagaggacacggctggactccatgaggatgtggcctctcttcacggggaggtggcccggctccatgaggcctggcctggggcctgcctgcccggccctggcagcctcatcctgggatgggtgccatccctgggatgggacaagggggctgtgggctttggctcctgggtgccaggaagcctcatctgcaccctgggtggccccagccgctccctatgctgggcctgtggtcaggaacttcctgctatgtgggagtgaatcccccacagtccaacggccacctcctcatcctcactgagtcacgtttgagggggcacccgggccctccacagcccagggcagatgctggtgagccagagcctgaggccccgaacctgtggcccggggtgcgtctgtgccgcagagaccagaggactgtgcaccagcgggaggactgggccctgcagagtggcatcggctgcaccctctgaacaagagggtactgcaggacagacgcgtcactcgccggccagagtgggggcaggctgagggactccgctgtggatctggaggctgggagcaaagggagcaagtgacagagtggctggagctagaatcagccccttgcagggagcaccctccctccctcttgcgcagggagcacctaccctccctcttgggcgcacccaggtcccggtgctcggccgggcatcatggtctagtgctgcggggcagacagcgtcccaagtggctcacccaacaactgatgcctttcctcgggcacctcccacactcagatctcactgggccagctggcgccccgcccgcccgtgatgcccctgcctgtagcactgaggctcatcccccgctgggcctcaactctcccatctgtgacaggggcgtggggactcctcggggcacgaggactggaagagacagcgcgggacgggctgatgaacaaggaggaatgcgactgccgagacctcctgggaagcccccaccccaagtgcaggtgcgtgggcccctggtcagggtcaagccccttgaggcccgagggtacccactcccatggccctggagcaccaggg

SEQ ID NO: 23887 - DNA, 1311 bp, Artificial sequence
  DNA replication origin
cagtgagaaggtgctggctttgaaccaggaagcgggcctctaagaacctgaccctgccggcatcctgacctcagactcctgcagattggtgggaaagcaaatgcctgtgtggaagccgcacagtctatagcagcctgtcacggcaagctgagctaagacaccgtgcctcagtttccctccctgtaacacggcagctggagagggtgtgtcctggcctcagaggtcacccatgtggaagccgcatggtctacagcagcctgtcacggcaagctgagctaagacaccgtgcctcagtttcccttcctgtatcatgggagctggagagggtgtgtcctggcctcggaggtctcccatgcagaggcgttgtatagcacccatggggctgtgtgtttttggtcaaaagcctgggtcacgctaagggcagccagtgccttggcccggccgtgtggctcaagagagaccctgggcctccaggctgacctccctggggtggaaggaagaagggaagaggtccttgcccctcactggggtggcgtgggtcctctgacctccttcggagggttttgactgtggctgtgggctggcgatgccctgcctcctgggcctgggggcacagcttctccaagttgggccagcacagcctgaggtataagcagtgactctgaaaatccagaacgtcacgtgaagtctccaggtgtttagatggtgactcaggcgaagatggaaaactgcctgctgaagacacagaaccgaggtcccatcacgaggaaggtgcaggcggacaggccgggggcatggaccacagaaggacgggccggcagccctcataggtgcgaggtcacaggggtcggggaaggcccgggagctgtgccgggccaaagaaggctgccctgggtgaggtctgtccctgcagcatcctctgatctgagatccactggctgcgtgtctttcccaactctgaccttgggaggacacctgcgttccaggagacacagaagcgagctcagggtggtcagcgcctcccaaaggatgcagaggactctcatgctgcgggtgcagctttctatgaacatgagatcctttccacaaaacaacacgccctgcccgcgtgttcctcatccgagacgcgcaggaccagaaaagtgttttggagctcagattgtttggagtttggacactatatttgcattatacttacaggttgagcatttttctctgcttttcttttttcaaatactgccacttggccaggtgtgttggctcatgcctgtaatcctagcctcacctcagggaggctgaggcgggtggatc

SEQ ID NO: 23888 - DNA, 1170 bp, Artificial sequence
  DNA replication origin
agcacctggaacagtgcctgtggcttaataggtgttcgttgagcaaataaagagtgacagaaggccgggcgtggtggctcacacctgtaatcccagcactttgggaggccgaggtgggtggatcacttgaggtcagaagttcaagaccagcctggccaacatggtgaaagcttctctactaaaaatacaaaaattagccaggcgtggtggcctgtgcctgtaatcctaggtactcaggaggccgaggcaggaaaatggcttgaacccgggaggcggaggttgcagtgagccgagatcacaccactgcactccagcctgggtgacagagcaaggctccgtctaaaaaaaaagagtgacagaaatgcaggcacctgcatggcaccagccgagtgctgggaggagcccaggccccatggaggctcctgccagagccagcgccaactgccatacgacaggagcaagccaggccccccaccatggtgcaagtgcaggggagaccagcggcggaggccaggcaacctccagagagagggagggagacagagagacagagagagagacagggacagggagatagagagagacagatgcagagacagagacatagagtcagagacaggcagagacaaggagagacagagacagagagacagggagagggacagagagagagagacagagagacagagacagggagagagacagagacagggagagggacagagatagagacagagagacagagacagatggggagacagagatatagagacagagaggcagaggcaaggagagacagagacagagaggcacagagagagagagtcagggagagagacagagatagagacagagagacagagacagggagggagacagagagagacagggacagggagagagacagatggagagacagagatatagagacagagacaggcagagacaaggagagacagacagggagagagacagagagacaagagacagggagagggacagagatacagagagacaaggagagagaaagatagagactgagttggagagacagacagagatacagacagagacagagagaggcagagacagagaaacagactgggggtgacagagcgagcgagaaggcaaggatcctgctgctgttaagtggagaagccgtgggggtcc

SEQ ID NO: 23889 - DNA, 1973 bp, Artificial sequence
  DNA replication origin
aggagcctccatggggcctgggctcctcccagcactcggctggtgccatgcaggtgcctgcatttctgtcactctttttttttagacggagccttgctctgtcacccaggctggagtgcagtggtgtgatctcggctcactgcaacctccgcctcccgggttcaagccattttcctgcctcggcctcctgagtacctaggattacaggcacaggccaccacgcctggctaatttttgtatttttagtagagaagctttcaccatgttggccaggctggtcttgaacttctgacctcaagtgatccacccacctcggcctcccaaagtgctgggattacaggtgtgagccaccacgcccggccttctgtcactctttatttgctcaacgaacacctattaagccacaggcactgttccaggtgctggggccacagccttgaaccaaacaggccaaatccttaatcttgtgaaatcttctgtaaatcttcctgtattccagtggggaaaaaaggcagccaagcagatggggctgtacctgtgagagtgtgtcacccgtgggtggagtgtgcagtgatcagatgttggtaggaaaatgaggcaggggggcggtgtttgtcgaggagggaagccgagcctgcaggagctgaaggaggctgcacacaggccctgcagccagtggtgttgggtgctctggagatcgctgggtgctctgggaggtgctgggtgctctggggaggtgctgtgtgctgggtgctctggggaggtgctaggtactctggggaggtactgggtgctctggggaggtgctgtgtgctgggtgctctggggcagtggtgggtgctctgtggtggtggtgggtgctgtgaggaggtgctgggtgctctggagaggtactgagttctctggggaagtggtgggtgctctgggttggtgctgggtgctttggggaggtgctgggtactctggggcggttctgggtgctctgggaagatgctgggtactctgaggcagtgctctggggaggtgatgggtactctggggtggtgctggatgctctggggaggtgctgggtgctctggggatgatgctgggtgctgtggggaggttctgagtgctctggggaggtgctgggtactctgaggtgctcctgggtgctctgggtcatgctgggtgttctgcctgatgctgggtactctaggaaggtgctgggtactctaggaaggtactgggtactctggaacagtgctctggggaggtgctgggtactgtgcggtggtgctaggtgctctggggcggtgctgggtgctgtggggaggtgctgggtgctctagggaggtgctgggtactctaggaaggtgctgggtgctctggggaggccctgggtgctgggtgctcggaggaagccctgggtgctgaatgctctggggaggccctgggtgcttcagggatgtgctgggtgctctggagagtctgaggagacgctggggtgtcagggatttctgtgtttactgtgcgggctcaggggagccacgggagggttttgggcagagtggggcctgatgagacggaggttctgcaggtccatctgactgccgttctgagaatgggtggacgtggggccagtgagggtgcagggctgggatttgccagggagagacagtggcttggacgagggctgtgagggagacacatcttggttgtatttggagatttgtgaggactatggcagagcgatgagacctcccttgagcatgggagggctgcgtttgccgtttttgcctgcgggagggcggtttgatggtgatggcctggtgattcccacgtgggagtcagaggtgtgctgatgggattttccacgacaagtgtgagacggctggtcctgcagggctttcttagacttcacatgatgctcccggtgcagagggcggatctgtgtcccccgctgcacactggcaggctcgagacttctgtgg

SEQ ID NO: 23890 - DNA, 794 bp, Artificial sequence
  DNA replication origin
ctgagaatggttcccattcaggtccagggcccgggcatctgaccctcagcagggccacagcagggccacagcagggccaagcagccacaggccaagctcagagctgcagcccgggacgcctgcaccctccacggggtgctgaggccaggctggctcctgcaggaagggcaggatacccacaggccagcggtgggaaggctggatgcacgctggtgccacggcccaatccaccaggagggcagcggtgtgagaagggcaaagggaagtggcccaggcctcacggcccacagtgggaaagacagggggagccggcccgggatgcccacaggtgtgaggagcaggtgcgctgggtgtggccgcccagacacagcctggcccgatcccggagcaggagtccccccgcccccacctcagaaggctgggatccgccactgcccccttccccaaggctggaccacatcccaggtccctgcaggggcggcacagcaggtgggcaagggccactgccgggaaccccagctctgccaggcccacgtgtgagctccccccagcctccctttcttgtgcacattctctgtaccccccagcagtgagtgaggtctcccatctcagagcccacagtcagattcccccacccctcctcaaaatccttctgtttttttaggtgagattcacataatataaaattacccattttaagcatccaactcagtggcaccgagcgcattcagtgtgtttcacgatcaccacctcgatctagttcaaaatgcgccggaaaagaaagctggtaactg

SEQ ID NO: 23891 - DNA, 1356 bp, Artificial sequence
  DNA replication origin
ccttccctcagccaggggctgggccctgggctcagtaaacaggtcacagagccattagtcagcactttggcggggcggatctcccgcctcaggttcctggtccccaggacggcaccctggctcccacagccccagccctgcctgccctgggccccgggacacggaggcagcacgaaagccagctggtcccaccgcttgcttcttggggccagccgggcccgaggtcatctccttggccagccagcggcagccgcctgtgccccggcccggccctgactgccagcgagcaggagtctccggcggcccctcccccgccccgtctgacgcagagcgaggccggccaatgccggccgcaggagcaatgtcaacaaacacacggcctagacaggtgggccaggccggcagtgctgccagggccagccggggacgccggactcaggcagggcccctaggactgacgcccggcggggaggggatgcctgttcaggagaactcagccctgccctggggcgccctgcggcccagacaccccctccccggtctcacagctggggaagtcacagcaagagccagcaccagcccaggcctggacccagggtggagtctccaggggcccagtagaccccagcctggacaggctcaacaccagtgctcaccaggggatccagcacctggggccacagtcccccagcccggtccccagcagaccgcagcccagaggccttacctggaagtcgtacagggccacgatgttttcatgtttcagttcctaggacagaaacccaagtttgttatcagtgtggggaggggggcttgcccacgcccacgcccacgccccctcccccagcactggctcaccttcaggattttgatttccttccccagcagcgtctgagacttggcgaggttcttcttgttaatgcacttgacggcgacctccaaatcgtgcttctgaaagccaaacgtgcaccttcaaggccagggctgcccctcgcaggcctcccccagaccccagtccacacaggtggggccctgagatgatcccggttgggaatcccgggactggaaggccgagtggggagccaggttgaggatcgcgctgggggtcctggggtagggatccagcctcgaaagccggctgtgggaccaggttgcggggtgtcccggggtgagggtttggacaggaaagtcgggctgggggtctcggagtgaggatctgggctggaaagcccggcagcggatctcggggcgggagtctgaactggaaagtcgggctgggggtcgcggggtggggatcctggggtgggggtcggcctggaaagtcgagtggggctctcgggaggcgtgggggggtcc

SEQ ID NO: 23892 - DNA, 1105 bp, Artificial sequence
  DNA replication origin
gattgagccagcacagaaccttccccaagctctactcttttagagacagggcctcgctcagtcgcccaggctggatggagtgcaaactatactcttaagtgacaaaattcacggcgcagagaggtgggtgtggcggggaaggacaccggtgaacacatcgccttgtaaggatggctgtccccggtggcccggaaacaactaaagcaggggcctgagaacggagggcagcgggactcgatcgggggcaggactctagcctcgaccgcactccctcccgtaatgtttgaggattttcttttatcacccaaatcgttcattgtccatttttaaaacccagttattttttcctgggtttgggtgcctgcctcaaacattgccttaccgacacagggcaacaatccccacgcctgtgggggcgagggcaggctaagctgcagctccagcagagcccggtgcccggagacaggagcgcctgcagctggcggctccaagtgcttcctgagtagagaaagccgcagagttgccaacactggaggaagtggcagatgcccacaaccaggtgtgtgtggctgactgggatggagctgggcctggggatactggtcccgggtctgcgggggtcgtgcggacagtcacagggcctggcctggagatgcccaggactggacctggggagccctggaggggagcagcaggcagtgtagcccagggtggagggggagtccctcagagtcgctgcctggccagggacagctgtccactccttgctggctcccagagccatgacgcatgtgcaggctgtggtccaggcaggaggcttccaaacatggagaggatgaggaaagaggaggaagggagggaggaaagcagggagaaaaggggtgggaagagggcgggaaaagcagcaggagggatggcccagctccaggacacagtgtgcctgggtttccaggtactcgctggacctgggccccccccacccggcaccttgtgacaagcctcggtccccaaggccacagcaaagctctgagaggcggacggaggaggccaccaaaacacggcctgccagcccttccctcagccaggggctgggccctgggctcag

SEQ ID NO: 23893 - DNA, 1094 bp, Artificial sequence
  DNA replication origin
ggccaaggtgggcagatcgcttgaagtcaggaggttcaagaccagcctggccaacgtggcgaaaccccatctctactaaaagtataaaaattagccgggcgtggtggcacacacctgtaattactcccagctactcgggaggctgaggcaggaggattgcttgaacccggaggtggaggttgcagtaagctgagatcgcagcactgcactccagcctgggcgacagtgagactccatctcaaaaaaaaagaaaaggtgctcatcaccctccccccagccatgtccctccctgtggggctcccagggccatggccatcagcctgcacttgtcctggcaccacaaggcactcacctccataaccaggtagacagaattagccatttcctgcaagacagaaaagaggctgtgagaggtcccagtgccaccgggccccactgcagggagtctggctcagccccaattcggcctgggcaggccctgcagtgccaggacttagctggtcagccagcggccgggagacgaggacatctctgggccacgtgctttgtaggtgggtgtgttctgttttgtggccagccaggtctccatctgatcaaggcaaaggcccctggtccccccataagagcaacagctcctggcagaggacataccccctagcaggaagggtgaaggccaggtgtgtgggcaggtgtgtgtgaccctcaggccatagaagcttctcagctcctcagcccaggatcaaagacgccaacagggctggtcgcagtggctcacacctgtaatcccagcactgtgggaggccaaggtgggtggatcacaaggtcagcagtttgagacctgcctggccaacatggtgaaaccccgtctctactaaaaatacaaaacttaaacaggtgcagtggctcacacctgtaatcccaacactttgggaggccaaggcgggtggatcatgaggtcagcagttcgagaccagcctgaccaacatggtgaaaccgtctctattaaaatactaaaattagccaggcgtggtggtgcgtgcctgtaatcccagctacttaggaggctaaggcaggaaaatcacttgaacccggga

SEQ ID NO: 23894 - DNA, 2414 bp, Artificial sequence
  DNA replication origin
cctgtttaagttttgtatttttagtagagacggggtttcaccatgttggccaggcaggtctcaaactgctgaccttgtgatccacccaccttggcctcccacagtgctgggattacaggtgtgagccactgcgaccagccctgttggcgtctttgatcctgggctgaggagctgagaagcttctatggcctgagggtcacacacacctgcccacacacctggccttcacccttcctgctagggggtatgtcctctgccaggagctgttgctcttatggggggaccaggggcctttgccttgatcagatggagacctggctggccacaaaacagaacacacccacctacaaagcacgtggcccagagatgtcctcgtctcccggccgctggctgaccagctaagtcctggcactgcagggcctgcccaggccgaattggggctgagccagactccctgcagtggggcccggtggcactgggacctctcacagcctcttttctgtcttgcaggaaatggctaattctgtctacctggttatggaggtgagtgccttgtggtgccaggacaagtgcaggctgatggccatggccctgggagccccacagggagggacatggctggggggagggtgatgagcaccttttctttttttttgagatggagtctcactgtcgcccaggctggagtgcagtgctgcgatctcagcttactgcaacctccacctccgggttcaagcaatcctcctgcctcagcctcccgagtagctgggagtaattacaggtgtgtgccaccacgcccggctaatttttatacttttagtagagatggggtttcgccacgttggccaggctggtcttgaacctcctgacttcaagcgatctgcccaccttggcctcccaaagtgctcggattacaggcgtgagctgccacgcctgctgagtatcactattgatgtcttccagcagggactgtggggacacctgccctgggctgggcaggtgcctgcgggctcagggagtagtgtccaagtgtgaggggtggggaggctgggcagggctgggaggtgggccctgggccctgctgcagcctgatgcgtgtctggtctcttgcagtactgcaacggtggggacctggccgactacctgcacggtgagtgcacagctgcgccacctgggctgccagccggtcccacagggcccgcacccagggccacactggcccagtctgggaggcagcctggctcgagtgggtccttggctcattgtgagattggctctttcttgtccccctgggcctcttgaggggatgcagggagctgagctgctcccggctgttaaggatgcagtccctccgctggcctcccccttgcttgaggagacagctgtgaccagaatagcccgaggggagccgcacaaaccaggggtgggggctgttgtcttcatagtgtggctggaaggcggctcttggcccacccaaagttgagccctgtggcggatgggaggggatgtgctgcacggggcggggcggggcagagggaaggacagcaggggggcggccgcgcccgtctgttcccaggctctctgggtgggggtccgggccacagtgccggcgggcgcgggggtgggtggggcgccggcggcctcttgggggtgtcctgagggtctggaggtggctctgggacagttccggggacttgggcctgagcacccgggagccggcaggactgctcaaacgccggctcagacccgcgtcgccctcatagcgctggggcgggagtgcggggctggtagatggacaggacccgctggccccctcgcctcgccccacgcgaggaggaccccacggaccaagcctgggagacagacgctgaggccgcgcgtagctgagactggggctgcgggtcgggtcgggctgtgcgcggctggcacctgtctggatgccgggaagaggggcaggagcgggacccgggcggaaccgcggtggcactgaggctgggcttcggcggcctcccgtctctggagcagctgcagcccggggctgagtggtggggccggcgcgccgggctctgcgcaggagcttcaggtgcgccctggtctcggcggcccgtggtggcttgtgcccctcctgacccggggtttcctcccggcctgcggccctgcctggcgctctccatccgtgtggcgggaccggcctggctgcgcgggactcacccctgggggaggaaacacggcccccaggccctgagccgcctctccccgcagccatgcgcacgctgagcgaggacaccatcaggctcttcctgcagcagatcgcgggcgccatgcggcttctgcacagcaaaggcatcatccaccgcgacctgaaaccgcagaacatcctgctgtccaaccccgccggccgccgcgccaacccc

SEQ ID NO: 23895 - DNA, 935 bp, Artificial sequence
  DNA replication origin
gaacaggcgcaggtcctgggggctgctggcctgcggggacggggacagcctgactgccagggctgcggccgagcgggaccagcccacggggtctcggtgcgttcgtccccagtcggcccctgccccagacgctgcgaagcccgggggaaaccgggtgctagcgcggctgtttgctgctggaggtatgagcatgggggcggggagggggcgccgacggtctctcggggtgtccaccccccagaacgcggcctcccagccctcacccactcggccccggcgctgccctcacctctgaccaggcaggcgaccagacaggcgactagacaggcgaccagacaggcgagggaggccttgccgggggcagctcccagtcaccgccggcggcgccgccctccctgggggacaccgaggccccttccccactggacccctggacgcccgccccgccagccaggacccgaggggagctcgtggggcgcgggcagggctcgcagggggcgtctgaccgcagctggcggacacttgcactgacggtgcggcgtggggagcagggccaagcccagttacctggaagggcgccttccccgtcaggcactggtagacgatggtgccgatgctccacaggtccgccttcccgtcgtagtgctgggacatgatgacctcgggggcctgcgggaccagaagtcgggtcagtgtgaggcccccgcacgccaaccacagaaggtgcccgccaggccacagccaaccagagcagagcgcaccacacgccagccaaccaaccagcaagcccagagaggcgcccacccggcacagcccggccaaggtaaacacaccatgtacatgggggagccgcagagtgtggccgccatcatgttgctctggaggtaccgcgcgaagccgaagtcagctgcgggagagaagcgtcaggaccggcg

SEQ ID NO: 23896 - DNA, 1872 bp, Artificial sequence
  DNA replication origin
agcaacatgatggcggccacactctgcggctcccccatgtacatggtgtgtttaccttggccgggctgtgccgggtgggcgcctctctgggcttgctggttggttggctggcgtgtggtgcgctctgctctggttggctgtggcctggcgggcaccttctgtggttggcgtgcgggggcctcacactgacccgacttctggtcccgcaggcccccgaggtcatcatgtcccagcactacgacgggaaggcggacctgtggagcatcggcaccatcgtctaccagtgcctgacggggaaggcgcccttccaggtaactgggcttggccctgctccccacgccgcaccgtcagtgcaagtgtccgccagctgcggtcagacgccccctgcgagccctgcccgcgccccacgagctcccctcgggtcctggctggcggggcgggcgtccaggggtccagtggggaaggggcctcggtgtcccccagggagggcggcgccgccggcggtgactgggagctgcccccggcaaggcctccctcgcctgtctggtcgcctgtctagtcgcctgtctggtcgcctgcctggtcagaggtgagggcagcgccggggccgagtgggtgagggctgggaggccgcgttctggggggtggacaccccgagagaccgtcggcgccccctccccgcccccatgctcatacctccagcagcaaacagccgcgctagcacccggtttcccccgggcttcgcagcgtctggggcaggggccgactggggacgaacgcaccgagaccccgtgggctggtcccgctcggccgcagccctggcagtcaggctgtccccgtccccgcaggccagcagcccccaggacctgcgcctgttctacgagaagaacaagacgttggtccccacgtaagcaccctcccgccttcccttcccttcccccgcgggctccggccccgcaggccctgctcacaccagcctcctcttgccccagcatcccccgggagacctcggccccgctgcggcagctgctcctggccctactgcaacgcaaccacaaggaccgcatggacttcggtgagcacccaccaggggcgcagctggagtcccccaccctccttccttgcatttgctgatgtgagcagggcccaccggcttcacacccagccccatgtgcacactgccctttccacaagccaagcgcaggcaggggctccacctccgcccgggcaggtgcccaacgcggctggagctcaggccgtggggaggcaggggcctggggtcagagctggggtcctcctgaggcctcactcctccttcctcctgcagatgagttttttcatcaccctttcctcgatgccagcccctcggtcaggaaatgtgagtttctgtgggtcctggggctccgcatgggccctgcatgcaccccttcctccccgggtttggttagggcactgagtgtggggcagagggagcaggtcttgagctgcggccagctcccagggagggcaggacacccggctccttgctctgctgcagcggggaccccaaggccaggggttcgcatggtgcagcaggcttgggatggggatggggtgttggaggggctggtgctgccctgtgacagtcatagggtggcccaggagggagcctccctccttcctgctggtcggggtgtagccggaagtggaggggatatggttgagcttgtccagtctgtgggttggctcgagggtgaggaggagacaggaggatggcccagactgacctatgcatgtttatctcagccccacccgtgcctgtgccctcgtacccaagctcggggtccggcagcagctccagcagcagctccacctcccacctggcctccccgc

SEQ ID NO: 23897 - DNA, 1021 bp, Artificial sequence
  DNA replication origin
gagcaggtcttgagctgcggccagctcccagggagggcaggacacccggctccttgctctgctgcagcggggaccccaaggccaggggttcgcatggtgcagcaggcttgggatggggatggggtgttggaggggctggtgctgccctgtgacagtcatagggtggcccaggagggagcctccctccttcctgctggtcggggtgtagccggaagtggaggggatatggttgagcttgtccagtctgtgggttggctcgagggtgaggaggagacaggaggatggcccagactgacctatgcatgtttatctcagccccacccgtgcctgtgccctcgtacccaagctcggggtccggcagcagctccagcagcagctccacctcccacctggcctccccgccggtgagttgccgccccaggggcttggcagcttctccctccactcagcagtcaggggctccagccctgggcccccgcggggacgtgctgtgacttctgttgtctgtgtgagtcacgaaagacatggatgagttcattctgtcagatgttgaagccccacaaacgggtgacagcccctcccaacacccacagccctcaggtcccagaggccgatagggcggctgtttggtctggtcctgtctttggttttgtgctgacgtggacagaagcagcgtgtggccttggcccactgacacctgcacccctggcctccctcgtgtcttccattggactcaaagcatgagtagggttgcagggtgatggccccacatgatgatggcactccttgtgtgacatgggaggggtctgcagagcacctgagtcggccatgaacccccgtccctctgtccatctgactgggagcctggctctcaggcatggtgttgtggctggtggtgatgagttcatgtctgggctctcctggcctggccccctgctctgtgaccagggaccggtcctctgaccttggttgtctgcctgtatcatggccgaaagctcagatgtggcgaggggagcgtggc

SEQ ID NO: 23898 - DNA, 1771 bp, Artificial sequence
  DNA replication origin
cgccgccttaaggagcaggtcagtgaggcggctggtgctgaaagacctgtgggagtgtgcagggctgtgctgggtgcccggcccaccccaccctaactggacctcgagaggtccctctgcaggccagacacacatgatgcacggtctcctggcccacctcgagaggcaggcgctcctgtcaccccagcttacaggcgggcatggcgaggctcaggacggggacctgctgtgggtctagggccagccacaggtgggccaggctctctggcacccagccacactgggcacccacagaagggcaaggctgggcttttcctgttctaccccccagaagtacccagcagaacaatgcaggggaaagaggctgcccctcagaagcccgtccaaggcctgtcccctcaactcaccggccaaaggggcccttggggtcctcgcctggccgcaggccagggcccaacggctgaccatggaagggtcccacctccgagaggtcgggcagcgtccggtttcgagggggcgtcatcaccacgccctgccgggctaggagggccagcaggttctgggagctgggggtcttcgggaagtcaaaggagggcacagcctaggaggacagagatggggtgaagactgccccgcaggtctgcagccctggggcccggtgcctggggaaggggccgagtccgcaggaactggcaggcatgtgggagcagcctgagcatgagcccaggcgggggtcaaaaggtacagagctgccttcctcggtctttgttcaggactggccattcccacacatcttccccagggctctgtgcccctgcacacatggcagtgcccattaccttggtgggggagcccaggatggggggcagggggtttcgctgcaggaagtcgggcagcttgggtgagccccgcaggttccggcaggactgcaggccgtgggacggctggggagggctggcctgtggtgggctgaacacagctcccagggggtccgtggggggtttgggcagcttggggcggacgacgtgcaagtcagacaggttgggggcgctgtgcaggcggcagcccagcccggaagtgcggggagagtgctcgggtgcagaggagcctagagagagacacgcctcgtcacgaccttccggtccggcggcccagccctaggccccactgctaccacacggagccccttggggtagacgcactccaaggccccactctttttcttttgttgagacggggtctcgccctgtcattcaggctggagtgcggtggtatgatctcggctcactgcaacctctgcctcccaggttcaagcggttctcctgcctcagcctcccgagtagctgaggcgccactcttaaacctgaccctcagccagcacagaagactggcacagaggggataagaaacttgccccagcccacacagccaggaggtggagaggcagttggcttctgttccaccagcttccttcccactccttttcacttggaaagagcaagggctttagaccaggatgacaacgtgagcgagggaggtcagcctagcaccccctcccccctccggactgcacccacctggacgaggggacctgccaccccgcatctcagctccctgtggggagggcgtcccgctccagcctggccgctcagggatggttccaacttggggaaaagagagatctgtcagggtccagctgggacagagacagcctcctcacccactgcctacagacgccccttcccaggccccagcctgcaggcgcaccttg

SEQ ID NO: 23899 - DNA, 1370 bp, Artificial sequence
  DNA replication origin
tcctgccggaacctgcggggctcacccaagctgcccgacttcctgcagcgaaaccccctgccccccatcctgggctcccccaccaaggtaatgggcactgccatgtgtgcaggggcacagagccctggggaagatgtgtgggaatggccagtcctgaacaaagaccgaggaaggcagctctgtaccttttgacccccgcctgggctcatgctcaggctgctcccacatgcctgccagttcctgcggactcggccccttccccaggcaccgggccccagggctgcagacctgcggggcagtcttcaccccatctctgtcctcctaggctgtgccctcctttgacttcccgaagacccccagctcccagaacctgctggccctcctagcccggcagggcgtggtgatgacgccccctcgaaaccggacgctgcccgacctctcggaggtgggacccttccatggtcagccgttgggccctggcctgcggccaggcgaggaccccaagggcccctttggccggtgagttgaggggacaggccttggacgggcttctgaggggcagcctctttcccctgcattgttctgctgggtacttctggggggtagaacaggaaaagcccagccttgcccttctgtgggtgcccagtgtggctgggtgccagagagcctggcccacctgtggctggccctagacccacagcaggtccccgtcctgagcctcgccatgcccgcctgtaagctggggtgacaggagcgcctgcctctcgaggtgggccaggagaccgtgcatcatgtgtgtctggcctgcagagggacctctcgaggtccagttagggtggggtgggccgggcacccagcacagccctgcacactcccacaggtctttcagcaccagccgcctcactgacctgctccttaaggcggcgtttgggacacaagccccggacccgggcagcacggagagcctgcaggagaagcccatggagatcggtgtgtgggtgggtggggctcggaggctgtgggatgggggtcggaggctgtgggatgggggtcggaggctgtgggatgggggtcggaggctgtgggatggggctcgaggctgtgggatgggggtcgggtggggcttggaggctgtgggatggggctcgaggctgtgggacgggggtcgggttcggctcggaggctgtgggacgggggtcgggttcggctcggaggctgtgggacgggggttggggggagctcggaggccgtgggatgggggtcgggttcggctcggaggctgtgggatgggggtcggcgggagtcaggatgctcctgagcccttccttgctctcccagcaccctcagctggctttggagggagcctgcac

SEQ ID NO: 23900 - DNA, 953 bp, Artificial sequence
  DNA replication origin
cagtagcacaccaagccacgcacctaccccattccagacagtggcagctgccctcctcccaggcagatctgggctgggggtcgggatacccagagggtcccttggtgggcaccgcagcccttggcctgaggtggggagctggggacttgggggttgtggtgagtggcaagaggttgaggagtggctctaggggcctgctgtgcttctcctgttggagcattgggatataacaggtgtaaaccgaggcagaggcacattgggccctggaggtgtgggagtctgtgggggatggatgggggccacggtgtctgctggtcctggtgtgcccctcatcgccctctccctgcagcgggccccactggctctgccagctcttctgcccgccacctggtgcctgggccctgcagcgaggccccagcccctgagctccctgctccaggacacggctgcagctttgccgaccccattactgcgaacctggagggggctgtgaccttcgaggcccccgacctccctgaggagaccctcatggaggtgagggctggagtgagcaaaggttcccattctggctggagggtgtgtggggtgtgtggggtgtcgggtgtgtggggtatagggtgtgtggggtgtcgggtgtggggtgtcgggggtgtggggtgtagtgtgtggggtgtagagtgtgtggggtgtggggtgtcgggtgtgtggggtgtcgggtgtgtggggtgtcgggtgtgtggggtgtagggtgtggggtgtagggtgtgtggggtgcagggtgtgtggggtgcagggtgtgtggggtgcagggtgtggggtgcagggtgtgtggggtgtcgggtgtgtggggtgcagggtgtgtggggtgtcggctgtgtggggtgtacggtgtgtggggtgcagggtgtgtggggtgtcgggcgtggcacatcccagctgcccgggctgcagca

SEQ ID NO: 23901 - DNA, 929 bp, Artificial sequence
  DNA replication origin
cctcccacccgcctgccttggcccccccaaagtgctgagattgcagcctctgcccggccgccaccccgtctgggaagtgaggagcttctctgcctggccgcccatcgtctgggatgtgaggagcccctctgcctggctgcccagtctggaaagtgaggagcgtctctgcccggccgcccatcgtctgagatgtggggagcacctctgccctgccgccccgtctgggatgcgaggagcgtctctgcccggctgccccgtctgagaagtgaggagcccctctgcctgccaaccgccccgtctgggaagtgaggagcgtctccgcccggcagccaccccgtcctggagggaggtgggggtcagcccccaccaggccagccaccccgtcagggaggtgaggggcgcctctgcccggccgcccctactgggaagtgaggagccccctctgcccggccaccaccccgtctgggaggtgtacccaacagctcattgagaacgggccatgatgacaatggcggttttgtggaatacaaaggggggaaggtggggaaaagattgagaaatcagatggttgccgtgtctgtgtagaaagaggtagacatgggagacttttcattttgttctgtactaagaaaaattcttctgccttgggatcctgttgatctgtgaccttacccccaaccctgtgctctctgaaacatgtgctgtgtccactcagggttaaatggattaagggcggtgcaagatgtgctttgttaaacagatgcttgaaggcagcatgctcgttaagagtcatcaccactccctaatctcaagtacccagggacacaaacactgcagaaggccgcagggtcctctgcctaggaaaaccagagacctttgttcacttgtttatccgctgaccttccctccactattgtcctgtgaccctg

SEQ ID NO: 23902 - DNA, 1044 bp, Artificial sequence
  DNA replication origin
catctgtttaacaaagcacatcttgcaccgcccttaatccatttaaccctgagtggacacagcacatgtttcagagagcacagggttgggggtaaggtcacagatcaacaggatcccaaggcagaagaatttttcttagtacagaacaaaatgaaaagtctcccatgtctacctctttctacacagacacggcaaccatctgatttctcaatcttttccccaccttcccccctttgtattccacaaaaccgccattgtcatcatggcccgttctcaatgagctgttgggtacacctcccagacggggtggtggccgggcagagggggctcctcacttcccagtaggggcggccgggcagaggcgcccctcacctccctgacggggtggctggcctggtgggggctgacccccacctccctccaggacggggtggctgccgggcggagacgctcctcacttcccagacggggcggttggcaggcagaggggctcctcacttctcagacggggcagccgggcagagacgctcctcgcatcccagacggggcggcagggcagaggtgctccccacatctcagacgatgggcggccgggcagagacgctcctcactttccagactgggcagccaggcagaggggctcctcacatcccagacgatgggcggccaggcagagaagctcctcacttcccagacggggtggcggccgggcagaggctgcaatctcagcactttgggggggccaaggcaggcgggtgggaggtggaggttgtagcgagccgagatcacgccactgcactccagcctgggcaccattgagcactgagtgaacgagactcccgtctgcaatcccggcgcctcgggaggcggaggctggcggatcactcgcggttaggagctggagaccagccccgccaacacagcgaaaccccatctccaccaaaaaaataggaaaaccagtcaggcgtggcggcgcgcgcctgcaatcgcaggcactcggcaggctgaggcaggagaatcaggcagggaggttgcagtgagccg

SEQ ID NO: 23903 - DNA, 988 bp, Artificial sequence
  DNA replication origin
cggagccgcccctgcgccccagcgtctgtggaacggggacggggagcggggctggggccacacgagggccgcacagggtgggtgccactgagggtctgggggccgagcccgtgggagcggacccggcaacggagaggagcggggccagcgtgggctcagcgcttcccctgctccgctgggcgggcgacagcacccgggaggcggcggcggagcgaccagtcgcgcggccgcggtgctggatgcaggagggcctggtgccccgccctcaacaccctaatccccgccccaccccacccccaccccctagtctccgcccccatcaccccctccgtctctgtccccgccctgcctcttctcccgaattagttttgtccgcgctcggccgccgtgcagtcggtcgttccacttccgccttcgcccacgtggtccggctccggctcagtcagccgcgtcgcgaatggggcaggagcgagcctctctggtcccgacgcgggtggcccgggtctcctcgactcctgaggaaagcccaccgggcggggcgggaggtgaagaggctggggaagtcagaggttaacctgggcgtcaggggacgttggagttgatccgtcagggtcccggggcggtctgggggcagtagagacggggcttgggcgcggggcctgagaggtcaggggtcagcaggagtgaggctggggcgtccaggtccgagaggtcaggggtcagctggagaggggctggggcgccggtttcccggaggtcaggggtcagaaggaacagggctgcagcgtcagggtccgagaggttaggggtcggcagaggcggagctggggcactgggggtcaggggtcggggatcagggcggggtcgggtgcactggtagcctgcgcatgggcctccagcttcgcgcgctgttgggagccttcggacggtggaccctgcgcctgggaccgcgtccgtcctggtaatgaccgcgacgccgggcgacccc

SEQ ID NO: 23904 - DNA, 1327 bp, Artificial sequence
  DNA replication origin
agcaggagtgaggctggggcgtccaggtccgagaggtcaggggtcagctggagaggggctggggcgccggtttcccggaggtcaggggtcagaaggaacagggctgcagcgtcagggtccgagaggttaggggtcggcagaggcggagctggggcactgggggtcaggggtcggggatcagggcggggtcgggtgcactggtagcctgcgcatgggcctccagcttcgcgcgctgttgggagccttcggacggtggaccctgcgcctgggaccgcgtccgtcctggtaatgaccgcgacgccgggcgaccccgctatgcccgcccagcccagcccaccccagtccaccccgcgcggtgccgagcgggcccccgctcacgccgcccttctccgcagctcgccgcgcatggccgggaacgcggagccgccgcccgccggagccgcatgcccccaggaccggaggtcctgcagcggccgggccgggggcgaccgcgtctgggaggacggagaacatccggcgaagaagctcaagagcggtggcgacgaggagcggcgcgagaagccgcccaagcggaagatcgtgctgctcatggcctattcgggcaagggctaccacggcatgcaggtgtggccgcccgggaagcggcaggtcccgcggggtttaggtgcaggtgcggccgccggggaagcggtgggtccggctgggtttaggtgcaggagcggtcgcccaggtagcggcgggtccggcaggatttaggtgcaggcccaagcagctttcactgctcctgctgcacgcgagctcctgctgctttccatcaggcccggccctgccgctaaccgctgttatctggggcggggttcacttgctgggtgcctgagtcctcatctttaggatgggagtgctcacagcacctgctaagtagagtgtgaagatgagctaggtgtactgacgctcggtgctgagaacagtggacagctcggggcagctcagaagagcctgctgtcgtgagcgttaaggggacagagagctaagtattaaagttgtgaggattctctcctcagcccacttccttttctggaaggtagagggtctgggtacattcaggtaggtgtatttttttttctttttgaggcgtggtctccctttgtggtccaggctggaatgcagtggtgcatccacactgctcgctgcagcctccacctcctgggctcaagagatcctcccacctcagcctcccgaacatcgagggctgtaagtgtccttgacctcacggcctgaataattttttttataatttgcaggaatggtgtcttgctaagttttttat

SEQ ID NO: 23905 - DNA, 1509 bp, Artificial sequence
  DNA replication origin
ggggtcgctcacgacagccgccacggcctggtccccacgcgacgcccgaggccggccggcgagcgggccctgtacgcccgcggctgcggctacgcgaccccggaccctggacgctgccgtcccgagagcctcccgcccccgtcccgcgcctccgccctcacttaccctgggcctcagggctgcgctccggccgcgtcaggagggcgggaggatggaagccgcgccgcagccgctcagtgcatccggggccccggcgggaggaagcggcggcgcggctgctacggcgagccggaagggacgcgcgtccgcgcgcccgtagctgcgcttccgcggcgccgctctgaccgcgcgagggcgccggaggtcgagggcgccggaggactagggcgccgcgagactctgcggggtgggcgggggccgaacccaaggccgagagggacggaggggggccggtcccagacagacggaggcggggccggtccgagacagacggaggcggggcggggccgagactgaggaaggcgggggcggggccgagactgacggagtcgcggcagcccggcttttccacgcgcagttcgggaaatgcgcccacgtggaacagaagtgggccgccagctctcacactctgcagattcaccaaacagaccaggctcacatgcaagacccaaaccctgtgtggcccaggctggcctcgaactcctggactccagtgatcctcctgcctcagtctcccgagtgggtgggaccacagactcgcgccaccacccctggttaattttttgtatttttagtaggggggttggttcaccaagttggccaggctggtctcgaacgccggacctcaagtgatccgcccacctcggcctcccaaagtgctgggattacatgtgtgagccaccacgcccggccaaaaacgacaaaactctattaaaagacacagacgtagctcacgtctataatcccagcactttgggaggccgaggcgggaagatcatttaaggtcaggagttccagaccagccgggccaacatagtgaaaccctgtctctattaaaaatacaaaaaattagctgggcgtggtggcaggcgcctgtaatcccagttactccggaggctgaggcaggagaatcgcttgaacacgggaggcagaggttgcagtaagccgagatcatgccactgcactccagcctgggcaacagaatgagattctgtctccagataaagacataggcataaatcttcggggttgtgggttaggaaatggtttcttagatatgacactgaaaacgcaactaacaaacatagatatattggacatcatcacaatttaaaacttttgtgctgcaaatgacaccatttaaaaaagataatccacagaacaggagaaattaccttaagtccatatgtctgacatggaactcgtgtccaaagtaaataatttacaacataacaattaaaagggcaggcacggtggctgttgcctgtaatcctagcactttgggaggct

SEQ ID NO: 23906 - DNA, 1007 bp, Artificial sequence
  DNA replication origin
tctacctgccaaatccaataaagccactaagcccacaaaagccctggaggagagaaatggcagaatccaggtgaaaacacacaattcctctgggatgagactaagccttttcccatttcttcagaggaaggtctacaagctggaaatgtgctagaactggcaacaagtcttcgtttcaacagaaagcacttgaatcaagtgcaggtgtgggtgacttcccgtagaggggaagcccgggaggaggcccctgctcaccagtacggctgcactgccccccgtcgtgattgcgggctgcgccttcgctggggcctgcacaggctgtggctgggtctggggctgtggctggggttggggctggacagctggtggccctgctggcggctggctgcccgctgcctgtggttgtggcagcggtggcggtggctgctgcgggggtggtgggggctgcggctggggcgggggtggctgggccacggccggctgctgtgccttctgctgatcagccagagcctgaggggccaggaaggaagaggagccactggaggggcagactcggcctgcataccccctggatgaagtcacagtcaccacattttcccactcaagcagaagggcccagggcgctgacctttttctcttttgcgattcgctctgcacggagagatgccacctggatgggaggcagcggcttgtcatagttgattccactgaaagacagacgcaaaggttaaaaacatacaggcaagttttaagacagacaagtaccacgtaccctagaaacaccatgctgccaggtgctggggcagctccagcccaagagatgagggcgtaaagcaaggtgcccaatgtgccctgcaggagatcgagccacctagacctcatcctcagcctggcgctgagtcctcttccttgaggccgagctctcccactctccaggaaaagtatctccgaacacgtccccagcgtacttgtggcagcccccaaacgcacagcccacctcatgtgtc

SEQ ID NO: 23907 - DNA, 1025 bp, Artificial sequence
  DNA replication origin
gtcacggggagggggtccctgagggaggggtgggcgttcgctcagccggggtcaccgggtgatgggacggagagaggggagcgcgcggccggggagcctcgagggtaaccggcggatgtgggcggtcgggggccgagggtagggccaacccctcacgcccgccacagccccggcagcggatacgcgggccgtcactcaccgcggctgccgggcgacgcagccaagggctcccggcgcggatgagcgctgcgacagcggaccgggcggcgaggccactacaaccgaccaaaccgaccggccgacgcggagccagtgcgcaagcgcgggagccggcccggcactgcgcaggcgaggctcggaccaatcagcgcccagcggacccggagggacgtggcggagggggcggggcggagggggcggggcggatagggccgggcctcggtccgcgccggcgcgcgcctctggctccgcccggaactagtttgttcattcattcgcacgtgggcactgagttgtatttgcccgccctcccgccggacacctgctgagcgctggtcacactgacaagcacagctagcggctcccctcgcgggccctacagtctaggcggggaggatagataaacatgcagttagaagagcaccaggcaaagcagccgggatggggcaggctgaggtctgttttaaattgggcaggggagtcggggtgcctagggagatgagatgttacgtgggatccgaagatccacaagactcttgcctgtgaccactgaaatggtgggacatgtccctggtttcgtcgtgtccactgtagacgggtgagctttggagctgtgcatcaggcgccttccactgcataacctgcccatctatttaagagtgaaacccgtatcacttaccacctgtccatttcttcatggtacttatcccctgaattattttatctgacctgctaggatgcaacccccttttttattttgctggcaagtatagcctagttgtctaaactgccacatagtatgtact

SEQ ID NO: 23908 - DNA, 1373 bp, Artificial sequence
  DNA replication origin
gtgcgtacaatacagtaagatattttaggagagagacatcactttcacatgacttttattacagtatattgttacgactgttctattttattattagctgttattaatctcttcctgtgcctagtttatgaattaaactttatcgtagatatggaaggatgcataacaaaacagtgtatatagtgttcactactatccttgatttcaggcatccattgagggtgttggaccgtatcccctgaagataaggtggggcgactgcacgtggattgagaggtgccctcactgctgcagagctgtggtaacaacactcacttgtggttcccagacaagactctatctggtcgtgagcccccaacagccagtggtactgctgtccaatctgacagatggaaaccagcgccaatcagcctgcctggagcggcacaaataagcctaagactcaaactttcagccagttaactgtaagtaaaccaactttttggtaaggaggaaatactcacccagctcttgggcaagataagtgtctttattataaaaggcgtcaattcgcagcgtctttactgtaaaggtggtggtattattagattcttcctttccactaacacaaaactcccagtgccggaaggcccttgtcaggagcaggacccgcggaggggtccgtggtcagttctgggacagctgccgagcagcgcagcgcgtggaatcaacttcactgctcacgtgcagcgcacactaagcgcactcgtctttcctggagtgcagaccaggccccgacctcagggatcaggacagcggggccaaggggtcaagaggcagaggcggcgtcagcgccgtagacagcggtctcgcgaggctggaaccaggcgggcggcagtgacgggggtgggcaccaggggactgggtgaagggtcatgaggggaggggcggttaccgggccagacggtcacagggatcgtgtcaccggggaagggctgggaggtcgggggtttgtgtcacgggatgggggggagcggtcaccagaaaacggggtgatgcgggagagggggcggaggagggaaggcgggaaaacggcagttgccaggtggcggggggaggggtcgcagggggaggggtgggcgctcacgggcgcagggtcaccgagggatgggtgggcgtttgcggggggtcatgtcacgggggagtgttcactgagggaggtgggcgttcacgggggatcgtgtcacggggagggggtccctgagggaggggtgggcgttcgctcagccggggtcaccgggtgatgggacggagagaggggagcgcgcggccggggagcctcgagggtaaccggcggatgtgggcggtcgggggccgagggtagggccaacccc

SEQ ID NO: 23909 - DNA, 1096 bp, Artificial sequence
  DNA replication origin
tagggctgctgctgcagaggcccagcccagggccaggggcacctgcacgcacattctgcaaggcctgccccggccccggactgggctgcgtgggactctgggtctggacctgctgggacaagggggacgtgacctgaatgtatgatggagacccatgctcaaaccgccgaggctgagcgctgaactggaagcctggagaggtggggctggggagcggcagtggggccagcgtgacctgtgggcttccctggagcccagggcccacgccctgcaggtcaacattcatgttctgcccacccgcagggccccctctcaccatcagctgctgtagttggtggctgggggatggcagtgtgaggggcagggacggctgggagcacgctggctgctcctcgcccgcgccggggcaggccccaggccactggacatggcgctggctgctctgggagctgctgacgtgctgcatgactacgtcttcaggaaatgctccctaaacaaatgcagaaaagttagagttgagtgaggtgagctccatgcccgggcgcctttcggagcctgcacaggtgtctggaaaggtggctcaggaggggccaatgcgggcccagcaaaccccaggcacgagactgctacccagggcaaaaaaggctcagatcagaatatctgctcagcaagagatgctcggaagcttccctgcctcacacttttctcgaactgaagtattcatacctgcctaatccaagtctaccgcaaggggctgaaagtgctagcgatgaagagcatgggagggggagaagggagagaagtacagcacagcagggcatccccagcgggtggcagacggtggctcagggtcacaaaggttctctacgccccttacgtgatctcatttagttttcacagtcatgccatggggtcactcctattgatagcccatttacacagagagacactgaggcagcgagaaatgagctccctgggctgtaaggtccagctctacagggcttagcgggtgttctccccgtgtgcggagacgagagattgtaagaaataaagacacaagacaaaaaaataaagagaaagcagctgtgcccggggg

SEQ ID NO: 23910 - DNA, 2040 bp, Artificial sequence
  DNA replication origin
acactcactggaaacacagattcctggggaagcacagaccaccgagaatattctggtactgcagcccatgtgggtcaggactcatcccgtgcccgggtttggagggcagcccctttgggtacctgggatggtgccgcaggcagaggctggcgggcctggggagctgcctgctcctgggtggggaggtggagcgcaagctaaacagcctgcctggtggcgagcgccggcctggcaggaaaggtggcggcgctgcgattggctgctgggtccttccctggactgagagctgtgcttgtggctctgtcgcctgctgctgggagacctgcaaagacgctgcagcgcggaccccggctggggcagcctcccggcgtgtgcaagctggaggcgttctgcacgggaggccccgtggaggggtcgtactgctgctgcctctgcctctgcctctgcccagcgagctgcgcggcgtgcggcgtggggggcattcctcccgcaaacgcaaagaaagtcaagcccagctctcccagtatctgacagcaaaacagagacgcgaccttaagaaattagggagcccactgctccccaaaccgaataatgtcccaggtgtccattgacagatgatgcgtaaagagaataaggccttagcgaggaaggaaatcctgccacgtgccaccgcgtgtatgagccccgaggaccttccgctgagtgacacgagccaggcacagaggggcaggcagatcctgtctgtcccactgacatggggtccctagagcactcaaagccatggggacagcaagcggagcggggctgcccaggggaggggcggggcatccgtgtttcacgggggcagcgtttctgtttgggagggtggaaatcttctgtaggtggacgcaggtgacagctgcacagcaacgtgaacgtgcttcatgccactgagctgtggcttcaaatggtaaaacaaaagccaaccggaagaactccaaggagtaacgtttgaatcgttattattattttcgaaataagggctcgccccgtcacccaggctggcatgcagtggagcaatcacagccttgtctctgcagccttgacccctgcgctcaaagcgatccttgtgcctcagcctcccgagtagctgggatcacaggcgtgcgccatcacgcccggctaatttttgtatgttttgtagagacgggatttctgcatgttggccaggctggtctcaaactcctgacctcaggtgatccgcccacctcggcctcccaaagtgctgggattccaggctgagccgccgcaaccttcaagcacaggttttaaaaaaatcatttttacagtagttgttccagtcctaaacatagccaatataaaagatttgattttacattttacaaccaaaaaagatggaaatctctagaatctaggcagtggctaaactatcaatttggccccatcattccttttcaggcccatggtcctgaagggacctccttcctcctactcgacagaactctcagcagcagatgagggcggccaatgccacggcctgtgattggagggtgccagcctctggctgccctgtgattggagggcgccagcccctggctgctctgtgattggagggcgttggcctgtgactggagggtgcccgcctctgtgctggcctttgattggagggcgccggcctgtgactggagggcgccctgccctgcgctggcctgtgactggagggtgccctcccctgtgctggactgtgattggagggtgactgcctctagctgccctgtgattggagggcgtcagcctgtgactggagggcgccctcccctgcgctggcctgtgactggagggtgccagcctctgcactgccctgtgattggagggctcccgcctctgggcgcgcttttcctcctctggtgatctgcaaccgcacaactcgcctcacagcccccacgctgggagaaggcgatggccgtgccctctgctccgggggctccgtgctcctggatggtgactccccaggcccggcccacctgcccgccccgcagc

SEQ ID NO: 23911 - DNA, 4072 bp, Artificial sequence
  DNA replication origin
acgacaagcagccagaaagagcagactgtgaatcacagatgagacagctcgggcacaggagtgcggggggtgtctcctgggtgatcaccaaacttcacacttccacaatgggccccagtaaaacagtggaccctaataagcacattcccgtccccttaggtgcactaagggaagctaaaagcagactgaggggtgcctgtaaccccaagaagatgtctgggagcagacccagagaccctcgcagaaaagtgtcacagagcagcacagactgagtctgacagaaactctctatacaaatagcacaccttgtcccagctaaaaccctgggccctgggaggacaagacatccctcctctaacccctcgtcactagcccatttgtaaaaaccttgacaggccgggcacggtggctcacacctgtaatcccagcactttgggaggctgaggcaggcgcatcacctgaggtcaggagatcgagaccatcctggccaacatggtgaaaccccatctctactaaaaatacaaaacttagctgagcgtggtggcgtgtgcctggagtcccaactactcaagaggctgaggcaggagaatcacttgcccgggaggtggaggttgcagtgggccaagatcagcccactgcactgcagcctggcgacagaaaaaaaagaaaccttgacatctttactacaacttagcaacccgctcaggccccctctgcaacggagagctcttcttcctttttgcttattaaacttctgctccaaactcactgtgtgtgtgtgtgtctgtctgcgacctcgatctccttggccatgagaccaagaaccttggtatttaccccagaccacaaggctgcttcacgatgattgccatttatcggggattgatagtggctcagtgctgctgggttcgcagacataagatgtgggcctggccacacactcgggaggtgggaggagcgggcaccgtgggcacactcggggaggtgggaggagcgggcaccgtgggcacactcgggaggtgggaggagcgggcaccgtgggcacactcgggaggtgggaggtagcgggcaccgtgggcacactcggggaggtgggaggagcgggcaccgtgggcacactcgggaggtgggaggagcgggcaccggggcacactcgggaggtgggaggagcgggcaccgtgggcacactcggggaggtgggaggagcgggcaccgtgggcacactcggggaggtgggaggagcgggcaccgtgggcacactcggggaggtgggaggagcgggcaccgtgggcacactcggggaggtgggaggagcgggcaccggggcacactcgggaggtgggaggagcgggcaccgtgggcacactcggggaggtgggaggagcgggcaccgtgggcacactcgggaggtgggaggagcgggcaccggggcacactcgggaggtgggaggagcgggcaccggggcacactcgggaggtgggaggagcgggcaccgtgggcacactcgggaggtgggaggagcgggcaccggggcacactcgggaggtgggaggagcgggcaccggggcacactcgggaggtgggaggagcgggcaccggggcacactcgggaggtgggaggagcgggcaccgtgggcacactcggggaggtgggaggagcgggcaccgtgggcacactcggggaggtgggaggagcgggcaccgtgggcacactcggggaggtgggaggagcgggcaccgtgggcacactcgggaggtgggaggagtgggcaccgtgggcacactcgggaggtgggaggagcgggcaccggggcacactcgggaggtgggaggagcgggcaccgtgggcacactcggggaggtgggaggagtgggcaccgtgggcacactcgggaggtgggaggtagcgggcaccgtgggcacactcgggaggtgggaggtagcgggcaccgtgggcacactcggggaggtgggaggtagcgggcaccgtgggcacactcgggaggtgggaggagcgggcaccggggcacactcgggaggtgggaggagcgggcaccgtgggcacactcgggaggtgggaggagtgggcaccgtgggcacactcggggaggtgggaggagtgggcaccgtgggcacactcgggaggtgggaggagcgggcaccggggcatactcgggaggtgggaggagcgggcaccgtgggcacactcgggaggtgggaggagcgggcaccgtgggcacactcgggaggtgggaggagcgggcaccgtgggcacactcgggaggtgggaggagtgggcaccgtgggcacactcggggaggtgggaggagtgggcaccgtgggcacactcggagaggtgggaggagtgggcaccgtgggcacactcgggaggtgggaggtagcgggcaccgtgggcacactcggggaggtgggaggagcgggcaccggggcacactcgggaggtgggaggagcgggcaccgtgggcacactcgggaggtgggaggagtgggcaccgtgggcacactcggggaggtgggaggagtgggcaccgtgggcacactcgggaggtgggaggaggggcaccgtgggcacactcggggaggtgggaggagtgggcaccgtgggcacactcgggaggtgggaggagcgggcaccgtgggcacactcgggaggtgggaggagcgggcaccgtgggcacactcggggaggtaggaggagtgggcaccggggcatctgcagtgcattgggcaggcccgtcccggcccttccacagtggcacgggggcctggatccttccccagagtttcgagatgtgagaggggagaggagcgggagggacagcagctgagcacacaaaggaagaggtgggaggggcaagaggaggacagagctgttggtgacggtggggaccaggcgagagggggtggggtgggggctgaggggtgtgccggggccatgccggcggcaggatggtgggcactcacctgctgggccaccagctgctgagggctcaggcaggcgtccgtggctgggcctcgagggctctttgcgaccttcacggagcacagaatagggaggagggaccttcaatgtgcagtgtgggcctgagctgtccacacattcccgtctccttacctctacggaggaagggggtaggtcttgaaagtaggataatgacagcaaggagcacagcagccactggcctgaccccgtgtggccatgtgggaggggcacagtgtgagctgcccctacctgcatgtaggcctgcactggcgcggtccccgtggccttgggaacctgagacatgggggatggcagaaacagtgctttcctggtgggccgcggacggtgggccacggaggctaggccactctcctggcgggctgcagtggtaggctgctcttggctgttggccggttggctgctaggcctgaactgtgacttgctgggtattcatctatgaactcaaaggacaggccttagagaaagagctggaagacggcagagccatggaggggcggccaacccctccttcacctttccagacatgagtgttgcgcatggccctgtgcattctagttgctgagagactctagggcgagtcggacgggtctggccctccaggagcgaggtctgcactgtcaggaaggcagagcaaggctggccgcaagtggctcatgcctgtaatcccagcactttgggagaccgaggcaggtggatcacttgaggtcaggagttcgagaccagcttggccaacatgctgaaaccccatgtctactaaaaatacaaaaattagctaggtgtggtggcagatgcctgtaatcccagctactccggagcctgaggtgggagaattgcttgaacctgggaggtggagattgcagtgagccaagattgcaccactgtactcccgcctgggtgacagaacgagactctgtctcaaaaaaaaaaaacaaaaaaggaaggcagagtgagtccacctgccaggtaacaggcagggtcccgggtctggaaggcccacagccacccccactcaaactgtcatagccccccccatcagccccggctcc

SEQ ID NO: 23912 - DNA, 2005 bp, Artificial sequence
  DNA replication origin
actcccgagagaactcccacaggtgaggccccggctgggcgggggtggcagaggtggcctctggtcccagcatcacttggccgcagccttctctctgcctaggctcttcctgctggtgcaagcttttgggggtgtggacgtggctgagttctcctcgcgctacgggcctggccagaggaggatgatcctgaagcagtttgaacaggggaagatccagctgtgagttcctgggcaggggcaaggcctctgtggggtgggggtgcccactccagggtcagcctggggctctctaaaaggtgcttccttctgcaaattggcttcctgtgccccagccccatggcagccagttcccagaaaggcctgagctgccccccgcagggccggtgctgccacggcccctgctcctggcacgtcgggcccacaatgctgcgtgtcccggcaggctcatcagcacggacgccaccgcgcgaggcatcgacgtgcagggtgtggagctggtggtgaactacgacgccccccagtacctgagaacctacgtgcaccggtgagcgctggcgcagcggccactggggggtctggggctttgtgagctcctgggcgttgatgtgggaccgtcttgactggcgtggggtggggttggtgtggagagaagctgtcgttccgtcagactcttgaaggctcaggggccagtctggagatagctgcgtttgattccagggttgggaggacagctcgcgctgggaaaactggacaggccttcacactgctcctgaaagtgcaggtgaggctgcgagggtcttgggagtttctgctgttggtgggtgttaaggggctggcccaagaacccccttccaccatgagcttctctccaggagaggagattcctccgaatgctaactgaagctggggcacctgagttgcagcggcacgagctctccagcaagctgctgcagccgctggttcctcggtacgaggaggccctgtcccagctggaggagtctgtcaaggtaagggcaccagagtccggcatgaaaccctctggggagggcgtttgcagagagggcgtcgtcaccacacgtggagaaaagagggaaaaagaggaaagcgagaaggcaacagagggtcacacaggttgtcctcgagcttctggcccaagggcggggagcccctgggcaccagtggtggaaacacgtggcaccagggagggctgtcagcggggccagggcctggtttctgcatgcacagggcttcctgtcctcagggttccaggggcagagcccggggccccacagacgatgaggggacagagtgtgtggtgctgagccctcccctttcctccacaggaagagcgcaagcagagggcggcctaggctggggctcagagggccggagggactgaacgctcaccaccctgaccctccttccagagcagtgctgatcactggatcctgtatgtgaggaaaggaatcccccagtggacacagccttcctccccaagcacgtggtctctgcgccaggcagcccgggcgtcagagctcaagcacctgccccgactggagacttcagggcttgtcactttcagagtgtggaggtcaggatggctgcgggcaatgaagccttagtaaaacggtgaaaagtactcccagacggacgcgggcacccgtcatgcttttgctgagagttgggggcattaaccttgagctaatgttaaaaatcaagctcttggccaggcatggtggctcatgcctgtaattccagcactttgggaggccaaggcgggtggatcacctgaggtcacgagttcgagaccagcctgaccaacatggagaaaccctgtctctactaaaaatacaaaattagccaggcgtggtggtgcatgcctgtaatccagctacttgggaggctgaggcaggaaaatggcttgaacccgggaggtggaggttgcagtgagctgagattgcgccactgcactccagcctgggcaacaagagcaaaactccgtctc

SEQ ID NO: 23913 - DNA, 1436 bp, Artificial sequence
  DNA replication origin
agaggaggagctcccaccggcccccttcccatgtggggtggagtcggggctgtggggtgaggcagcgtcttgctatccggaagcccttgagaaagcttccttctctcgagctgctctctggtctgtagagctgatgggtaccgctgcttggctgacatcgtggtagccacccccggccgcctggtggaccacatcgaccagaccccaggattcagcctccagcagctccgcttcctggtaggtccccgccccaggggcctgggctttgagctcagggccgcgccacccagtcccgggctccctgtctcctgcagattatcgacgaggctgaccggatgattgacagcatgcatcagtcctggctgccgcgggtggtggcggccgccttccagagcgaggaccccgcggacccctgtgccctgctccagcgaaggcaggcccaggctgtgacagccgccaggtatccagcagcacgcccaggtgctggcctcccctgagcagagtcctctgcacacagctctccttccttaatgcccagagataagggtggcttgagctctggtgcacagaaccgcatcgtactgtcacgtgagctggacccaccttgctcctggtctgcggcagtctctacagtgcgtagcatgaggaatcctgttccctggaggttcggggcagccactggtagggtgccagcaacacccccttctcttccagcacctgctgtccccagatgcccctgcagaagctgctcttctcagctactctgacccagaaccctgaaaagctgcagcagctgggcctccaccagccccggcttttctccacagggctagcacacaggggcctggaagatacagatggggacggggattcggggaagtatgcctttcctgttgggctcacggtgagtgggataccgtgtgggcagagggttgcactgggaacctggggcccctaaccaaccctcacctccaccccgaccccctgccgtccctgtagcaccactacgtgccctgcagcctcagctctaagccgctggtcgtcctgcacctggtcctggagatgggcttctcgagggttctctgcttcactaactcccgagagaactcccacaggtgaggccccggctgggcgggggtggcagaggtggcctctggtcccagcatcacttggccgcagccttctctctgcctaggctcttcctgctggtgcaagcttttgggggtgtggacgtggctgagttctcctcgcgctacgggcctggccagaggaggatgatcctgaagcagtttgaacaggggaagatccagctgtgagttcctgggcaggggcaaggcctctgtggggtgggggtgcccactccagggtcagcctggggctctctaaaaggtgcttccttctgcaaattggcttcctgtgccccagccccatggcag

SEQ ID NO: 23914 - DNA, 1058 bp, Artificial sequence
  DNA replication origin
ctgcaggggcatctggggacagcaggtgctggaagagaagggggtgttgctggcaccctaccagtggctgccccgaacctccagggaacaggattcctcatgctacgcactgtagagactgccgcagaccaggagcaaggtgggtccagctcacgtgacagtacgatgcggttctgtgcaccagagctcaagccacccttatctctgggcattaaggaaggagagctgtgtgcagaggactctgctcaggggaggccagcacctgggcgtgctgctggatacctggcggctgtcacagcctgggcctgccttcgctggagcagggcacaggggtccgcggggtcctcgctctggaaggcggccgccaccacccgcggcagccaggactgatgcatgctgtcaatcatccggtcagcctcgtcgataatctgcaggagacagggagcccgggactgggtggcgcggccctgagctcaaagcccaggcccctggggcggggacctaccaggaagcggagctgctggaggctgaatcctggggtctggtcgatgtggtccaccaggcggccgggggtggctaccacgatgtcagccaagcagcggtacccatcagctctacagaccagagagcagctcgagagaaggaagctttctcaagggcttccggatagcaagacgctgcctcaccccacagccccgactccaccccacatgggaagggggccggtgggagctcctcctcttcacgggaacaggtggttaaagatggtggcccctcctctgctcccacggtgcctcaggccacctgcagggctgagcagggaccccctgaaaaacccgcaccctgacacaacctacgttttctggacgaggctctcctgctccttggccagagacttctgtcccgtaaccagggagactctcagaggtgtggcatctgtgtagatgttgaaaactttgctcacctgcaggagaagtctgtcactggcctggaggtagctggtgtccacctactgcagcaaaaaggaccccagatctaatctgggtcccccaggggct

SEQ ID NO: 23915 - DNA, 1493 bp, Artificial sequence
  DNA replication origin
ggggcgcacggcagggcccgcgcgctgctcgagcggctgcagagccgggcccgcgaacggcagcagcagcgggagcccgcgcagaccgaggcggctgcatcgaccgagccggcgaccaggaggcgacggcggccccggcggcggcggcgggtgaacgacgcggagccggggagcccggaggcgccgcagggaaagcgacggaaggcggacggcgaggacgcgggcgcaggtgggccgcggggcgagcgggctccctctggggcgccggcgactcggtgctgacgcgctgccgggtgggtgtctgcctcgcagaaagcaacgaggaggcgccaggggagcccagcgcagggagcagcgaggaggcgccaggggagcccagcgcagggagcagcgaggaggcgccgggggagcgcagcaccagcgccagcgccgaggcggccccagatggaccggccctggaggaggcggccggacccctggtccccggcctggtgctgggggggttcgggaagaggaaggcgccgaaggtgagcctcggcgggcgggagggtggtcggcgtgagagggtaggctgcgcggattcttaagtgcggcggtcgccccggaagatttcgttcagcgaatgttcccgggtcacagccgcgcctcgctgccaggtctgcagtttcatcgcctaggggtctggatcctgcacgtgcagagctcccgtttcctctgctaggcttgcccctgtcctcccgccgcgccgcgccagttctgcaagatgtgtttgcgtgaacgtgcggggtttcctgctgtgcgctcaccgcctcaggagtaagtcagaggccgttctgcaagctcctgaccgttggtgtttttgcttagcacgtgtggttttcggtaaagagatttccggcgagacaggtgaagaaagcgagaagtttgacagagtgctcgggcaccttaggtagggcaggtggaggaggttctctttgagttgggatgcaaagacttgaagccaggtcaaggttgggggttgggggtgccaggcagaggcctcgaggcagggacgccggcgtggctggggcaggcgagcgccaggtcacaggacctcctggctgcgggagggtgggtgccactgtgggttgatgggaggctacagagtgagtttgctcagggagtggcatctgcttttactgtttaacttctgaaggctgtatggaaagcgcatcctggggctgagaaggagctgaagacgacagaggtttccccagcctccctcccctagctttttccaccgtgggcttctgcgcgagagcctggaaagcgctcacctggcctctctttctttttgatggcaggtccagcctttcctgccaaggtggctggctgagcctaactgtgtcagaaggaatgtcaccgaagacctggttcctatcgaggacatccctgacgtccatcctgacctgcagaagcagctgcgggcacacggcatctcgtcctactttcca

SEQ ID NO: 23916 - DNA, 2200 bp, Artificial sequence
  DNA replication origin
ccgtcgcctcctggtcgccggctcggtcgatgcagccgcctcggtctgcgcgggctcccgctgctgctgccgttcgcgggcccggctctgcagccgctcgagcagcgcgcgggccctgccgtgcgccccggcctccgcgccctccggccccgccgcagctgccgcatcggggcccgggtaccgcgcgacgtagaacagcgccatggccagccgcacgcctgggactcgggcgtggcgcgctgcgatgacgtcggcggcacgcctgcgactcgggctccgcgcaaaagatggggttggggtacggcgcgtagagatgacgtcgggttctacgcgcagtggtgacgtcacgggagcgccggcggctgagaatccgcgttgttccgtgttgggggcggcatggagcgggagccgggcgccgcgggagttcgccgggctctgggccgccggctggaggcggtgctggcgagccgcagtgaggccaacgccgtgttcgacatcctggccgtgctgcaggtgggcctggcggcgtcgcagggccggagtcgcggcacgggagcgggacttgaatggggggctgcggcggcaggtccccaggaggttccgagacggcgttggggggtcagggtgggaggcgtgtgggtcacgggtcgggggtgacggggctggcgtcccgagggggaagggaacgggttgggggcagcctaggcaggggcgaaggtgacagttggcggccgggcaccctgccgccgcctctcctgcagtctgaggaccaggaggagatccaggaagcagtccgcacgtgcagccgtcttttcggggccttgctggagcggggagagctgtttgtgggccagctgccctctgaggagatggtcatgacaggtgagccctggagggccccggggctgctcttctctttccgtgggtcggagggaggctttgtcaccatgggatgagcgcccccaaccctggcacaggccgtgcaggctggtgggaggacgcaccaagcccaccgtggaagatggatggtggcgttggggcaggggtgacatgggtgccctgcagctgagtgtagatgaacactggacaaggtacgactttttgtgtgctttgcaccccttttgtaatttgatgttgactgatcctgacacggtcgcttaaactcggagcttcctttatgtccccatcctggggacgtcaggtcttggagtaaagagaggggatgtggatcctgctcctggcagcttggctggggcagtcctggggtaggaggtgctcttcctgtttgcagggctcagggaatgtgctggtctcagcacaggtctgggggccttagcgacctgtttccacctgcggaggctgagtagaagacaatgggagggtggagccaggcctgagattttgggctgggcccagggtggcgtatgtgggcctcacgtgggctgaccaccctaacctgtctgcagggtcccagggagccacacggaagtacaaggtgtggatgagacaccgctatcacagctgctgcaatcgcttgggagagctcctgggccacccctcctttcaggtcaaggtgggtcattgggctggcctcatccttgtccatcccctgcaccccaactcccaggttatccacaaagcagaggtctggggctcccacaattgtccaggcaaagctgcttccttcatgggagcatcaccctgtgggtgttcagtcccattcagaaacatggctatcgagtcctgtagtgaatattgaagacgcagaatccgtgttcatttccagtggcatccacggggatctctgtgtttgcatagagcacgcacaccaagcctcgtgccagtccacagatgtgtttgctcagatcacactgtggtctgcagccatgggaatgcattatgagctttcttaaaatctgtagtgaggaataactgaggcacagtttaccgtttaaagctgagaagttagcatctgttactgtgttgtgcagtggttgccgctatcccagaacatctttatcgccccgaaaagaaatcctgtaccagttaccatcgcttccatatcccgcccctttccacccccagccccaggcagccactcctggatcagtggttacttcctggatcaatgggtttgctttttttagacgctcctcataagggggatcatacggtatgtggcttcttccactcatcggcg

SEQ ID NO: 23917 - DNA, 1290 bp, Artificial sequence
  DNA replication origin
ggaggcaacagcatgatgctggcgacaggaccccatcacccacctcggggtgctggccagtgacccgggccacggcatccacggctgcctgcatggtgtggtagcgggtgtcgtcgtagtccaggtactcccggaactgggacaggagcaggctctggtcctcctcaggagacagcaggcctcccaccaccaactaggggcaaggaccagtgagcagccctgcccggcccagcatacgccagcaaggtccaggcaggcagccctgccccatcgagccccccaggcagactcctcctggttgggtgggccacaggagccacaggagtgtcccagccaacagccaggctcagctcagcaggccccgcccccactacggggccatcctgggatctggccagccagccaggccctctgggagtccccagcaaggccctcaccttgaagagctctcgggggaacaggtagttgccttcccacttggacttctccagggggtgcgctccttccagctgcacgaacttcaggagtgcgctgagggccagctcctgggaagggggcagtgcagggtggctgtgatgccctcaccccacggatgggcccagagctcagcccagtcagggagcccctcccatctaggcccagagctgagaaaagggcggccgggccttctcttgctccacacgccaccagatgccactctgggcttccgtgtcccacccatgacgtagagatgacaagatctctagttaaagagatccagtgctcacgacagagtctggcgggggaagggtacacagcccaggtctgctttatgggccacctgactgctctctcgtcacctgtgtcacgggaatgccaccataacccttgggaacagctgtgaaaacacaggcgtgtgatgccagcatggtgcccaactcagacccaggcttggaagctctcatctcggggtggcaaactcagtgctttcagggcccaggcaaatgacaccacaaagcaaaagagcctcgtgcgggatgacaggagcacacggctgtctcagagctgtctctgactctccctccagccaatcgcagccatgaacaaacttagaccccgtgttgacagaactgattatttctttctgagaaggtggaaactggttattttcacgtggtatctccccaacatttaaaagtctgcagctcggctataattatagacagacgtgttggcgaggatgtggagtatggaactctcaaatgctgccagggggagggtaagatagcgcagctactatggaaaacagtc

SEQ ID NO: 23918 - DNA, 1266 bp, Artificial sequence
  DNA replication origin
aggggattaggggtgtggtgtgagcgaggcggcggcactcaccgaggggattaggggtgtggtaggagtgaggcggcggcactcaccgaggggattaggggtgtggtaggagtgaggcggcggcactcaccgaggggattaggggtgtggtgtgagtgaggcggcggcactcaccgaggggattaggggtgtggtaggagtgaggcggcggcactcaccgaggggattaggggtgtggtaggagtgaggcggcggcactcaccgaggggattaggggtgtggtgtgagcgaggcggcggcactcaccgaggtcgcaggcgcgggtgaggaagtcgatcatgagcgtgggctgcgccagctgcggcaggatggcgtcatgcacaatcagcagcaccttcttgtagaggctgaggggcagctgggcgggggccggcaggtgggggtgaggggcgggtgggcgggggccggcgggtcggggtgaggcctccgccctgggggagacccggatgccgcccccgccccctccccggcctggcccctaccttgtgcttgaggaagctgagccacatggcctggaaaaccctcctgtgctcctgcaacggggtccagactgcactcgccgccctccccaccccagaccagagcccgagcagctgccagggcaccccgaagcccagcctgagccaacacaagcctgctctccacttttctgaccctgccttccttcttcctgtccccattcaagtcaggtacgccttgccctcgaggctggagtctcagaacagccaagaaagcagctttggcaagaccatggccaagaggggggctgcgcccaaaacagcccacggggcccacaggtggcaccagaggcttgactccaagaggcggcggtggcctctgacccaagggagggtcccgagttcacaggtctcgtcacctcccacacttcgagtgacctggtggccgtgcaagctgccacctgtaccctgggagtttcctctggtgaggaaggcggcagcctccatggggtctcacatgcaccccacacacacccccaaacccgggagggtgcccggctctccagaagcaactcaccttcaggtgagcaaccttccaggtgtcccacagctctgcagggaaagcgagggcaaaggtcacctgacccgcaggggaggcagaccaaggctcagccctgtccgcccctgactctcagcacactcacccgcccgcttcacatagaagctggagacggtgggctcccggcgg

SEQ ID NO: 23919 - DNA, 847 bp, Artificial sequence
  DNA replication origin
gtgaggcggccgcactcaccgaggggattaggggtgtggtaggagtgaggcggcggcactcaccgaggggattaggggtgtggtgtgagcgaggcggcggcactcaccgaggggattaggggtgtggtgtgagtgaggcggcggcactcaccgaggggattaggggtgtggtgtgagtgaggcggcggcactcaccgaggggattaggggtgtggtgtgagcgaggcggcggcactcaccgaggggattaggggtgtggtgtgagcgaggcggcggcactcaccgaggggattaggggtgtggtgtgagcgaggcggcggcactcaccgaggggattaggggtgtggtgtgagcgaggcggcggcactcaccgaggggattaggggtgtggtgtgagcgaggcggcggcactcaccgaggggattaggggtgtggtgtgagcgaggcggcggcactcaccgaggggattaggggtgtggtgtgagcgaggcggcggcactcaccgaggggattaggggtgtggtgtgagcgaggcggcggcactcaccgaggggattaggggtgtggtaggagtgaggcggcggcactcaccgaggggattaggggtgtggtaggagtgaggcggcggcactcaccgaggggattaggggtgtggtgtgagtgaggcggcggcactcaccgaggggattaggggtgtggtaggagtgaggcggcggcactcaccgaggggattaggggtgtggtaggagtgaggcggcggcactcaccgaggggattaggggtgtggtgtgagcgaggcggcggcactcaccgaggtcgcaggcgcgggtgaggaagtcgatcatga

SEQ ID NO: 23920 - DNA, 1611 bp, Artificial sequence
  DNA replication origin
gagccaagcctgagagccgccgtgctttgtgctttgcagatctttgagcgggacctgaagaagaaggggcccgagccggtgccactggagtttatcccagcccagggcctgctgggacggccgggtgaactctgtgcccagcacttcacgctcagctgaccctggcccacctgtgaataaatctcagctgaccccagcccacctgtgaataaatgtttttgcaggagaaaggctcagggagtgtggactggggcggctggatgcctctgccaggccgagggcctcacatctgcctgagcccaccaggcacatggcaaagcgaggcccctgccgactccacagcctgggaggggatggtggggaacctgaggcgtggtctttcccagggcctccggcccaccagtgtcaccggtcacccagcctccctcatcccctggccccagtgacctccctgttggcagagctcggggcctctgctgaggttacactccagacacctgggagggagcagggttgggggggttctctctgcctgggtcagttgtggtgggaggtgtatggtggtgtagacgggtatggtgtgtgtgggagtgaggggaggtggtgtgagtggggggtcagtgtgactggggggagtttggttgtgagtgggggtgttggtgtgaggggagagttggtgtgaatgggggggtggtgtgtgtggggggtgggttaggattagtgtgaatgggaggttggtttgagtggggggtgttggtgtcagtggggggttggtgtgagtcgggggttcctgtgagtgtcagcatcccacgctggctgtgtcctgccgatctggccttcgttctgggagccccgcgaggccccgggtggatgccgcgtggagttctgggtggatggtgcgtagaattccgggtgggtgctgtgtagaggccccgggtggatactgcgtagagttccgggtagatgctgcgtagagttacaggcagtgcctgggcccctctggagttccctgcccccacccccgtgggaggccctggtccagctgcagtggagtttcccccgctgtgggaggcgctggtccggctgcagcacagccttgttatcggggtgtttatttttagggaaccaaatttataccaaacaaactaggttttctgtctacacagtgacccccagtttccttttgacagtctgcttattcgaggacagggtgggatggggcactggaacagagcttggtgcgcgtgggtgtggctggggagggcggggagtgccttggccgtggcttgggggtgtcaccctgccggcccagcattggccgggaccctccgtgtgcccagcggggttttggggggcagagtgatggtggagatgttgcctctgctcccagcatccccctggctgcttccctctgccccagcgggctcctcaagtgaactggctcctgccccagggcctttgcaccagccacagctgtggcctctgccgcttttccctgtgttgccctggtttgaacgtcccgtccccgtccccccgggaggccttccctggtaccccgtgcgtggtagtcctgcacaggcgcccctccttccccactcttcatgctgtccc

SEQ ID NO: 23921 - DNA, 2595 bp, Artificial sequence
  DNA replication origin
gtgtgcatagtggtgtgtgtgtagtgtagtggtgtgtgtagtgtgtgtagtggtgtgtgcatagtggtgtgtgttgcgtgtgtgtagtggtgtgtgtagtggcgtgtatgtgtagtgtgtgcatagtggtgtgtgtagtgtgtagtggtgtgtgtgtagtgtgtagtgtgtgtagtgtgtgtgtaatggtgtgtgtgtagtggtatgtgtagtgtgtgcatagtggtgtgtgtgtagtgtgtagtggtgtgtagtgtgtgtgtagtggtgtctaatggtgtgtgtagtggtgtgtatgtgtagtgtgtacatagtggtgtgtgtgtagtgtgtagtggtgtgtgtagtgtaatgtgtgtgtagtggtgtgtgtagtgtgtgtgtaatggtgtgtgtgtagtggtgtgtatgtgtagtgtgtgcatagtggtgtgtgtgtgtagtgtgtgtgtagtggtgtgtgtagtgtgtgtgtaatggtgtgtgtgtagtgtgtgcatagtggtgtgtagtggtgtgtgtagtgtgtgtgtaatggtgtgtgtgtagtggtgtgtagtggtgtgtgtagtgtgtgtgtaatggtgtgtgtgtagtggtgtgtagtggtgtgtgtagtgtgtgtgtaatggtgtgtgagtgtagtggtgtgtgtatgtagtgtgcatagtggtgtgtgtagtgtagtggtgtgtgtgtagtgtgtgtgtagtggtgtttgtagtgtgtgtgtaatggtgtgtgtagtggtgtgtatgtgtagtgtgtgcagtggtgtgtgtagtgtgtgtgtaatggtgtgtgcgtgtagtggtgtgtgtagtgtgtgtaatgctgtgtgtgtgtagtggtgtgtgtagtgtgtgcgtgtagtggtgtgtgtagtgtgtgtaatggtgtgtgtgtagtggtgtatgtgtagtgtgtgcatagtggagtgtgtagtgtgtgtaatgtgtgtagtgtgtgtgtagtggtgtagtgtgtgcctgtagtgtgtgtagtgtgtgtgtagcgtaatgtgtgtgtagtggtgtgtatgtgtgtgcatagtggtgtgtgtagtgtgtaatggtgtgtgtgtagtggtgtgtgtgtagtgtgtagtggtgcgtgtgtgtagtggtgcgtgtgtagtggtgtgtgtagtggttgtgtgtagtgtgtgtagtggtgtgtgtagtgtgtgcgtgtagtggtgtgtgtagtgtgtgtgtagtggttgtgtgttgtgtgtagtggtgtgtgtagtgtgtagtggcgtgtagtggtgtgtgtagtggtgtatgcagtggtgtgtatgcagtggtgtgtagtggtgtgtgtgtagtgtgtgtagtgtgtgtgtgtagtggtgtgtgtagtgtgtgtgtagtggtgtgtgtagtgtgtgtagtggtttgtatgttgtgtgtgtagtgtgtgtactgtgcgtgtagtgtgtgtagtggtgtgtgtagtggtgtgtgtagtggtgtatgtagtggtgtgtgtgtagtggtgtgtgtagtggttgtgtgtagtgtgtagtggtacgtgtagtggttgtgtgtgtagtgtgtgcgtgtagtgtgtgtgtagtggttgtgtgtgtagtgtgtgtagtgtgtgtagtgtgtgtagtggtgtatgtagtgtgtatgcagtggtgtgtgtgtagtggtgtgtgtagtgtagtgtgtgtaatggtgtgtgtggtgtgtgtgtggtgtgtgtagtgtgcgtgtagtggtttgtatgtagtgtgtgtgtagtggtgtgtgtactgtgtgcgtgtagtgtgtagcggtgtgtgtgtagtggtgtatgcagtgtgtgtgtgtagtggtgtgtgtagtgtgtgcgtgtagtgtgtgtagtggtgtgtgtagtggtatgtagtgtgtagtggtgtgtgtagtggtttgtatgtagtgtgtgtgtagtggtgtgtgtagtggtatatgtagtggtgtgtgtagtgtgcgtgtagtggtgtgtgtgtgtagtgtgtgtagtggtttgtatgtagtgtgtagtggtgtgtgtactgtgtgtgtagtatgtgtagtggtgtgtgtagtggtgtatgtagtgtgtgtgtagtggtgtgtgtagtgtgtgcgtgtagtggtgtgtgtgtgtagtgtgtgtagtggtttgtatgtagtgtgtagtggtgtgtgtactgtgcgtgtagtgtgagtagtggtgtgtgtagtggtgtatctagtgtgtgtagtggtgtgtgtgtgtagtggtgtgtgtagtgtgtgtagtggtgtgtgtactgtgtgcgtgtagtgtgtgtagtggtgtgtgtactgtgtgcgtgtagtgtgtgtagtggtgtgtgtagtggtgtagtgtgtgtagtgtgtgtgtgtagtggtgtgtgtagtgtgtgtagtggtgtgtgtagtggtgtatctagtgtgtgtagtggtgtgtatgtagcggtgtgtgtcatgttgcatggtgagctctaacgaccccagcccccaacacccaactctacctcctgccacccggagtgcaggcgagccgtccccaccaagtccacactgcaggttcacgagcgaaatcagtgctgctgcagttccacaccgctacgtt

SEQ ID NO: 23922 - DNA, 829 bp, Artificial sequence
  DNA replication origin
ggggcctctgggagctggaaaaggcaggaatgggtcctccctgagtctctgagggccccgcctgcccacacctgcccatatttgccccaacctgcccacacctgcctcaggacagcatctcggtctcctggctgccagactgtgatgaagatgcatggttctaggccactggcttgtggtgacttgttgcatcagctgtggggagctcacacggtagcgcctgtcttggggggtgctgggcgggtgaccttcaggagacccctggggccccgctgccctcccaatgcctccagtcccagtgtctctgtggtggcatcctgtgctgaggatggtgcctcgcggagcctccactgcccctgtgtgctccgcaccacgtctgtctcgatggcgcccctcgaagacctcgggaagctccccgttcgctgtggccccccggggtctgtcccctgcagcactgttctctgggggctcgtggtccgagttctgatactgcaggtggcaggtcccctgaaggcatagtcagaggctttgctctgggctggcatggaggtatgggcgtggcggggtgtggctgggcgtggaggggcatggaggtgtgggcagggcatggagatgtgggcggggctgggcgtggaagggcggggtgtggaggtgtgggcgggttgggcacctctgggggttctgggaagactcgttgctgacttctttgggctccagagtctgctgtgctcctgggctctggcatggtcccttgcttgtcaccccgacctctgctgctgcggccactgctccctctgcctctcctgcctccatcctgtaaggaccatgt

SEQ ID NO: 23923 - DNA, 1719 bp, Artificial sequence
  DNA replication origin
gggacagcatggaggacaggacagcacctcaggaccggattctggatacactgcaccctctcgtgccaggtgttggcagttccgaccaagcccaggcatgagggagggccaggcggtgtgagcccgggggcatcctgggggtcgttctggaggccagaagctgcaggtgacaaaataatgtgtgacgagggggatttgagagtagcagagaggaatgtgtcctatgtctgccaaaaagaaagaaaagatgaggggagaggggagaggagacaagagaggggaggggagaggggagagaggagaggggagagaggagaggatctgtgcagggcacatgtttcccgtcccagggcagggaaggacagcccccagggcagagctgtggaacgctgttttcttccctccttgatgctgtgggttggcggtggctggatgcagccccaccaaatgggggcttcaggtggctgctggggtcccaagacagccaggctgagaaaaccgaggcaggtgtcatgagccatggtggggcttcggctttctcacgatgtggcgtctccacgcagtggagggcagggcagggcagggcctctgatgacccagccgcagagtccagtgcgaggaacagctcagtgaggaggggctgagtggagaggagctgagggaagaggggctgagtggggaggggctgagtggggaggagtgatgacccagccgcagagtccagtgcgaggaacagctcagtgaggaggggctgagtggggaggagctgagtgaggaggagctgagggcggaggagctgagggagtaggagctgagtggggaggagctgagtggggaggagctgagtgaggaggagctgagggaggaggagctgagggaggaggagctgagggaggaggagctgagggaggaggagctgaggaaggaggaggtgacggaggagaagctgaggaggagctgagagaggaggagctgagggaggaggagctgagggaggaggagctgagtgaggaggagctgagtggggaggagctgagggcggaggagctgagtgaggaggagctgagggaggaggagctgagggaggaggagctgaggaaggaggaggtgacggaggaggagctgaggagctgagggaggaggagctgagggaggaggagctgagggaggaggaggtgagggaggaggaggtgagggacgaggagctgagggaggaggagctgagggaggaggagctgagggaggaggagctgagtggggaggagctgaggaaggaggaactgagtggggaggagctgagcgaggaggagctgagggaggaggagctaagggaggaggagctgagtggggaggaactgagtggggaggagctgggtccagggcagagccaggatgctggaggccgcagcatctttatcggtggggtcaggggtcaccacacggaatctttttgccgggatctgaggctggagactgcgggaagctctcaggggagggcctgcggtggagcaggcctggtgggaggcggccagcaggagaagagatgagggcccagggaacgggaagggcgggggcttcggccagagggggccaggagctgggggaatgtgggaggaggacagtcggtcccaagatcactccctgtctccgggcccctctggccaccaggtcctgccaccaggtcctgccaccatccagcctgccttgcttccaccgccc

SEQ ID NO: 23924 - DNA, 1090 bp, Artificial sequence
  DNA replication origin
gagctgggggccactgagtcctgggtgtgactcccacgtgccaggggcccctggtcctggccccaccccaaggtgctttctggggaaggtgggccgtgtggcagggggagacagcggggagggtgggccacgtggcagggggagaagcagggagggcgggccacgtggcaggggggagacagcggggagggtgggccacgtggcagggggagaagcagggagggcgggccacgtggcaggggggagacagcggggagggtgggccacgtggcaggggggagacctcagggagggtgggctgcgtggcagggggagacctcggggagggtgggctgcgtggcagggggagacagcggggagccagggccggagccggccagtgttctttagggaacacagcccctgcccgtggcaggcaccccagggcggggacgctgaggggtctcagctcctctgagcagctcccacctgcccctcctggctgctggcctgagttcctccctgagcctgggccaccgccagaatcacgtgtccagcacgggcagtggcaggtgagactggcaggtggccccaaaccccggatgtcggccaggacgtctgcggcataacctctgtccatctgacacgggggcccctgaggctgctggccccccacctcccatggcacctgggtcctggtaggagagctgacctgagtggggcgtgggcttgaggggcatgggtggaaggaccctgggtctcatgagggcgctctctctgcactcccaccacgccccaaaagaagggcaaaggcagaggggatcctgtgagtctctgcagggtggacatgttccctggtggggagggcagctggaggtctgatgcccctagcctggaccaagaactcgcagactggcctggtggcttctgagcacacacaactgaggtcaattttatgctctggaattgatttcaaattaaattttgtttctttcgacccagtcaatacttggaacaagttctaatcaggagagcgattcggggctcacaccctccttctgtaggctgggctcaggcctcattctcagtaaggaacgttgtgatgtcagcc

SEQ ID NO: 23925 - DNA, 1249 bp, Artificial sequence
  DNA replication origin
attctcagtaaggaacgttgtgatgtcagccctcttcctgcactagcaaaagtgccattaatcagcctttctgacggttacaggaattcttaatgatgcatttatttacacagatttctctgctctgggtaaattcttttctccccgtgccagaccacaaagtacatggcagtcgatagcagaattatgagaaacgcaatttactttgcggatctaatgagcagatgagtagaaagtcgccagccccagccttggccgccacacacatcctggcccgctcctcctgggaaacgggtctgtactgcctggtgctgggcgggggcggcctcgtcatcctccagtcacatttttccaagcacactgtggtcgagccatggccccagcccctttctgtccccatcccccaatgtccccggggcaggtccctttaatacacaggggtgccttgggcaggccctggctgggccctctccatcctggcagacactcccaggttctgtcccgtgctggaggtgaacacgcttgtcactggccaaagagtgagctggagacagtttgcacggcaggggaccctgtggccacaaatgaagtcccccggtgtgtgtgtggagagggggggaacaagaggacattggctgccctgcagccccatgaggacgaggaccatgccccgtccagcgggaggctggtggaccccgggttccgatgacgctgagccagagagccaacgcgaccacgttttggggagggaaccccggcaccttggggcgtcagcaaggggcattgacttttggccacctaaggagtactggacatcacacatgtgcacacccatgagaccagcacacacaggcaggcacaggtgcactcacaccctccaacaccaggcagaacgcgcgtgcagacaccggtgtggcctcagtttctgtccctggggcccgtggagctgttgccagatcaggctgtgcagtgctgcgtgggacccaccgaggaacttgcccagccgcgtgcatggtagctacgatgtggagacgttgacggtttccatctgccttgaattgtgatgctgccggtcagggagcagctctgggggaccaggcctggccacctatgatggtgttggtggagacggcttccgacgaggtcgggttcgtgcctaggcgtgtcctgcacattcgaggccacagacgtggggatgtgtggggtgtcgggggtggggaccgggaagacctggcagggggtgaggggg

SEQ ID NO: 23926 - DNA, 1198 bp, Artificial sequence
  DNA replication origin
cggagcccgccattcccgctgcccgtgagcccggagcccgccattcccgctgcccgtgagcccggagcccgccgttcctccgggaagcagaactcccctccccatcccttttcttagactcaaggattctgttgtaattagatatttttactgtttctctgcccttttgaatggtgccaggcctgtcccctgtgtccttgaaatgcccccgtcactgtctgagcaagtcctcaggtcggagaggtggtcagcccagactcagccacttccccagcagccctgggcaggggtgggggacaccgtgtgctttcctgggttcacgctggctgctgagtggaagaggccgcaggggcgagggcggcggccaggaccgatgaggaagcagctgcagggactccagctcgagcccagggcggcctggacctggggggcagtgggggtctgagaagtcaggtcaggctgtgcatcaaaggcagagctgacggaatttgctgcagcagccaccatgggtggaaagagccgccaaggctgaacccgacgccctggtgtgatcacttgtggggacaaagtggtcgctaatgggatggggggcttggagtggactctgaggctggggaaaggaggggtttggttttgcagatgctggacctgggtgtctctgagaggtccagacggaaaggcacgtggcgggtggatttaggaggctgcagttcatggagaggtccaggcagcagcaggtaccacttggagatgacaggtaacggatggtttctaaagccacaaacagggcgaggccccggggagagggcaggcctggagtcccgcgaggatccgtggttagaggcgccctcccacaccgcccacaggtctgcaaggtttgcacgcctccgctctgcaaggaagcaggtgcagttagttcccttggcctttcccagcacagggagacggcgcgtgtgacccggtgatctgttggggaggggaggggaggagcaggcagcacgggcgtttgggggctgctgggatggattttggggtgatgggaactgaggaaccaaaggtgctccatggtctttggcttgagggatgggcggggtggcattcactgggaggggcactgtgggaagaacagggtcttcctgtggggagcagcatggacctgtgaagtctgcagggcccgtgtggaccaggcaggtgtgcg

SEQ ID NO: 23927 - DNA, 830 bp, Artificial sequence
  DNA replication origin
cagggcgaggccccggggagagggcaggcctggagtcccgcgaggatccgtggttagaggcgccctcccacaccgcccacaggtctgcaaggtttgcacgcctccgctctgcaaggaagcaggtgcagttagttcccttggcctttcccagcacagggagacggcgcgtgtgacccggtgatctgttggggaggggaggggaggagcaggcagcacgggcgtttgggggctgctgggatggattttggggtgatgggaactgaggaaccaaaggtgctccatggtctttggcttgagggatgggcggggtggcattcactgggaggggcactgtgggaagaacagggtcttcctgtggggagcagcatggacctgtgaagtctgcagggcccgtgtggaccaggcaggtgtgcggggcggcgaggccggacccaggcaggtgtgcggggcggcgaggcggggctccgacaccggctttctggacacccagaaacaagaggcatcatggagagacccacaagggctgggggaggccaggccctctccaggggtcaggctggggattttggtgtctgccaggagcggcagagaggaggggagttttcggggtcccctaggggctgtagcgggctggatggttcatgctgcactcaaccccgggacccattttccatgtgtccctccggcaatgggaggccactgggaggctgcagacacacacttgggttttcagcggcctctgctgactgggacccacttctgatgccctgagcccccactgctggctgggacccacttctcacatcctgagccccctctgctgactggga

SEQ ID NO: 23928 - DNA, 1042 bp, Artificial sequence
  DNA replication origin
ccacgcagccacacgaggctcacacaccacacactctccagccctcctgcccacccaggggcgccacaactgcggtgctgtcccggccacacctgggcgggtgggaaggtcaaggtcagccccggggcccccaggcctggagggtgcagggagaggaggagcggaggtgcaggcaccgtggccgggcagtcggaggcgccccatcactcgggggggggggggggggagacagacttcaccagcggcaggaagacagcgtggcgggcacacgaggtggaaacagtgaagggacacacctgtgctggtggcctcacccctcaccccctccagtcatcgccagccaaggcggccgctatgcaggggcttggaaggacgtggaccccagcacccagcgctcaccgcccgcctccaccacaccctccagcagctgaggctgacggctgatgccagcatgtgagagcatgtgctgtctgctgggtgtgtgcgcgctgggctgtgcagggtgcgagtgaacgtgtgctgggtgggtacatgtgctgggtgtgtgtactgagtgtgagttgtgctgggtgtgtgtactatgtgtgcgtgctgggtgtgtgtaccgagtgtgtgtgtgtgtgctgtgtgagttgtgttgggtgtgtgtactgagtgtgtgtgtggtttgagttgtgttgggtgtgtgtactgtgcgtgtgtgtgctgtgtgagttgtgtggggtgtgaacgtgcgctgagcatgtgtgtgtgcggtgtgagttgtgcaggatgtgtgtactgaggtgtgtgtgtgtgctgtgtgttgtgtggggtgtgagcctgtgctgagcctgtgctgggtgtgagcgtgcattgtgtgtgtgctgtgtgtgttgtgtggggtgtgagcatgtgctgagcctgtgctgggtgtgagcgtgcgctgggtgagtgtgccatattagttgtgcagggtgagtgtgcaaacatgtgtgctatgtgtgcactggcgatgggagtgtgtgttaggtgtgtcagggggttgttgcatgttgctgag

SEQ ID NO: 23929 - DNA, 1032 bp, Artificial sequence
  DNA replication origin
ctcacatgctggcatcagccgtcagcctcagctgctggagggtgtggtggaggcgggcggtgagcgctgggtgctggggtccacgtccttccaagcccctgcatagcggccgccttggctggcgatgactggagggggtgaggggtgaggccaccagcacaggtgtgtcccttcactgtttccacctcgtgtgcccgccacgctgtcttcctgccgctggtgaagtctgtctcccccccccccccccccgagtgatggggcgcctccgactgcccggccacggtgcctgcacctccgctcctcctctccctgcaccctccaggcctgggggccccggggctgaccttgaccttcccacccgcccaggtgtggccgggacagcaccgcagttgtggcgcccctgggtgggcaggagggctggagagtgtgtggtgtgtgagcctcgtgtggctgcgtggcgtgtgtgatgtgtttcatgggtggtgtattgtgtatgtgtgtgttgcgtgtgtggcgtgtgtggcatgtgtggcatggttgaacgtgtgctggtggaggcagccgtggccactgaccatctgcccctgggcggcaggagggggaaagccttgactctgagcactcccaggtgcacaggttccgcagggtccatgcgggtgggaagtcggtttctctgctctccacagttgagtattcctggagaagatggcaatggcccagggtgttggtgggagaggggctcacgatgggaaattctggggaaggagctaagggcggcgcgggtgcacagtatgccctcgataagtgcctggggaatgaatgtgtggagtcgcgtatctgtcctcgggtgaacggtgcgtggggccgcgtggctgtcctcgggtgaatggtgcgtggaactgtgtgtctgtcctcagatgaacaggagtggggccggacgtccctgtgtccccctggtgttcctctccttctctcactctctgtggctgtttctcctctctctgggttccctgagagcccagcctcttggat

SEQ ID NO: 23930 - DNA, 1147 bp, Artificial sequence
  DNA replication origin
tctgtcttactccacctccatctcagacccccgagctaccgggccaggctgccttctgcatccgtggagccccagtgcccgtgagggtgtccaggcctcaccctgtggggccgtgcatgaatccaggcatggaggaagtgtagctgggcttctctaagctgagacaagtaaagatgaagaggcccccaggtacccaattcctataggtgtgaggccagggcaccagacaaaggcgtgagctgcaagtatgggcgtctcctatggaaaaagtggctcacaccagagcctgggccccggagggaggagccacgcgcctgggagaccacacagccgggagcaggaccagtgtggcccggggacactccccaagccgggactcggcgacaggcccgggggcctcaggatgtcgacgggcctcgtgttgccctcgctgcggccgtcctggctgtcctggcctatgtcgggcttgagtggggtggcaggttccgagatgaggaggaaccgcactgagaagcctcctctgcatccgaacccgccaccggtcacaggaacacggactctgattggtgggtttatttttttgagctgcccatcatgagccgccctctgctgagctttgatctcgatgccttaatcagatggggctctggtggtctagggaggggagaatgcggttttatgagaggggaagggactcgctggggcagagggcgggctgccggattcaccaaacccggggcccgggcaattctccctgtgtccatgcactggtgggactgtgactgggcggcacctcccctcccgggatgggtctgtgtccctaggccctgggtctcggtggcctttgatttgccgtggttggtagaacatggtggaaggggtgtggggccttgcaacgcctctccactgggctgtggctctcccacgcccaccgcagaaggaaccggcctgacctacaggaaggtgagggtggtgtgcggaatttctccacaggagccctggaacgtgaggacgtgcgccgtcctcagttaaactcaaaaggggggtcatcggggtggcctcgcctgctcactagcccctcagagccaggagaactggccatgctgtttccggttggaagatgggaagggcccttgagaggaagatg

SEQ ID NO: 23931 - DNA, 983 bp, Artificial sequence
  DNA replication origin
cagagccaggagaactggccatgctgtttccggttggaagatgggaagggcccttgagaggaagatgccggcagccttcaggagccgagaggggacccggctgacaacctgcaaggaggccgggacctcagccctgccgctgcaggcccccagagctgccaggcccccccgcgagcctgcaggcgggttcttccccagagcctgcagaacggcacctgccctgctggcacctggactccaggctgtgagccctgagtggcaaatccacccacaccgtggctgagtcctggccatggaagctgccaggggatgaactggcgttgctctgaaccgctagatacggggctcatcagaaacagaaaactgaggcaggaggccgtgcggaggacagcccaggccgcagcgacggccagccccacccgccagctgccaggagccgtctgctgcccggcctggccagccctgctggtgaccatggcggcccatgagccagcccagggagcccccatggacccagagaattgtgaggaccaggagcccagcgctgctttaacctgctgcgtttcgggtggtttagttcccgtgttgtgcgtggacgcatcgtggcacgggggattctgcccagcaactgctctgtgttctgagacactaaaggccagtgcagcgttagagtcaggctggaggtgggggcaggggtgaggaagaggggacgagaagttgggggagggagaggagcaggagcaggagggagggtggggctgctctctgggcagccaggctcaatacacagagaagcttccctcagtggctaaaccgggccaggagatgctggttccggggaatgagcccactgctctgccctcttcccgtcccggctccgccacctccccagctctgtcctgatttcacacaaacccatcattccatttcactccagagatgaaatcggttctgcagctcaccctatccccatcttgagcacc

SEQ ID NO: 23932 - DNA, 1099 bp, Artificial sequence
  DNA replication origin
ccggggtcacaggcagcctcggctccgaccccgccgggcgcgcggtgaccggctgtgcgggttccaggggcggatgtgcgctttgcccggcccctctcccgccgcgcggccgctcctcctctccgccaagggccggttcaggcacaggccccgccgaggctgcccctgacttgagggctcacgcaccgggctgcttgcggctctggactattgtgaataaggccggtgtgagtattttactgtaagtctttggggacgtgtcttcatgccccttgggtgaatccaggtgtgagattgccgggccggggtgctgtgagttacctttggttatagggaggtggtgacccatggtggctccaagtgcccgtggcctttcgtgaccccgccagcagcgggtgggcctttggggcgctccgaggctcgcccgtgctgcccgtgggtgcttcagccagtccggccgccgtggctttcctctgcagcccccggtgcctgctggcgtcgtgcctttccgtgtgctcgttggccacgcacatgtcgaggggccgttctgacgatggactgaggggctcggggatagcacgtgtccagcggggcaggtcagcctttctcttctccccacagacctcagcacagctctgcacctcggaggactcggggaagtttctgggcctatttgggcaataggagaaggtcatgggctgtctttccaaaattcacgtccacccagaacccccgaatgagacctatttaaagagaaggccttagctgatggaacattaagatgaggccaccctggagcagggtgggccctgaatccgaggctgctgtccctgcaaggtgacgagagggtgcaggcgtggaggagacacatgggggtggggtgaggaacaggccaccggcagcagagacgggtcaggcccagcgagggaggaggtgggaggagccccggagccctcggaggaagccgggctggcacctgggccttggactctgggactgtgagggaatcaattctgccatctgaagccacctgctgtggtcctgtgttacagcagcgctgggcacaaacatgggagggcctcgtgattgggactggggc

SEQ ID NO: 23933 - DNA, 1701 bp, Artificial sequence
  DNA replication origin
ccgggagcctggccctgcggagcatttgggcgccgtccagcccgcatccccacgtgggccctgcccggcggtcctctcccgcccgcaacagcgtccccggggtgggaggctccaaggcagccgcgcagggccccgtttgcagctcaaggcagctcgcacggcctgtcagtgctcactggggagagcctgggcgctgctcacacacagtcccggtggtcctgtccccagctggtgcggtacagcgctgatggactgctgcagctggggcctctgggctccacagccttcttgcctgactccaagtgtctggtggatgacggcacgggccgcatgcccaccctgaagaagtgtgaggatgtggcgcggccaacacagcggctgtgggacttcacccaggtcagcctctggggaaggggggccgtggggttggggcggggcagggctgctgggacccctgggtgcctctgccactagagccagcccattgggtgggagctggagtgcggcagggggtggtcaggggaccgggccttggatcagctgttcccttatgggccccgacgctcacagagagggcaggtgactggtcagggtcacacagccagagaggggtcgggctggacagtctgatcatagccctgcatctgcctcttccagcctcaggtgcccagggtagagggaggatttaggaaggggatgaggtatgattccaacctgggccgctagccctgcaggaaagatgggaaatcctcgaagctccactgaagtcagccccttcccggcccccctgggtgctgctgtgatgctggctttccattcaagctgccccaagaatgagcacgagggctgagagcacgaagcagcctccctgaggtggggggagggggaacaaggacgcctgcacctggctgacttgatgtgcctgtccccacagagtggccccattgtgagccgggccacgggccgctgcctggaggtggagatgtccaaagatgccaactttgggctccggctggtggtacagaggtgctcggggcagaagtggatgatcagaaactggatcaaacacgcacggcactgaccccacctccgcccggacccccacagacctcgggaaggcgctgggccgagccagtgtggctgagtgaccggggtgtgcccggcagacacagcaggacagggctctatgtgcggccaggacagcagaggctgaggggccggggtgtggctgagtgaccagggtgtcacccactgcatctggagtacagcttctcctaggacaggcggctctacccgagggagggcgtctggggacagtgatgccaactcaaacacgtgccttctccacggtatctcctggccaggctgctgggacagccgccgcctctgcatgtaccacagccccccacgccccatagggaggccaagccccggaccatgcaccaggctgcaccctggtgtcttccacccgcaggcctcccatgctccaagcagcctcccccagcacttgcggccgctcagccctccaaccaagacctaagtcacacatcataatgcagctccttgtggtctggtaagaggggtgctggaggacatggacagcgacaaacctgaggccgtgtctaggaggctggcacgactgcttcagcagagaccaaataaagagaggattaggcagcagcactgtgtgtgtcttcctgg

SEQ ID NO: 23934 - DNA, 1251 bp, Artificial sequence
  DNA replication origin
aggcccggtcccctgaccaccccctgccgcactccagctcccacccaatgggctggctctagtggcagaggcacccaggggtcccagcagccctgccccgccccaaccccacggccccccttccccagaggctgacctgggtgaagtcccacagccgctgtgttggccgcgccacatcctcacacttcttcagggtgggcatgcggcccgtgccgtcatccaccagacacttggagtcaggcaagaaggctgtggagcccagaggccccagctgcagcagtccatcagcgctgtaccgcaccagctggggacaggaccaccgggactgtgtgtgagcagcgcccaggctctccccagtgagcactgacaggccgtgcgagctgccttgagctgcaaacggggccctgcgcggctgccttggagcctcccaccccggggacgctgttgcgggcgggagaggaccgccgggcagggcccacgtggggatgcgggctggacggcgcccaaatgctccgcagggccaggctcccggcttgcacagctggctggtcttccgcctggacagacgtcatgaatgtggctcagacccagagcgcggccccactcgtttcggggaggacaggagttgggtttaatttgggcaacatgcagtgccgtgtgtgagcggaacacgcattcccgtggggttagaaacgtccagctccttatgggggtcatggtcagaatggcctggaccttcactacggccagcccctgaccactgtgattctgcggggctggggctggggctgggcctgggcctgtgctgcaggtgagtcctgcccaggtggggagtgctcggaggtcaacagcactattgccgtgttaatccaccccccgagccaatgcttcccacacttcgcttcaatcacgcgacagtcctgagcggtaagtgctgttgccgtctctcttgactgaggggggagtgatgcacccccagcccatctgaccccaaaggcctggttcctttttaattttttgagatacggtctcgctctgttgcccaggatggagtgcactggtgtgatctcagctcaacctccgcatcccaggctcaggtgatcctcctgcctcagcctcccgagcagctgggaatacgggcatgccccaccatgcccggctaatttttgtattttttgtagcgacagggtttcgccacgctgcccagactggtctcaattcctgggcttaagtgatctgtctgccttggcc

SEQ ID NO: 23935 - DNA, 1333 bp, Artificial sequence
  DNA replication origin
aggggtagaggatcgcccggtcgccgtcctccgctccctggtccagacagtaggcactggctttgctgtttctcacctgcaagcagaagccccaggagaaagtccagagtcacccgagggtgcggccccagggagcttcacgcagccagctctgcagccagcacctaaggaggtgcccgcgggaggaggagggggcgtgtgggatgctctggccgggtgggctgcctgggaaggggtggctgaccgagtttgtcactgatggagacatggaagtgtccgccatgcacagatggagacttggccatcactccataggggaacacttgagcagcagggacgacggccccaggctgtggagtggcttccctgccttgccgcctgctccctgtgcccttgcggctcccactgagtgggtagagaccgctcgccagccttgcagtctaggctggccttggcttggacccttgggagaccttccagcttccactctgtcttggaaggaaccctgacagccctctgagaacaagcccgggccagactgctgggggatgtgttgtcatcgggcagccaacctccagcctccagaacaggcccatcggagatcagcacagcctggatcaggccagcagcactgcctgggtggccccggctcgtgagcaagtgtagatgcttattgcttttgtccaccgcgtctccaggctgctgggtttgcagcagcagctgacccatccaccacggccaccacgagaggtcacacaggtttgaattgggaccgttgaggaagcccagcagagtctggatgttacggctgctctgggttgggggtgcctgcacttggctaattgaggatggagtgggcagagtagaagcacagggaggctgggggagaggggcggtgccccgatgcacactcagcactgcctgggaaacctctgtgcccaagggactggagtcagcgcagggtggaccaggagctgcaggaggggaggctcagcgaggaccatccaccccagggacccttttccttgccccatccgagtgccagctcagggctgggacgctcgagtctcatggtgggaggcaccccatcccctgcacagactggggagagggcagaagagcagcaccttctcgctggctttacggagtgctgtgcatgtgggggccagtggagacgggggtctctgtgtagctgatgggcctgtgtgagtgtgcatatcacccattgtgtgcatctgtgggggcaccttcatgcatgcacgctggtgtatgaacgtggctccgcatatgtggatgcacagacgtgtacacacacacattattttgcttgata

SEQ ID NO: 23936 - DNA, 1437 bp, Artificial sequence
  DNA replication origin
ctccaggctcaggccttgtggggagggcagacgacttggccttcacggcctgggcttgaatcccgtcaccttctggtatgtgggcctgggacagtcccctatcttctctgtgcctcagttactcattggtaaagtggggacgatcacgccagaaactcattgttgctctgttatgaggttttaatcagccaaggggctcacaccagggcccttggacacggaggtgacaggcatttgccggcctcactgcccgggggcctggagcacctcactcagttgcccacacacttggggaggtcatcaccctgcacgttttccttatcacttcatggaaaacaaggctgtaggagcaccgggtaccctcttctcgtctctcagacacgagtgcacgtgtctacggctcctgatctgcctggcgggagctgatatgggggctggatgctggatttgcagtgaatggtccagcccggggccacttcaggccgtgtcacccacacgctggggtgcactctagcagggggtggtaagccaatttaggggctgtggtgggaagttttaagaagtagtaatattgtaaatgagaagggtcactttggtgctacgtacacaaagcgctgtatgtggacagatgtaaatgtatgcgtgtgtgcgctgggtcatgacttaagatctggctcattagggttgatgcagacaagcccgtttctaagatgagccctcccagaactcagggacccagtgcctgcagtggccagggaaggaagggggtggttccagagacgctggggtgtggcgggatgggtcgcggccacccgtctcagtacctgcctttcttagggttgtgggggtggggcgctttgagaaaagccagaattcaggctctttatgggaaattacaaattagaaaacaaacagcaatcctcaacttgaagcgggtcagccactcataggccaaagcccaacaggaaacaaccaaaaacgtccatccacggacgagtggatccacacgaggggccctttcacactgtggacgtgactcagccatggtgggggtgacctggaaaaggtggcgctgaggacgggaagccacacagcgtatgagccgttcatgaaaccgccagacagttgaggctgcccggggctggggaggggtccgcactggctgacaggtgctgtgcagggcactaagtggggccctggctgaggcggcggcaccaggttggggagaggccgcccctccctggcttctaaccacggggcaattgctctaggctgagaggaaaaacgcccaccacaccggggtgggtgtgagctggtctcttcccagtgtgaggaaggctccttcccaggcagacagctcacccactcacacctgcacacacaactgcttgcacctgtgcacacctgtcaacacacccactcacacctgcagggggc

SEQ ID NO: 23937 - DNA, 919 bp, Artificial sequence
  DNA replication origin
tcagcccgtgggtggcatcggcctttttttaatggggtggatgggatgggacagcacaggatagggtaggataggatgggacggggctggctcagggctctccagggaaacagattaatagcagatggtggggacgtgggcttagctgtgaaagttcatctaaggaattgactcacccggttacgggggctgagggtaccgagattggccgtcggctggcaggcgcccaggagagccggtggcgtgagctccaagcctgaaggcaggggaggacccacgtcccagcccgaatcgagcagagtgtgtgaacactccctgcctcggcctttctgtcctactcaggcctgtaggggacagatttaaacacggctcccaccagaggccatgcacagaccacccagaatcgggagagcaaacgtcccagcaccctgttccctgccacgctgacacaaaaccaaccctcacaggcaggacagcgcggggggacaaaccggagtgaaagagcacgtataggaaggctggtattgcttaagtggaacgacacggaaggaagcataaaaggatacgcagtgacaaacacgtttctgctgcgcgtgggggttcagaaagccaggggctgcggggttttattagctggggaggctggttgggcttttgattgtgtgtgttctggggatgcgtggagcggtgtctgcatggcaagcagctgtttgtaaacagattgttggtgtgttcgggtgctgggggaggtggctggtgcagtggggcggggggttccctgcacagaacaagcactgggggtgggaaccacagggtgaaaaacctgttaagtgttggggtcggtagaataaacccccctccccacagccatcgtgtaacgcacaagagaaagaagtcccagagaggacgcaacccagac

SEQ ID NO: 23938 - DNA, 805 bp, Artificial sequence
  DNA replication origin
gctcgtagggttctcctggaagcgctggggacatgcggccttcatcgtgaaactgtcatctagaggggaggcaggcgaggctcagacgtcacactcatcacgtgtgggtgcagctggaggactgagtggggccatgaggcttgggcaggaggtgcgccctggctggggacggcttcctgaaccccagctctgagcggagatgggtggcgagtggggttaactggcggtgagacacaggcatgcttgaggcccgagccccgtcctcctgggctgtggggctgtgcagagctggcatgggcaggctgtgctgcggtcagggaagctgaccatcttaatggttgaattgagaagaagctccaacttgccaaaagccaaacttgcaccaaaaaagggcttggtcgccatctggaggtcgccgtctggcggttgccatctgggtggtcgccgtctggaggtcgccgtctggaggtcgccgtctggcggttgccatctggaggtcgccgtctgggtggtcgctgtctggaggtcgctgtctggtggtcggctgccggcctgactcacaacagctttctgaatcctggcaaaaccatcacacttgagaggtgcgctcagcaaatccatgagatgcaccaaaaatcgcggtgcctgccgccggcctcagtccacagaaagggcccagttcttctccaccacaacgcctggctgcacgtcacacaaccaacgcttcacaagctgaacgaattgggctgcaaagttttgcctcatccgccacattcacctgacttctcgccaaccaactaccgct

SEQ ID NO: 23939 - DNA, 1359 bp, Artificial sequence
  DNA replication origin
cagacccgggtggggtttccgtgtcgaggtctgagggctgcagacccgggtggggtttctgtgtcgaggtctgagggctgctagacccgggtggggtttccgtgtcgaggtctgagggctgcagacccgggtggggtttccgtgtcgaggtctgagggctgcagacccgggtggggtttccgtgtcgaggtctgagggctgcagacccgggtggggtttccgtgtcgaggtctgagggctgcagacccgggtggggtttccgtgtcgaggtctgagggctgcagacccgggtggggtttccgtgtcgaggtctgagggctgcagacccgggtggggtttccgtgtcgaggtctgagggctgcagacccgggtggggtttccgtgtcgaggtctgagggctgcagacccgggtggggtttccgtgtcgaggtctgagggctgcagacccgggtggggtttccgtgtcgaggtctgagggctgcagacccgggtggggtttccgtgtcgaggtctgaaggctgcagacccgggtggggtttccgtgtcgtggtgtgaaggctgtagacccgggtggggtttccgtgtcacggtctgaaggctggcatccttctctgggaactccccacccgtcttttctctcaatgcctggctgggtggggcctgcctgcgtgcacgtccgctgccatgcggagtgtccactgacgcaagcatcactcacagctgcagacatggtcccagcagcacctcacatccactgaataatgggaccttcacctcctgagcagatgtaaaaccgtcacatgggccacagcccacaggcgtggattgcagggcaggggtgcagtgtgtgagcacgtggcctgctgttggggaccaagtttggagtctggctgcctcaggtgctggctgggtgacttggacatactcctcagccttccgtgcccatctcctaattcccacaaatgctcttgaaggacctgccccagggtcccctcgacggagagggggaaatgctctgggaagctctgggcctgctgcctttcacagagagaatattcgggaaaaccacggtggagacagaggatgagggacacagaatggccaggtggacgagagagggtggacggagtgagcggatcacagtaagactgcggatacacggctgtttctggccagcgcgaaaggcagctgcatgtggtttgaccgaatagacacgaggttgcctcctcactgctgtggtgacagcgtctgaggtgttttctcgtactaggtcggtgcaaaagtaattacagtttcggatcatgaactttaaatcattataactaggctcaaacacacctttattcgtcaaaataggaa

SEQ ID NO: 23940 - DNA, 1890 bp, Artificial sequence
  DNA replication origin
attgatgaatggcgcccactgcgccctgggagatgggatttgcctttccagcgataaatacaggcagatcctgcccggaagatggatcgctgctgcagaacgaggcatgtgtgtgacaagagggtggcgtcacccacagccgtaccagaggaattatcatttcccgaaaccgacctgggctccaggggcagggacacgctaagcagattgtaaatcttttttaaaaatcaggttcaatgaaatctctcaaaggtatgcacacaatttcctccagagtgaatatgaagccctgccttttgttaaaggggaaattccgttctgccaaagggaaagtgctgactaggtacctcttgggtttgtaccaggtgagacaacctgggggtcaggatgcctgggtttccgtccgcgtcagcctggacctctggtgcatccaacccttttcctggaggcctgggctgggaacacagggcttgcttggcctctaaggttgttttcctcatcttgatgacacagctttgcacagcgcccagacagagtcatgctggttctagggactaatgcagatgggtggatggatgagtgggtgaaagaaggaagggatagatggtcgctaggtgggcaaatgagtgggtagattgatggataaatggtggatggatgggtagatgagtggctggatgagtgggtgggaggatggatagatagatggtgtctaggtgggcaaatgagtgggtagatggatgagtggtgagtgggtgggtagatggatgagtggtgagtgggtgggtggatgaatggatgggtgggtgggtggatgaatggatgggtggatagagatggtggctaggtgggtgagtgagtaggtagatggatggataaaggaatggatggatgagtgggtggatggatgggtgaatggacggatggatggatggctgggtggatgcagggatggatgggtggatagatggatgagtggatggatggatggatgagtgcgtgtggatgaatggatagatagtggctaggtgggtgaatgagtaggtagatggatggataaaggaatggatggatgagtgggtggatgggatgggtgaatggatggatggatggctggatggatggatggatggatgagtgggggatggctggatggatagatggatagagtgagtggatggatgaatggttggctggttggatgcagggatggatggatggatgggtggggatgcatgggtgggtgaatggatggctggctggatgcagggatggatggatagatgaatgagtggatggatggatgagtgcatgtagatgaatggatagatagtggctaggtgggtgaatgagtaggtagatggatggataaaggaatggatggatgagtgggtggatggatgggtgaatggatggattgatggctggctggctggatggatagatagatggatgagtgaatggatggatgggtgggtgggatgcatggatggatgaatggatggctggctggatgcagggatggatggatggatgagtccgcgtggatgggtggatagatagtggctaggtgggtgaataagtgagtagatgggtaaatgggtggatgagtgggtcattctatcagttactgtatccaaggaatattggcaaaatggaagagaggtgggcttgagcaaatggtggccataacttgagaggtgaagtctcatcctcattattttcaaagtgaaaaccagattttataacagtttagtggatcacaacacccaaaaggaaacacacagttcgtcacacagctaaacctatcagtcaagaaagagccaagttatccccaaattcttcttcccacttacaagggcagactgcccacaagggcgaaaagcccag

SEQ ID NO: 23941 - DNA, 3106 bp, Artificial sequence
  DNA replication origin
  misc_feature (2310)..(2310): n is a, c, g, or t
cgtgcacctcgctggagcccgtctgcgtctgtcagactctgtctgtggtgcgtgcgtgtgcctgggtgtaacgcggcctgaggtgttgctttcacaggcacacgcttcggagggagctgcggccagcagggtcggggagctgggccggggagagggtcgcaggcctttgtccgtgcaatgcacttccccacacgcgttcggggacggcaccatgcacagctgcacgctggtgccccggggttctgctgacgagctggggagccatttcggtgcctccgttccatctggcacagaaacgattcttcctgtatctgagtctctcctcatgccctagccatttcctcaggctgaatttctagaagcgaaattactgactcaggaaacgcatattttcatggatttatgtacaatttgccaaattcacctccctcctcccaaagaaaaagctatgggttgtgtgtgggtgtgggtgtgtgtgtgtatggggtgtatgtatgtgtgtgggggggatgggtgtgtatgtacagtgtggggtgtgtatacagtgtgtatggggtgtatgtggggtgtgtacagtgtgtggggtatgtatatggtgtgtgtggggcgtgtttatggagtgtatgtgtgtggggtgtgtatgtacagtgtatggggtgtgtatatggtgtgtgtggggtgtgtttatgggatgtgtgtgggtgtgtatatggggtgtatgtgtgggatgtgtatgtacagtgtgtggggtgggtgtatggggtgtatgtgtgtgggatgtgtatttggtgtgtatgtacagtgtgtggggtgggtgtttggtgtgtatgtacagtgtgtgtggggtgtgtatatgggggtgcatggggtgcatgtggggtgtgtatatacagtggggtgtggggtgtgtggtgtgtatgtgtgtggggtgtatgtgggtgtgtatatacagtggggtgtgggttgtgtgttgtgtatgtgtgtggggtgtgtatatggtatgtatggggcatatgtgtggcgtgcatgtgtacagtgtgtggggtgggtgtatgtgtgtgggatatgtctgtacagtgtggggtgtgtacatggggtatatgaggtgtatgtgtgtgggatgtgtatgtacagtgtgtgggatgtgtatatggggtataagggatgtatgtgtgaggtgtatgtacagtatgtgcagcgtgtatatggtgtgtatgaggtgtatgtgtggggtgtgtatgtaccgtgtgtggggtgtgtgtatatgttgtgtatggggtgtatgtgtgggttgtgtatgtacagtgtggggtgtatgtgtgtggggtgtgtatatggtgtgtatggggtgtatgtgtggggtgtgtatgtacagtgtggggtgtgtgggatgtatgtgtgtagggtgtgtatttggggtgtatgcgtgtgggatgtgtatgtacagtgtggggtgtgtgtatagtgtgtatggggtgtatgtggggtgtgtacaatgtggggtgtgtggggtgtatgtgtgtggggtgtgtacagtgtgtggggtgtgcatatggggtgtatggggtgtgtgtgtgggttgtatatgtacagtgtgtggggtgtgggttgtggggtgtgtggtgtgtatggggggtgtgtatacacagtgtgtggggtgtgggttgtgtggtgtgtgtgagggtatgcatgtacagtggggtgtgggttgtgtggcgtgtgtggggtgtatacagcgtgtgtagtgtgggttgtggggggtgtgtatgtacagtgttgtgtgtatggggtgtgtacgtacagtgtgtgtatggggtgtgtacgtacagtgtgtggagtgtgtgtgtggggtgtgtatatacagtgtgtggggtgtgggttgtgtgatgtgcatgtgtggggtgtgtatatatagaatgtggtgtgtgggttgtgtggggtgtgtatgtacagtgtggggtgtgtgttgtgtgtggcatgtgtatatacagtgtgtggagtgtggattgtgtggtatgtatgtgtgtgggatgtgtatgtacagtggagtttcagttgtgtggtgtgtgtgtggggggtgtatatagtgtgtgggttgtgtggtgtgtatgtgtgtagggtgtgtacagcgtgtggggtgtgagttgtgtggtatgtatatgtgggggtgtttatgtacagtgtgtggcatgtgggttgtgtgggggtggtgtgtatgtagtgtggggtgggttgtgtggtgtgtggggggtgtataagtatagtatatgggatgtgtatatggagtatatgcagtgtatgtgtgtgggntgtgtatgtacagtgtgtgggttgtgtggtatgtgtgtagggtgtgtacagtgtgtgaggtgtgagttgtgtggtatgtatatgtgggggtgtgtatgtacagtgtgtggcatgtgggttgtgtgtgggggggtggtgtgtatgtagtgtgtggggtgtgggttatgtggtgtgtggggggggtgtacgtatagtgtatagggtgtgtatatggggtgtatgtgtgtggggtgtgtatgtacagtgtgtggggtgtgggttgtgtttatgcatgtggcacgtgtatatacagtgtgtgcagtgtggattgtgtggtatgtgtggggtgtgtacattacagtgtgtggagtgtgggttgtgtggtgtgtatgtgggagggtgtgtatgtgtgtggggtgtgtgtatgagatgtatgtgtgtggggtgtgtacagtgtggggtgtgggaggggtgtggggtgtgtatggtgtatggggcgtatgtctggtgtgtatgcacagtgtgtggggtgtgtagtgtggggtgtataggtacagtgtggggtgtgtatgtacgctggggtgtgtatatggggtgtatggggtgtatgtttgtggggtgtgggttgtgtggtgtgtgtgtgtggggtgtgggttgtgtggggtgtgggttgtgtggggtgtatgtggggtgtgtggggtgtctgtgtatgggggtgtgggttgtgtggggtgtgggttttgtgtgtgtgtggggtgcgggttgtgtggggtgcatgtgtgttgtgtggcgtgtctgtgtgtgtggtgtgcgggtt

SEQ ID NO: 23942 - DNA, 1508 bp, Artificial sequence
  DNA replication origin
atccatctgctgcgtggccctgggcaggtcactcagcctctctgggcctcagctcctccccagggctgtgggaggggccaggagaatgacagcctgattcctccgccccctcatctgcaggccacccgcccagggacgtgctaccatttacctaacacacgtctttaaatccacccaaaggataactgcatgaattttaacaggaaactctttatcactgccttaggagaggaccattatctcttgccaaaaatgagagataactgtacaaataaatacaataagatacacaccgcagttaaagtggttggataccacagtctggaaggctttgtcgtctgatggccgctcgaaaggtgagactgttcagcatcagaggtgctctagaacctggcctagattttcctcttgaaataatcagaaagcttagaagagaacgggggtacttttcaggatgagggagaattttttatcttcatgtgggggtgggggccacacagcattgacatctgtcagaacccaggagctgtgtgggggtgggggacaggcagagagagagacagagagacacagagacagagaaagagacacatacactgagagactgagagacagagagacacagagacagagacacagagagacagagagagacacacactgagagactgagagagagagacagagtcagagacagagtcagagacagagagagagacacacagagacagagacacagagacagaaagagagacacacactgagagactgagagacagagagacagagtcagagacagagaggcagagagagacagagagacaaagagacagagatacagagagacagagagagacacacacactgagagactgagatacagagagacagagtcagagacagtcagagacagagagacacagagacagagacacagagagacagagagagacacacacactgagagactgagagacagagagacagagtcagagacagagtcagagacagagagagacagagagacaaagagacagagatacagacagactgagacaaagagacacagagagacaaaaagactgggagagacagagacagagacatggagagaatgaggcagagactgggaggcagagacagatgcagagacagagataaagagacacagaaagactgagagagacaaagagagacagacacaaggagatagagtgacacagagagacagaccacagagagagatgcagagagaggggaatcatttcttgtgaggggcctggcctcaggcagccgcctgcctgggagctgctaggctgtctggtgtctggggagaggagtgatcagaggtgaagagtggctccccaacccaggcccgccgctctaaacacaggaagatccacagtccttgggcagtttatagaactgctccccttggggcctatcaggatgtgtggtcttaaatcattgctgtttaatattcaacagttgctccactgagaacaagc

SEQ ID NO: 23943 - DNA, 5061 bp, Artificial sequence
  DNA replication origin
ggctcagagcaaagccgggacgacagcgaacctgtgtggtgggcgagggtcagcaggccgggctgggggtgtgggtgctggaccacggagggccctggctgggcgagggtcagcaggctgggctgggggtgtgggtgccggaccacggagggccctggctgggcgagggtcagcaggctgggctgggggtgtgggtgccggaccacagagggccctggctgcagccgttggagagcttccctcccgtctccatgacacatgggcctttcttttttttaagacagagtcttactctgttgcccaggctggagtgcagtggcacgatctctgctcactgcaacctccacctcccgggttcaactgattctcctgcttcagcctcccaagtaggtggcaccacaggcacatgccaccatgcccggctaatttttgtacttttagtagagacgaggtttcaccatgttgatcaggctagtctcaaactcctgagctcaggtgatctgcccgcctctgcctcccacagtgctgggattccaggtgtgaaccaccacgcctggctgacataggggcctttctgatggcctgactcctccgcggggcaggggagcctgtgtcaccgcgggttctgtctttcaccttcatcccctgacaaggcacagctgtggccgcgcccagcgtttactccactccctgacctccctgccctccctgccacctctcccccgacctctccccctgacctctctcccgtcctgggggcttgaaagttttcaccttggtgtcctgtctggcggtcagaggttgctctacggtgggagacaggctgagaaccagaacccagttctcctggtgagggacaggagactcacctgtccccatcaccacgcccccgtccaactccatcaccatgctgcccgtccagccccatcaccacgcccccgtccagccccatcaccacgcccccgtccagccccatcaccacgcccccccatccagccccatcaccacgcccccccgtccagccccatcaccacgcccccatccagccccatcaccacgcccccgtccagccccatcaccacgcccccgtccagccccatcaccacgcccccccgtccagcccccatcaccacgcccccatccagccccatcaccacgcccccatccagccccatcaccacgcccccgtccagccccatcaccacgcccccgtccagccccatcaccacgcccccgtccagccccatcaccacgcccccgtccagccccatcaccacgcccccccgtccagccccatcaccacgcccccatccagccccatcaccacgcccccgtccagccccatcaccacgcccccccgtccagccccatcaccacatcccccgtccagccccatcaccacgcccccgtccagccccatcaccacgcccccccgtccagccccatcaccacatcccccgtctagccccagccctgccgggccctcagatgctgaccaccgctttccagtcccccagctccttccctcctcccaccttgtgctcttggcccgtggaggcaccgcaggctgtcttggcccgtggaggcaccacaggttgttggaagctgcaccgtggtccgagtggccggcccgaggcctcactctgccggtgtcgagaactgcacgttgccgcccctgaggttgcactgcccccgtctgtccctatgcccctaaccacacatccctaaagcttcccttcattaacatctttactgttgagcccagtagggtgaactttctttcttgtggggtgtggcggacacgggactcttccaaaaaatatttaggatgcaaagctggcaagagacggtgattgacgggtgattggccggtgattgatgggtgattgacgggtgggctgggacagcggctgattcccagtccccaggcaggcagggccttcatagggacagaatgccagccggtgcgtggtggcatgttggggagagccacgatggacacgtggagttcagtggccccaggacagccaggtggggctcacagttggggttaaagcctgagaggcagagtgggggctatgcagaagcagtttgaggggatgacagaggcgggagaaatagaaatagaactggggtctcctgggagccagacgaagagacgtggtgtctggagggaaggaccaacaacaccagagctgcccctacgaacccaacttcgtttccccaaagagtggatgccctgaccttcaggtcggccaggtggggcccccaccagagagagagagctccggaagacgaggaggactggggcccccaccagagagagctccggaggacggggaggactggacactgaggccactgggggccctgatggccccccgggaagggtgtgtggtgtgtgtgtaatgggtatagggagggccccgggaagtgtgtgttgtgtgtgtaatgggtatagggagggccccgggaagggggtgtggcgtgtgtgtaatgggtatagggagggccccgggaagggtgtgtggcgtgtgtgtaatgggtatagggagggccccgggaagggggtgtggcgtgtgtgtaatgggtatagggagggccccgggaagggggtgtggcgtgtgtgtaatgggtatagggagggccccgggaagggggtgtggcgtgtgtgtaatgggtatagggagggccccgggaagggggtgtggcgtgtgtgtaatgggtatagggagggccccgggaagggggtgtggcgtgtgtgtaatgggtatagggagggccccgggaagggtgtgtgttgtgtgtgtaatgggtatagggaaggccccgggaagggggtgcggcgtgtgtgtaatgggtatagggagggccccgggaagggggtgtggcgtgtgtgtaatgggtatagggaaggccccgggaagggggtgcggcgtgtgtgtaatgggtatagggagggccccgggaagggggtgtggcgtgtgtgtaatgggtatagggagggccccgggaagggggtatggcgtgtgtgtaatgggtatagggagggccccgggaagggggtgtggcgtgtgtgtaatgggtatagggagggccccgggaagggggtgtggcgtgtgtgtaatgggtatagggagggccccgggaagggggtgtggcgtgtgtgtaatgggtatagggagggccccgggaagggggtgtggcgtgtgtgtaatgggtatagggaaggccccgggaagggggtgtggcgtgtgtgtaatgggtatagggagggccccgggaagggtgtgtgttgtgtgtgtaatgggtatagggagggccccgggaagggggtgtggcgtgtgtgtaatgggtatagggaaggccccgggaagggggtgtggcgtgtgtgtaatgggtatagggagggccccgggaagggggtatggtgtgtgtgtaatgggtatagggagggccccgggaagggggtgtggcgtgtgtgtaatgggtatagggaaggccccgggaagggggtgtggcgtgtgtgtaatgggtatagggagggccccgggaagggtgtgtgttgtgtgtgtaatgggtacagggaaggccccgggaagggggtgtggcgtgtgtgtaatgggtatagggaaggccccgggaagggggtgtggcgtgtgtgtaatgggtatagggagggccccgggaagggggtgtggcgtgtgtgtaatgggtatagggagggccccgggaagggggtgtgttgtgtgtgtaatgggtatagggagggccccgggaagggggtgtggtgtgtgtgtaatgggtatagggagggccccgggaagggggtgtgttgtgtgtttaatggggatagggacggcccctggaagggggtgtgttgtgtgtttaatgggtatagggagggccccgggaagggggtgtggcgtgtgtgtaatggggatagggagggccccgggaagggggtgtgttgtgtgtgtaatgggtatagggagggccccgggaagggtgtgtgttgtgtgtgtaatgggtatagggagggccccgggaagggggtgtggcgtgtgtgtaatgggtatagggagggccccgggaagggggtgtgttgtgtgtgtaatgggtatagggagggccccgggaagggggtgtggtgtgtgtgtaatgggtatagggagggccccgggaagggggtgtggcgtgtgtgtaatgggtatagggagggcccctggaagggtgtgtggcgtgtgtgtaatgggtatagggagggccccgggaagggggtgtggcgtgtgtgtaatgggtatagggagggccccgggaagggggtgtggtgtgtgtgtaatgggtatagggagggccccgggaagggggtgtggcgtgtgtgtaatgggtatagggagggcccctggaagggggtgtgttgtgtgtgtaatgggtatagggagggccccgggaagggggtgtggcgtgtgtgtaatgggtatagggagggcccctggaagggggtgtgttgtgtgtgtaatggggatagggagggccctgggaagggggtgtggcgtgtgtgtaatgggtatagggagggcccctggaagggtgtgtgttgtgtgtgtaatgggtatagggagggccccgggaagggtgtgtggcgtgtgtgtaatgggtatagggagggcccctggaagggtgtgtgttgtgtgtgtaatgggtatagggagggccccgggaagggggtgtggcgtgtgtgtaatgggtatagggagggccccgggaagggggtgtggcgtgtgtgtaatggggatagggagggccccgggaagggtgtgtggtgtgtgtgtaatgggtatagggacggccctgggaagggggtgtggtgtgtgtgtaatgggtatagggacggccttgggaagggtgtgtggcatgtgtgtaaacatgtatagatcatactgcacattccaattctgctggtgatcaggttctggtaacttcccaggaaacagaagggttccagcaagataaggtaaattataaacagaataaaagaggaagaaaaacacggcagag

SEQ ID NO: 23944 - DNA, 1687 bp, Artificial sequence
  DNA replication origin
cacgtcgcgtggcccacaatggcacaccagcttatcctcccgctccactctgcagatcctgccttcactgctccgcagatcctgccttcactgctccgcggatcctgccttcaccactgctgtccatgcagcctcttcccaggggatttgcagcactgatgcactctcaatacatattagaaaaaatataactagcataccaatgcatgatttcacagagatggggccaggctaagtcggctgacgttttagaattattacaggaagtatagtacagctggcagtctgtggcacatagctgcacaggctgtgcactcagctccaagctgcgtcgttcagaatctgtcatcaacaaggttctgtggagttgagcagtgcacagcctacgcaactgcccattgcagtcctggctcctgatacacagttaggatgaagcatgggggaggcgggcaagtgactcactcgaacttgggaaatgatgttcaaggcaaccacagagctccttaggtaaactgatcttttttcaggggagaggggagacaggatctcactctgttgcccaggctggagtgtagtggtgcaataccagctcactgcagcctcaattcccaggctccagtgatcctcctgcctcagcctccctaagtgctgggataacaggcgtgagctactgtgccggccgattgatctttttttaaacctcctacactaagctgaattgaatgcgggttctgtcatctgttggcattcagcatttggacgctgtctgggctgagggcttaaccaggctccaagggactcaagtcctggtggctggaggagcagcggcccctcaccttgagcacagggacctgagtgcacagggaggaggcacaggagggaggggtggtggggtcttccaggctttcctggctcatggcccagcaggcagggctcaggcctgcatggcgaggtcctcacgccgctgtctctgcctcccaggaccccagccatgatcggctgctccttcgtagtggaccgcgagtacttcggagacattgggctgctggaccccggcatggaggtgtatggcggcgagaacgtagaactgggcatgagggtgagtgcggccccggtgtccagggacagggtgagggcgagtgaggccacagcgtctgggaacaggatgagggcgagtgaggccgcggtgtccggggacggggtgagggcgagtgtggctgcagcgtccggggatggggtgagggcgagtgcggccacggcatctggggacggggtgagggcgagtgaggccgcggtgtctggggacggggtgagggcgagtgcggccacggcatccggggacggggtgagggcgagtgcggccatggcgtctggggatggggtgagggcgagtgtggctgcagtgtccggggacagggtgagggcgagtgcagccatggtctagggacagggtgaggtccagggctcctgctcagcgcactgagccctctccagagcctaggctgaggcagctggaagccaagctgggcggccaaggctcccagggtccctgagctggagttggggacagtgagatggggctaccctgagtcttgctagaagctcagtggcaacatcactgagaaattttgtagaatcacaaaagatggcatttcccatgtctactttatttttcatgccctttgtt

SEQ ID NO: 23945 - DNA, 979 bp, Artificial sequence
  DNA replication origin
ctctgatgaagtgaagagccagattctctgccacatctattgtagcgggtagcgtcttttttattattgctcagagttctaaaataaagcccatgaggcaagggaggcagcaccagctggaactggattgacttgccggagagatgcctgctgtgattacagaaaaaggtgggctgagggttctcaggctcgcgtggggctgcctgtcaccgtggtgacagcctcccctcggggcggttccgccacacgcggggcacaggggtgcagggtggaggccccaggtcctgcctgctggagctgctctgcccgatgcccgcacctgccctccagttctcagcttccggggccttagtccagccggacgcctcttgttagcatcagaagcgactcagcccagcagccacggagggacaggtggatacatggagagtggcccatccaggctgtggaccgcaattctgcagtggaaggagcgaggctgacacagcctgcgacgtggaggaaccctggaaacgtggcaccgagggcagggagccaggtgcaagaggttgccccccgtgtgactccgtccgcatgcaaggaacagaagaggcaagtccacgggggcaggaagtggattcgtggatgcaggggctggggcggggggaacggggagtggcggctcgtgggtgtggggtccccacggggagggaggacaatgctttggaacgagacggaggtggcagctgcacgacactgtgatggtcgaaacaccgcagaggtgcccactttagtgtggttgatttgtgttatatgagtttcaccaatggcccattgagtgctttgatcttccacagaccctgataacaagaaaagccaacgtggccgggcacagtggctcacgcctgtaatcccagcactttgggatgccaaggcaggcagatcacctgaggtcaggagttcaagatcagactggccaatatgaagaaactccatctct

SEQ ID NO: 23946 - DNA, 1419 bp, Artificial sequence
  DNA replication origin
agagaacactgctgccctggaactgtcccaggcaggccccttccctgtgagccccgaccctcagcctccacccaggatgaattttgccttccgtggaattctgtgtgcaggaatcacgcagacactctcttccatgtgtggctccgaggctcagcatgagcctctacatctcaccacgttgttaggtgtggaagggtccactcctccctgtttctaagtattccgtgatgtgggtggagtctgccctgctcatccattcacctgctgacgcatatgaggctactgtgagtaacgccgctgtgaacgtttgtgtggaagcctttgcatgtacgcatgtctcatttattttgagaaaaacacctgggagtggaataggggggacactggaggggggacacgggggacactggaggggacagtggagggggacagtggagggggaacactggagggggaacactggggggacgctggagggggacactggaggggggacgctggaggggggacactggaaggggggacactggagtgggtttcgggccttcagaaggagctgccggttttccaaagtggctgcaccgattcacagtcctgccagccatgtccgagagttgcatctgtgccatgtccttgtcaacatttggtattgtcagcctgcacctttcagccaccccagtgggcacagagccccatctcactgtgggttgaatttgcatctccctggactgtggggagcacatttcatgagcttgctggcgcaggccagtcttctcctgggtagtgtctgttcatgtcgcgccctgtcctttagctgagagctggaacggggggcttcagcagctgtccaggtggtggctatgaggagcaggggggcagccatgccttgaagacttgatggggccagtgagcctgctcctgccacagctcagggcatccagagcctgccaaaaactgtgggaggtgcctcccattgggttctctgaatttcactgatttttaaaatgtcaaacacaaggcgatccttttcctgctaattggggattatcaagtgcattttgaatgaagaaaaataaccttcaagccgttagtactggctcctgtgaaccctgagggctgcgtctgcatctctgtgatacagacaagctctgtgtgccaagtttttatggcaaagcccaggggccccagcacccggcccgacactcaccgtggtctctgctcagcccctgcaccaggttgtgcttgctgggggacgtccccagccctcgtccccatgccctcatccccggccctcgtccccacgccctcgtccccggccctcgtcctcatgccctcatccccacgccctcgtccccggccctcatccccacgccctcgtccccacgccctcgtccccacgccctcgtccccagccctcgt

SEQ ID NO: 23947 - DNA, 1518 bp, Artificial sequence
  DNA replication origin
ccccgaggcctgagggcgtctgggggagccttgggtctgtcacgtcaaaatgcaattttaaaccggtccaaatttaattttcacaactgaaaacccagttatccatctgcaaatagcaccccctcccgtaactgtctccacaaaggattctgccttattagaagacctggcatttccagggagcttttcatctctgaagcacttcgctaacagtaattaattaatcctcctcacaaagctgaaaggcaggtaaataccaggcctcatgctcagaaggacgggaagaaggggtgaagacagccgtgtggtctcacaggcagggtcagggccttgcctctccccatgccggctctgcctgagccgacccgaatctgccctcaggccatccagcctctcactgcagcctctgggctctgtgtcagccagtggctgggtggctttggccctgtgggtctccagcgtggacggcgggcctctgcggccatctcaccttgcggtagaccatggcgtctccaagggcgagggctgcacctgcttcccaggacccctgcttgggacggggaatcgaagactgagctgatgcccatcgaggctgcttctactcaccttcctctctgccctcctcgccccccattgccccatcgctctgtccggcctcctggccagccctgcaggcccattaggcacacgcccgggcttcggtgcagctgccgcaccctctgagactccctctatgcctccttccagtcactacccagggcagccctacttaaaactgtgagccccctctacaacatccacgactgcttatacctcatcctccgtcccgtccttgagcggggccgctgcacactcatgcaggttccactctgcacaacggtgcctggtggcttttcatcccacaccgtgcgagctccccgtggcacggattgtttttattccttagttcatgattgtattccaatttgtgggaacagggcgtggcacatagtagatcctcaattaattcttgcaaatgaatgcagctcccacaggagcaggaaaggagaggagggactcggggctgggcagagagggagaccgagctggggagccccgtggtggacatagctgacctcttatggacccctgggcagcccttcagagatactgcagttgggccaacgtggccggtgtcagcgtcccccaggggccagtggcattcgaggggctaccccagcaggggtgaggccttggtcagggtgggtctgctgctgagaggggcccttgggcttccaagggaggatgtgggtctagctcagcagggggtggcagggctagatgcagaccaggtggggactggcctcccctccctgtgggcgagtggaccctcctcagggaatgcggtgggctggggccgcccctcctcacagctgtgcctccgcagggccgagcccgcactgtcgcggatccgagaggaccggcgtcgcatcgtgctgccagccatcgacaacatcaagtacagcacgtttgaggtgc

SEQ ID NO: 23948 - DNA, 1355 bp, Artificial sequence
  DNA replication origin
gtgtggctccgagtggcagctccctgatggccgccgaggggggcacctgcgcacgtgcttgatggctgcttgggcgtcttcggtggtgacgtgtctgttctggtcttttccccagttttcattggacattttgttttcttacttttgtcttacttctggatacaagtcctttatcagatgcgtgctttgaaagtattttctccagtcggctgtggcttggctttctacacctgagtgtctttcaaagaacagatggttttttattttgataaagtccaatttatccattttgttttgttttggatcatgcttttgttgccatagtgaagaaatctttgcttaagccaaggtcacaaagactttctcctctattcccttccagggacttgatggttttagggtttacatttaggtcaatgatccgttctgggttaatttttgtatgtggtggaaggtacagatcaaaattcatttatccagaataagaagtgtttgttgcttgccaaggtgtgtgtgtgagagcatacgtgtgtgtttcagtgtgtgcgtgcgtgtgtaggggtgggtgtccatgtgtgagtgtatgtgtgggtatgagtgtgtgtgaatgtgtgtatgggtgtgagtgcatgtgtgtgagtacatgtatgggtttgagagtgtgcttgtgtgagattgcgtgtgtgtgagcgtgagtgtgtgtgtgggtttgtgtgtgtgagtgcgcgtgtgggtttgtgtgcatgtgactgcgtgagtgcgtgtgaccacatgtgggtttgtgtgcatgtgtgttcatgtgtgttcgtgtgtatctgcctgtgtgtgtgcatgtgtgtgagttcatgtgggtttgtgtgcatgtgtgtgactgtatgtgagtgcgtgtgtgtgtgcatgtgtgtgagtgcatgtggatttgtgtgcgtgtgtgcgtgtgagtgcatgtgggttgtatgcgtgtgtgtgtgcatgtgggttgtatgcatgtgtgtgactgcatgtgtgagtgcgtgtgtgagtgcgtgtgagtgcgtgtgtgtgcgtgtgtgtgagtgcatgtgtgtgtgagtgtgtgtgcttgtgtatttccccattttccgaagcagtattatttcttcactttactcctttatctatttcaatgcatctttctctttgtctagcttcacaccagtgttgccctgccaatggctgtggtactaaaatcagtcttaacttgaggtggtgtgagtcctcccgcttggttctttttcaagattgctttggctctccaaggtcctttgcatttccacatgaatttcagaatcagctgctcaggttctaccgtgaagccctctggggtgctgggcgac

SEQ ID NO: 23949 - DNA, 732 bp, Artificial sequence
  DNA replication origin
tgtttcaggttcaggcttggccgaggtcccaagtcaacagggccagcgacggccagggccccaaggcgagcagagccccgcacagaacgtgcagggaggctcccacgcgtgggaggccgtggctgccaggagggcccgtcccccgtgcgcccttcagtgctgtgtgtgttactgcggcagcagccatgtggggccacacgtgttctcagcagggcggccacacgtgaactgtgtgtgtctctgacccttggggacacgtttgccaactgaccaaactccagtcaccagccactgccagggccagaggctgcgctcgagggcggggggaggaggagacaggagagaggagaatgccgtcacgccccgcccggctcccccaactcagagcagccccagagcggtcgggggacgcaccgtggggacagatgcacggcggggacccctctgtgggccacgcctgctcatcacgggacccaggcttctgttacgagcgagcagaaccctgtgggcctggcccaggtctcacaacgacccagggaagcaccccctcaacgggacagagtgggcaatggtgcggggcgggacagggtcagggcaggtgctccttggcattctgacggtggctccacacaggccctccacgatgcccctgcagcaaacttgtgcagaagaaaatatcacagcgccaccaccctactgccgggcgcttaaattagttcccggcttcccgtg

SEQ ID NO: 23950 - DNA, 941 bp, Artificial sequence
  DNA replication origin
tggtgtctgcttatgtgtgcatgtgtgtgtggtgctgtagcttctaattcagcccaagccacaacttagacttttaatgttacgttcaaacaaaaccatttggagactcacccacagctctgaggctttggacgacgcccgctcatcacctgccttcccctctgctgagtgcaatgaattcaagctccataaaggccacacatggagccctgtgtgcgtctacagttctgggtcccgagatgaggcggtgaaacagcaaacccacacccagaacccctgccccaggagccccagccagcaggagagcagggcaggggtgcaaagagcaagccgggggtgggggtgggagaggcagagcagcaggctggaggccggggctctggtgggattttacgttgagcacggggtgagcctcttgaagggtgagggcgtgtgtggccatccaggtgggggtggggagcgcaaaggccctggggcaggagcaggcctggagcgcaggccacagagccaggggccgggcgcaggtgagtgagccaaagggaaccaagaggggatggtggagggagcggcctggctgagcaacccggggctttgaccttctcaggggcaatgggaagcctggaattgcatgggctggtgtggaggtcaccgtgaccttgccaggcctgggggtgcagccgcagtgcccagggaggtgagaaggggctggccaggctgcctgttgtgaagagcggagaagtatgagagagatgtggagcagggcgtctggcttttctctgacctgcgatgggctggtgggagcaggagcgagctggcctcactgtgaatgtgaaaatgctggttggagcacaccacggtgggtacttccttcaacggctaaatgcgccgaaggcctccaagcttgacagggttgaatttcctccaaggccctgggaggggcg

SEQ ID NO: 23951 - DNA, 711 bp, Artificial sequence
  DNA replication origin
ctcacgtcctgtctcccggagcccagccaacctctcctggctctgattgggccgtgtgtctctccctgagcctattgccatgctgattggctcagcctggtcctgtgccctccccttcatccagggctggaactccacccagctacttagggagttcctgccgggctgagccccatgttttatgggaaggaggagggaagcggctgagcagggcaagagcgaaagtccactgcctggcaaggacagcctagacacgggggaaagaagggacatggaggggctgagccctgtcacacgtcatgccctgcatgccgggctggacatggagaagctgagcgtgcagtctggagctgaggctgggaagccctgatacatggcttagaagtgagttggtgacaactggacggttccccagcaggggcaagcaccagagtgatgggaacagcccctgctgccaggagcccacggggggagtgtgcacgtgtgtgcgtgtgtgtggtgtatcctgtgtgcacgtggtatgttcatagatgtgtagtgtctgtgcatgtgtgcgtgtgtgtggggtatgttcttgtgtgtggcatatgttcatgtgtgcgtgtgtgtggtgtctgcttatgtgtgcatgtgtgtgtggtgctgtagcttctaattcagcccaagccacaacttagacttttaatgttacgttcaaacaaaaccatttgg

SEQ ID NO: 23952 - DNA, 742 bp, Artificial sequence
  DNA replication origin
acaaacagggctgaggcctgggcatggaggcttggacacctcagccacatccagagtgtgacaacattattttattttcattctacttattttcatggttaccatgatttaacacaagtgatgccagctttccatttgcagcggtgaaatgaagattccctttcaaataaaaaatgcatttagttttaaaataggccagtttaaagaaacatgctccataaataagaacacagtggtgttttcatgtggcgccagctacaggcatggggctggaatgacttcggtttggaaagcggctcgtgtgtgttagccagcctgtgcactgagggtgcacggtgtgtgtgtgtgtgcgtgcgcgcgcgttgtgtgcgggtgggtgtgggtgtgtgcgtgtgcacctgcatgtgtgcgggtgtgtgcgcatgtgtgcatgtgtgcacaggagtctgtgtgtgcacgtgtgcacacacatgcgtgggtgtgcgtgtgtgtgtatacgtgcgtgtgcgtgcatgtgcgtgggtgtgcgtgcatgtgcgtgtgtgcatatgtgtgcgtgtgtacatgcgtgtgtgtgcatgtgtgcacgtgtgtgtgtggtttttgaacgctcctgtgtgtcctgaatttgggggtgaaatctgtttgctctcagggctagccccactgctggagtgagcaccgttcttggctgtgagcctccaggcagctgtgtggcaggaagacccccgagaccaccttg

SEQ ID NO: 23953 - DNA, 761 bp, Artificial sequence
  DNA replication origin
ggccagcacgggggagcgctcactttcccggccagcgtggggggcggtcacttccccggcgggcgtggggggcggtcacttccctggcgggcgtgggggccgctcacttccccggccggcgtggggggcagtcacttccctggccagtgtggggggcggtcacttcctcggcgggcgtcgggggatggggggcagtcactcactcactttctgggccggtagtcggggatgctccgatcgagggagatgcggtcgctgagctgagcgttgtagccgtactcctcatacttgccttccgcctcctggccgtcatcacgcagggtggccgccaagccaccctggcccaggcctcctggcccctccaccaggccgatgggcttggcaaggcctgggggaaaggaagagagggaggtcaggcaggcccaggacacgctgcgtctgcacccaggagacgcccctcccgcccctctccccgacggccgcttcccccggtacaagcccagcaaactccctgcagatggcaggctgccagctcaggacattccagaaagtgcaaggctgtgcgcggagtgagagggcggtgccaggcggaagagggagggatgaatgggtggtacatgaggcgttgaaggcagtggactctgtgtgatgctgcaatggtggatatctgttattattatgtattttttgattcagggtcttgctctgtcacccaggctgcagtgcagtggcatgatctcagctcactgcagcctggacct

SEQ ID NO: 23954 - DNA, 1975 bp, Artificial sequence
  DNA replication origin
tctcctgtgggatggggggaggcagtgccctggcacccgcttggaagggatccattcacccacctcaggcggctctccaggtacatgctgtgaacacatgaggcgctggggtagatggcaggaaggcaggacaaagtcctgtctcttgcacgttgaggggaagcagagagcgtagcggaggggatgattttagatggtgatgagttctgagttctgggaggaaaatgaggcagggaggaaaatgaggcagggactgaggtgccgtcaccgggaatggcttcaggttagaacctgggaggtctccagggtgcaacccagagctgaggtccgagtgagggcaggagccaaggccccggggcaggaagcaggagcgtggctggcatactgtgagtgaggatgcgacccacgagggctgcaggggctgggggggccacagctgccgtgaggagccggaaccgcaagtgcagcaggattggggcccatggctcccagcaggggagcggctctggaaccctctacaagctcacactggctgctgaatggacaactgagggtgtggggacaggaggggatggggaagcaggggggaggaaaggactgagcgcatctggtctccaggggtgccagcacaggtgtggacgtgggtgctgtggatgtgtgcgccatggatgtgggcgctgtggatgtgggcaccgtggatgtgggcggtgtggacctgggtgctgtggatgtgggtggtgtggacgtgggtgctgtggaggtgggtggtgtggatgtgggcggtgtggacgtgggcgctgtggttgtgggtgctgtggatgtcggtggtgtggacgtgggtgctgtggatgtgggtggtgtggacgtgggcgctgtggttgtgggtgctgtggacgtgggtgctgtggatgtgggtgatgtggacgtgggcgctgtggttgtgggtgctgtggacgtgtgcgctgtggacgtgggtgctgtggacgtgggtgctgtggacgtgggtgctgtggacgtgggtgctgtggttgtgggtgctgtggatgtgggtgctgtggatgtgggtgctatggacgtgggtgatgtggacgtgggtgctgtggttgtgggcgctgaggacgtgggcgctgtggacgtgggcgctgtggatgtgggtggtgtggacgtgggcactgtggttgtgggtgctgtggttgtgggtgctgtggacgtgggtgctgtggttgtgggtgctgtggatgtgggtgctgtggatgtgggtgctatggacgtgggtgatgtggacgtgggtgctgtggttgtgggtgctgaggatgtgggcgctgtggacgtgggcgctgtggatgtgggtggtgtggacgtgggcactgtggttgtgggtgctgtggttgtgggtgctgtggatgtgggcgctgtggatgtgggtggtgtggacgtgggtgctctggatgtgggtgctgtggacgtgggtgctgtggatgtgggtgatgtggacgtgggcgctgtggttgtgggtgctgtggacgtgtgcgctgtggacgtgggtgctgtggacgtgggtgctgtggacgtgggtgctgtggacgtgggtgctgtggttgtgggtgctgtggatgtgggtgctgtggatgtgggtgctatggacgtgggtgatgtggacgtgggtgctgtggttgtgggcgctgaggacgtgggcgctgtggacgtgggcgctgtggatgtgggtggtgtggacgtgggcactgtggttgtgggtgctgtggttgtgggtgctgtggatgtgggcgctgtggatgtgggtggtgtggacgtgggtgctctggatgtgggtgctgtggacatgagcttgtggctgtttctgcctctgcttcctcctcctgtgctgtctattcctggactgggcagaggacagcacagagaacagcctgttgggtggcaatggctccgtgcccatcaccccaagacacagcgcgtt

SEQ ID NO: 23955 - DNA, 4536 bp, Artificial sequence
  DNA replication origin
cagccgtggtccccaaggccaggcaggcactgtcacctgcttctttgggagaggatgcccttcctctcctgaaagtggagcgaccatggtttagtggctatttaacgcctttgcctgccaccatacaggggtggtgcctttcttggtccctttggacaccctctttgagagctttgcagttcggagcactgtgacggagtgtggctggggctcactgcctcctggccatgggcccaaacttcagcctcaggagtctcatcagttacatgggggtgacaaaagcagctggctcggagggaaccctggggattaaaggaagcaaagcttgtgcaacgcctgcacgaggaacggtcagtgctgtgctgtgaatgcgtcgcccgctgcccccacatgggaagcttcacccccaccatggcattgagagaggtctgcaggggctctgccctctccaaggggttaatgcccttaatgtgggagtgggttagttatgggagtgagttatctcaggagtgggttggttatctcaggggtgggttaggtgtggtgggggtgggttaggtgtggtgggagtgggttagttatcatgggagtgagttatctcaggagtggcttggttatctcagggatgggttaggtgtggtggcagtgggttagttatgggagtgagttatctcaggagtggcttggtcatctcaggggtgggttaggtgtggtgggagtgggttagttatcatgggagtgggttatctcagcagtggcttggttatctcaggggtgcgttaggtgtggtgggagtgggtgagttatgggagtgagttatctcaggagtggcttggtcatctcagggatgggttagatgtggtgggagtgggttagttatgggagtgggttatctcagcagtggcttggttatctcaggggtgcgttaggtgtggtgggagtgggtgagttatgggagtgagttatctcaggagtggcttggtcatctcagggatgggttagatgtggtgggagtgggttagttatgggagtgagttatctcaggagtggcttggtcatctcaggggtgggttaggtgtggtgggagtgggttagttatcatgggagtgggttatctcagcagtggcttggttatctcagggatgagttaggtgtggtgggagcaggttagttatgggagtgagttatctcaggagtggcttggttatctcagggatgggttaggtgtggtgggagtgggttagttatcatgggagtgagttatctcaggagtgggctggtcatctcagggatgggttaggtgtggtgggagtgggttagttatcatgggagtgagttatctcaggagtgggttggtcatctgaggggtgggttaggtgtggtgggagtgggttagttatcatgggagtgggttatctcagcagtggcttggttatctcagggatgggttaggtgtggtgggagtgggttagttatgggagtgagttatctcaggagtgggttggtcatctcaggggtgggttaggtgtggtgggagtgggttagttatgggagtgagttatctcaggagtgggttggtcatctcagggatgggttaggtgtggtgggagtgggttagttatcatgggagtgggttatctcagcagtggcttggtcatctcagggatgggttaggtgtggtgggagtgtgttagttatgggagtgagttatctcaggaatgggttggtcatctcagggatgggttaggtgtggtgggagtgggttagttatcatgggagtgggttatctcagcagtggcttagttatctcagggatgggttagatgtggtgggagtgggtgagttatgggagtgagttatctcaggagtggcttggtcatctcaggggtgggttaggtgtggtgggagtgggttagttatgggagtgagttatctcaggaatgggttggtcatctcagggatgggttaggtgtggtgggagtgggttagttatcatgggagtgggttatctcagcagtggcttggttatctcagggatgggttagatgtggtgggagtgggtgagttatgggagtgagttatctcaggagtggcttggtcatctcaggtatggttaggtgtggtgggagtgggttagttatgggagtgagtcatctcaggagtgggttggttatctcaggggtgggttaggtgtgttgggggtgggttaggtgtggtgggagtgggttagttatcatgggagtgggttatctcagcagtggcttggttatctcgggtgggttaggtgtggtgggagtgggtgaggtatgggagtgagttatctcaggagtggcttggtcatctcagggatgggttaggtgtggtccgagtgggttagttatgggagtgatttatctcaggagtgggttgtttatctctgggatgggttaggtgtggtggcagtgggttagttatgagagtgggttatctcaggagtggcttggtcatctcagggatggtttaggtgtggtgagagtgggttagttatgggtgtgagttatctcaggagtgggttggttatctcagggatgggttaggtgtgttgggggtgggttaggtgtggtgggagtgggttagttatcatgggagtgggttatctcagcagtggcttggttatctcaggggtgggttaggtgtggtgggagtgggttagttatgggagtgagttatctcaggagtggcttggttatctcagggatgggttaggtgtggtgggagcaggttagttatcatgggagtgggttatctcagcagtggcttggttatctcagggatgagttaggtgtggtgggagtgggttagttatgggagtgagttatctcaggagtggtttggttatctcgggtgggttaggtatggtgggagcaggttagttataggagtggattatctcaggagtggcttggttatcaggagtggattaggtatggtgggagcaggttagttatcatgggagtgggttatctcagccgtggcttgtttatctcatgggtgggttaagtgtggtgggaatgggttagttatcatgggactgggttatctcaggagtgacttggttgtctctgaggtgcaatggtcatcatgggaatgggttagttaacttgggagtgggtttccttgggaacgagttagttatcagaataatgggttggttatcatgagagtgggttagttatctcaggagtgggctaggtatcttgggaatgacttggttatctcaggagttagttggttattgtgggagtgagttggttatcatgggagtgaattggttatctcaggagtgagttggtaattttgggagttgattttctcaggagtgagtgagttttcttggatgtgagttggttattatgagagtgagttgattattgtgggattggcttggttgtctaggagtgagttggttatcatgggagtgaattggttatctcgggagtgagttggtaatcttgggagttggttttctcagaagtgagttagttttcttgggagtgagttggttattatgagagtgagttggttattgtgggatcggtttggttgtctcaggagggagttggttttcatgggagtgtgttggttatcttgggagtggcttgcttatcttgggaacgagttggttatctcaggagtgagttggttatggtgggaatggcttggtcatcttgggggagactcagtcatctcagaagtgagctggttatcatgggagtgagttggttatctcaggagtgagttggctatctcaggagtggcttgtttatctcgggagtgattggttattgtgggagtggcttggtcatcttgggagagactcagtcatctcaggagtgacttggtcatctcagagtgagttggttatctcgggagcggctttattgtctcaggagtgagttggttattgtaggagtgagttggttatcatgggagtgagttggttatctcgggagtggcttggtcatcttgggagtgagttggtcatctctggagtgacttcattatcatgggagtgagttggttatcttggcagtgtcttgattatcctgggagtgagttagttatctcgagtgagttggttatgatggaagtggcttggtcatctcagagtgagttggttattgtgggagtgagttggttatcatgggagtgagtttgggtatcttgggagtgagtcggttgtggtgggagtgacttgatcatcttgggagtgagttggttatctcgggagtgagttggtcatcttcggagtgagttagttatcatgggagtgagtttgggtatctcaggagtgagctggttgtgttgggagtgacttggtcatctcgggagtgtgttgtttatttcgggaatgtgttggttatctgaggagtggctttgttatttcaggagtgagttgggtatcttgggagtgagttggtttgtgtgggagtgggctcctgatggaaggaagagttccaccctccccccgcccagcccccaatgcgtgtgtgctct

SEQ ID NO: 23956 - DNA, 957 bp, Artificial sequence
  DNA replication origin
gtgcccgggtgaggctgtgcccgggtgagggtgtgcccaggcgagggtgtgtctgggcgattctgtgcccgggtgagggtgtgtccgggcgagggtgtgcccgggcgagggtgtgcccgggcgaggctgtgtctgggtgagggtgtgcccgggtgaggctgtgcccgggtgagggtgtgcccaggcgagggtgtgtctgggcgattctgtgcccgggtgagggtgtgtccgggcgagggtgtgcccgggcgagggtgtgcccgggcgaggctgtgcccgggtgagggtgtgcccgggcgaggctgtgccccggagagggtgctgcttctcatctctcctctgcttccgtttttggtggtggattctgggcagctgcctctcgtgttaaatgaagatgccctggtggccctgtgctgctcaaggtgcccggggtgggggcctctctcctggtgacgaatccactcagggcgcctgcccagccttgggcagtcactgcatcccggcggtggagggtctgacggggactaccgggtgaaggccacaggggtgacagccacagtgtgcatggggacggctagtcctgaaatacacagggaggctttcccgagagagagacagacagagggtgggaaaccgcgtcttccatgtccacacaccgtctcaccccagggctgatcggagcatcagactctgcacaggcccctgggttccaccctcgccccccttagacggtcaccggagtggtccctctgcatagaaaacctgaccactgtgcccaccctcctctctccctctcagctcaaagctcctctgcgctcccacttcctacaaggctcaaagcaagatcccagcggcacagaaagctcccaccccgtcccgtcccctttctgctgccacagccctgacctgcatgcgcagccactcacaggacaccttcctgccctcctggcctttctc

SEQ ID NO: 23957 - DNA, 1570 bp, Artificial sequence
  DNA replication origin
tcagggctggcagcacagcctttaggacagtggctctcacagtggcacctgggccggggggctcacggcggggcccaccctcaggacaggggggctcatggcggggcccagactcaagacagtggctcccgccctcaggacagcagcggccacctcacctgggagcctgtggggaccacacgttcttgagaccctccccaaacctgccgggtcagagcccccgtggggggcctgcaggggacccttacacaggcagcgttggaagcggctgtccgcaccggaaccgcctgcggagtgtgagggcgccggcacctgcccgggcctccccacggagctgacataactgccggggcgtggcctggacgccggacggtctaaaccatccccaggtgactctcaagcgcagagcaatgggagctgctgtccgggatggcgaggagtcagcctggctccagggccctggccaggaggcgacccactcaggggcgccccggagccatgcagagaggcctgttgggggtggttctcctggggtctgggggccgaggtccaggtgggcgggcagagcgggggtctagactgtgggcaacaagttcttaaggcgaagtcagttcggacatagtggcttggaggacacaggtgcgtctccaggcctttctgggtacccccacctgccccggcattgctgacggagtgccatggggcacccactttccccaggacgttctccacgccttcccccctgctcagagccagggacaccgcttggttttggaggcagtgatgtgacttgcgcgaggaaaagcagcttcctttcgagattcagggctgaacacaaggctccctccccgccattcatcatcactgcggtaatggaaaagatggctcacttccgcgcacacccgccgcgtgcccgtggtcattctgcttttacggaatcgtcatttgaagttcctttcccatgacccgagggagcgcactgttctaattacgggagataatctggaagacaatcacaggggaggagacggctgtctgggagcgtggcggggaatctgatttccatgggggctgactctgtgagtagatggccaggtgggggtgatctgggctgtgaggggacctgtgcccgcttcccagccacctcctctcgatggaccctgaggagagcagtcagggaagttgaaggatgaacagattgtcacttggcatgtgtgtctggggcaatggggagtggtggggactgcggctcagacccacggattactgccacccagggactcgggtccagagatgccagatcttctaaaattccaacaggaagtgccagtgtacagatttatatctctacatgtcagcagtggattcacattttggaagaaatggcattaagttaacaaatacgcactgggtctatctagatctgttcattaggcaggacagctgtggtgggataaataaccgattccaaaggcatcaggttctgatgtctggaacccatgagtctgtcaatttccatggtcaaagggactttacagacgagattaagttagagaccctgagacggaga

SEQ ID NO: 23958 - DNA, 1435 bp, Artificial sequence
  DNA replication origin
ggacagacagataacatgatgcctgatgtatagtatgtgcttagtaagtattgattgactggtaggatggatggagggatgggtcggtgggtggatggataaatggatgggtgggtgggtggatggataaatggatgatggtgggtaggtggatggaagggtgggtgggtggatgtgtgggtggatggatggattaggtggatggatgggtgggtgggtgagtggatggatgtatgggtgggtgggtggatggatgggtggatgtgtggatgggtgggtgagtggatggatgtatgggtgggtgggtggatgtatgggtgggtgggtgatgggtgggtgggtggatggatgggtggatggatgggtgggtggatgggtgagtgggtggatgggcaggtggttgggtgtatgtacgtatgtatgtatgtatgtacggatggatgggtgggtgggtggatgggtagatatgtggatggatgggtgggtggctgggtgggtggatgggtggatgggtgggtggatgggtggatgtatggatggatggctgggtggatgggtggatggatgaatggatgagtaggcaggtggatggatgagtgggtggatgggtaggtgggtgaatggatggatgggtgggtgggtggatgggtggatatgtggatggatggataagtgggtaggtggatggatgggtgggtgagtggatgtctgggtggatgggtggatggctgggtacttgggtggatgtatggatgggtgggtagatgggtgggtggatgggtgggtgggtaagtggatgggtgggtgggtgaatggatggatggctggatggattaggtgggtggatgggtgggtgagtggatggatggatggatggatgggtaggtgggtagaagggtggatacatgggtgcgtggatgggtgagtgagtgagtggatgggtggattagtgggtgggtggagagatggatgggtgagtggatgggtggatggattggtgtgtgaatggatgggtggatgggtaggtgggtggagagatgaatgggtgggtggatggatggatggatgggtgagttggtggatgggcaggtgggtgggtggatggatggatgtacagatgtatggagggatgggtgggtgggtggatggatgggtgggtgagtgggtaggtaggtggagagatgaatgggtgggtggatgggtggatggatgggtgagtgggtggatgggtgggtgagtgggtggatggatgggtgggtagatgagtggagggtgaataaatatagtaggagactctatagagtgaggacagacaagcattgagaaagggaagacaggatctggaatgctggactacgagagaagacgaggaaggcaggttgggtcccagtgcatccatgtggagttgagcagcccagactgacacaagttttgg

SEQ ID NO: 23959 - DNA, 705 bp, Artificial sequence
  DNA replication origin
tgggattcaggccctgctctgtggagtctaggatggggatgtgccgtggggtgtaagatgcaggctgtgctctgtggggtgtaggatggggccgtgctctgtggggtgtaggatgaggctgtgctctgtggggtgtagggtgcaggctgtgctctgtggggtgtaggatgggaccgtgctccatagggtgcaggctgtgctctgtggggtgtagaataggaccatgctccgtggggtgtagggtgcaggctgtgctctgtgggtgtagaataggaccatgctccgtggggtgtagggtgcaggctgtgctctgtggggtgtaggatgcaggctgtgctctgtggggtgtagaatgggggccaggccatgcagcattcctggcctccaaccactagatgctggtagctgccccacccctccccaggtgtgacagccaaacctgcccaggtctcaccaaatgtccctatgggtccgagtaccccatgtgagcgccagtgctcgtgatgggaaggaggctgggtggctgcagagggagtgggctggggtgggcgtccctgtcggatctgaaagggtggctgagggactacacagagcacgggggaatttgctgaagcggaggaaagagagcagggacacaccctggcaggaggagggatgaggacccgggaggtcctggcagcacctcgcacctcagacggccattcc

SEQ ID NO: 23960 - DNA, 970 bp, Artificial sequence
  DNA replication origin
caccgatacccctcctccttctttccctgccctggttggaagggacaaggctgggccccggggctggaggggcccgaaggtggggccagctggggagggctgggcgcagcctctactgagcgaggggggtctggccaccgtgtttttgagcttttaggaagatttttaaaaacacaaaatctcaacacaggcttaccaaaattatgttgtatttacacgtttatggataacaaattaatgcttttaacagactcactggagtgtgatccaattgtgctgttcgcaggtgatcctggaattcataaaaaccgcaggtctccttggtgaggtggccctggagaggagctgaccccacgctagggagccagtgtggacggaagagtggcaagtccaaggcctgggcctgggcacacactgtgaggacgcgagtggaaggagcaggagagagggtgtggcctgggggggcagtgcaaggctcctgtccccgaagctgggcaagctgaccccaccagctgcttctgtggggtgtgggacaggggctgtgctccatggggtatgggattcaggccctgctctgtggagtctaggatggggatgtgccgtggggtgtaagatgcaggctgtgctctgtggggtgtaggatggggccgtgctctgtggggtgtaggatgaggctgtgctctgtggggtgtagggtgcaggctgtgctctgtggggtgtaggatgggaccgtgctccatagggtgcaggctgtgctctgtggggtgtagaataggaccatgctccgtggggtgtagggtgcaggctgtgctctgtgggtgtagaataggaccatgctccgtggggtgtagggtgcaggctgtgctctgtggggtgtaggatgcaggctgtgctctgtggggtgtagaatgggggccaggccatgcagcattcctggcctccaaccactagatgctggtagctgccccac

SEQ ID NO: 23961 - DNA, 1348 bp, Artificial sequence
  DNA replication origin
cgcatgtccgttccttcctggcgaattcgtgagcacctgctgcattcctgaactgcgctgaggacgcgggcctgagcagagatgtccccacctcaggggctgacatcccagggaggaagacggggagtgagtaagttgcatggtccagatggtctcagacaaacctacgaggaggcctgagtgacgtggacgaatgggtatctgggtggcggggatggttacgggttgaacggggcccgcccggaagctcacgtccacctggaacctcggaatgtggcttatttagaaacagggtctttgcagaagtaattagataagatgccctcagccaggactggggattagtgggccctaaatccaatgactgtggcccttctaagacgaggagagacagtgggggtttggaggggaggacgccccttgggggccgaggcgggggctggggtggtgcagggggccgaggcgggggctggggagaggcaggatgtgtcttacccactgccttcagagggagtgtggccctgcgcgcctgacatccaactcccggcctcctgtatgaggggacaggtgtgtgaggggacaggtgtgtgggctcctgtgtgaggggacaggtgtgtgaggggacaggtgtgtggggtggagcctccccactcggtgccactgcagtgacctgggacacacacaggtgggtggggagggagccactctctgaattgtgaatgaggagaaggagctgccaggagagaatccgggggaagtgctgggtgtcggtggcaggtgcagaggccacagtgggccctggggttggggtggtcagggcgaagtgagtgagggagatggtgaggtgctagggcagggggctgccaggacagcctgttggccccggaagggtgctggctgcactcccaggctccggaccatgccagaaggttcttgacgagggatgtgacactgtgggtgcctgttttgtgggggcactgaggtcccatctctggtggtgcccgtctcactagctgcttgaagcacattttcagtttcactcggatctgccaggacccagatgagacgggcgactcattagcagacgggaaaccaaggtctccggagcagctggtgtaccatggccttgattctggacccacaggggcctcgactccggaccgacaggggcctcgactccagacccacaggggcctcgactctggaccaacaggggcctcgactccggacccacaggcaccctcagtcagggctgacacaggtggggcagttcttcctggcggggccgccccctgggtgggttgtggatgttgagcagcgtttggctccacccactgccaggcaccct

SEQ ID NO: 23962 - DNA, 1533 bp, Artificial sequence
  DNA replication origin
caggctctgcgaggatggaggtgggagcaggcctgggcggcttcctgggagggcctggtgagcccaggggaccgggcgcagagcccagggccgagctgcttccgtgctacgagatgatacaacccttggcaccttttaaacgactggaaaatgagtttctccttcctgtgaatggcagctagaggggggactgtcagacttaggctgacaccagtccgcttgctgagtggcggggcggccatcgctctcctggccgtcccgtacgggaaagcccaggccacaggggcacttcctcgggctcgagagccgtgcgtcagccttgccccctcctccagcgcctcccggcttctccacctccttgtcccttcacaggcatctgtgcttgctcaagagaaaatgggctgctgaccacacgggtctcaagacatggatcccatcctgcccgtttgtcctcagtgggagatctgacatggaaatttacagacttatttttgtcaagtttccagccaatgaaggataaactgtcctttcagaaaatagttccaagactctgaaatatgcaggttgctgtgctgaattgtaaatgcaaacactcagcccagcacacgccgacgctggggatcaccgcctgcctgggtcgttcctagaagctcgggctgctgcgtttgcagacagaaggctgccgaccgggcctgctctacgcaggtctgctccgccccaagggaagtggctgacaagtgtttaggaactcatctcccccaagactcaaaggggcaggtctgcacagaggccaccctccgggttaagggaacgggctgagtggctctgagtggtcagatggggtcaaaatccccagcgaatctgggggcagcgatggggaggacagctgtgtgtgagtgcaggcaaggaagagaacgcacaaccaaaatgtcgttcatctcagccaggaaatgccaggctcctccgagtgccgggagccccagcggacgtcagaaaaccggagaggcaatccccgtccagtagccacgaaccagcctcatcgtcggagtcagagtgggggctctggccgtgggtagtaactattttttcagtttttgtagtaaatccacaatcatggggaagctgtgaacctcggccggggcgggggcccggaagttaatgatccgggtggaaagacggtcaacgctgctgccactgtggaagcgagacctgccggggccgggactgaagcctccagggcgctgcagctgtcttcccggccacggccactccggctgtttggatcagcaacgtgggacgttgtaatacacggagggaattcaggggagggtagagacgatgaactcaagctggaaaggccgcctgaaccagcaggagccatttgggaaataaaactcacaaatgaataggaaaagctttctgctggaaaccgcacttcctagcaaggagaatttctcaaagcgtttccaaaatggaaacgcttacgcagagcagagcagacgcttggaaagccctttttagaaacccacacct

SEQ ID NO: 23963 - DNA, 1090 bp, Artificial sequence
  DNA replication origin
gtttacattaaaaaagcagaaggccccactgtggccagccagttgctggtcagagaaggttggagtgtggtgcacgctcattgcacgctcatcctgcccacggccccccctctggggacatggactcaggcttcctccagcctcaggaattcccacgtgcctcatgcatccccccatgactgtgtgacacctcgctcgtgtccactgagggcgaggctgtgtctgtctggtcctggctctgatgcccaaggcctctggcggtactgtgaacatagcactccacgaatatctgtccagtgagcaagcgagagggtttttctccaaacaattcattgttttgtttaaatgaacttaagagacacttgtgtgtctccagcgcacccgtgagtagaaggtgactgagtgccgtgggaacagcctggagactccagcaggcgtcaccccaccaaggcctgccctgtcccccagggaggcctgagccggggccacatgagcacgacgccggaagaacttgggagagcaaggtctgaagtggggtggcatctcataaagctgtgcccgtgcatggcccacagccatgtctgcaagctgggcccaccgggacgcagcccctgctttgggaagccccagtgtgtgttcagagcagcagctgaggggacgttcctgtggggctggagggcttggggaaggggtggtcaggttgccaaggggcgtatctccccaggctgccttcgccacagtggggtcccagacctttaatccggacgcaaaacactgccaggagtccgggcaccatgagtgaccaccagtgaagacctggctgaaccagaatggagaggctggggggtgagaaaggggcggtggggggagaatgccaggccacccaacacttgccttgcacccggctgcagagggcggcggtctagatgggagggtgtctccctgacaagagccggggccatggcatctgcttcagcagcaggcagactgcacagctgagagcgtgaacttggggagccagtccaaagaccccccgctgccacaagtgacaggcagtcggcccacactgccttagtcccatccatagccg

SEQ ID NO: 23964 - DNA, 2477 bp, Artificial sequence
  DNA replication origin
tgagctggtgctgaagggacagctccggccgagccccgcagcccccgcagccccgggcggctcatggtccccgaagccgaagctgaagcccaggcccgggcggggatgctggggatgccccgcgggtgaggcccccgctgcagccgtgttcatggcggtggccaggaagatccgaactttgctgacggtgaacatcctggtgttcgtgggcatcgtcctgttctccgtgtactgccgcctgcagggccgctcccaggagctcgtgcgcatcgtgagcggcgaccgccgggtgcgcagccgacacgccaaggtgggcacgctgggggaccgtgaggccatcctgcagcgcctggaccacctggaggaggtggtctacaaccagctcaacggtgagcgggggcgccggggcggagtgggggcagccctgcccgggacagtggccaccccgggcgcgatgggtcaggccggcctcgggtgcgcgcccctctgcgcccctgtgggagggaatatacaggagagaggagagggaagggccgcggaagccccttcagcagcgggcagcaacctgggttccccccgcaccgggcacccacccctccagtggagacttgaggaatccccctgcccccacaatgacgcaaacttgctctccgagggaacttctgcagaggatctttggagctgctctagaagcaggcagtgcctaggtccaggagtgtggggtggggggctggcttggcgctccaggagtgggggccgtcaggtttaggctgcgccgacccctccactcttgaaggtggggaaagaggagggtggggacgccacacttgggaggctgctggtgcagtgtcctttgcccctgaggttcgaaggcaccccaaatgcttcgaccactgggctaggcggccccctgtcctgggggtgcccgaggccgcgttagaaagttgttatgggagaagcttgaagctgagacctgagactcctgggaggatggagttgaggatcatgcagggcttggcaggactcattacccaggggggcccaagttgtggcacctgggagccccagaatccatgaaagcctccagctcccggtgggtctgtttcatcacgagcggacgtaggtcagcccgaggagcagcaccggcatcaccacaggtcagggccagcggccacagctgctgagagcaagcacttttccagctgctccaccttcccggaggagcagccgcccccaaggccactctgcaccggggcgccaggaaggagaaagtttgcatgtgcctacatcactagctggtgtggctttccgttccgtgccgatgattcaggcttctgccttggcagccccagcaaacctcctccagaaagcatccgtaacaggctcgagtgggaggtgacgggagctggggttacgcgggcaggcgggggctccggatgtgcctgctgtgtgtgggggcaaaggcggggggtggtcttgcgtttccttcaggagccacaccctctcttgagggtgggctgcagacaggccgtggggtgggagggggaggtgaatccccatgaggaggggttgtcccagctttgtctgactcagagcaccctgacttcctgagcgccttcccatcacccacagaatccctgactttcccgcagagctgtgcttggtgagctctgtggcttctctgatctttctgattcagctggagccacgaggggagaaaagtagttcaagcagccgcccagccgcccggcagagcaattcatctcccggaaggcggtgtgcccggcaatagcacatggctctattgaagtgtgctcgccatggtgttatggtctgttttatggggagagccagaggattacataaaaacattggcagcacactgaggttgtgtaacaccacgagggcagctcggccctgtgagtcgttttccctgcctcacccttcaaggtgagaatcggctgggattcttggtggtggaaaaagccaggacccatgatccgctttgctgacattggcgggagataaggaagcattccgggaaagtgtgtctccccccaccgcccaccgcccccactgccttctcccatcccgcttcctcctgtcctctgtcccctcccttcttcctcttcgcttccctcccccttcctcctttctttcttttaaaattgtttctccttctttccttcatcctagctgtcctcccttgtcagcctttctccgaacggcccctgccatctgtctgcctctgtctttgccctcaaccttttgatgaggccgagtttcgtccccctctgtgatgaggctgtgctgcgttcctctctgtgaccagcaggccaggcacagtgtctaaacccaagagtcagtcaatctttgccccaggaaatgatgggagacaccaaaattactctcacccccggtggggccctacggggagggcggtgccgtagaggcctgatgtctgtcgccatgaggcc

SEQ ID NO: 23965 - DNA, 1853 bp, Artificial sequence
  DNA replication origin
tcgcggggcgcggccggcatcccccgctcagagggcgcggccccgccccggggagcggtgaggggggccgggggcgccggggggcggcggggaaggcgcgggcgggcggcgctcggtgtctgtgccggctcctgtcctgcccgccccgcagccaccgcgccggtgcagagtgacgcggcctcacctcacctcatctgcaaccgcggccccaggaccgccccgccccgcctcccccacccctcaaggccgccccccgggaccgccccgcgcgcctgccccgccccccccaccgcgcccccccggggaccccaggacagcaggtccggggggcgggggacggggggcggggcgcgcggggtagcctgggccaagggcgcgcgggcgcggggagcgggggcggggcaggcgcggaccctccctccccaggacccgccagacgcccggggcccccaacggccagcacggtccgaatcgaccccaagcttgacccgagggcagcggggcctccgggaatgcctggccagggcggtgtcgccgggagtgaatgggggagggggcggccggggcaggacccgggtcagggccactctggtagtctcctgcccacccctccccaagccgagctcccggcctccctccctctcccccgtccagggctgaggactggggaagctgagtcccgggacgggtatgggggggttggggcttgggatgcagccggacctccgggaacagcagggggccctggagccaccaggagggagaaggccccgtccctgagccaggctcgcaggtaagacccgaggccgcaaaccccggctgcccccacccccagcccaggctctgatctggccccacactggcgttttgtggaggagaccctggaagccaggggagatgtcagccaagccgcgcagcacaggggcccaacttccactggcagaatgcaagcacccaagaggcaggagtttcacccaaaggcagggttcacccctgtgttcccagagattggacacatagctggtgttcagtaaacatttgcgggatgagtgaataaatgacggagcatttattaagagcatggctgtgcttggctctccatacagagatgagtaaggcaaggggcttcacagctcttggctgtgtgtgtgtccgtgtgtgtgcatgagtgtgcatgcatttgcctctgtgtgcctgtgtatctgcatatgtgcatgtctgtgttgtcagcacgcatgcatgtgcatgtgtccacgtgtttctgtgtgcatgtctgtgtgcccgtgtgtgcatgtatctgtgtgtgcatgtgcctgtgtctgtgtgcattgtctctgtgtgtgttcatgcgtgtgcatgtgtctgtctgtgcctgtgtgtatttgtgtatgtgtctatgtatgtctgtgtgtgtgttcacatgtgtgcatatctctgtgttcatctctgtttgttcatgtgtgcatgtgtctctatatctgtgtgcatctatgtgtctgtgtttgtgtgtccatgtgtgcatttgtctgtgtatctgtgtacgagtgtctgtgtgtctgtgtgtgcatgtctgtgtttgtgtgttcatatgtgcatgtttctatgtatatatgtctctgtgttcatgtgtgttcatgtctgtgcatgttcacatgtatgcatgtttctctccatgtgtctctgtgtgtgcatgtttctgtgtatgtatgtctgttcatgtgtgtggtctgtgcatgttcaaatgtgtgcatgtctgtgtgttcatatctgcatttgttcatgtgttcatgtgtctatgtgtgtgtttgtatgtatatctgtgtgtgcatgtgcctgtgtgtgtgtgtctgtgt

SEQ ID NO: 23966 - DNA, 1292 bp, Artificial sequence
  DNA replication origin
accggagagtcccagggggacggtgcggggtcagcatccccgggttctcatttgcagatgggaagactttacctatgatggtcccagagggcccggcttggctgaggcacccgctgccctgtcagtcacctccacggggcctcagcacatggagcccacgttggcgggtcccagcgaccgctgaccacagcatcacagacatgcatgtgaatgggccgggagtccttgagggtgtacagtgtctgtgtctgctgcgtggccgtgagcagccaggtcaggagaaggacacggggagtcgtccttggagggaggagcgccgggcagaggggttggcgcgggagggctctgggtgggagctgcctggagggcgggaaggctgcgtggcctctgtgaacactaagcctttgactcggggggagggggcgctgcagggtcaggagcggagggcagtgtagtgacctcagtgtggcggcagctgctgtgccggggaccgactgagacccgggagaggcgagagggcggtgagctgcggcccttgtctgggaccgactgagacctggggagggcggtgggtgctgcggccattgtctcagccgtcgtccggctgagagacgagggtgcctggggtcaaggctgggccgcagaggtggccagaattgggcagattctgcacttaacctgggggtggaacccacggtgtttgctgacagattggaagtcaagggtcacctttgccaccaggcacagcggggacagagtcaccgttcacggcgcagggatggagggtcaggcaggttggggcaggcaggtgctgagctccggacgctgagtgtgggggctttgacctcctgcaaagagaccccgagggtaaaggccgggttgtcgcctgccgccctccgatagcagtgggcctctccctctccacctccagtccactggcctacacagcccatgaggcccagacacttcctattcttggggtggaacaagatgcctgccaggggcccgcggctgtacctggggctgctgagaagaggcccttggtttttcaggtggggaactctagggggtaagaggcaaatctggagctgctggtagaaacccttggggggccctgtccgggaataaagtcagccctggggcggcaggatggaggggaggtgggagggagcggggaagggggtgcagagatgcagacacatccgcttacttgctaaaacgtattcgtaatccccagatcagtaccggggtctttcctggtcattcacaggcgtgcacagagcttctggaag

SEQ ID NO: 23967 - DNA, 2816 bp, Artificial sequence
  DNA replication origin
tcgtgtgaagacacgtaacgacgggcatccatcgtgcatcacacagcggcgtttcaatgctcccagagtcctctgtgtgggtaccagctctgcatttatttaatcctcaccacccacctcgaggaagcttggattattgcagacattctacagaaaaggaaactgaggcatcaatccactaacctcattccctggggagtggagctggcattggacatcatgtgtgactggtcctggtgtgaattctccccagggagcagagcccgcattggacagcacacgggactggtcccagtctgagctctcaaaggagtggggttcacatcctcagcgttttgtctgtaattattacacttagtccaggtgtaattacccataatttgaggaggaaagcggtcatgtatttaccttgtaatttgcagtcgcaccttagactgatgtgctgcctcttcctgcggaaagctccggaacccttgaagaatctgcagagcgcagacagcacagcgaggtgtgagtgtgcgggccgctggtgcgggtgatggagggcagacagcacagcgaggcgtgagtgtgcgggccgctggtgcgggtgatggagggcagacagcacagcgaggcgtgagtgtgcgggccgctggtgcgggtgatggagggcagacagcacagcgaggcgtgagtgtgcgggccgctggtgcgggtgatggagggcagacagcacagcgaggcgtgagtgtgcgggccgctggtgcgggtgatggagggcagacagcacagcgaggcgtgagtgtgcgggccattggtgcgggcggagggcgcagacagcacagcgaggcgtgagtgtgcgggccgctggtgcgggtgatggagggcagacagcacagcgaggcgtgagtgtgcgggccgctggtgcgggtgatggagggcagacagcacagcgaggcgtgagtgtgcgggccgctggtgcgggtgatggagggcagacagcacagcgaggcgtgagtgtgcgggccattggtgcgggcggagggcgcagacagcacagcgaggcgtgagtgtgcgggccgctggtgtgggtgatggagggcgcagacagcacagcgaggcgtgagtgtgcgggccgctggtgtgggtgatggagggcagacagcacagcgaggcgtgagtgtgcgggccgctggtgcgggtgatggagggcagacagcacagcgaggcgtgagtgtgcgggccgctggtgtgggtgatggagggcagacagcacagcgaggcgtgagtgtgcgggccgctggtgtgggtgatggagggcgcagacagcacagcgaggcgtgagtgtgcgggccgctggtgcgggcggcggagcgtccccgctgcctggggtgggttcactgcacaagctgctctcctgggctgtgtcctggggacagctcaggtctggactttggcccaacccacgcagccccgcccggacctgttcccacctggccaagctccctgctggctcctctcccctgggctgccttcacccgcacactgagtgacccgacgcccgctacacagaaggtcgtgtcgcagtggggggtgcccaggtctccccgtggggcggagggaagcctctgtagctgtgggcttgcaaatgtgagatgtgggtgcccaaaggcccggcaacggtccaacagggccgccttggggagcacggccttcagaacgcctcgtggggagaggtggcgtgtgtgtagctgggactaggagggagggtggggaaggtcatgctgggagcatctccggcgcttcctcagaatcccagccgctcagggcatcacagaggccgcccatcccaagaaacgccgcggaggggctgtggagggcgctgtggaaggagggagcatcgggccgggaactgcgtggccattgtggcattccagctgtggcatccccgccacccccccagccctggcccagcctgacccccagggctgtgcagccccttccagcgcgttccctgcacctgctctacacctttccctcctgaggccagcgcgtcggaggccgtggcgcagcgtgttcccagtgtcagctgtggcaggaccccctttctgtggaggccgtgaggatgattacaggctgccattcacgcagacgtattttctcaccgttccggaggcagcaaagccacgatcaaggtgtcactggttcctcggaggctgtcggggtggggagtctgccccaggcctccctcctgggccatctccatctccctgcaccaacctctacgtccaaatctcccctttccataagctcgggaggggtggggccaggcccttctgtgtgtctggctctgggatgggggtggctcctgcctgaggccgatgaggacatcccagggaggccccgagggcccctctgcatcccagcccttcccgcctttgtccttcagaccacacgggtcacagacagtcaggaaatggaggtggcggtgtgtctccttcatgcagtgggctccttggctgagctgtgcagtagtctgttcattaagcctggccgcagcatcctagtagcttaattatgggcttcattacaagggaagatcaatagccagaaggacaaaagctcaaagataatggaaacaaataaagtactttgtcttaggtgacactaaagctgtctggtctgacaaatcctcctcaagtccggccttctggctcctccgagggtccatttgggttgaatggaaaacagccgtacacccagcccagagcaggctgtggatggagctccgggcagcactgtactccctaccccacgtgcctctgatgtgggtg

SEQ ID NO: 23968 - DNA, 2445 bp, Artificial sequence
  DNA replication origin
aggaaaacatgcttgggagaaactgagtgatgtggatgaatctcgctaggcaaatcgaccatgattattcactacagcaccccagagcagtgccctctggattctcattgtcattgtgatacgaaaatacattatttttaaagactgttgagtgagtcaaaccccagcactctcattaatgttcccaggctcagagaagcaaaccctggagagcttcatccccccagctctgcctgcctgaggcttaggaaacggccaggacaggggagagcctgggggatgcggatgctgtggttggctctgtctggcagcggcaaaggctccaggactctgcacagagccccagacctggggcctccccaaggagtgagggacacccctccgatttcgagaaataaaacctgcagggaattcacactgttgtgggagacccagagcccagcgccccgggcaggggccatacccagctgcgtgtagctgaaacctgatgaaatagccgccccgggcaggatcacacccggctgcgcgtagctgaaacctgatggaatggcggctgaacacctgctcctcagagtgtggccccgaccagctgtgtctgcatcactcaagaggccctcgggaatgcagagccccaggcccctccagagctgctgagcctgaatcttaccagcgtcttgtgtgttttgtcacagtccccagaggatctctactcacagcaagaagaccacggggaaccctgcatggctcaaggccatcacagctgagttctctgcaagacgatgccgctggtctcttcctcatgttgcaggacgcagccccagccatcaaggtgccaacaggaagaaagggggacagggggcagggagagggagagcatctgaggagaaacgtccctttaaatccccatagaccagaatccgtcccgtggccacatctaactgcaagggacatttccagctgggcacacggctgccctgaacagaagcaaggtttggtaagaagcgaggtagaggggagtcgctgtgtggcaggcaaggtctgctacaccaatacgcaaagggtgcacatggtggttccccaccaccccacgcccacaggagtccccacctgaggccggaagaggcgaccagtctgtggcagacacccggagggaggagtccagagccacccacatgacaccagagcaaagggggtatctggaaaattacactccaaatgccaaggtcaagatcacctggacactacagggggagtgaggaaagagagatggagagagacaaagagagagaccgagagagagggagaccgagagacaggtagacagagagagagggagggagacagagagagagagactgagagagagggagaccgagagagaggaagacagagagagagggagggagacagagagagaggaagggagacggagagagagggagacagagagagagggagggagacagagaggaagggagacagagagagaggaagggagacagagagagagagagagagagacagagagagatacagagagacagagagagagggagagaagggggagagagaaagagacagagaggaagagagagacagagagagagggagggagacagagagagggagggagacgagagggagggagacagagagagagggagggagacagagagagagagagagagacagagagagagggagagagagagagaccgagagagaggtagacagagagacaggtagacagagagagagggagggagacagagagggagagagacagagagagagggagagaaggggggagagagaaagagacaaagaggaagagagagacagacagagagagacagagagagagggagagagagagagagacagagacagagagagagaaacagagagagagagagagagagagacagagacagagagagagggagacagggagagagagagagagagacagacacagagagagggagagaaggggggagagagaaagagccagagaggaagagagagacagagagagggggagaaagagagaaaaaaaacagagagacagagagagacacagagacaaagagagaaggagacgagagagacagagacaaagaagaaggagacacagagagagggacagagagagagggagagaagggggagagagaaagagacagagaggaagagagagacagagagagggagagatagggaggaagagagagagatggaggggggagagatggagagggagagagagagggagacagagagggacagagagggggggagagagagggagagaaggagacagagagagggagagagagagggacagacagagagacagaaggagagagagacagagagagggagagatagggagggagagagagagagacagagagatggagagggagagagacgggggagaga

SEQ ID NO: 23969 - DNA, 2137 bp, Artificial sequence
  DNA replication origin
gagaggccgtcacagctggggtctggaaccagcacgtcctcctgggatggggagagggctctggcccacgcaccgcccatgtgcaaactctcagctcagggaaactcgcttgcccactcaacaggcttcctgagacggcaccgtggacagaaggcatgtggaccgagggcacagctcaggataaatacgccgcgtccctgccctccagttgacctggcagtgggtgaggtgtgttaatgtcagaaagaaatgagctccataaaggaaaacgagtagcaaaggaggaggcgtcgcttgagtgggtggcggggacggtccgggccactgcacttcccccgaatgaggagtggggcgagtgggcggaagggaggcccccagaaccactgaccacgcccacgcccacgccccagggcctgcaatggggccttgtttggaaatcgatgtcattgcagatgtactgggttagggatccagagatgacaccatcccggatttagagggatcctacatccaatgacaagcatcctatacataagagagaaaggggagggagatgcgggctcagagagaggggagggagatgcgggctcagagaggggagggagatgcgggctcatagagaggggagggagatgcgggctcagagaggggagggagatgcgggctcagagagaggggagggagatgcgggctcagagagaggggagggagatgcgggctcagagagaggggagggagatgcgggctcagagagaggggagggagatgcgggctcagagagaggggagggagatgcgggctcagagaggggagggagatgcgggctcagagaggggagggagatgcgggctcagagaggggagagagatgcgggctcagagagagggaagggagatgcgggctcagtgagaggggagggagatgcaggctcagagagaggggagggagattcgagctcagagagaggggagggagatgcgggctcagagagaggggagggagatgggggctcagagaggggagcgagatgtgagctcagaaagagaggatggagatgcgggctcagagagaggggagggagatgcaggctcagagaggggagggagatgcaggctcagagagaggggagggagatgtgagctcagaaagagaggatggagatgcgggctcagagagacgggagggagatgggggctcagagaggggagggagatgtgatctcagaaagagaggatggagatgcgggctcagagagaggggagggagatgcgggctcagagagaggggagggagatgcgggctcagagagagagggagatgtgggctcagagagaggggagggagatgcgggctcagagagaggggagggagatgtgagctcagagagggaggccatggtaggcagcagccgaggctggaggtcccaccacaggctcagagccacaggcggcgtcagaggcagagaggcctggagtggggggactctcgctcagcgcctccaagagcgtagccagcactcctcggcctcagccctcaggcctccggaatagagggaaggcaaggttctgtggattccaatggccccgtgtgtgctgttctaggacagctgctgcaggaaacacatttgaggataaagaagcagctgtgggcaagagttctgggcagaaggaggagcaggtgcaaaggccctggggcaggggcggcatcagggctggaggctgagggatggacctgcaaatcctgcacaacttccagtgcagaggaggctgctgcaggttccccggcagagaaacaatgctggaggcctctgtgtgaggtgagatgcacagtgtggccagcagaacaagaactagatggggacaaacacagaggccgagatgcagggcaggggtggcacaaacccccacagatccaaccctacagacccaaccctgcagaccatcccctaaccatcccccacaactccatccccaacaggcccatcccccacagacccatcccatgcagacccaaccctacagaccccacaagtccatcccctaaaatccatcccccacaggcccatccccactgggaagggtgcaggaggacaggccacagctgctcctgagaagacaccaaaggcaggaaggaagcg

SEQ ID NO: 23970 - DNA, 868 bp, Artificial sequence
  DNA replication origin
agcggccaccaggggccatttgtgcctccccagagcccttttgtgccagggagcgtggggtccttggtttcagaagatgaacgcaggccatgttccaggccccatccgcacacccgagacaggcagcccgtgattgtcattgacgcagtacaagttccaagcataatttcagaagagtgcatggatgagagctgaggggcaagcccacctcccgtcccggccctgccccgcccaccctgtcacctgccagagtgacactttctgtcagccactgcatttcccatcggcccatggctgtgccctcctgcctgccacaggcctgagacccccactcccagctagacggggttgggggaaaggccaaaacttggtgcaggcacaggagtgccaaggcctttgtgctaggtggccctgtgtgcagaggacggggctggggtcggcctggctggactgagcccaggtggggggcgggggcgggggtgggggcagggctcggggagctttgggcgagattggagctgggtctggaagggcggaggagcctgggaagtggggaggagcctggcgaaccgtttctgcaggtgctggtgctgttcctgccctgggaggcccctctaaggtgctgggaggcctgggttgttgctggtgtctgcagcagttctgaggagcaagaaccttccctgggtcccaggactctctctcctctgcctcagcgtccgggtccccggatccagctgcatccctggcgatccccttccctcatccttgccttgaggcccagggccccgtgagtaccagacgctgttatcaggggcctgagctgcagggaggagctgcagtctattaagatttaaagagatttgatgta

SEQ ID NO: 23971 - DNA, 1740 bp, Artificial sequence
  DNA replication origin
tgggaagagcaacgtggtcggagggtcccgggggagagtgggtggcggagggtccccggggagagcagggtggccggagggtccggggggagagtggggtggttggagggtcccgggggagagtggggtggcggagggtccccggggagaacggggtggccggagggtcccgggggagagcggggtggtggagggtccccggggagaacggggtggccggagggtcccgggggagagcggggtggcggagggtccccggggagaacggggtggccggagggtcccgggggagagcggggtggtggagggtccccggggagaacggggtggccggagggtcccgggggagagcggggtggcggagggtccccggggagaacggggtggccggagggtcccgggggagagcggggtggcggagggtccctggggagaacggggtggccggagggtcccgggggagagcggggtggcggagggtccccggggagaacggggtggccggagggtcccgggggagagcggggtggcggagggtccctggggagagcggggtggccggagggtccctggggagagcggggtggttggagggtcccgggggagagtggggtggcggagggtccccagggagagcggggtggccggagggtcccgggggagagtggggtggccggagggtccccggggagagtgggtggcggagggtcccgggggagagtggggtggcagagggtctccagggagaacggtgtggccggatagaggatgcctgggccccagagcctgggagacttggaggagtggactcgtcatggtggccctgggccctcggcctctgctctcgagggaaggagagcaaacgcctctctcgtggaggcaacagttcttccaggtctctatcacctgcagccacccccagtgttagaaagtgtgatggctgggcccggtgaggggagatggtcccatgaggcgtcaagagcggcgtttcgtctggcctgttgggcgcctgtgttccagtggcggtgtttggggtctggtgaatggattgtgcttatttgctgtcatctcggctgcgtctcgtctgctgggtgcacgtgctcagatggtggagcttgacgggcgcacgtgctcggatggtggagcttgacgggcgcacgtgctcggatggtggagcttgacgggcgcacgtgctcgggtggcggatcttgggggtcttttgctgtcaccttggctgcagccacctgctctcgctggaccctcatcctgggcagcgtctggcgttctgtttccactctgaatttccctctgtaacattgaaatcggtacctctttcctttttcttccctcgaaaagggagcttcttaggataatgtgtttcactctgaaatagcaaaaggtaagaataggcaaataaataatgatcccagccatctgagcaagcattaaggaggatttctgaaagcacatcctggtgtggctgcatccctgaccacgtccggctgtgctcgagtgcgcctgtcacacacagctttggaaggcacctatcacacatctcccatctgcttttcttctcagagtgcaggcgtgaatttgcagccagagaaaccaggagcacccgtgttcccatatgaggttcttcataagcagagaggggtgacggctgtgttagggcctggacaggggagggtcaggagtggggtcagctgaatagggggccttgggaccccttaaccaaaa

SEQ ID NO: 23972 - DNA, 2038 bp, Artificial sequence
  DNA replication origin
aagcggctccccggttgcaacgcactagtcagagctggtcagcatcacctccagtacaggtctctgtgggaggccagtgacggcctctgaagacctcgggtcttaatccatggagcctgtggctgtccccgggtgactcagcacccactgtctcagagtgactcagcacccactgtctccggggtgactcggtgtctactgtcccgggtgactcggcgcccactgtccccggggtgactcggcgcccactgtccccgggtgactcggcgcccagtgtccccggggtgactcggcgcccactgtccccgggtgactcggcgcccactgtcccaggtgactcagcacccgttctctcttggatgactgactcggcctccccagggtgactcggctttctccttcactctcccccagtgatgcaggacaggggagccccaaactggggctgagcccgggaggcttcttggcttcactcaggaatgaattcaagagccagctggtggtgggagaagcaggtttacagaggtgcagggttgcagcccccccataggcagggcgtcgagggcagccgcacagcacagttctgcagcctcatttatacccacgcttaatttcgtgcagatgaaggggcaggttaggcagacatttccagaaaaaggtggtaactcctgggtcgtggggttgttgctatggaaaggtgtggtcgcccaacggtaaacggacctggccctggtggcctgtctcatgcggaggtgctttcgcctctccttgtttagtcagtcctcagtctggtctggaggctcggtccctgcctctggctctgagtcccgcctcccatctctccagggtggctccctggtgagtcagcgcccgtccaccctgaggatgaccgtccccgtccgtttgcatgacgccatctcacagtctctgtgtctcactgtcactgagaactgagcccctttcccttccccatccggtgttttgaggggcctcatgttctgctcttgagctggccagagccttgcctcttcccgaacacaagttctgaccgatgaccctgggctggagccacttccaggagggtttggctgcaacctctgccgccgtcttgccccatgggggcagcttgtttgaaactggaactgggagagcagagcagggctggggaggtgagcatcctcccaggtacaccaggctctgtgtccagcactccctgagcccaccagcgtctggacttttcactgacctaaatcaacatatttccttttctacttaagccagtctaggttagctgctgccatcgcagtgaagatggtccagtcggatacgccgcctgaacctcagcaccacacatggttcctggagcccaagtcagtgggatgtttgtcatttgggtccccggcaccttcctacaggtaagagcatcttcagtgagggtcgtagaccaggctggagccggtaggtcccccgggatacctgctgctgggcgccatctgccggctccacggtcgtccgacgctgaggcactttctgggccctgtggcccccacgctccagggtccacgcggaggatctgaactcagaaacttgaggacttcaccttgctacaaaggcatcacagccctgacatcacgcagctttgataatccaccaggtgtttaatcacagggacagagcacacctcaaagtggtttacgcacacacacaaagaggaaattcgctgacaggagttgagatgagagtgacaggttatgggctccaggggcggcgcagtccaggcattcccacgatgtcctgtgggctgtgccagaaccctgggaagagcaacgtggtcggagggtcccgggggagagtgggtggcggagggtccccggggagagcagggtggccggagggtccggggggagagtggggtggttggagggtcccgggggagagtggggtggcggagggtccccggggagaacggggtggccggagggtcccgggggagagcggggtggtggagggtccccggggagaacggggtggccggagg

SEQ ID NO: 23973 - DNA, 1290 bp, Artificial sequence
  DNA replication origin
aagaagagaaagtccctggctgtaagtggagccccctcccctgcagccctcagcctggagccctggcagccagtcacacctgccccaggctgagaaagggggttcccatgagaaactgaggggccagggcaaagggccaagacttgcgtccagcagggtgggtgccgcccttgcttggtgggtccctcttgcccaccgtgtagacaaacgcccggagacacaggtgaaagcccacgaggggccctggggagggcggctgtgaagacaaacgcctggagacgcaggtgaaaatcacccagagacgcaggtgaaagcccaggagggtccccggggagggcggctgtgtagacaaaagcccagagacgcaggtgaaagcccaggaggggccccggggagggcggccgtgtagacaaatgctcagagatgcaggtgaaaatcacccagagacgcaggtgaaagcccaggaggggccccggggagggcagctgtgtagacaatcactcagagacacaggtgaaagcccaggaggggccccggggagggcggccgtgtagacaaatgcccggagacacaggtgaaaggccaggaggggccccggggagggtggccgtgtagacaaaagcccggagacgcaagtgaaagcccaggaggggccccggggagggtggccgcgtagacaaaagcctggagatgcaggtgaaagcccaggaggggccctggggagggcggctgtgtagacaatcagagacgcaggtgaaagcccaggagggggcccggggagggtggccgcgtagacaaatgcccagagatgcaggtgaaagcccaggaggggccccggggagggtggccgcgtagacaaaagcccggagacccaggtgaaagcccaggaggggccccagggagggcggctgtgtagacaatcactcagagatgcaggtgaaaggccaggaggggctccggggagggtggccgagtagacaaacgcccagagacgcaggtgaaagcccaggaggggccccggggagggcggctgcgtagacaaatgcccggagacgcaggtgaaagcccaggaggggccccggggagggcggccatgtagacaaatgcccggagacacaggtgaaaggccaggagggggcccggggagggcggccgagtagacaaatgcccggagacacaggtgaaaggccaggggggccaggggagggtggccacagctgcttgttcactgtggtctcacttctaaaacttagggacacaggttaatttcataaaaatgtaaacgacaag

SEQ ID NO: 23974 - DNA, 1172 bp, Artificial sequence
  DNA replication origin
gatggatggatgggtgggtggatgaatgggtgagtggataggtgggtgggtaggtgtatgggtgaatggctagatggataaatgggtggatggatggtggatgatgggcgtgtggatggatagatggatgggtgggtgggtggatgaatgggtggatggggggatggttggataggtgaatgcctagatgggttgatggatgggtggagggtggatgagtggatgtgtgtttggatgggtgggtaggtgggtggatgaatggatcggttggtggatgaatgggtgggtgggtgggtgaatggattggttggtggatcaatgggtggatgggtgggttattggatgaatgggtgggtggatagatggatggatgggtgtgtggatgaatggattggttggtggatgaatgggtggatgggtgggttattggatgaatgggtgggtgggtgggttattggatgaatgggtgggtgggtgggttattggatgaatgggtgggtgggtggatagatggatggatgggtgggtgggtgaatggattggttggtggatgaatgggcggatgggtggcttattggatggatgggtgggtgggttattgggtggataggtgaatgcctagatgggttgatgaatgggtggatggtggatgagtggatgtgtgtttggatgggtgggtggatgaatggatcggttggtggatgaatgggtgggtgggtgaatggattggctggtggatgaatgggtggatgggtgggttattggatggatgggtgggtgggttattggatggatgggtgggtgggttattggatgaatgggtgggtgggtggatgggtgggtgggtggataggtgaatgcctagataggttgatggatgggtggatggtgatgagtggatgtgtgtttggatgggtgggtgaatgtgtgagtaggcaggtgtatgagtggattgggaccagtttggcttggacagcccagcctcctcctgtagggacggcccctcctctggtggttattcgacgtcttctccaccagttcgttcattcacttgcttattcattcttcaagaggtgattgagtggcagcttctggattttcaagataatgcaacaccccaccactcaggttctcctgcaggaggtccctcctgagaaggaagggtctgtgtc

SEQ ID NO: 23975 - DNA, 1964 bp, Artificial sequence
  DNA replication origin
agggagcagggacgcgcaggaggccctgccaggcggccgaggaggagatgaagggacccctggcgtcctccttcccaggagcagcttctccatggacaagaaactgaattctccctggaaggaggtggcgtctgggaggaatcacagccctcagaccagagagcagggcatctgcgaggtcaaggaaggccaggagccgcagggccgggtgcacggtgtggagtctgcggaggggcaggtggtgggaggcgcggggtgagggctccggccctgcactcacagtgatgctgtgggaccagctgctggactctgggaaggagagagggggcgggaggtcctgaggtgcagccggaggggtagcatggtttgcccagggggaccccaggcagccgctggagctgccgtggggcccaggagccctgtggggtgaggcaagtgttccaggaggcggccagggaccctgctggattccaggatctcagggacccaagtaggaggcccgcctcatagagccatcagggtaaacaaacagcatttaaaggcaacagaaccctcgtgttgagggcgcctggccctggtgcggagctgtggtcttcggggctcagaaaacaaagctttcccaggaccttgaaaatgttttagaccaaagaacaaaagcccttgctccaaagtacaagaaaagaaaacttcgtcttagaaatcgatcgggttggctgacatgtttaaaaccggtgtcaccatatcagggaggcaggacagtgtctgatgccaccagggccaggccgacttcccgccctgctcagtcccgggccccgacggacccctgtgcggaacgactctgggtcccacagaacggccttgcccttgagttgccagcggctgcctggtggggatggatggagggttgagcctcgttccctgagagaatgggtggatgcattcgaaccccaggacctcgcccaggagccagggagggagggcacaacttggggaggtgaggggcctggggaggcgaggggggcatggggaagtgagggagcctggggaggcgagggggcctggggaagctcccagcccacgacaggaccagtgctgtcacctggagaccgggcgctgacggcgggaactgcagccgccactctcgtgggggtcttgtgctttggtgcccgtcagggcccagtgaagatgcggaaatccgccaagcagggctaagggcccagtgaggaccacggagtgaggcggaggctcttcccacggaggggacccagagcggcaggaaccgccatcccccagcctgcaggtgtgggaggagaggccgcctatgcagggacacagccaggccaatgacattgggggacggagaccccgacctctcgcctcccaacctctgaccttctgcaggtgccacaggggctgaatctgacccagaagcctgtggccagtgccacagtcacagcataggtgggagggcatctccccagccagggtcagccacctgggttggctgcgggtcaggacatggacaggctgagccacgtctactgtctggggaaacactagggtctgtgggttcctccctggtggatcctgaggggctgtctctgcagggtacaaggctgtgtccataggccccggggtcccccaagagcttctgctgttctgaggctcctgcgtccaaacgggaccactcgccctgccctggagccctagcaaccccactctgctccagtaaggagcaaatcagtggcccaggaccacggagccacccccaccctcaccaccaggccccagcagggctaggccagaggccaaggtggacccagaatcctgaggacccacgaggctacagggtcccttgcccagactgcaggcaggagccccccaccctcagccccctctgaggacctcctgctcccagcagctctgcaggtaaaatgctgcttgataaacacgctcctgtgtct

SEQ ID NO: 23976 - DNA, 1636 bp, Artificial sequence
  DNA replication origin
gagctcaggagactctgccgagcctctggggctgatggcggagtaactgcccgaccgccaacgccacgaggagacttcacccagcaggagagcccttcgcatcacggccccgccctcacgggaggggtgcaggcacctcgggggcgctggggccatctcagggcttgcccgccacacgcggcttgtgctggaggaaccaccccctgtatgacgtgcgcggtcgaaggggtcgagccaccgcccacaccaagcatcagtggaacgggtgctggggccgcacaggtccccgctgttggatcatcagccacgggaatgaaggctacgacccgactgagcgcacgacggctcctgggggggcctgtggggcaggtgacggctcccgggggggcctttggggcgggcgatggctcctggggctgcctgtggggcggacgacggctcccgggcatccaggtgcattttggaccctgctgggcatcgcgcaggagccagggagtgcgtgccctggggaggtggggggaggtaagaggagggaggtgggagacggccccccccactgccgatggatcctggagacggtgacgctgtgcggggctgcgtggctgcagctgtgggcctggggctgagtggaggcagggacatgacaccggatggccctcgcagtggacgtggcttctcttctggtgctcctgtggcctggtgacctgctctgcagggctgcctcgcacaggtgagcaggccggacacggccgtcacgcgggaggtatggtttgcgcgacgccgagggtttggccccagagctgggcagtggacaacccgtgctgcagtggccgctgccccgcgtctgtgtcatgtctcattcccatttaacaaagagcagggtctctgagtgtcgggcgttctcggcggagctgaaggtgcccgagaaaggggtggctgctgtttcttctcgtcccccagggagctgcagatggcaaggtgctcctgagctgcgcctgctgggaatgtcgagggcggcgtcccctctgggaatgttgagggcggcgtcctggctgggaaaacgtcgagggcggtgtctgcactgggaacgtcgacggcggcgtctgtgctggggatgtcgagggcggcgtcccccagctcaaggcggctcagctatgaaaccaacccaggaaagcccggctcattgctgtgggccatctcttacccccagggctggagaccccgtctgctgtggtgcttggagcttgggggagggagattttaggccccttggcccctctattcgggacgatcagggggcctgtgttttcttctccccaggcaggggggcctttgtctccacacggtgggtcattctgcccacctgccccatggtcctgttcacgggcctctcgtctcactcttcttggggtctgtgattcaggcaggatgtggctggacttccctgggggacagagccttgggtcaggcccacagggctggcagtgggggaacgggccggggtcagggtggcccgcaggtcatcccctctggggcgcaggtcattgccgcattctcggctttgtcttctgaacagaaaagggcgtcaccttccacagggctggacggcggcttcctcagctccggtgcaggcatc

SEQ ID NO: 23977 - DNA, 1002 bp, Artificial sequence
  DNA replication origin
tccctgggatttgggcgtccgagtcagtggggacctgtgcccccaaaccccctcagcagcagaacgcagagagccgcggtgccatctccaccctggctttccaggccctggagggcaaaggtcagtcagatggagggagcccggggtccctggcaggagtgtggccaagtcccagcagcgctgccccgagagaggaggacggcgcagctccattgctccacctgcccggctcagggatggaacccagagctgccaccgtcctgtgggtgacggcagaacatctggctgccgggtggcctccgtaaccgccacacacctgcctctgctggaatcacctgaggctctggtgcctcacacggattggccaaaacagggagcggagccgggaaggccacggacatctgtgtggtgtcacgaacaaggtccggccacgtgtgtgggagacgcgggcgccgaggcaggcgccaaactaagcccggccaccaaggggacgcccacaccccacctccgtggtgacccctgaacccccggagctcaccatccacaccagggtgagaggagaggatgggcaaggaaccgtcaaccagaggggatgctcagctgcgtgcacgtggcgggtggtacatgggggctcggggaggcacccagagaggatgcgtgtgtagtgcagaaaatgaggctttggggcccgcacaccgagcccaggacagcacggaggcgggagacactgccaagcccccctcaccctccttgatggacgccccagagtctcaccctatcccctccccagctcagggcgacaggagcccagccacgtgcgtcccggggccgccatcacagcccctcagaagccgccttaacacggactaatcctgcagacctggagctgggagccgagggtggggcctctgcagggccgggtgctttgaggccctgagggagaatcgtccagggcccgtgtctgccgctcccaggctggtcaacaccttcgccttcccccag

SEQ ID NO: 23978 - DNA, 1072 bp, Artificial sequence
  DNA replication origin
agaccccagtcggacacccatgcaccccttgactgacaccctcagacccccagccagacacccccagaccctgtggcccacatcccagaccccctggcccccagactccccagcaggaaacctcagaccccctggccgacaccgcagacccccttgcccacacccctagccttcttggctgtcacccccagaccctgtgacccccggctggactcccccagatcccatagccaataccccagaccctctggtcagtggaactgactggccaagccctgtccgaggaggcagttcctcccaagctgctcctttccacagtcagggccggccagggcagagcctggcgtccacatccctcctccactcaccacacaggccgtggggcagcacttcagttttgtttgtgattaaatgaagctgccttttgaaaaatgctggctcttcaccgtctaggcagcaaattatcttaaagtggatgttctttgttctgggaagtcacttgatttgctgagtgtgcgtgtgcctgtgtgtgcgcacctgcatgtgtgtgtgtgagcctgtgtgtgtgtgagcctgtgtgtgtgtgtgggtgtgtgggcctgtgtgtgtgcgcatgtgtgtgtgcatgtgtgtgtgtgggcctgtgtgtgtgtgagtgcctgtgtgtgtgtctgtgtgtgcctatgtgtgtgggggcctgtgtgtgtgtgtgggcctgtgtgtgcacgtgtgtgtgtgtgggggggggctgtgtgtgtgtgcgtgtgtgtgtgcatgtgtgtgtgtgtgggcctgtgtgtgtgtgcgcgtgtgtgtgtgtgggcctgtgtgtgtgcatgtgtgtgtgtgggtgcccgtgtgtgtgtggggggctgtgtgtgcacgtgtgcacgggtgcgtgtgggcctgtgttgtgtgtgtgtgtgggtgcccgtgtatgtgtgggggggaggtgtgtgtgtgcacatgtgcacgggtgcatgtgggcctgtgttgtgtgtgtgtggggttctagaccctggttacgtgctagaaccacccgacagctttgagaagtacaaagccctgcacc

SEQ ID NO: 23979 - DNA, 2631 bp, Artificial sequence
  DNA replication origin
acacacgtgcacacacaggcccacacacacacacaggcccccacacacataggcacacacagacacacacacaggcactcacacacacacaggcccacacacacacatgcacacacacatgcgcacacacacaggcccacacacccacacacacacacaggctcacacacacacaggctcacacacacacatgcaggtgcgcacacacaggcacacgcacactcagcaaatcaagtgacttcccagaacaaagaacatccactttaagataatttgctgcctagacggtgaagagccagcatttttcaaaaggcagcttcatttaatcacaaacaaaactgaagtgctgccccacggcctgtgtggtgagtggaggagggatgtggacgccaggctctgccctggccggccctgactgtggaaaggagcagcttgggaggaactgcctcctcggacagggcttggccagtcagttccactgaccagagggtctggggtattggctatgggatctgggggagtccagccgggggtcacagggtctgggggtgacagccaagaaggctaggggtgtgggcaagggggtctgcggtgtcggccagggggtctgaggtttcctgctggggagtctgggggccagggggtctgggatgtgggccacagggtctgggggtgtctggctgggggtctgagggtgtcagtcaaggggtgcatgggtgtccgactggggtctggggtgtcagtgggggcctgggatgtcagtggggcctggggtgtcagtggggtctggggtgtcagtggggtctgggatgtcagtggggtctggggtgtcagtgggatctggggtgtcagtggggtctgaggtgtcagtgggatctggggtgtcagtggggtctgaggtgtcagtgggatctggggtgtcagtggggtctggggtgtcagtggggtctggggtgtcagtggggcctggggtgtcagtgggatctggggtgtcagtggggcctgggatgtcagtggggcctggggtgtcagtggggcctggggtgtcagtggggtctgggatgtcagtgggggcctgggatgtcagtggggtctggggtgtcagtggggtctggggtgtcagtgggatctggggtgtcagtggggtctgaggtgtcagtgggatctggggtgtcagtggggtctggggtgtcagtgggatctggggtgtcagtggggtctggggtgtcagtggggtctgggatgtcagtggggtctggggtgtcagtggggtctggggtgtcagtggggcctggggtgtcagtgggatctggggtgtcagtggggtctgggatgtcagtggggtctgggatgtcagtgggggcctgggatgtcagtggggtctggggtgtcagtggggcctggggtgtcagtggggcctgggatgtcagtggggtctggggtgtcagtgggggcctggggtgtcagtggggcctggggtgtcagtggggcctaggatgtcagtgggatctgaggtgtcagtgggggtctgggggtgtcagtgggggcctgggatgtcagtggggcctgggatgtcagtggggcctggggtgtcagtggggcctggggtgtcagtgggggcctgggatgtcagtggggcctgggatgtcagtgggggcctgggatgtcagtggggcctggggtgtcagtggggcctggggtgtcagtggggtctgggatgtcagtggggtctgggatgtcagtgggggcctgggatgtcagtggggtctggggtgtcagtggggcctggggtgtcagtggggcctgggatgtcagtggggtctggggtgtcagtgggggcctggggtgtcagtggggcctggggtgtcagtggggcctgggatgtcagtgggatctgaggtgtcagtgggggtctgggggtgtcagtgggggcctgggatgtcagtggggcctgggatgtcagtggggcctggggtgtcagtggggcctggggtgtcagtgggggcctgggatgtcagtggggcctgggatgtcagtgggggcctgggatgtcagtggggcctgggatgtcagtggggcctgggatatcagtggggtctggggtgtcagtggggcctgggatgtcagtggggcctgggatatcagtggggtctggggtgtcagtggggcctggggtgtcagtgggggcctggggttgtcagtggggcctggggtgtcagtggggtctggggtgtcagtgggggcctgggggtgtcagtgggggtctgaggtgtcagtgggggtctggggtgtcagtgggggtctgggggtgccatgttaaccactgtaggctgtcctgcagagctgcctgggctgttttaggacgttgaggttccagagcagcaggaggttcccagaagacaagctgggctccagcaccaggacctggggtttctggcccagagaccacagccctgtctgtgccgggcgctgagggtacggcaggtcgtcctggcggccttcttgccagtcctgtcaggtatcaggagcctaagaggctggtgaggggctgcctgcccacccttgctgactccggagggtaacccagctcctgccccgtcctggccctgctctccggagtgggctgtggtc

SEQ ID NO: 23980 - DNA, 1005 bp, Artificial sequence
  DNA replication origin
catctgaaaatccactctgaaatgcaaactcttccaatgggcatttcatgcatttcatccgagctcatgccagtacgcaaaaagtttcagattccggagcgttctgattttggatttttgcaggagggatgctctgcctgtaagtgccaggcagccttccagctgctggggaagtagctggaaaccagaggacaagtcccactgcctcagatccctgtggggacagagtagatgggaagcaaaggtgtgcacgagaccacgccagacacacggatcgcacggagcgagatctggccgcatggagagccaggaggagcaggcggggaagggcctggcggtgggagagctccaagtgtctgcagcagagcaggtggtgcagccacggccggggcagcacagtgagaggccagaggggaagctgggccggtcccgcaggctctgcaggccctggctcgggctttcacctgcaagcaggaaggtgctgtgggtctaagcacatgaggtgttggtttcagctccagctgggcaggaggctgggccgtgggaggaggggacaggcaggggacaggcaggaggctggggcggtgctgaaatctgtacccattggctttgccatgcttcccacagagctgggtccggccgttcctgactttgtggaccgtggaggggtgacactgtgggcttagtcccgcggccggctcttgaaaggcccaaggcctctgcctggttcttggagccactgcactgcaggggtggccactgcctgaggattctgaccccgggaccactgtgtgggggaccttggggagacccccaccaagccagggagtgcccagccagcaactgggccagtggtttcccacgtccggcccagtcaccctcataggacacagccctggccagcggcacaacacgagagaccccagtgaggaccccccagccaggccccctgagtccctgaccccagcactgtgaacaacgtagtggaggtgtcatttcaagcta

SEQ ID NO: 23981 - DNA, 1010 bp, Artificial sequence
  DNA replication origin
ctgggttcaagcgattctcctgcctcagcctcccgagtttctgggattacaggcacccggcaccacgcccagctaattttttgtaattttagtagagacggggtttcaccatgtcggccaggctggtcttgaactcctgacctcaggtgatccacccgcctcggcctcccaaagtgctgggattacaggcgtgagcccctgcacccagctgagatgggtaatttgggataacgtcatcgattcattaagacaggtcccgcagatgcattaacccacatcagaggaaacagatgagaggacgctagaaatggggctgggaatccccaaaaatccccaggagaccccccagacaggaaactcctgtggatgtgagatgcccactggacatcgcagaagggcatggagcgggcaggtgggtgtgagaggctcaaaccacaggaggcatccaggccagtgagagaataggcaggaacaggcatggaagccacgaggccgggtgagatgccgggggtgagtgtggacggggcagtgagaggataggcatggaggccatgagactggatgagatgtcaggggatgagtgtggatggggtatccacagaggagagacagaggagaggctgtgggtaccaggtcctgtgaccggatgagaagccaggggtgagtgtgcatcaggcagaggagaggctgtgggcactgcgtcccaaggcaccccctcaggaggcggagggaggagagagaaccaacagcaaccagccccatagcaggaggacagtgagaaggaggggatggggggtgcctggaagtcgagggaagacaccgattccaggggaaggactggacgggtcggcgtggaattaggacacccggccactgcgacaggctcaggaacaagcacagacctcagaggctggctgacatcattcctccttcggatcatggcctgggaagccccatggcatctccactgagacagtcacacagtcaggctccagggaggggaacagact

SEQ ID NO: 23982 - DNA, 1016 bp, Artificial sequence
  DNA replication origin
atctgcccgaggccacacagcacagtggcagagctggggcccggtaattcactcttcctgtcgccctttgtgaaagtcccgccctgtcctgggcaccgcacaatccttccggtcccacgggaggcccagcccctgctccgcctgcagccgccacaccccctgcccctctccctccgcggaccccgtccgccccgccctcccggggccgctgctccctgccctggtccgccttcttcaggggaggggcgtggccacccaggccctgcccagtgtaacacccagcgctgctgattggctcccgtctcggctctgggtcgcctggacaccgtgattggctcagtgatgagcacgtgatccaagctagcccaatgaaagccaggcctgggattttggcggggttcgcaggagcaggaggggagagtctgcacctgcaggtggtgcagaggcccctggggtcccagagggagtggagcagcctgaggccgacagggctgggtcggcaggagggagagagagatggagatggagatagacagagagagacagggacagagaaacagaagagagagacagagagacagagggagagagacacagagagacagaagcagatggagagagagagagagagaggcggagacgaagatagagatagagaaacagagagacggggacagagaaacaggagagagacagagatagagagacagggagagacacacacagagagacagaaacagatggagagaggcagagagagagaggcagagacagagatagagattaagagacagagagatacacagaaagacagggacagagaaacaaagacagagttagacagagggagagagacacagagagacagaagcagatggagagaggcaaagagaggctgagacagagatagagataaagagagaaagacacagggacagagaaacagagaagagagagagagacggagagagagagaagcagatggagagaggcaaagagagagagacagagacaga

SEQ ID NO: 23983 - DNA, 1048 bp, Artificial sequence
  DNA replication origin
gcctctctctctctctctctccatctgcttctgtctctctgtgtctctctccctctgtctctctgtctctctcttctgtttctctgtccctgtctctctctgtctatctccatctccatctctctctccctcctgccgacccagccctgtcggcctcaggctgctccactccctctgggaccccaggggcctctgcaccacctgcaggtgcagactctcccctcctgctcctgcgaaccccgccaaaatcccaggcctggctttcattgggctagcttggatcacgtgctcatcactgagccaatcacggtgtccaggcgacccagagccgagacgggagccaatcagcagcgctgggtgttacactgggcagggcctgggtggccacgcccctcccctgaagaaggcggaccagggcagggagcagcggccccgggagggcggggcggacggggtccgcggagggagaggggcagggggtgtggcggctgcaggcggagcaggggctgggcctcccgtgggaccggaaggattgtgcggtgcccaggacagggcgggactttcacaaagggcgacaggaagagtgaattaccgggccccagctctgccactgtgctgtgtggcctcgggcagatcactcaacctctctgtgcctggttccccgcctgtgaagtggggccagcaagcgggtgctgtggggttcaccctgatgtgtgcgtgactcagaagggcggctgcacctctaagttactgtcacagcagagacctcccctgggcgaggcaactggatccacagagagaacatgggctgccctccagaaagcacctcctgcccgcggggcacgcggaaaaggcccagcagtttcccttcccagggcgggagctacgcatccaggacccagctgcagacccacaagggcctgggctgcgggatccccaggccagtgacctccaccctcgcctaattgtcccagctgcgtctccttcacgcctagttagattttgttgtaaagagataaaaggctgttactttgtatcagcaaggcgt

SEQ ID NO: 23984 - DNA, 1067 bp, Artificial sequence
  DNA replication origin
cgtcacagccttgttcatctcccgtgcatcgaggcgtctcatggtgaaggtgccatgtgggcatggtgattttcacttggacaaaacggcgcaggggaaagtgaccaggtagggagaggaggatgacgtccctgaaactcagctgagccatcggcatgggcggaaggctttgtggccctgggaaggtcgatggcggaggagctgcaggggtggctgctgcatgtggagctggctgaagccagagatgagaaagctcctggggtctcgagagagtcgcgatgacaggatggcacccactcagtctacaagagaaacgtgtgcgttaatgcaaaccaccactaactcctgcgaccaggaggtgggcggcgaagactcaccggccccaaggaaggcgtgtcctgggtacccacctcgtactggccgagaagggtcatggaggaatcagaaacctctcggagggcagagccaggggcctcggaggatggcagaaagggaggtgaccttcaggtaggaactgaatctggactgagtgagggagcgtggaccagcaccagggtgggtgctcaggggccttcccgggggtttcaggtcctctgtggaccagcgactgccgccatctcccttctctctctccctgctgctggggccatcatgtccattccctgccacccactgtgcaccgagcatgagggaggcaatgaccaatctcttcagtctgtgagtctccggtgaagaggtgtctggggtcacccagacccgatatggctgtgatttggggtcgtctcacctggggagccatgacggggagtgaacacagtcgattagtccagaaggcagacgtggaagtcagtggcgccgcccactaatattttggcctccttttccagacgcatttaggattatgctttccctctctctccaagttaggcccggccatgtgacctgctttggccaatgaaattctagcctttaaacacgagttcatgatgcttcctgctttggggattgtggatgtgtgttgacacctgggtccctgtcccccagtgatgacaaagagcaaaggcacc

SEQ ID NO: 23985 - DNA, 1550 bp, Artificial sequence
  DNA replication origin
ttcctccatgacccttctcggccagtacgaggtgggtacccaggacacgccttccttggggccggtgagtcttcgccgcccacctcctggtcgcaggagttagtggtggtttgcattaacgcacacgtttctcttgtagactgagtgggtgccatcctgtcatcgcgactctctcgagaccccaggagctttctcatctctggcttcagccagctccacatgcagcagccacccctgcagctcctccgccatcgaccttcccagggccacaaagccttccgcccatgccgatggctcagctgagtttcagggacgtcatcctcctctccctacctggtcactttcccctgcgccgttttgtccaagtgaaaatcaccatgcccacatggcaccttcaccatgagacgcctcgatgcacgggagatgaacaaggctgtgacgccgtgccctgcttgagacttttgtcagtgcactttcttgatcacttggagtctacagtcagccggctcttccagctttctgggagtgtcatattttgaaatctccttgttcactttcacgcctgctggcaggatggacaattcctgtctgggtctggctcctcaaaagatctcactggcatgtctgccgacgtgcgattttccagcctttccctagagctgcggtttcgtcaggttcatggtccaacttccaagttgccgagtccagtctgaccgagtgttccacaccgagtgtgctccggcctctgccccgccttctctctgtcctccacgtgagcaggacacgtgctccaggtgccctgtggctgcggcagcacctcatttcttggagctggtttctgcgctgtcaggattgcttggttctgctgctctaacaaacagtccccagactcagtgccttcaatggcgaaggcgtatctctcactcaggcaactgctctcacacgtcctcaggggacctgctgtttgtcctcactcagggatgcaggtggaggaatgatctgtttgacacacctttctgcgaggactcagttggccagaggagatgtggcgaaacgcgctgggcgggggaggcctctgccggggtggaccggggcacctgctcacattcccgcagcaacgcaggctcaggctcacgcttggatttgccctccactcctgcggtttactccttgaacaaatgtttgctgagactccaccgtgtgtcagacactgctctaggccctgggggtgctgcaggggagagagaagacacaggagaaccctgcttttgtggagtgtgcgtcccagtggcagcgggggtaggttgacagctggaagggcccgatgctgatgaatcctgcagagacaaataagcaggagcggcagggacacgggaggaatctgaggctaagcagagagatcagggaggggctcactgagaagctgatgttggaaggcgtgagggagcagcatctcaggcagagggaacctcctgtgcaaacacagtgggaatgttcaggaaactgccccatgtggctcaaggccaggaagcaaggaaagagcaggcggt

SEQ ID NO: 23986 - DNA, 1407 bp, Artificial sequence
  DNA replication origin
accctgcttttgtggagtgtgcgtcccagtggcagcgggggtaggttgacagctggaagggcccgatgctgatgaatcctgcagagacaaataagcaggagcggcagggacacgggaggaatctgaggctaagcagagagatcagggaggggctcactgagaagctgatgttggaaggcgtgagggagcagcatctcaggcagagggaacctcctgtgcaaacacagtgggaatgttcaggaaactgccccatgtggctcaaggccaggaagcaaggaaagagcaggcggtggccagggggtgacgaacggggcggggcctggggcgggtggccggggggtgacgaacggagcagggcctggggcgggtggccggtgggggggtgatgaacggggcggggcctggggtgggtggcgggggggggtgacgaacggggcggggcctggggctggtggccggggggtgatgaatggttcaaggcctgttgggggggtgatgaacagggcaggcctggggagcaggcagtggccagggggtgacgaacagtgcagggcctggggtgggtggctgggaggtgacaaatggggcagggcctggggctgttgagacactaggagccatgagcagggaagtgctgtgagctgatctggtcttgacataatcatgctggctgggaggagagggcggggtgagcctgcggcatctactgactccagcatcacaaagggtcccacacttggcagctgaaaacagcacacacttatcagctcccattttccttagatcaaggatcaggtatggcttggctggatccgcaggctcagggtctcacaggctgcaatccggactcagctgggcaggggtctcatctcccatggggaagaaatggctccgagctcaggcatgtagttctgggcgggattcagttcttcagggcctcagctcctcactggcgtttagctggaagccgccctcagtctcttgccccatggcagctctcggcacagccactggtttcaccagaccgtgggagagggtgagagggatgagcaagatagaccagggtctttccgcgaccagatttggaagtgacaccccattgcttttgccattttctattcatttgagataaaccacaggtcccgcacatgctcaagggagggagcgcacaaggactgagcaccagcaggggcaccacgggccgtgtgaggctgccccatagagggcgagagcagcagctgctggctactgcaccagtccaggccggagacagcagtgtctcggaccaggtggccggggtggaggccgtgagaagccatcggatgctgggtacttgcagacaacaggatctgcttcaggctgggaggagaagagccgcgccttggccttcacctgaagggggctgcc

SEQ ID NO: 23987 - DNA, 930 bp, Artificial sequence
  DNA replication origin
tagctggaagccgccctcagtctcttgccccatggcagctctcggcacagccactggtttcaccagaccgtgggagagggtgagagggatgagcaagatagaccagggtctttccgcgaccagatttggaagtgacaccccattgcttttgccattttctattcatttgagataaaccacaggtcccgcacatgctcaagggagggagcgcacaaggactgagcaccagcaggggcaccacgggccgtgtgaggctgccccatagagggcgagagcagcagctgctggctactgcaccagtccaggccggagacagcagtgtctcggaccaggtggccggggtggaggccgtgagaagccatcggatgctgggtacttgcagacaacaggatctgcttcaggctgggaggagaagagccgcgccttggccttcacctgaagggggctgccgtcacctgagatggggcagccgtgacccatgacctgagatggggcagcccagctccactctagacagggtccctcccgtgccctgggaccttcctcccagtagaaggtgaggagagcgtggtgggaaacgcagaaggcttgtgagcagcgggcagggcagacagtcctcacggggagacaccccacgcccagctccagccacccacccggggcacagcggcctgcctgttgtcactaccaagctcgccaccacatgaaggggctgcccctgctgggaagccctgccagccccagaaccaccaaccctcccattaatccgctttaaacccacgacgaggtgggggcccgtaagcagcttttcaggtgagagacaatgtccccacgcagcgcgttgcccaggagaccgcagggctgagctgcaggctgaagtcggcccgctgtgtttacgcttccgtatgtgttcaccctgctccaccccag

SEQ ID NO: 23988 - DNA, 725 bp, Artificial sequence
  DNA replication origin
gccaaggcctcatggccgcctgctcaggatgggggagggcaccttccccttcttggccatctgcccagtcctctcggggttgggggctgtgctggagggggcgggcaaggacgtgcctacgctgtcatctggtggctgcctcccaggaactagggaattccaggttcctgtccagagtccacccgcaggctcctgacaccagtggctcccccaggcccagaggacgcaggctgctgaggggctgcagcccatcagggtccctgcctgagccccgctgtcaggcaggcatcccacaggagcaccctgggctctgctgccttcccgcggtttcctgttgtgggcagggccacaggggctgttggggaaattcaaggcctgggacctgggaacttccagcctggggagggagacgggcgagggccaggagcgggtttcaggaagtgaccagtgccctgggagagggagagtggccgcaggtggctgcttcccacaggccccatggaaaggacatctgagctgaggcctgaggatgggagaaccctcatgtgtgaaaatggggaagtgggcgggaggtggggaggtgggcaagtcggcaagtcacagggcgtggggtaggagcttgagcgtcaccgtcgggaagaggccgtgtggtcagggagggaggagggtggctgccgttggcagctgtcagatgggactcgcaggcaggtttcggacaggtttcc

SEQ ID NO: 23989 - DNA, 784 bp, Artificial sequence
  DNA replication origin
gctgctgggctgctgagggacctcagcattggctgcatttccaaaaccagcagctcagaggccctgcaggagacgctgccaagtggggccccgagagggactgggctgcagctgtttggagcctttcttccagtgcaccacctccgcatcttccctccacccccgcccctgccgtggggagccctgccgacggcgtttaactgactgtgtaaggctgggcctcttgccctcccactcctgtccagaacagtgaggacctgttccatccatcagaaaggcctccgcagaagccgcgagccgtgccttcgcgtgtgcacacctgagagctcacgcgtgtctgtgggtactcagggtgcgatgtgtacacagatctgaatgcagacgcacgtgcccatgagcacgcacgtccagagagacgcacgtctgcttatccacaaggtgcacgcgtgtctggatccgcacaggtgcgcgtctgctcgtggacacgcagaggcgggtggggctgtgcacgtatgcctgtctgcacaggaggctggaaacataaccgcatgtgacttgagggcctgtgtgtgatggtgtcggggtctgcggcgtgcctggtaggcatgtgtgtgtgtttgccaaggttacatgtgcctgtatgttcatgcttatcttggcgtgtctgcatgtttggtgtacagagtagatgtctgtgtgcatgtgtgcatatggtgggtgcagggaaagaatgtaagatcggggagctggaaaggacacgccctcgcctggccagccgaggatg

SEQ ID NO: 23990 - DNA, 970 bp, Artificial sequence
  DNA replication origin
ggtctccccatcaccctggtcaggtgctggagggacccctgagctgcccccgttgtcctggcctgggcagaggcagtggcaggcagacagccctgggcagggacacacctggaatcagaccaaggctgcggcacagcccagcaagcagggcgtcggcctgtggtttctgacttgagagtcactgggcgacagtatctccgaggccagagcagtccctggagatggaacgggcattctcccagggtgcccagagcccagggaaagacggggacggcagaaggaactgcaggtggcgcccacaggtgcgcagctgagaccccatcaccacatcccggggccgtcaggcatgagttgaccctgaggtgacgtcggcgccatgcctggggtgacatcggcaccatgcctggggtcaccagggccgtgctgagccaaagcgccctggcagctggctgcgaagctcgtgcacccacgggtgcagccacggggctggttctgacccaggccacgcccgcccactctgcagcctccgtcctcattggtacaacaggggcaacggggctcagtttgcgtgtcctgttccagaaagttctagagatggcctgtgccctgttgctgctgtcactgttgctgctgtttcatctacactgaagatctgctgtgagtgtagccgccttcatccgtgatctcagctggatcttccatcggggagctggacgtgctgcctcacctgcacttctgtgtgatggaggtggcttctgtccctaaacctcaggaagccacctctgccagctgccagcttttcttctggagcttcctcacctctctcagcctccacagaattgaggagagttacagccttggtctggatccggctgtggcttgaggagacgtcgtggctggtttgatcttctatccgaccgccaccacgttttccacattggcaacagccttttcgcttccttcccaatcg

SEQ ID NO: 23991 - DNA, 1332 bp, Artificial sequence
  DNA replication origin
aggaggggagagaggatggaggggagagaagaaggaagggagggaggagggaggggagagacgaaggaagggaggggagggaggaaggagggagagaggaaggaagggagggaggagggaggggagagaggacagaggaaaaaggaaggcagggaggagggagggagagagggagggaggaggaagggggcaagcgctcagtggtgaacggcagacgggtagtggctggccaggcctgcccaacacagggttgggttgttcctggggccggggacccaaggcttatgcaatcaggagccaggctttgtgggtgcaggagccggagagcagcccccagccacacacctcaggctcggtggacatctgggaggggtgcctgggccggtgcaggcgagcactgcgctgcccctgtggcccctgagccagggctgaggctgagcgggtgctgcctgcctgcctgccctctcagcctgggtctgggagatccacaaccacaatgggggttctctgaagctcaggctggaagagacgccacgtggaggaaagcggaggaaacagaattcccagagacggagctggagcctgaacaacctccaactgcagcctgggaatcaagggccaggtccctcctccagcgctgtgttgatcatgctggtgcctgaacaacctccaactgcagcctgggaatcaagggccaggtccctcctccagggctgcgttgatcatcacggaaagttgtgcagccaggggaggaggctatgtggccccacgccccaccgcacgctcccaccgccagcttctctctggagctctgcaaggatgggctatgatcacccgtgatactgatctgccgtgtttcgtgtttaaattgctgagctgcagcgtggcttcgtgggggctggcaggaagctgggacaccgcagatgtggaacaaagcaagaggccgctcgagggtcgtcgggaaaacagttagaaccaatgaatgcttgtcaccttcacactgcctcccaccacggcagggtccatggccacagccagcgtttgcgagaccccaggcctgcggacggtggggctcccggggtctgaagggttgggggccaagcactagcaagagtcaggagatttctggagactgaggttgaggtcatcgaggacacctctgtttgcccctctttcaagtaaatgaccccatccccccagcggagggcaggaacccagtcctcgggttggggctcaggatcacttccaaaggtatccctgtttcctgcacagccacaggccctagagtagagctgggagggctccagggtgggtgatggggcacgtgacacc

SEQ ID NO: 23992 - DNA, 793 bp, Artificial sequence
  DNA replication origin
tgttacctccagttcagactcaggaaccgcggcgtctcctcctaggtctgtggatagcggagatggacccagccttgcgcctgttgcagcctgtggagctcgagctcactgtggtttctcccccttctggctgagattgtgctgctgcactgcagcctgggtgacagagggagaccctgtcacaaaaagagaaaaaaaaaaggaaggaaggaacgcagttcctgtgatcacgccgttttctgcttttagaacgagggccctgcccgttggttttgcaccaggcctcatgcgatccacagccggccccggcgaggccacacgtgtgtgctgatctgtcgctgcctctcaccgtccctggaccagaaactgcctgagcagggcccctggctgtcaacttcactctgggttccccaacactgggccaggccccacgtgggggctcatgctcagcctgtcggtggcaaagacaagccggccggcagcggggccgtgttggcggcagggatggtggtagggccgggggtgctgtggggctggtctggggcgggcggtggtgttgtgtctggcggtgctgccactggggccagtgatggtgtgagtactgtggaccatggtggtgtggggtgagcaggtggcttgggggtgacgggcggcagtgggtgttggtttctaggatacggagctgcatgaggccctcttgcctgcagcttcatcacctccagcctcatggctgccttcagtcagcgttggagacccagtggtgttctcagtcaccaagggcaccagcaggaag

SEQ ID NO: 23993 - DNA, 1467 bp, Artificial sequence
  DNA replication origin
gacccctccccaccccacagcggttcagagacaaggcgggaggagtgacgggggcttctgtatgcctgcaaaacacccccatttgtgcccctttaaaagattctagtaaaaatataaatcacggaggacttctgtttctggccaaaatggagtgaaaaggactggattcgctctcccatttgaaaacacagaagaggtgcttccggacatcgggcaccaggttggaaaggacgagaatccctgagaaagacacagacaaggcggggctcacagtttcctagccccggcctccagcgttgctccaggctgcattcagggcggggcccggtggagcccagcagaccccctgggacaggggagacagagggctccgggaggcccagagggttaaagttcccaggacagggcatggaggggagcgttcagaagagccccaacccagcttgggaggaagccgccggaggccaggggcaacactgtcagagagcgtccggccctacaccagcagcccacagtgcccgtcccccagcctggaggcctcccgagggtggcggtggcatctcacaagggtcttgctccccaaagagggataattagtgtggacaaaatgggcagaacattcggccctgacggccactttaaaataagacctgagaggccaaaccttttccatgtaactgaaccgcacgccagaaaaaggtgcaggaatgtttccacataaacacaaacatccacacccaacaaaggcgatgttaacaatgtctgccatcgattcaaagattacattcggggaagcaggaaaacccacccgtaaggggaggaaaaatccactgcgaaatcctggtcagaactaacacaagtgttagaatcgccagacagacactgacagtcatcctgactgcattccctgtgttgaaagagctaagtagaaacatagaccatttaaaaatatgcaaaccaaacttctagaaatcaaggctacaatggatggggttcacagaccacacatggaggaaaaggtgaatgatcttaaagacagagccaacgatacagcaccgtataaaacaggaaacataatagagtaagttaaaagagcatcctgcgtgagttgcaggttccaggggcccggcacccccgtgagtgtaagagtaccccacgcacaaccgtaatacgtatgggggtccctgaagaagagccgaccatggagacactgaaaagatatgaaaaaatcatgactccaaaatttccaaatctgacgccaactgtgaactcacagatgatagaagctcaacaagcctcaaggacatgaaaggcgaagaaatgggacagaggcccatggaagccagagtgcccggccagccacagaaggtccctttccaggtcaccggaggaaaacacacgctctcatttctcctgaggagcaacgcgagtgaacccacgcaagggcagcgtcgtaagaagaaacct

SEQ ID NO: 23994 - DNA, 1123 bp, Artificial sequence
  DNA replication origin
tggcggagcctctgcgcctgctgttcattagcggattttggaggagccaggggagtgtagtcccttcaggaggcggcggagggaggtgggaggtgtttggggagctggcaggtgggctggggccgagctcacagccttccttgcagggggagtggggcctcgggatctgagagctcctccccgcggcccttccctcctttcttaagggcctagagtgggtggagggtggtgctggctggcagagtgggggtgggggcagcgaatgaggggcaagtgtttgcgtcctctcaggcctgggggctagtgccacatggaagtgaatgctctctgtcagcaggtcggggtaactggcataactgcgttgtaattacaggaaaattgctcattaataactgtgttagcgaggcagggcggaggcagatggccagggcagatgcagtggggctgggggtttcgggggtgggggtgctgggctgagcctggagatgggggcggagccctggggtggaggagaagatggtgtttggctgggcccgggccaggaagtggttttgcagaggtgtttctgctaaaacgttctccgtgcccggcagccaaggctgcagagtaggaactaggccttctgcttctgctcgcgcgcaaggctgccacactgagagaccggcgttgggcctgcacccggttcccccttctgcagaggctccgggcctgcctgctgtggggcagatggtgataaaggagaaatgagagaagcctcagaataccaaaccgatcccactaccaacgcgggggactggggtgggggcgagggaaacgcagccttggccggcggggggtgaaagtgatgtgggttggagagagaagagacccctccccaccccacagcggttcagagacaaggcgggaggagtgacgggggcttctgtatgcctgcaaaacacccccatttgtgcccctttaaaagattctagtaaaaatataaatcacggaggacttctgtttctggccaaaatggagtgaaaaggactggattcgctctcccatttgaaaacacagaagaggtgcttccggacatcgggcaccaggttggaaaggacgagaatccctgagaaagacacagaca

SEQ ID NO: 23995 - DNA, 972 bp, Artificial sequence
  DNA replication origin
gcggtatcctgtggtcttactgtggtgacgtcatctacaggagcggctggggcggtgacttgtggtcttacggcggtgacgtcatatacaggagcggctgggaagggtcctgtggtcttacgatggtgacgtcatctacaggcgcggctggggcggtgtcctgtggtcttacggcggtgacgtcatatacaggagcggctggggaggagtcctgtggcgtctggctgcgtgaatcctgagccggaattcctaatcctgctgttatttgtcggttttacaacgggactggtccccccaagcgaggagggaatctgttttggggaggggctgttatcctttttgttcccaacttaaactgtaaactaagttcctgtcaaagttagtttggcccacgctcaggaagcagccgggcgggttggggtggaggcaggtggagcgggtcaggttggcctctgccactgtcgtgattcctcactactaccgtcttagcaaaggcggtttcagaacagggagggctgaggccaggagcacgccggtggcggagcctctgcgcctgctgttcattagcggattttggaggagccaggggagtgtagtcccttcaggaggcggcggagggaggtgggaggtgtttggggagctggcaggtgggctggggccgagctcacagccttccttgcagggggagtggggcctcgggatctgagagctcctccccgcggcccttccctcctttcttaagggcctagagtgggtggagggtggtgctggctggcagagtgggggtgggggcagcgaatgaggggcaagtgtttgcgtcctctcaggcctgggggctagtgccacatggaagtgaatgctctctgtcagcaggtcggggtaactggcataactgcgttgtaattacaggaaaattgctcattaataactgtgttagcgaggcagggcggaggcagatggccagggcagatg

SEQ ID NO: 23996 - DNA, 1109 bp, Artificial sequence
  DNA replication origin
gccccatcaggatgttggcttgctctgtgggggacggcgcactgggttgaagagtgtccccgaaattcaccaggatgaactcagaacgtggcctcgtttggatgggattaatgaaggggaggtcagtgaggggtctgtccgcagggccgcagggtccaagcacacctgctcctgggagttgctttcaaagctgggccagaggaacaggtggcagttcaaaggtgccagagagtaaccaaggcagctgggacttgaggggtgacggccccaaggaggaggaggagacctcatttccctgaggcagcctcaggtttcctggcagtcagagctgggagggaagaacttgcatcaggctttctgttgatgcccttgaatgccgcagcctgggagtgagggggaccagaggagagcagcctcatgcagaccggcggcctccagttcccgccctcgtggagactggcggcctccagtggtcccggccctgatggggtcatggcagtcgacccctaaccctaactaccatcctaaagaaaagcaactcatctccagaggaagacaacatcacccaagcccactgtaaatgtgtattcacaacgccaagcattcaatcaaaaatatccaggcatgggggtgacaggaccaggtaataaggccagcagcagcagcagaggaaagtcaatagaaacagacgcagcagcgacgggagtttaaaacagcagcatcggtgtattcaagacaatatgtaagagggagaatttcatcagagaattggaaatcgtgacaaaagaatcatggacattttaagactgaaacacgccgtaggtggagttcaaacccccgagagggtttgacggcccctctggcctgttgttcctcttccctgagtatgtgtgtatctgtgtgcgtttctgcctccctcttcacggtcatcccctctctgtgtgtatctgtctctcctctcttatgacaccagtcattggatttagggcccaccccaatccaagatgacctcatcctcacttcacatcacacctgcagaggccacgttccgaggtttcagtggatgcgaatttggggaaacaccactggatcccgtgcaaatgccctcc

SEQ ID NO: 23997 - DNA, 1133 bp, Artificial sequence
  DNA replication origin
ctcccctccacctcagggcctgccacctgcaggctgagcccgggcaccgatgccagcagccctccagccccagccctaaggcccggctccccagggccagggaggttaattggagcagcaggcctggagccactgcagggctcctggctccaatcaacctccccgtgtgaggagtaacaaagccccaaaggcgttggccggtcacctcagccccacaaaccgcaggcactcacttcccggctcatgacggattctggaattcagttacatcagccgccctctggctcctgggttcctggagaggctggcccaggaaggtgatcaggagcccggctggcgagcctggcctgacagcagcctgggagacccttggccacggaggctgccccccaccccccgacaggacccagacctccctggagctgggaggcaccacagacatgtgggacacagccgtgaaccggagacgagccctggcttggggggttgcagtctgggcaggaggcacagtgggtggaggcactggcggtcagtgcccttcaaggctgtggagtgccggggagggcgtgagcaatgcctcacggggtgaccaggatgtctccgtgaggtgatggtagaatgaggaggtgcggggagatcctggcatattggggtgcagggaggggcacacaagccaaggagcagccaacgccaggcctgaggatggagggctgcagcgtgtgaggcccctccgggaggtgtggtggctggggggcagtgtgatggggccagcgggggcaaagtggcaaaggctgccccatcaggatgttggcttgctctgtgggggacggcgcactgggttgaagagtgtccccgaaattcaccaggatgaactcagaacgtggcctcgtttggatgggattaatgaaggggaggtcagtgaggggtctgtccgcagggccgcagggtccaagcacacctgctcctgggagttgctttcaaagctgggccagaggaacaggtggcagttcaaaggtgccagagagtaaccaaggcagctgggacttgaggggtgacggccccaaggaggaggaggagacctcatttccctgaggcagcctcaggtttcctggcagtcagagctgggagggaag

SEQ ID NO: 23998 - DNA, 1094 bp, Artificial sequence
  DNA replication origin
attccagaatccgtcatgagccgggaagtgagtgcctgcggtttgtggggctgaggtgaccggccaacgcctttggggctttgttactcctcacacggggaggttgattggagccaggagccctgcagtggctccaggcctgctgctccaattaacctccctggccctggggagccgggccttagggctggggctggagggctgctggcatcggtgcccgggctcagcctgcaggtggcaggccctgaggtggaggggagcatcccgcagccctgccgctccctctgggtgcttggcctgcaccctgccaaggaaactagctagttaaccatcccaagtgcatcccaggggctgggcagagcacagcaggcttggtcagcagtgatggggtggagagatgcctgctcggagccagggacacaagacagctgtggccgactctgccccccacccccagcccgggcctcctgggaaggccgtgtctgagttcatgggccagaagaagagagatggatggagtcaggcggaacagctcttggcgccaaggagacagccagtcttaggtcctgaggagggacagttaggggttagggttaggtgtgattggtggtgggggtgaggggcgtgggtgttgttaggattagggttaggggtagatgtgatgggtgttggcgggtgagcggggagagagttaggtttagggttagcgctaggattagggttggagtagatgtgatgggtgttgggggtgagggggcggggatgttaggattagggttggggtagatgttatgggtgtgggggttgagggaacgggggtgttaggtttagggttggagtagatgtgatgggtgttgggggtgagggggcagtggtgtcaggtttagggttagtgctgggattagggttggggtagatgtgatgagtgttggggtgtggtcgcaggaggatttggcttttattctgggggaggtgctgcactgggctgcacagggtaccagcaccggcctcctctgaccagatgctatttagacccctcccccaacccctgtgtccttggagcccctccctctgcccagcgtccctccctgagt

SEQ ID NO: 23999 - DNA, 1982 bp, Artificial sequence
  DNA replication origin
ctgaccagatgctatttagacccctcccccaacccctgtgtccttggagcccctccctctgcccagcgtccctccctgagtttgctcttctctgtggtaagagtgagggctgcctttggcttccaggcaggcagcttggagggtgggcagggtgaggaagtgggttctgcatctcccggggagtctgaggccagaggcagctctgagcagcccggccgtgcagggggcagctgggggaggctgcggccaccccagggctctcctccatgctaagccagcaactggaaggccaggggtagccggttgcagatggggtgggagccagggtgaccagccacccgtgttccccaagacgaagtgggccgtgggggtcccaggtaaacatgggggaatctgtcaccctctgagagcagagtccagtggggacgatgcaggtctgggcacgacctctgggaggggcagcaggtcagggggacccctggtttccaaggagcagacactgccaggggagaggaagctgttgaccctggtcagaggcccaggctgaggagagtggggtcagggccaccaggaacagccgggggcagtagctccaacctcacagcagcacctggacagacaccgactggggaccacagaaaggtctaggatccatgagttatgcctgccaacagcagaccctgtgtatgtgtgcatgtgaacgtgtgtgaacatgtatgtggatgtgtgtgcgtgtggacatatgtgtgtgcatgtggatgtgtgtgcgtgtgttgtgtctgcatgtgtgtgtgaacttgtgtgtgtgtgcatgtgtgtgcatgtgaacgtgtgtgtgaacatggatgtgtgcatgtgggcgtgtgtatgcaagtggatgcgtgtgcatgtggatgtgtgtgtgcatgtgtgtgcgtatgtgtgtggacgtgtgtgatgcgtgtggatatgtatgcatgtgcattgcgtcagtgcatttggacgtgtgtgtgaacttgtgtgtgtgtgcgtgtgtgtgcatgtgaacgtgtgtgtgtgaacatggatgtgtgcatgtggacgtgtgcgtgtggtgtgtctgcatgtgtgtgtggacttgtgtgtgtgtgcgtctgtgcatgtgaacgtgtgtgtgcatgtgaacatggatgtgtgcatgtgggcatgtgtatgcaagtggatgcatgtgcatgtggatgtgtgtgtgcatgtgtgtgcgtatgtgtgtgtggacgtgtgtgatgcatgtggatatgtatgcatgtgcattgcagcagtgcatttggacgtgtgtgtgtggatgtgtgtgcgcgtgtgtgcatgtgaacgtgtgtgtgaacatggatgtgtgcatgtggacgtgtgcgtgtggtgtctgcatgtgtgtgtggacgtgtgtgatgcgtgtggatatgtatgcatgtgcattgcatcagtgcatttggacgtgtgtgtgtggacgtgtgtgatgcgtgtggatatgtatgcatgtgcattgccgcagtgcatttggacgtgtgtgtgtggatgtgtgtgcgcttgtgtgcctgtgggcgcgtgtgtgtgaacacgggtgtgagtgggtgtgcacgaatctgtgtgtgtgtgtatgaacatggagctcagtgcggggtctgcttcccctccagtcagagctgccctggcatctggctttgaccttaggatggggcatgacctcgggaggccgtccactctcccttcgtgccgtggaagccctggggactcagggctgcgtgagaggaaccgtgcggcagccggcaacagctcccaatgtgtgagtgaggccaggtgagacctccgcccagctgagcagctgatgaccgacacagaggtgacccggggagctcagcagaggggcctagacagcaactccctgcacctgaggctcacagaccctcggcaagcacaggtgttcacagtctcacagcagaagtgaggttcagacgctggaccccagcgca

SEQ ID NO: 24000 - DNA, 1745 bp, Artificial sequence
  DNA replication origin
tgggcccagtgcaatcacaagggtcctcgaatggggaggaggaggcaggagacgaggccgggagacgctgcagggagtctctgcggccgccgaggctctgaagacggagggagggcctggcccggacgggccactcctggggctgacgaggcaggcggcgggtcctccccaggccccagcagaaccggccttgctcgccccacactgggcttccaacctccagagctgcgagatgataaatctgtgcggcgttgcggtcacttgctccggcagccacaggaagctctcacatggtgaggcgtcgggagagagggctccgttggcttccacgccccccagtccttgggctcgaacgggcgggggagtgggtgggtgggtgggtggacgggcgggcaggtgggtggatgggcgggtgagtggctgggtgggcgggcgggcaggtgagtggatggctgggtgggtgggtgggtgcgggagtggatgggtgggtgggtggacgggcgagtgagtgggtgggtgggtgagtggacgggcgggtgagtggctgggtggatgagtggattgggtggacaggtgggtggatgggcgggtgagtggattgggtggacaggtgggtggatgggcgggtgagcgggtgggtgggtgagtggacaggtgggtggacgggcaggtgagtgggtgggtgggtggacgggcgggtgagtgggtgggtggatgagtggacgggtgggtaggtagacaggtgggtggatgggcaggtgagcggatgggtgggtgagtggacgggtgggtaggtggacaggtgggtggacaggcaggtgagcgggtgggtgggtgagcgggtgggtgggtgagtggacgggtgggtaggtggacgggtgggtggacgggcaggtgagcgggtgggtgggtgagttgacgggtgggtaggtgaccaggtgggtggacgggcgggtgagcgggtgggtgggtgagtgggtgggtgggtgaatggacgggtgggtaggtggacaggtgggtggacgggtgggtgggtgatgggtgagcgagtgggcgggtgagtggatgggcgggtgatgtggctgggcgggcaggtgggtggacagatggctgtgaagcttcatatcttaagtagagagagatgcagatacgtattgaaatctcagccttatgaatacaggtatatatcgaatccggtttccgctccttcaaacattctgtgtgctgtcagtattgattgagcatttcccacacacacgtagcattccctgtgtgtctggcactcttctccacacttctttaactcatctggtctttgcagcatccacgagggaggtgctgctatcctccccctttacaggtgaggagactgaggccgagggatggagtgatctgttggggttagtggctgagtgcaaatatgaacgctgccagcagcacctcagccctgtgctggcctcaggccccggctgcactctgctgggtccaccccaccacagtgcaccctccatgccgtccgctcccagctcattgtccaggagtggtggtgcccgaaagctgagcctgggacaggcccctgggacctcaggggttggggggcaggaaactgagcatcacacttttggctttaacagcaagacactgcctctgcgtcccacctgcccgtgaggtggagaattccctacacaggatatgggttcagatgctgggtaggcaaagaatggccaatggccaccgcacctgtc

SEQ ID NO: 24001 - DNA, 1487 bp, Artificial sequence
  DNA replication origin
tatcccacagggagggaaagggaaggggaggggaagggagggaggaggggagggaagggaggaggggagggaaaggaagggaaagggagaaatatacacacatgcatatatacacacacacacacacaagcgttattccacagaagggaaaaggaaggggaggggaagggaggggagggaggaggggagggaaaggaagggaaggggagaaatacacacacatgcatacacacacacacacacacacacacacacacacacgagtgttattccacagggagggaaagggaaggggaggggaaagaaggggaggggagggaaggggaggggagggaaggggaggggagggaaggggaggggagggaaggggaggggagggaagggaagaaatacacacacatgcgtacacacacacgtatacacacacatgcgtacacacacgtatacacacacatgcgtacacacacgcgtatacacacacatgcgtacacacacatacaggagtgttattccacaggaggaaaagggaagggggggagagagagagagacagagagagagaaaggagagagagagaagggaagggaagggagggcagggcagggcagggcagggcaagcccgccatttgtgaggacacgatgaacctgaagggcatttgtggtaagtgagataagccaggcacagaaagacaaacagcacatggcctcactcgagtgacgtgtgaaaaagcggaactcacagaagcagagtgaacagtggctgtcagggctggaggggaccgggagttgagggtcacagggaacaaaggtgcagttatgagattagcgggttctaagatgtaatgaacgtggtgactacagctgataagaatgtgtcctttatttatttattttgagatagggcctccctctgtcgcccaggctggagtgcaccgcaacctccgcctcccaggctcaagtgattctccagcctcagcttcccaagtagctgggaccacaggtgtgcaccaccacgtccagataatttttttatatttgtagagacagggtctcactatgttgcccaggctgtgtgtcctctatttaaaatttagtgttctcaccacagaaagaagtaaccatgtaaggtgatgggtgtgttaattagcccaattgtgggactcatttcacaatgcctacgtgtgtcaggttgtgatgctgcataccttgagtgcacaccgtcctgaattgtcaactatacctcaataaagctggagagagagaaagaaaagaaaaggtatcctgggacggtgacgtgggtaacgggccccaggacactcacagagagagggaatgcaggtgcaaaggccccggggcagtgacaaacaggaagcaggaagaagggccagggtacggggatggggcctggccgacctccatgcccagagccttcctttcccgagtgggaagagccgggaggttcctgcggaacaaacgcctgggttga

SEQ ID NO: 24002 - DNA, 888 bp, Artificial sequence
  DNA replication origin
gtccagataatttttttatatttgtagagacagggtctcactatgttgcccaggctgtgtgtcctctatttaaaatttagtgttctcaccacagaaagaagtaaccatgtaaggtgatgggtgtgttaattagcccaattgtgggactcatttcacaatgcctacgtgtgtcaggttgtgatgctgcataccttgagtgcacaccgtcctgaattgtcaactatacctcaataaagctggagagagagaaagaaaagaaaaggtatcctgggacggtgacgtgggtaacgggccccaggacactcacagagagagggaatgcaggtgcaaaggccccggggcagtgacaaacaggaagcaggaagaagggccagggtacggggatggggcctggccgacctccatgcccagagccttcctttcccgagtgggaagagccgggaggttcctgcggaacaaacgcctgggttgaggtggcgcagagccctgagggggctcaggcgagggtccaggccaggtgggcaggcgggggcagcactctgcaagggcaggagccatcaggagagcatcggctgtccctggggaaggcccctcatggaaggagtgagccggtaacagggagttggggggcggatttgggggtcaagcacaggctcctgagcggccaggcggtgagcgtctgcactgccctgcagacctcaggcatcactggcatcttgaagcagaaatgacataatcaagttttgctttaggaagaaatatctctatccccaaagccagcaaacatatgaagagatgctcgaaatcatcagtcatcagagaaatgcaaattaaagccaccacgatgatcccgtcccaccatctagctgccaagatgagaggccggat

SEQ ID NO: 24003 - DNA, 2246 bp, Artificial sequence
  DNA replication origin
ctgatcccaggaggatgcgcccaggctagtccactggccccaaaaggacacacccaggctagcccactgatcccaagaggacacacccaggctagcccactgatcccaagaggacacacccaggctagcccactgatcctgggaggagcccaggctagcccactgaggaggcaggggagagagatgcaggtggggtgagaggacagttggggatgcatcttggtgatcatgattggggaggacctcctagtgcctcagctgtggtgggggaggggtgggggatgggagggcactttgaggctcccaacctgggaggagccaccacaatcagcccaaacgtcactgctccaccaggctgtgtgacagctgcagtgtggtcaggctgcaaattggcccttggttctgcagggacttggagaacctctgcggcgtgcagggggtggacgctgacccggggcacaggccccacccaagcaaaccgcagcagctgcagcagggctggggagggaagctcaggggtaggagccgatctgatctgtgcgttccagggcttcccctggaggaggcactcggggtgagggggccctgcagagaggcccagagctggggaggccagtggagccgggagccacctggagggaggaggaaggtgcggccgggtcagcgttgggaggggtgtagctcagcctaggggccggtggtaggaggggtgcagcccagcctgggggctggtggggaagctgcatcccatgaggggccggaagcactgagggcagctcagggctgggttgtttccaacaggccaggtgtcatggggtgaatgtgtctgaggaaggagagggcaggctggggagaactggacagtgatggaagctggggggactccagccgtcctggcctctgggggctcctgccagggcgcagggtgcggggacagcctggtctgcatagctgcgagtctgaggacctcttcaggaagacttgtggggtcagaggctgcacggtccgtgaggggggcggcagccgtgaggttcgggatcacaggacaagggccgtggggtgtccggcatgggcattggagaccgcgatggagtcaggttctgctggacatggaccagaagtccccagttcagttctgagcacgtgggtgaggggactcctggggggccgccaggggctccgaggagatgtgggctcgggagctgtgatggctgggctgtgtcccccacaaatccacatgctgaagtcccacccccacgacctcaggatgtgactgcataaaggggtctttaatgagggtgtcaaggtaaagcgaggttgttggggtggaccctgatccagtcccatgggtgacacaatacgaagaggcgatcagggaggaaaaggccccggagagcggctttgagagtgacgaccgcccgtgatgaccggcctgtgataactggctggtgataactggctcgtgatgaccggcccatgatgactggcccgtgataactggctcgtgatgaccacccgtgatgaccgcccgtgatgaccggcccgtgataactggctggtgataactggctcgtgatgaccacccgtgatgaccgcccgtgatgaccggccgtgataactggctggtgataactggctcgtgatgaccagcccgtgaaggacaaggaagaggtaaggatgcagacaggcacagggggccaccaggtgaacgcacagaggagacaccgactgccggccaaggagggaggcacaggatgaacctgccctgccggccccagggtggagacttccagcctccggggtgggcgacgggtgccccagcctccggggtgggcgacgggtgcgtgtggtttgagccgctggcctgtgtcgtttgttgtggtggcctgaagagacctgcacggtagctgagtgtggtggacacgccaaagccgcaggcaggagacctgcagtgaggctggcaggaccatgtggcggcaatggccaccccaagcctcaggggcttcctgcagggatggctgctcagatgccggggcctgcagtgctgatgagggtgtgcctgggccacatcgccatggaggacgggaggggcctgttcgtttctagagggacacgccggccacccggatgcagataccacgtcctcacggatgcgcacacgttgcttagacaccatcacgtgagccttttgagctttgaaggttgagaacatattcctaagaacacacatcagcgccatttagagc

SEQ ID NO: 24004 - DNA, 1677 bp, Artificial sequence
  DNA replication origin
cgcccctccccggcgccccgacctccgctgcagccggcggtgatccgctcggctccttcctgggagggcgctgggatgccgcggcccctccgtgggcacctgcgggcggcgctctccaagcgggaggcgggggcagcgccgccctcctctgcgggactggggtccccggccgcgggcggcttccgaggaggacgaggggcctccggtctcgcggaaccgaagtcctgccctcggcgagcgtggaagggacggggaaggggcggggaggaccgggggagggtcctcggccaggcggtgccccctccccgcgtccccgcggaccctcccaggcctcctaggatgcgggaggggtctgtccgcgtccccgccccgcgccacgtgcccccaagtcccacaagaaggcggctcccgccaccgagacccccgggaacgcgcccagcgaggcgggggctgctgccagacacggagcgcagtgtggagggcggcgcgggcaggaagcgcacggaggcggctgcggttgcgaggcaggcgcggggcgaacttcctcctccacccccaggacaggccgagctcggaggggcccgcctggtggggttttctgagcccaggggccccttgcgcgtgggcactggagtcattgattcatgcagcgcgtatttgccagatgcctcctgtgtccaggctctgttggtgaccccgcagcggctgagatagactaccctcttagaagtgggagagagaccctgaacacagggccaaatagaatatcagccaaggataatctgaagaaaatcgaacggggaggtgtcacagagagtgggcattgggtggtccagagggcctccccgaggagtgacgactccgagccccagcagtcatgggcaccctgtttcaggtcggggctacacccctgcacaggccctcggagaagaatggtggtttgctggagggcggaggggagggtgcccaagacagtggtgggaccctgccctcggttgcccttagtgggaacgggtcctcgcccactctgcggggtccactttaccctgcctctgggagagcctactggcggcctcttgtgcagggcaggaagggtgtggtccaggcaccactggctgtttgctgggctgaggcagttgggaaagtagctcactggggtggggggacttcctgttcacccagcctcctccagtccacccagcccgctctctggttccctgtcaaagcctccccagggtgggggcagggtccccctccccctcttcccattccgggttttgttaaaccgtggtttcaccctccagcatcctcccttttgatttttaaaagcctcattaggaagacagaaacggaccccgagtagtttctccatgcacgcctgctcccgaattcccctccctggacagaaggccaggaaatgtgggcgagggtcacccaggtggcatttgaggctcttgtttaaatacaggcctcttcccaagtagcctgggagtcctcacctgttccccgaggctcccagaggccatcccaccctaggctgggcccagaggtcagtcagactgcaaggggcatcctgtgggcaccccctcccccccagaagaattgcttgggaaggtctgaggttttggatttgaagtttctttctctttttctttttctttttttttttttgagaca

SEQ ID NO: 24005 - DNA, 1229 bp, Artificial sequence
  DNA replication origin
ccgcgcccggcatgcccggcccggcccgccgcccgccgccgcccagggcccgagcccgcgcggcgcacactcagcccggcggcgccgcgtagccgagggagcccgcctgctgcgagccaggcgcggggcgtcaaggtcaccggcccgacggggcgcacgcgcggccatggaggccaaggtccgcccgagccggcgctcgcgcgcgcagcgggaccgtggccggcgccgggaggccgcccgcgacgcccgcgcccagagtccgtcgtcgggcgacgagcccgagcccagccccggcaaggagaacgcgggcctccgcggcgcgcccccccgaggcgccgcccccgcgccccgcaccgcgcgtcccccgcgccgccgccgccgcgagtccagctcgcaggaggaggaggtcatcgacggcttcgccatcgccagcttcagcaccctggaggccctggaggtaggtggacgggtgcggcttcgcaggcgttgaggcgagaacggggcccggagttgacgcgtcgggcgatcccgggacccctgggcttgcgaccgcccgcgccgtgggcagccctgagggaagccccggccacttggtacccgttccagggaccctgggtgcccaccgctcgcccagaccgtcgcatctggaagacccagcagcgtcgggtgggtttggggacgttttaagttgcagaggcaaaaaaatctacgcttcgaaattgggggctgtctgacagcaccgtcggccttttatcagttgtgtttctgtggccagcatatcgctctgcctggttcaggacgtgctagggagcagtgctggatcttagggaggtggtgataaaatggatactccgcgggccatcccgttccctcctcccttcgagggctctgctgagaaggggagaaggagggttaatctcaagacccctcttggtgactgctgcctgctgcatggttaatagattggccaaaaatattgcttgtctggctgacggacagtatttgctgagcaaatactgctcctcttacatgaactcagctgagcagagaaggaaattaaatgctgtctgagagttggggcaggcgctgtctccccaggactggcatgggcaggaatgctagcaagttgccctgcaccagggccgagacccgcccagcgaggtgtgccccgtgcagcacttactttgggggaccctcatctgctggactttgactcccagaatcacccc

SEQ ID NO: 24006 - DNA, 1078 bp, Artificial sequence
  DNA replication origin
gctggcttgtgcccgcgggacactgcagtggtataaacaaccaaacacaggtgtagacttgccggggaggtgcagcctgcctgcaggagtcctgttacctcaccccagaccccacacacactgggaccaactctcggccccagccctggcccctggggcagacccccactcgcagccccttctgaccccaggcagaccaccctctccgcctgtctgaacaggcaccccttgccctgtgcccggggcaggtctctgtacctgttttgtgcccccggcaggtccctgccccttttctgtgccctggatgggacacacaggctgttctgtgcccggggcaggcccccgccccctttgtgtaccctgggtgggacacataggccgttctgtgcccggggcaggcccccagcatctgcacatttatatgtgctcctgtaggggaggaggagtccccgcttgtcctgggcctgtgtgtgctgtgaacacagcaggcactccctaaatggtggtggtggtggttgtgggctgaggagggccagggtctggcctggctcagggtgtgcctgcagccctggagacagcattaatgattaactgcccatagagatgggagccctgtggcagggctgaggacctgcagaggggcgtgctgggctgggtgtgctggggtgggtggggcggcgcggcagacctgagccagcccccgcttgactttctactctgtaaccaggggccgtggtatgtggggacaggaggcctgaggaagccccgctggcctctcccctgctcttgttctgaccgggaactctgggtgcttgggaacgtggctcttgctgtcccttttgtttcctgtgacaactctgtcccctggttgtactgaccagaggacactggaagccccctacccctggagcagtgctgtggccatacgtgcctggtcagtgctgctgttctctgcctggggtcctcccaagaagactggggtctgagaggtgtatccagggctgtgtcagaccccatcttcccacatagcaaaggccatccttatctggcctcaggccacagaacaggttgtgccggt

SEQ ID NO: 24007 - DNA, 819 bp, Artificial sequence
  DNA replication origin
atgggctggagtgctgggacccgagtattctgtccaggtgctgagaaagtgataaattcttatgccattttgacgttacagaaaaaaatgaaaagttcccaaccaaaatgcagcaaaaccagcggaagcaagactaccagactaactttactagaaacagggtggcaaaaatccgaaccgtcggcaaacaacccgaaatgagactccaccaacacggcccgccagggccacgtccggagttcacggacagcctgacagcaacacaggacaccgcagggcctgggaaggaagcgcggggcagcggcacaagctgggtgagcagggccacccctacccgatgctggaccagagacgcgccccgcgcaacacaggacaccgcagggcctgggaaggaagcgcggggcggcggcacaagctgggtgagcagggtcacccctacctgatgctggaccagagatgcgtcccgtgcaagacagagcgcccatcagaatgtggggaaacagggaaggagggagggacacagatacccacaaacagcaacaccaatcctcacgctctggacacactcacaaatccagcgcagccgcagggaagcagcaacgtcacagccatgtgcagacgccagcagggccaatgacaaccccctaagagtcccctagaaactgcctgtgctgaggagggaatccaacaaagtacccaggtagagatgtcaggtgggaagacaaacagcaacaaccagccagaaaacacagtgaaacgaggcttccagagtgacaaaaacacaagcccgggtaaatacgcaacacgggcccctcggca

SEQ ID NO: 24008 - DNA, 931 bp, Artificial sequence
  DNA replication origin
gacaggagagggcagggacggtagggggcggggacaggagggggcggggacaggcaggcatggggatagcgggctcgaggcctgaagcagggaggtgggggatggtgtaaggggcaggctggtgtgaggactgcagtggagctactgcttggccctggttttatcccagggttccagtccagccacgcctggagaaccgtctgataggggctgagcctggagggtgaaagaggctgcccagtcaccctctgaccagcccgactgggaggccactgtcacgtgccaggcctggaggtcagtcctgctgtgcactcggacgttcctccctccagctccgatttactggaagaccacggatcacacctggctgtggcccgcagtctcacccttcaaaccaaaggccttccgcaggattcctctgggtggccataagggccgggggtggagggctgaggtggcaccagggaagatggcccagggcggcagtttgccaggagggaggtgacaaagggctggagcctgccccggccaccagtggggtctgccaaggattctagaagggcccccagaaggacggaccacaccattgctggcaggtgggggaaagcaggcagctgccccctctgtccctaaggaaatgcggggctgccgcaggttggggcatgaggacgcatcaggatggtggtcaacacactgagtgggacgcatcactcagacccgggaggtcacctcttcaaaaccaacatatgtcccgtccatgcactctctgtacaaacagacttcctcacaataacgaaaagaataaaaggaaaggcaagtcatttggatttagatttagaggaagacaacagaaagaagccaggtgctggagacaccgggcaggtgaggctgtccccaaaggggggacgcagggcaggaccctgtgagcaga

SEQ ID NO: 24009 - DNA, 863 bp, Artificial sequence
  DNA replication origin
gcctctcggggctggctgacattcccaagcacccagtgagggcatgtggctgcactctaggggcaaggaggtagggtcagggctcctggggggtggggtgggaggcggggcactgtgaggcccagcttggccgttactgctgcactccaccccttgggagctatggaggctgtggcctggccctgtgcgggccgggaagagctacctgcagacaagtcggagacccagaccattggtgacggtgtcatggagaacagcagtgctgcctgggatggagtggtgccaggacgggtgtgaatgcagggggcacggcaggtggacaggagagggcggggacaggagagggtgagaacaggagggggcggggacaggagagggtgaggacaggagggggcggggacaggagggggcggggacaggagagggcagggacggtagggggcggggacaggagggggcggggacaggcaggcatggggatagcgggctcgaggcctgaagcagggaggtgggggatggtgtaaggggcaggctggtgtgaggactgcagtggagctactgcttggccctggttttatcccagggttccagtccagccacgcctggagaaccgtctgataggggctgagcctggagggtgaaagaggctgcccagtcaccctctgaccagcccgactgggaggccactgtcacgtgccaggcctggaggtcagtcctgctgtgcactcggacgttcctccctccagctccgatttactggaagaccacggatcacacctggctgtggcccgcagtctcacccttcaaaccaaaggccttccgcaggattcctctgggtggccataagggccgggggtggaggg

SEQ ID NO: 24010 - DNA, 2746 bp, Artificial sequence
  DNA replication origin
ccctgttcccagctgggccacgcacctgaccactgaccacagtcacgtgcctgcagccactgccgggaccaagtattcccttccccacgccgcacacgtgagcggatggcgctgcgtgtggacaggacagccctcggcaatgagcctggaccccctccttatagacactctggacacctgtagtcggcggagcctgatggacacggcagggaaacggggccggcctatcagcttggcgccccagcccggaacgcgcgccttgctgccccagacaggcacctctcctgctgtggccctgggcacgtcacggcccctccgtgacccagccggctcctgcctctgctaggccccagccctgtccacgtgtcctgcaccccaagcctgacaacgatgggcgcgctgccaggcaggcccgggggccacgtggcgtggtgtccaggtgctggcatggccctggggcggtgagcactgacccgccgcagagcttccggtcggggagggacctgctcacctgcttggagggctgcagtgggacctttctcgccccatcgcaggcgggttcgaggtcctgcccggggctgcctgcctccaggggccgcctgttctcactgggctccgcaggggggcaggtttccgactcccggggcttcttgatgagacgacgctcccacttctccttccgctcatgtggcttcagggccatatccttctgcagggagacagggaaacgccagttaattggcgggaccccagggccttgggcccaggacagcacccacctgagcagctcttgggaaggagcctccccacttgggaggggcacctcagagggaaaggaagatggctgctgtgggacgggggatgggaggggaaggacgatggcaggtgagatgctgctgcgggatgggggatgggagtttcccagggctcagccatcgaaggggccagacgagaaaaagcttagtccagcagggagtctccagtaagcttcacaggaggccagcccagggctgcccaggactgcccctccctgctgagaccagggctacctttcaagagcgagtgccctgcagtgggggccagggaccacaggagcctctccaggggacacccaggccccacaagaagtgctcccccaggtgacagcccacaggaagtgctcccccaggtgacaccatattccagagggcctgaggggttctggccagtgctcccagacgggtctgtggatttgggacagagatgcttccccgtgttcacctttgggctaccagaccctggggacacccccaggccccctgtaaacctgctggcctcccctggtcccctctcgtcccatctcgactccttcagagcaccttctagcctgcggacagccccaggacactccagcctccgccctgccggtggacatcgggcagccccaggttctggggtccccacctccacactcgataaaccactagtaagcaccttctgtatgctggctcagctcctggcaccagggctggtgcagacagatacggcgcgtcaagtttagggtccagaggagccagccggccagggagaagcgtccacgaaaggacagaatcctctcggggagggcacagctgtgaggaaaacagcagcagtgaagcccaggacagaacccatgtcagagctgctgccaagaaccctgggaagccactggggaggatccgcccccacggagggccacagtgtccccgaggaggacccgcccccgcatagagccatggtgtccctggggagaaggaccttggctgtccctccggtaagggcagacgacagagacaagagccatggtggtgccggccacgccctctccggctgggcgcccgccccatgacacaagcgccacccccaccagtctgagctggaggccctgagaggcccagcagcgtttccgggccccctgcccacgagggctgatcctgtcactccaactctttgctgtttccggctccaggaagactccttgcctccccgaggcccagctcccgccatatgctctctgcagagccaccactcaaggcccagagccctgctgtgagcggcctgctcctgcacaagcccgagagcccatggcctccagagttcctgctcgcccacccaggatctgtcagggctgcccatcccaggcagctgtggacgcaatctgctaacactgcagaaacggttcccagtgagctctgagggtctcagcctggatgaatcaaaggctgcagcccagagaacggctgtttgcagcgctggatcaaaagcaggaacaaatcaaggtgttacctttcacagtaactaggaaacctgcaagggcagcctgccacgcagggcaccactgtgctgggatttgtctttctactgggcaaagagtcagaggggacaggcagagggcagatctgaggaggcgggaccgggtggtaccctcggggcacagacgctcccccaggcccgctccacacctctccccattgccacagtgctcacagctggccagaaggacgcatgtgtcaagggcaaattgtttaaatttaccacattttctgtaaacctgctctagtgttactctgctttcaaaaaaatataaagatttctgccggcccctcctcccatccacagacccaccctccagctccctccccaccccggccacagtcacaccaagcacaaggcagtttcctgtcccgtctgacccccaccagaatgtccatctgtcctgccccctgct

SEQ ID NO: 24011 - DNA, 1699 bp, Artificial sequence
  DNA replication origin
cccggggatgggtgccccccaggcatgagccgagaggggggtctcgacccctgtcacactggcccacacagtagccttgcggtggggggatctggaggccggtgcccccatgctgagcacagtacaaacccccattccaggcctcagatgggtgggcaggaaggtcaggaacagatgctccaggtctcccctctgttcggtcagagtgcaatgaatcccgagccaagcccagcacaaaagccctttgtgggaataaatcacgtaagacacatgctcgtctgtttaaattacaaacgctgatgctgttataaaaaatagtggcacggcactttttattttctttaatcagaaaaataagccctgcgcttctgggatggaggccccaggtgagcaccggaggaaggggcccgggtgggtggggagcgagggggcccggaggccaaagcagatgctgcaccagaggctggtcaggacccgggagggcctgcgggggtggggtcctcatgagcaagtgcggggtgctggaggtcagcagctgcctggcctgggagccagggacacccatccccttcctgacacctgaggcagcccagctgggcaagaccaggcctgcaggaccagagcctcctgtcacgtggcgcaggggtccaggtggtcaacgctgctctctggaggaccactggttagagcctgcccagctcccctgaggtctggagacagtcaaagcccccccaaacaccccctcccttttgggcgagtggcgtgccttggactccagaagactcgagtggggctgccttgagaccaggtcctgagggggtggcaacacctgaccacaggtgggggccgtggaaggggcagggatgggcccaggggtagccttgtagtgtgaggtgtgcccgaccacatgtaggtcaacagccagacgggacgctgcaggggactgtggggaagccgggagaaggcgctgcccaccctgtggggtccccctcgcctggagaccctgcaggcaacccttcagtgcatgcccacgggggtggtggaggcagagtcctgagaggtgggggtgggagcctccgggtcccctgcaggtcctgacccaccagatgggcccatgtgccccctgtagcttgggggccctggaggtggacaccagcacctcctgactaccagggggagggcctggactgaaacccacaccttcaccattcgccactgggccactctgcaggaactgcagcaccccacagatccttcatgcccagcacgccactcactctcacaccctctcgcacacatgcacacacagcacgcacacaccaggctcacgcgctccgcacaggtggcacgccaggggcaagcgtgcacgtagactcagagatgcaaggacagtattggcaattcagaggcacagaaagacgctgaggggcccccagcaaggtccccgccctcaggggctgtgttcccctcccagggcacgcacaccacaggcagcaacgcgggtgggggcactgtgacgccagtggggggagagggagcatggcggggcggcaggcagacgcgggttcatctctcttcctggtgtggtgagcctcagcctgatcgtggcactgtaggggctcccgcctctggccgagcctcaatttccaacgacaaacagctcagccctgtctagacaaggcctcaggctagtccggca

SEQ ID NO: 24012 - DNA, 1505 bp, Artificial sequence
  DNA replication origin
gctccagaatgagggaaactctgttgtctgtctccaggaccctggtattagcaaagcatgccatcccctcctccaggctaacaccacgcagtatggctgtggccctgcttcttcctgaaaccgttcctgacactccattcactccacatgccaaccaggctaggtaaagagctcctccaggctcccacagtcccctaagtgtctctctaaaagagaagtggggttgcttgtttctgtgtctctcttcagtagactgtaagcatccagtgggcggggctgtcttttatccttgcctacctagcacaggcagacacagtaaacagggactcaggcaatgtttgggagagaccaagtgttccctgagtcagcacagtgtcagggagcagggtactgcccgcccagtgcgggacactccagtacgctgctccaccttcttctattgtgattcagatgggtggatggatggatgcatgggtggatggatggacaaacaggtagatgaatgggtgcatgggtggatagatggacagacaggtggatggatggacagacgggtgggtgggtggatggatagatgcatgggtggttggatggacagatgggtggatgatggatgcatgggtggatggatggacgggtagatgggtggatgcatgggtggatggatggacagacaggtagatgggtggatggatggatgtgtggatgtatgggtggatggatgcatggggtgaatgatggatgcctgagtggatggatggacagatgggtggatggaaggacagatgggtggatggatggatgcacgggtggatggacagatgggtagatgggtggatgcatggatagacgggtggatggatggacagatgggtggatggatggccagatgggtagatggatggatgcacaagtggatggatggatggatgcatgcatgcatggtggatggatggacagatgggtggatggacacatgggtggatggatggacagacgggtggatggatggatgagatacactacagacgggtggatgatggacgcatgggtggatggatggacagacaggtggatggatggatgagatacactacagatgagtggatgatgaatgcgtgggtggatggacagatgcatgggtggctggatggacagatgggtggatgatggatgcatgggtagatgcatgggtggatggatggacagacaggtggatgatggacagatgggtggatggatggatgagatacactacagatgatatgagggatgctggctgagttaaggcctaggaagtgcgttgccagcaggctcttggggacactagtgtgtgtgggcaagtgcaggtaagtgtctgcaaggccctgcctgtgcagtcctgtgtgccggaggaggggtgggaacagcagctatgctgtgtcagagtggactccagcaggtgtgtgccgccagctctggagttggggccactggactcctggctccaccacatttgccgcctg

SEQ ID NO: 24013 - DNA, 781 bp, Artificial sequence
  DNA replication origin
ctctgccccatctcccagggggcctgtccttggcctggcaggtctgaggaagccgtaggccccttctcagggttctccagggtctgcattagaacagcagcccaggcagcccccgactctcaccctcgctcccaggcctgcaggtgcagaggctggaggcatcgtggccggccagtctcagttcatgcccctgtaggatagtccttgtctgaatgtgatgccatgggatggggtgtgagagtcgccctggtgtgatccgattggtgtgagacttcaccagggctgcagagtatggctgtcagagttgtgcactgcaccgctccagggctgccattcccaccgtgccgtatgtagtgcgtgcatttgccctgaccattgcacattccccgggagggcaccttctgctcagtttgcacaagaggacacgggggctggtgtggggcctcttgggtgctccactttgggcggggcctgcgcaggacagtgcgtgcttagagccttggggcgggtctggggagcaggtggggcgatgagtccgtgtgcatggggtgaggtgtgtacagggccagtgtgactgctgtggtagagaggggtgtgggtgtgtgtatgcagccagcgtggcccctcagcctgccggcgcctgtgggtctgcgtgggtctctgtgtgcagccggcgcggcccctcagcctggggtggtgtgtgtgcctgcgggtctccgtgcaccctagagggtttcctggctgcatggcggggccactgctggctcccgtctctctggcc

SEQ ID NO: 24014 - DNA, 1635 bp, Artificial sequence
  DNA replication origin
cctgtgagggctactgtgcagctgagcaggtcactagcccaccaccctgcccccggctcccgcccagtaaggctcagactcctcggggctgcatccctgcccggccagggcctcctccagtgtgggtgcctgctactgtgcggcttgatggacctcatgggccgggggcatttgacctcaggggcctgggtgacatcccttaattcgcactggcaccgtctgccttgtgtgcaccctgtcagccacccagggaggcctgttgctgcaggaggtgcacagagcgggcctctggctgagccgaaggtcggcagggagccaggctcatggctgcagcgagccacaccagccagtcctgggacgggtttccccgggctggggcgtgctcctgacttggatgactcaaagtaaagaacctcaccaggggccctggcatgcgaggcctgggggcccagatgtgctggggcgtgtcactacaaggtgcagaattgttccagatccaagttggccagagagggagaccgctgggcttccacgtgagtctgggcgctggctgtgcaggggcgtccctgctgggcgctggccagcaggagctctggcctctcacttccctcagctttgtgcaggtttgaaattatttccaagtaaaaaaagtaaatacatgcagggctcggggtctggtccctgcatggtcacttaacctgtctgcgcctctgttttctcatccgtgaaatgtaaaggaaaatagtttctactcggggccaccgtgtgagcaaatgtgtgagtgtgtgcaaagcgcccgggccaggccctggcacgcatcggcgcccatgttggctggtgtcaggggtggtggcggtgggcgtggggcgtgggggtggggtgaagggagtatgggtgctcccttcagcaggtgatgaaactgaggcacggggaggccgagcagtggcccaagggcccatggccagggtcaggcaggtcccaccaccacctcgctgcttgctctggcatggagccgaccgaaggaggtgctgtgggcacagccaggggacagtgggtggcactgaggctcgacctggaggtcatagccctgtacagccagatggggtggtgcgaaccagccagggtgtgggtggaggccctgcctgtggtccctagcacccccaggatgccttcaaagtcagcggcttgtggaaggggcggctccaagcacgtggcggttctcgtgtcactgagccggtgggtcctgggtaggtcctccccgtcctggtagagtgtgttatcagtgtgtgcgctgtcagctgggatggcattcctggctgtgcagagctctgtcctgctgctgctcccgcccccagaccaggacccagcccaccacagctcgtcacatcccaaagcgcccagcggctgtcggggcgcctggggccggggtgctggggtgccgggagcaggcatgtagccctagccagggggccccgatgcggacgcggtgaggtgggggtttgcctgagacagtgtctctctctgtcccagatgaaggtcaccgtgtccaaagggggcgaccgggacagtgacgacgacagcgtcctcgaagccaccagctcccgggacccgctcagcgatgtgagtacccagctg

SEQ ID NO: 24015 - DNA, 3589 bp, Artificial sequence
  DNA replication origin
ggctgtgcagagctctgtcctgctgctgctcccgcccccagaccaggacccagcccaccacagctcgtcacatcccaaagcgcccagcggctgtcggggcgcctggggccggggtgctggggtgccgggagcaggcatgtagccctagccagggggccccgatgcggacgcggtgaggtgggggtttgcctgagacagtgtctctctctgtcccagatgaaggtcaccgtgtccaaagggggcgaccgggacagtgacgacgacagcgtcctcgaagccaccagctcccgggacccgctcagcgatgtgagtacccagctgcccgcgcccggaggctccgagtctgggccgcctgcccgctgcgccccgcacaagggcgtccagtccgagtctgggccgcctgcccactgtgccctgcacaagggcgtccagtccgagtctgggccccctgcccgctgcaccctgcacaagggcgtccaggaagccgctggttagggtccggtttcccaccaaggctttgtcttagcaatgagcattttgccttcgttaaagcgtgattttttactcattaggactttcccattaggagagatttaaatgaagaaatggtgagtgagctggcaggagcccagaggccaaaacgttaagccttggacgctgtgcctgcactgctggcctgtgggtggagggcaggcggacggccgccgagtcttgagatgggcactggcggggcagtggggaggtttctgctgactggaacttgaggcatctcattatcatttaaatgaaggcctcactgcccggctccccatcttgttgccacaagttaggaaaataggctgggaattacctgggactgccgctgccttggtttgtcctctaattgccagcccctggtgaaggaagtcacattctgggcacaatgcagcagctggggctgaggctcaaactcagggcaacgaaggccctcccacccctctggcagctgggagctggcgggtgggcccatcgggacccagggccttgggctctgtcccctgacatcctggggcccttcaggagctgacctgtccccggcaagggtctgtcttgggaaggggagggggtgtcctccctgactctgcagtgggggttgtggattgatttgggagagtggaggactgccgtcagctggccccaaagccctccttttcttcctctgccttgcccctcagagggggtgttggatctttgcatctgccccccactcctcagggggctctggaccctccctgtgagccccacttgcccagctcagtgacccaccccatccactacagcagccctgagcctgtttccccacccctcctgctgggggaggccctggtggtctgagtgtgtagctggtgtgatccatacctctgtcctgaagacctcacaacacccactcgagccagagggatccaagggtgtgggggacctcagcagcccctgcaggccagagggatccccaccagaggtgtggggggcccctagctgcccctgcagaccagagtgtgccctgatgtctgaggggcccccagctaccatcccccagccccaacccccaccacctgtcaggcccctgtggtgaaccctcctttgagggctccatctggtacctcctcccggaagccttccttgtctagccagggcaccctccccaaagtcctgcaaccatggacccctctggcgggtgggcacggagggaggtcagcagaagctggggccctgggctgacctcccccaggtcttcctgcctcctctgaggagcatttctggtggggccttccctcttggggacagggagctagccaagggcgtccctgtgggagcctcctcgggtttggatcccagagctgctgcaggggagcctcagactggctgggcccctcaggaggacgacagcccctggggaggaccccaccacgacgcctaactctgtcctcctccctgcggcctcagccctcgtggcccctgcctgagaggatgtctcgctggtggtcttgggtctgggcatctggacctgtccccatccgagttgagggctgcggggctgcggggcagggttgagggctgcggggctgcggggcagggttgagggctgcggggctgcggggcagggttgtgggctgcggggctgtggggcagggttgtgggctgcggggctgtggggcagggttgtgggctgcggggcagggttgagggctgtggggctgtggggcagggttgtgggctgcggggctgccgggcagggttgagggcttcgggtctgtggatctgcggggcagggctgtgagctgcagggctgcggggcagggctaagggctgagggctgcagggcagctgtcgggtgcatccctgggagtttgttccgagtggcagcctcactgactgtcccctcttccttcctgcagagctctgcgcatgcggtctcggggagaggctactctgtaagtctcccagcacccctcctccatctttgtccccctggggccttaggaccaggtccccacctcacctgtccgaggccccacaacttagctcaccccagtcccgtgcccgctttccctctggagccccagactggttctggcctcaaacaccatggggttggtggggggtggacaagctccagagtgaagatttgggggtgcgtcctgctcacggtttgccagggggcccccaggctaacatgctgccccagggggacgggctggccctgtggctgtggccttgccaggagcctcagagtagtcagcctgcacagaccccagctgcagctaagggtgccgggatccgcggggccaaggccgggctgcttcttggggtcctgttgggggcctgggacatttggtgtgggaggtgcccatggtgtgagcagccacctccaatgccctgaccggcacctgcctcaccccggacagaaaggcctgggcccaggctgggcaacacccagggagccagcaccccgtggcgggcagggggaaggagacctgtgtgcagccttcatgacgggtgtgtgcccagggggagcgggtgtgtttcccggggggagcgggtgtctgcctggggggagcgggtgtgtgtccgggggagcgggtgtgtttcagtgtgtgctgtgcctccccgtgggtgcacgggtgtgtttcagtgtgtgcctgagagaagcaggtgtgtttcagtgtgtgccgtgcctccctgtgggtgcacgggtgtgtttcagggtgtgcccgggggaagcaggtgtgtttcagtgtgtgccgtgcctccccgtgggtacacgggtgtgtttcagggtgtgccatgcctccccgtgggtgcacatggcacggtggagggctccttgcacatgtgcctggacttgctgtgggaatggcctgggaggctgggcgccgacccctgccccccggacctggaggcccagcaccatctccccggcccccatcaccactgtcccctgccctcctcatgactgtgtttcattttcccttaagtatcaggaggaacattaatgacaacataaaacccagagctccataaaagccatttctacagattgacggcctgc

SEQ ID NO: 24016 - DNA, 1019 bp, Artificial sequence
  DNA replication origin
gccgaggcacacaagtgacagatggcggggtggggggtggggctggggggtggggggagggggaaggggggaggggctggcctgctgcactggggatggggttcccctccaagccgcaggagcctgggaggaccctgagggctgcagagggtcctgtgcgtgtgcactgggccccagcacacacatacctgtttcagaccctggtgcatacagatgggccctgccatgtgcaggtgtgcacccggggccttggtccagtgtggccctcagttgcccatgctgtcagccctgcgggccccttgtgtccagtgtgggggggggggtgcaggtgagagcccggggtgcaggtgagagcccaggctccaggcagagagcagggaggtgcctggcctccttggaagtgctcttccccggcactgaggactggaggcaggtggaggccagaccaccccaggggtggaggaccaagaaccggtcccatgggacgcatgcccaggagcaggacaggacccaggagcaggacaggacccaggagcaggacaggacccaggagcaggcgaggggcccaggcgagggtctggattgtgctgaagcctgggacccactagtgggggtttgggacttccctgaggcctcagactcctgggttgctccctaggctgaggctgccatgtgtgtgtgggcgtgtgtgtgcatgtgcatgtgtgtatgtgtgtgtgcgtgcatgtgtgcatgtgcgtgtgggcaggtctgtgcctgtcctgtgtgcagctcgtgtccgtggtacccccgtgtggtgggctgcatggggctgtgcgttgccttgtagaacagtgtcacgggttcctctctgggcctctgtgtgtgcgtgtgtgtgtgtgtgtgcacccgcgtgtgtgtgacctgtgtttgtgtgtttgcatgctgtgcatgtggcattgtgttgtgcacatggcgttgcgtgttgtgcacttggcgttgtgtgttgtgcacgtggcgttgtgtgttgtgcacgtggc

SEQ ID NO: 24017 - DNA, 2928 bp, Artificial sequence
  DNA replication origin
gagtggctgtgggccccgtgccctgccctgtgggaccccatcttcccagatggcagtgccaaggggcccaccttcatttgggccgcacgctcgggcgggatatgcaatgcattccaatcaagcgattcggctgaaataagggacaggggctggcgtggcaccggcagcccccagggctgagagcagctggggagatttcgagttgagcttcacactgtgtgaaatgtctcacgattggaaaggtcactctcagcccctttcggccgcctcagtcctgtgaatccgcacccctccaccatgtgggcttagcccaggctccacttcccttcccctgcatgggcagaactgggctgcctgggggggcaccgccaggtgggagccacttgtgcactcaccccacgcagctgggcagctgtccccggggtgggggggtgcatgacctctggcggggctgctggcccctcgtgggcagggggttacgggtgtgggtgctggagctgcagggcccaaatctggcacttgagggtgaggcacctttggccatccacggtactggcatagaatggatgggtggggcccactgagtggatttgcacctgacgtgcctcagggtaggggtgtggtgtggggctgtgccccccaggctgacagtggatttgcacctgacgtgcctcggggtaggggtgtggtgggaggctgtgccccccaggctcacagtggatttgcacctgacatgcctcggggtagggatgtggtgggaggctgtgccccccaggctcacagtggatttgcacctgacgtgcctcggggtaggggtgtggtgtggggctctgccccccaggctcacagtggatttgcacctgacgtgccttggggtaggggtgtggtgggaggctgtacccccagtgtcacagcagtatcagcccatttcataggtgaggaagcagaggttcagagggaaataactttcttcagctgtatggctactcagcaagggcctggagctgagcccaggactcagagctggggatctggggatctggggatctgggcttgtggggccataggtgtggggctgggagtcctcctgccatcggggaggggcccccccgggtgaggcaggtgcagtgagcagtgggcttgccctggagcctggttccaggtgctgatgtgttgagcccagagcaggcgccacacacaccacaggtggctcggaagcccacgggatggctggcagtgacagtgtgtggtgggcgggtcagggggcgtgtggagtccactgagaggggatgtctggcctccattctggcagggttgggtgcaggagacagtgtggggctgggctctgctgctgcaccaggccagatggaggtgtgccagggaccagagtgggtaggtggcccgggccagggtgggtaggtggccgggaccagctgggcgcactctcagggtggcccacagggaatggggcccaaggccgaggggaggtggcacctggcgggagggacctggggtcaactgagagagggctgggggcaggactgggtgggtgggggcacggggctgggagactgggctgtgtgggcatggggctgaaggacacgactaggtggatgggggctggagggcaggactgggtgggtggggacacggggctggagggcaggactgggtgggtgggggcaggggctgggagactggactgggtgggcatggggctggagggcaggactgggtgggcatcgggctgaagggcaggactgggtgggcacggggctggagggcaggactgggtgggcacggggctggagggcaggactgggtgggcatcgggctggagggcaggactgggtgggcatcgggctggagggcaggactgggtgggcacggggctggagggcaggactgggtgggcacggggctggagggcaggactgggtgggcatcgggctggagggcaggactgggtgggcatcgggctggagggcaggactgggtgggtggggcacggggctgggagactgggctgtgtgggcatggggctgaaggacacgactaggtggatgggggctggagggcaggactgggtgggtggggacacggggctggagggcaggactgggtgggtgggggcacggggctgggagactggactgggtgggcatggggctggaaggcaggactgggtgggcatcgggctggacggcaggactaggtaggcatggggctggagggcaggactgggcgggcacggggctggagggcaggactgggtgggcatcgggctggagggcaggactgggtgggcatcgggctggagggcaggactgggtgggcacggggctggagggcaggactgggtgggcatgaggctggagggcaggactgggtgggcatcgggctggagggcaggactgggtgggtggggcatggggctgggagactggactgggtggacatggggctggagggcaggactgggtggacatggggctggagggcaggactgggtgggcatcgggctggagggcaggactgggtgggcatcgggctggagggccggggcatgggactgaggcttcctggcccacctgacggccagctcctccctctctgaccctgatcctagcatagacactctccgcccgctccccaggcctttcttctctggagactggaagagcaggcgcctggaaagagctgccatggagcccgaggggtgggggccgggcagtgtgtggggatgcggctcacactgggctcacttgcaagtcgccacagacccacctgctgccggatggggaaactgaggactgagtgcatgggagcccaccagggcacagaccgggggtgactgggtgggttctgaatcctgaatccaggctctggaatctgtggcagaagccctggaggccactctcaccctcc

SEQ ID NO: 24018 - DNA, 912 bp, Artificial sequence
  DNA replication origin
tctgactcgtgccgctgagtggtctggaacccctgtcgggtgcctccctctggccaccccacaccttaggcgtgagggccggggccctgggcaggaggaaggaacagagcccagtggttcaggggcagagcctgcccccacggccaatcaccggaatcacccggctgctactccccaccccaggcacccgggtttaagtggtctaggggccccgagcctcggtgcggcttaaaaccagactgactgagggcgtgggtggagacaacaagtactgagaagtggtcacgagggccattattggatggtgaggtccgacagactcagaggggccttgtaggctggcagaccatggtacagggagctgctgcctcctggctgccattggagctcaggacaagcagagaaggagagacttgatatcggggtctcctcgtggctacaggaaggctcacctttccagccttggccatcagggtcatagacaagcgtgagcactgccagggctaagagactctaaaactcccagaccaggacttcacctacgccagggtaaatggcatcttctcgttcttggctttgtgggcagacaatgatggtgatgatggtggtgaggatgagggtgaggacgatgacctgatggtaacgacagtgatggtggtgaagataactgatggtagtgctgttgaggatggtgacgtgaggacggcgatactgatgatcatggtggtggtaatgaggatggtgttggtggtggtggtgtgaggatggtgacgatggtgatggtgatggttgtgacaatggtgatagtgattatggcggtgatggcgatggtgaggatgatggtgatggtggcaatggcgaggatgatggtgaaaatggtggtgaggatgatggtgacggtgatgagggtga

SEQ ID NO: 24019 - DNA, 1785 bp, Artificial sequence
  DNA replication origin
agcatcctgggctgcttccagccacgatgtccctgcccaacacacctctcctcgcccgtccgcagatggacactgttggggacgcgtcctggtggtcacaaagcccataggagtggcctcacccgggaccccgcgtggctccgcgtggccctcagcccctgcccacagcttccgcgcccgaaccgtgacgggcctaacatttcagatgagtaaccttgtcctgatctcaggaatgaaatgaggtcacgggcacccaggaaatagccactcaccccctccccacctcctttcatttaaaagcagtttttggggaagacaccctccacaaccaagggttgctctgagagaggcaggaaggaggggatttcgggagcctggggcctactgggggctccctctcccctccccgcctgccttaccgagatgaggcaaagccacctgtggccccggaggccaggtccacgtggagtcggcgatgccggcggggaaggctgacagccgcccccataactgcacgccccccatgtccagcaaccaagggtaacgccagcctccgagacccaaacgatgtctgtgcaggctgtgcctgcagagatgcggcccctgcccgggcctgggctggaggccgaggggtccatgggagagcacaggctgaaagagggttctagaatggggtcaggtggagtctgcacactggggcgtttatttctgagacgcccaagcagccccaggggagatgaccagctctgggcggtgtcggggaggctgagtccagtccagggctctgcacacggagggtcccggcagggcgagtttggcattcctgcacacggagggtcccggcagggagagtttggcattcctgcacacagagggtcccggcagggcgagtttggcattccgtgccgttggggccgtgttggggcttctagggctgtggtggccacaggtcctgaggaggacagcaggggagggagaggggctgcggaggacggcaggggagcggagaggggctgccagcctttctccagggcagaacttcgggtcacgcccactctggggagagcagagaggcctggcggggcggggacggagaaggcagctccgccaaacactgagtccccgtgatggtggctccttctggctgcggcaaggtctgagcgccggcgcacaaagcgggggcacggtgctggcagagtgggtgggacctgcctgtggccccgtttgcttctgttggggggcagctcccggaggctgctcggggagagcagcagggtgggccaggaaaactgcaggggcctctccttgttggcccgtcagcctgtccgtctgtgtgaccttggggcatgctctgaggggtgtgtcccaggctgactcaagacagctaagccagaggtggggacgaccctggtgcgttctgggagccggcagtgcatcctgggctgcagcggagcgagagagaggagcccagagccggcagcaggagtttccgtttccctccgagtgcatgggatgctgcaccgtaggactcccccgtccagacgtctccgtttccccatggcatccagcccctgatgctcagaaattagcttcctgagtttgggagagttgggagggcaggaggcctcaggtccctcctggtcttctctgcccggcgctgggttcagggggtcaggaacttacgctgggcggagggtgtgcgtggagcccatccagacgcacacagaggcgtaggcaggtgtgggaagtcagccagcaccccactggccgtccccagccctcctc

SEQ ID NO: 24020 - DNA, 1387 bp, Artificial sequence
  DNA replication origin
acctggccagccaccccttggggactcaccctgggctctcctgccaatcaaggtggagactttgggacagccctcctccacgtgaacagactgaccgagacacctctccaccacctccctcacactgtgcccgcccagccgccccctcccctggcccttggcaggaggctccttggcagctgacgggaggctcgggcactgccagatggccccttcgcaagtcttcggtttgtgtctaaccactttttccttggaaaagtgtggggtgaagagcgatatgggactccataggcagccgccaggtggtggtggcctcgctcctcctgctgccgggggctgccacggccacctccagggatggctgtctggcccgtctgtggaagcccatcaggaagcacccccagtgccgggcctcagccaagagcaccggcctggaaggggcagggctgggggacagtggcatgaggtcagacatggcgtggggccgaccccgcaggcagcccaccatccacagcctccatgttctgtctgcaaaatggggccacagtggggcctgggcagaggagagaactgcccactgccccaagcacggtccccagagagctggaggccagccagtcctccacacccagcccctccccagcagacccttcttccagtggggcgctgtgcccgactgggtcctctctgaacctctgccttttcgtcactgaagttcgtaggttcttgttcttgggaactgtgagttcaggcactaccagcacgacagccagagggacggacggacggctggacaggctggaggcccctgccatgggcactcaccccgtgggacagacagaaggatggatggacggttggacaggctggaggcccctgccttggggcactcaccccgcaggatggacagaagggcggatggatggctggacaggctggaggcccctgctatggggcactcaccccacgggacagacaaaggatggatggacagctggacaggctggaggcccctgccatgggcactcaccccgcgggacagacagaaggacggatggacggctggacaggctggaggccccttccatggggcactcaccccgtgcgacagacagaaggacggatggacggctggacgggccggaggcccctgccgtggacactcaccccgcaggacagacagaaggacggatggacggctggacaggctggaggcccctgccgtggacactcaccccgcaggacagacagaaggacggatggacggctggacaggctggaggcccctgccgtgggcgctcaccccgcagttgctgggcctccgtggggtcctgggaaatttcaacagcagtccagtgtgcgggccgcgcctttgttctgtccagcc

SEQ ID NO: 24021 - DNA, 1439 bp, Artificial sequence
  DNA replication origin
ccgtggacactcaccccgcaggacagacagaaggacggatggacggctggacaggctggaggcccctgccgtgggcgctcaccccgcagttgctgggcctccgtggggtcctgggaaatttcaacagcagtccagtgtgcgggccgcgcctttgttctgtccagccagcggcccaggctgcgcctttgttgtatctggccgccggcaggccaggcaccttctgaggaagggttgctgcgtgtctgtggctcacggaggccttcctctgtgtgtgactcacaccccccacccaccccagcccacttctgggagcatcttcctgggggctttggaggcccatccattcttccctagggacaaaagtgcagggagcggcgtcccaggtgccaccgtctctggggaacgtgggccaggactccctttgctggacacagaccctgcccacaccgggtgaccgtggggtgacctcacagggtgtgtggggttccgaagccgccaccctccttcctgagcctgcactttgacctgggactgctgagcccagaagggccttgagagggctggctcagtggcacgtgggggccttgggtggttgggtccccgagacaggccatctcgctccttgtgtggcaggctgcggggccctgcttgcctgggtcccacgtggtagaactcggcgtttggtgggggcctgctggggacaggaagggacagcaccccaccctgagctggcactcatgcttcactggagccaggcggaggggccgagggcaccggcacaaggtgcagacgtgtcggtccctttgaggaccgagatcatgaccaccacggagcaagcgcccgggtcctcagatcaaaggcccaatagccagtgaggcttctctgcactggtcccagcagaagcggggcctggctgaggcagtggcatcagagactcggggcaatgggagtgcgaggggggtctcagcgtcccacagctgctgtaacaagtcgccgtaaacacagtcactcaaaacggcacgagctgatggcagcagtggagctggaggtccaggatgggtctcaccaggctgaagtcaaggtaccgacctcaggggaattggtgtcctgcctttcccagcctcagaggccccacttggctgtacctgggcagctgctccgctccacgggcctagcctcgctcacagggctccaagaacagagcctggatcgtcctgagggccccgtgatgtccccgtcacagcaaaggaagatttaggatgcactggaagcccagaagtccagagaaggggctcagagccatcggtcgccacggggcacctcgggggtcccacgaacactgcagcgggcgtcagaccctcaagcgtcggtaagggcctcaccgccttgggaggggtcagcagttaccggaggactctgggcagtggcagggagcagca

SEQ ID NO: 24022 - DNA, 1557 bp, Artificial sequence
  DNA replication origin
tgcccggcctgtgtaggccacagccacgctggcagtgtggctttgccatggaacgactctgaggttctgtctgtcgcagaggtgtgcactctctgagcaaggctgtggtgcataggtgaggggtaggccagacccccaaggcctgagggcagcatcagggggagcccggagaagcgtgtgttcaccatctccacccggaatgtcgggagaaaagcaaaagccagaaccacctatagggatgttcagatgctgctcagcatccctggaggctgccggcctggaaatgcaaatcctagcgaatttcagctcccagggaaagtgcagaaggcaccggaacttcgcggaaacacagaaacccagggaaagcctctgagaagagaggaccccaggggctgggggaagagcccagggatgctgtgcccgaggccctggatggcagcgcctcctggaaccccgaggccacaaccggccctgaaggctggtacacaggcacgagtgcctgcggggagaaaggtggggccgcctgcaggccccaagcccacacccatcctgaccctcagatggggccctcccaggttatccaggtggacctaaatccgaggactggcgtcattttgaggagaagagacacaaagacacacacacaggaggggccatgtgaggacggacaggggcagagataggagcaatgcaaccaccagccagggatgccggagtcagcaggagtgggaagaggcaggaaggatcctcctctggggcctctggagggagcatgaacccaacaccatgatgccagacttgtgggtgtggcccccacgctcacgctcgggtgaggcggctaccgtggcccccacgctcacgctcgggtggggcggctaccgtggaggccacgctcacgctcgggtggggcggctaccgtggaggccacgctcacgctccggtggcgcagctaccgtggaggccatgctcacgctcgggtggggcggctaccgtggaggccacgctcacgctcgggtggggcggctaccgtggaggccacgctcacgctcgggtggggcggctaccgtggaggccacgggacaccagggccccatgctgcctgccagagaaagccgtgacccccctccagagatacaccacagctacactcccacccgagggagagctgtgcccagcacaggtttaacgttcgtgaaatattaaatcacaggaaacacgtacctcccccaaatgcattgaattcagccatccccacagccgtccttggcaggcgctactccattttacaggcaaggaaaccagggctcagaaggtcgtctgcggtggaggtcgcccccagcagggggcaggatggcgccaaaggccacacaagcttgtcttcagaatgtctggtttccgatttcgagatatagttccaaccgcacattttttttgttttttggagacagagtctcactttgtcgcccaggctggagtgcaatggcgcgatctcagctcactgcagcctccacctccggggttcaggtgaccatccctcctcagcctcttgagtagctg

SEQ ID NO: 24023 - DNA, 1850 bp, Artificial sequence
  DNA replication origin
atccccagtcccctcttccaggccctgctctggggactcggcacagatggatccagtgcatcctcagccccctgagaagctgtgctgccatcagctccttctctgggtacagggcacgggaagcggctgcccagcaggcctcggtcccgccaagctgtgcccactctccctgctgactggagaccccagggggctggggagttgggggagcaggaagaaggaattgaggggcagcaactggccagctccaattgggctacggccagtctcaatgtggccggctcctctcttgggacctcaccactggaatcacaggagaagccatcttcctgccacaaacgaggcttccaaccccactttctaacctcagtcctgaggccgccttcagcactgaccatcctggaacaggcagagatcctggcctgggtcaacggggccgaaaacccagccccgagccccgagccccgccccacagccctgcgccccagtttgggggtgaaactagactcagaaccaggggcaggtctgtgttttgtttagaaaggagagtagctctgatatgaaagatgtagtgaggttagaagtctagaaggaagcggagtgggaatagattatccgggggaagaaaggcattcaccggagagcaggctgatattaagtatcaggcttccaggccaaatatacataatccagttagggacttgacggtggtgttcagaggcacatttatccagagcttacggttcagaaaccaacactgtaactgcgtctgccatcgttacgcagcgggtggccagggggtgccatcatgggaaggcatgggaaggtgctggaggccccaaccattaaccaggagtgcagagcacacagggtcctctcagccatgctgccccagccaccccaggacaccggatcgccctggaaaccaccctggggggcacccaacctccattcggccatggttagccgagcgctggggccaggagaccacaagactgcttcctcaaggctgccactccgcggggcacgtgtccttgaattgggccgtgtcctctcacgcctggagaggaacctcccacgggacgggggtttggggggcagcacaagggcctgaagaagagcgtcccacaggacaggggtgggtggaggggggtgcagcacgaaggcctggagaggagcgtcccacaggacaggggttggggtgcagcacgaaggcctgaagaagagcgtcccacaggacaggggttggaggcagcatgaaggcctggagaggagcgtcccacaggacaggggttggaggcagcatgaaggcctggagaggagcgtcccacaggaggggggtgggtggcgggggcagcaggaaggcctggagaggagcgtcccacaggacaggggtgggtggaggggggtgcagcacgaaggcctggagaggagcgtcccacaggacaggggttggggtgcagcacgaaggcctggagaggagcgtcccacaggacgaacactcagacgcacccagcaggcttgggccttgagtcgtggcgtggggggtagggcctgcgcctgctgttgcccggcctgtgtaggccacagccacgctggcagtgtggctttgccatggaacgactctgaggttctgtctgtcgcagaggtgtgcactctctgagcaaggctgtggtgcataggtgaggggtaggccagacccccaaggcctgagggcagcatcagggggagcccggagaagcgtgtgttcaccatctccacccggaatgtcgggagaaaagcaaaagccagaaccacctatagggatgttcagatgctgctcagcatccctggaggctgccggcctggaa

SEQ ID NO: 24024 - DNA, 1136 bp, Artificial sequence
  DNA replication origin
cgcgggagcagctcccacacgggttcgatggagccctctgcaagctggaccagcactttctgctcccaaaggcgccaacgttcgcaggatgcctccaacggtatagaaggaatcaccaaggtcggcctcagccagggagttccagccctcaggttctatttgaactacttaccaaatacacgtactccctttaccaacaagtcgcccccaaagccctgctgtttcctgccatgaaaacggcacgcgcttgcgtccatgcacacacactgtgtccacataggcacttccgggcgcactgcatgccgcaagccacagggccctgaagcctgtactctgaggacttggataagccaccactcgtctcaccgacgagaaaacagacgtgctgctggcgtggctgctctgtggcagagctgggctgggctgagccggcaggctggccgcagggctcatggctcagcagggacactcccctgggaaggtggtgggccactcctgagatggggatggggccgctccatttgaaatgcgtggagccctcagggataagtcagggttaaggtcaggcccagggtgctggcctgggcaaagccagccaggaggggccgtgaggacaaaggccgtgaaggggccctgtgacgaggtcatttctgtccatggggggtccagatggtgaggcccacagagagggaacgggcggggggaggggaggagagaagacagactcaggcagaaccctagctcagccccttcctgcgtgcctggccctgggaggatgccatccccagtcccctcttccaggccctgctctggggactcggcacagatggatccagtgcatcctcagccccctgagaagctgtgctgccatcagctccttctctgggtacagggcacgggaagcggctgcccagcaggcctcggtcccgccaagctgtgcccactctccctgctgactggagaccccagggggctggggagttgggggagcaggaagaaggaattgaggggcagcaactggccagctccaattgggctacggccagtctcaatgtggccggctcctctcttgggacctcaccactggaatcacaggagaagccatcttcctgccacaaacgaggcttccaacccca

SEQ ID NO: 24025 - DNA, 1937 bp, Artificial sequence
  DNA replication origin
gatctcgggcgtcccgctcttctgggggggcggtcgctccccctcccctgtccccccaaagtcccaattccctctctggagtccgcagcgcgcactcacctcgccggcgccccaggcagtcgcccctagtcccggggccggagccgggctgcatggacgcgggcgtggagcgcgagccccgggtggccctggcccgtccaggcgacccctctccccgcgtgccctgctcagccggagctcgggccggggacgcgcatgtccgccgcgccggctctgcgcgctctgggcggcgctcggtgcgctctgggctcccgggcggacgtcgggcgcggcgcgggccccgaggcggcgggcgcggagctgggcgcgcgggaggcgggagcgcgggcggggcgggggcggggcgcgggcagacccgactaatccagccccgaggcgccgatccacccgcgcccgccgccggcccggggtccgaacgcgctgcctccgatcacggccacccggggaaaggcgcgcagcgccggcctcactgagcgctgtgtgggcgctgctcctctggtcctcacaacaagaagttacggacacctgccaccccgctcccagaaggggaaactgagtcagaaagggcgacagccgggcgcggtggccggcgcctgaaacagcactttgggaggccgaggtgggcggatcacttgagcccaggagttcgagaccagcctggccaacataggaagaccccccacccccgcccgtctctacgaaataaaaaaattagccggaggtggcggcacgcgcctgtggccccagctactggggaggctgaggtgggaggatcaactgagcccgggaggtggaggctgcagtgagccgagattgcaccactgcacttcagcgtaggtgacagagcgagacaaggtctcaaaaaaaggaaaaaagagcgacctcattgccactgtggagagttgggacctgaaaggaggagcccttcccccacccgtccgctgcaagccccgccctccctgggcctcggtttctccctctgtgaaacgggggtgcaaagtcggagacagctccgagcagctgctgtagctgcaaacggctgtgcagcgcagcccccaagaccaccgccctgaaccccgtgattttacacttgaggtggccgggagggacaggaagcacctggctctcccttacggtggggcgctagaactcggatcgaggcccagccacggcttcctgcaaaggctgcttatgtgcgcctgaccgcaccagacgcctgggcgggacccttccatcccagcgcccactcaggtggaaaaccaggacaccaactgcgaactcaaacgcgatgagtaagggagggagggcgcagctctggacccggcagtcgggaagtgtttaaggacgggtcctctccaagctgctgcgtggctggcagcacacagggaggccggctctggtgcggccagggacagagggcttgggctccagtttcgggactgaggtgggagctgtggccacgtttctatttctgggcttggaaggcctggccccgggcagggcctatccatggcggagcccgcagccattcaaaccgcgggagcagctcccacacgggttcgatggagccctctgcaagctggaccagcactttctgctcccaaaggcgccaacgttcgcaggatgcctccaacggtatagaaggaatcaccaaggtcggcctcagccagggagttccagccctcaggttctatttgaactacttaccaaatacacgtactccctttaccaacaagtcgcccccaaagccctgctgtttcctgccatgaaaacggcacgcgcttgcgtccatgcacacacactgtgtccacataggcacttccgggcgcactgcatgccgcaagccacagggccctgaagcctgtactctgaggact

SEQ ID NO: 24026 - DNA, 1540 bp, Artificial sequence
  DNA replication origin
ttggggggacaggggagggggagcgaccgcccccccagaagagcgggacgcccgagatctccgggccttctgcccacaccgcctctcccggagccaagcgcggagaccgcgtcctcccgggggcgcacgtggcggcgggcgggcgggggtgcggcgcggccgagggtcccaggcccgggtcagggcacccggggtccgggggtggaggcggggccgagcgttgtgggtggcgcgcgcctttgtctgcgcccaggtgcggaatcggccacccgggttcccggcgccgcgctcacctgccccgagttggagttctttgtctggggcggggcgcggctggcccaggctgcgccgcgtgtctggccgaggctgctccgcgggtcgggtcctcgcagacaaagcgcgccctgacctccgcccgccgccgggattgtgcacctcgcgggggctgaggcttgcccgggcgcccccgctgcctcttcgcagggaccctgagcctgcggacccggagtcctcccacctgtaccctgggcttgagtgatcctctaccccacgcgggctaggaggcagaggcggctgctcgtgcctgggtcacgtccctgcagaccatggccgagaagttaagcgggtctggtggcccctggggctgccaccccatttgggtcatctggccactgccagaagccctgtcctagaagggaaagagctgagggaccgcgtggaggaacgagccccagaaggtgcagctgctgtgtgtggtctaggaaggggttggagcctgggccaggcccccagagggccggcccctgttctgctctcagccctcccggatgggcgtggctgcacctggccaggtgttcaggttctcactgtgaggtggaggccacctgcctccggggcctctgctagggccgaggacccctggagcacccattctcagcctccctgagcaaactcgtctgctaagtgtagggcccactgtggcgtgaccagaatgggtgctggatggccccagccgcgcggcccgtgcggaagaccctccccttccttgcagccctcttggcttcgctggtgtctggggcgcccccttgtggccctggggagcttgtgttcgaacctgggacgtggagcggaacccactagagtgtttgggtcccagtgaaggggagggcagcagagccccagaagggctccaacctgtggttaccctagagacgagggccggctttgggggctgtgctttggggtctgccttttgggttggccgtcaaactgcgggctaagctggcttctcctccctctgcccacctgggaggcctcagcacccgcctccttcctggcccctggagagtcctggcggcgtggtggggcctgctgccccaaccacagagggggcagttaacaggtgggccacctggcgaagaggccactcaaacccgggacgccagccaagaagagggcccgcgtgcgtgccagagacagtgcagcccctcagatgaggggtccagaagtcctcccaggaggatggtgcaggcccaggaga

SEQ ID NO: 24027 - DNA, 1344 bp, Artificial sequence
  DNA replication origin
cggaacccactagagtgtttgggtcccagtgaaggggagggcagcagagccccagaagggctccaacctgtggttaccctagagacgagggccggctttgggggctgtgctttggggtctgccttttgggttggccgtcaaactgcgggctaagctggcttctcctccctctgcccacctgggaggcctcagcacccgcctccttcctggcccctggagagtcctggcggcgtggtggggcctgctgccccaaccacagagggggcagttaacaggtgggccacctggcgaagaggccactcaaacccgggacgccagccaagaagagggcccgcgtgcgtgccagagacagtgcagcccctcagatgaggggtccagaagtcctcccaggaggatggtgcaggcccaggagagaccccaggggtctgtggcaggcctgggtgttcagtgcctggttcatggctggcatggagcagcactggatccccatccttgctgtgtgaggggcccagatttgggagcctggcccaagggagcacttggtgctggcactgctgggggatgggcacggccaaggaggtgccgaggcctttctggggagccgcagtgccccctggaggcccaaaggctggtctggactcctccctgcccacctgcacaggccccttcactattcctcctgtttctctcggagtccttcctgtttccgatgctgggatggtcactgcgtagcctgggtcaccggcagtggctggacggggcagggaggtggaggcggaccccatgggagccacacttctgggggatgatgttgaggcgagcagagaggagaaagccacatgccccaacctccaggccccctggcttcccaggggtgagaggttcctgtccttctttctttgtaacaagccaggattctaggggtggtggccgcaaggctgggggagggagagggtcatcggggccctggactggggctgggagggtccctttctggggtgccggggtctcctagcttccatccgacccggcccctgtgtggttgagctgggtctgagcagaaacaacctcctcagaaggatgtcctacgtcactgcctgggggttggtggctgggggcgctggacatagagttggtgtttcaccctgcagaagcctgggctgcaggaccccgaccccggggaccgcacagggtgagcagaccaagtagcgtcagtgccaggagctcagcatcccttcccaccagctgcaccgcagccctttaacacacgaacgtgcggggcccaaccgctgctcctttccgaggggcccaccttcctccagtgcaggggcccttccggcgcgt

SEQ ID NO: 24028 - DNA, 1737 bp, Artificial sequence
  DNA replication origin
gcgagactccgtctcaaaaaaaaaaaccttggagggcgagggcaggggccctcccagagccaggaggctcaccaggcgtagccagcccagaggggcactggtgctgggaagagacctgctgtccccatgccacagcacacgtttcctatcaccccaaccaaaatcccaagcagggatctggaacacgtggattactaggtcctcactgtgggagctgcttcccctgaatcccacgtggcccagccaagggagctgggctgctgttcagggcagaagggaggcggctcagggtccaccggggcctggtgtggggctggggtgaagccaggcccagctgcccagagggacacccgtgtccagcaactggcagacggatcaacagtgagcgcgtctgcctcagccacatatggaattgctgtcggcacgcgctctgtgagcctcagaaacatcacaggagccaaagccagaccacaaagagcacgcagccgtgtgaccgtgagcgcggccccagccacagcagccgaggggtgcagggggtgcacaggagctcaggggttcggggcgacgggggtgggtgtacagacgtaggtatgtgtcagctggaggggtgcagggggtgcacaggtgctcgggggttcaggggcgacgggagtgagtgtacagtcgtaggtatgtgtcagccggaggggtgcagggggtgcacacaagctcgggggttcaggggcgacgggggtgagtgtacagtcgtaggtatgtgtcagccggaggggtgcagggggtgcacaggagctcgggggttcaggggcgacgggggtgggtatacagtcgtaggtatgtgtcaaaaagcaaaccacacacttaaaatagctgcatttactgcaaaaataaataggtgaattttactgccagtaaatgacagcattggaaaccaacaaaaagatgtgacacgatgctgggacagacggacaggcaaacggacagacggaaggagatccaagagcgcaatgagaagccccagagttcccacagatgccgcgacggacagagatccacagaaccgaatgagaaaccccagacatggtgcaggctgtgggggccaggtgtggggtgcaggctgtggggaccagatgtggggtgcaggctgtgggggccaggcgtggggtacgggctggggggccagatgtgaggtgcaggctgtgggggccaggcatggggtacgggctggggggccagacgtgggggccagacatgggatgcaggctgtgggggccaggcgtggggtgcaggctgtgggggccaggcgtggggtgcaggctgtgggggccaggcgtggggtgcaggctgtgggggccaggcgtggggtgcaggctgtgggggccaggcgtggggtgcaggctgtgggggccaggcgtggggtgcaggctgtgggggccaggcgtggggtgcaggctgtgggggccaggcgtggggtgcaggctgtgggggccaggcgtggggtgcaggctgtgggggccaggtgtggggtgcaggctgtgggggccaggtgtggcgtaggtccttcagagcaagctcctgtttcacctcttatctgaaaataattccagacagatcgcaaacatagaagtgaaaaaccatcaacgtatcagagaagaccaggtgtggattccaccttcttgctggaatgggaagcccttcctagtcacgtcgcaagggcctgaaccacagagaagagcagca

SEQ ID NO: 24029 - DNA, 3266 bp, Artificial sequence
  DNA replication origin
taggagggaaatatctatttaaggtcattcttatgaagctcattcctggaaactgccgtgaagtcccccagagcatggggccctccgtccacccctccccatcagcggccacattctcgccacctgcttgtggcaggtggttgagcgagtttctctggaagagatggaggagtggggctgagcaatttctgcgattgaccctctgagagctcccccacatagcctgggacactcagctgcctctcagcaacactgggcaccaggcctagagcttggccggcctgggagcatagcgcagcattctgtggctgctgggagcttggccggccgcaggcacatagcgcggtgtcctgtgggctctgggcaccaggcctagagcttggccagtccccagcacataatgcagtgtcctgtgggtgctgggagctcggccgaccccaggcacatagcgcggtgtcctgtgggcgctgggcaccaggcctggagctcagccggcccgggagcatagcgaggtgccctgcagccttgcggacccacatgtccagcctggtcggtatcctggttctctcactttcgccagggcgcctgtgctgggcagtggttgggagcaggaggtgtgtcccggggctctccatcatccgcctctggcctgatgggtgggggcccagcagggcccacagctactggtgctggttctcctgggaggggtgcagatttgccaaatgccggcgctcccccagtccacgccagcagcagccttggttcccgatccccccacaaaccccgtcttcactcagaccccctctaggaagcctgctgctctgagcagagaggggcctgtgtgcccccagcgtgagcacatgtatacacatgcgtggagctcaggactaagcgtgttcacctcgtacacgggggcatccacaagggcacatcccgcctggccctgctggaaaaccacccagacttgtgtgtgggcattgggcgcaaggtccacgaggatgaggaccaccctgactgcccctgaccccccttctctctctccaggcatccgtgggctctgagaagctctttgcgccgggaaccgataaaggtaagtgggtcccctcggcccagctcctgggcctctgaagagacacaatgcgccctgcgtcttggcggcaggacatccccctgaagtcaggggagagatggtcttggcacctggggtgcagagctgggtgggaccagggtgctgggattgctgggaagcccccaggagcaggggagagtagacgaagccactgagccctaggcagggcctgggctccgctcgtagcagcggctcccagagtggaaccgttaggaatgtgtgctctcaggccctccccaggttcgtggggtcagatgctcggtactgaagggccacctgccacgagcaccacaatcacctgtggctgctgagttaaagagaaacgggactgagactcacttccctggctctgctgcctgcgcgcctctgtggtgcagtggaggggcctggattgctgttccaggccaggccttcgaaacctgtggctgtgagctatgggacagggtgtctacaggccagcaaccctctccagagggggtagccccggcgtcttaggggccttcgtaacctgtggctgtgagctgtggggcggggtgtccacgggccagcaaccctctccagaggggatagccccagcgtcttcttagggcctccctggcgctgggatcctgggattcccacaccaaggcctaggcgggcagcatctccggcagggccacggggtctcggctcctgcctccctgggtttccagctggaaccacccttttgctgggacggcttcatccggatgtgattggacaggacaggccctgccaatgccggcaaggatgggccctactgcccttcagcaggcatggccttcacctgccttcaagttggaagcctgttcacatcagagcatcacagcaaagcaggcgcagatggggtggtgtcagaaggggcgtgcatgggacgggccccggtaggagaggcagctggcttcgcagacggtgtcacgcggggctgctgaatactcagctcactgccgcggctgctgccgcatctggacggacaatgtcccagtgagggctggaggtgctagaagggcacaggaggccccgcacgtggggtctagtccaggtctgtgcggcccaagcctctttccatcctgatcacagctcttactatatgcaaggctggcttggagatgtgggagagaggaggagaggtcccgtggggctgacccagggagctgggaaagccggtggagatagtgcccgtgggctccctctctcctgtgtcctccgcgcagcctctctgtggtcgctgggtggtggctgctgtggaaggcctggccccaggtgaagagtgaagatggggctgcttcctgctgcctgttttcacctgggaggaactccttgaggccccagaagaccaggccccatggtcacatggggcagggacggccgcagctgtccccatgggccatggctcactgtcccaaggcctcaggaaggaagcagggtctgccggggacgtgaacaggaggcatgcggcacgtggaacgttgttttgtttctcctgcgaaactggccccctgaccgtggcagctcctgaccccaggcaacaggagctccaccacatggacgctgccctctcctgactcctggggacttgatctgagacctgcccgaaggggcctgaaaaggagggtttggggtgtgcgggggtggggggggcaggccccaggggctcagaggggcccacaggacctgcgggggacgtgcctaggtgggcagaagggtggccagggagcagggctgagggtggcgggtgacgggcagtcacagtagggggaagcctcccacccagtccctgcccaagtttccaggaagtggtcaagccttccaccagggggttccagaaagaaaaggtggttacagctgtgggcgctgctgttggggtggggcagacccatgccctgggctgagggcacatccaggggccgtgaacatgaggcctaggtacacaggccctagctcccgtgttcaaatccagctcccctcttgggccaagtccttgatgtatcttggttttgtctgttaaatgaggtcatagcagcccctgtccagggactgactcttgcagggcctgtcctgtccctgccagtgatgcgtcttcgggcaggtgggctacccacccccacccctggccacg

SEQ ID NO: 24030 - DNA, 1508 bp, Artificial sequence
  DNA replication origin
cctcaccccaccctctgcctgtaaccagaaggtggcaccaatgcagcaggggcgaggccaggcgaggggcagccccacccaccgccccgtggccaggacctgcgtgcacagcgacacgcgccgggcccctcggggacactcacactcacgctggaatgtcggaagtaggggctgtccagcttgggcgcatacttgtcaaactggaagggaaggagaggagggtgaggccccgcacacacgacaccgttgctgggccccgggccccgcccacctggccgggctgggcagtgacaggacggcgttgtgcttcctgaggctggcggcttcggccagccgtcccaggctcctctagagcgccagccccacggctctgaactcagtctcagaccagggcggccctgccattctaagggtccccttgcatggggtgggaactcggcccccccaggcagtctgtgtgcctggctgaggcctggggcgtgaagccctggctgctgggtcgcgctggggacacaccgggttactgacaaactggccagtttccgaataaaactcgagagagtggaggggactccagcccccagcaactccctcctcagaccgggcctccggggcggggaacacgggaggcaccctgagtcatggtccctgtgccctcaggcctgtctgggcctccagccctggcactggggatctagtgcaggcgtgagggtgtcccatgcacgtgggcacggggtgcctgcctaagtccaggaccactgccgagggtgggggcctcatggcacagcttggggtggggacaccagaaggcacgttggggaccggacagacgacagagaggtgccgccggccccccacctcctcctgggctggtgtgtgtgcgagcgtgtgtctgtgtgtgcctgctgcgtgtccccgccccacgcccgcccccgccccctgccagcacgcgggcctacgcaccggcgggggtgcggcgggcggcgtcgggggcagccctgcggggaagggggcgaatgtgtgttggtgctggtgtgtgtgttggtgcgtgtgctggtgtgtgtgctggtgctgatggaactccgcccgcagcagagcccccgggcccagggaggcgccaggccgctcggcgctctgcaccagaaaccgcgtgttcagctcttgcctgagcagctcgtgatctacaagagaaaaagagagagagacagagaggcacgttggccgcgggctcccggcggggcgaggcggatagtcacctggcactcccggggtcggcaggccaagccggggtggccgctcgccacgtgcgggcccaggggtgcaggtaagagaggagcctgtgaccaagtaccaatcagaattcccgaatgaggctggcaatacatgattggctggctgaatgagaccgccaggctggcatctagaggcaagagagaacacggtgagcccctccccgggagccagggtccagccacccgcaggccagcatcctggtcccatcccgggac

SEQ ID NO: 24031 - DNA, 2234 bp, Artificial sequence
  DNA replication origin
ctccccggcttctgcgacaggatggaagcgctcagtggggctggtgccacccccacccatgttttctgcagactcctgctgtcacgggccccccgaggccgccccgggggcaccagagtcctcccttgccacgggccttcccaacacgtgctcaccttgaccaccgcccggtacgggtcagacacctgtggagacaggaaaggagtgtgaggtccgggcccctcaggaggctgagtcctgggggtgcaggggacacagcccgtctgctgtggccaccagcccgcacagggcccggccggggcaggccatcccccggggtggggacgggcgcccactaacacctaccccaggcgctttctgcaggagtgtgtgaaccgcaccagcccggcgggccacctcaatggggcttgaagtctgaggggagaaagagacagcttgtgtgcgcctggggccgcccaggcaggaggacgcctcgggcttcctggttctggcgtgggcctgtgccctgctttgccttgccgtggggccccgcacgctgtctcccagggacagcctgccctccctcgcaggaccaccacacttttggcccgccagtttctgcaaaggtgggaagcaggtgctcttgccagggaaggtgggcgaccctccccggggagccacttgccaccagggccgagacagccccacccagagggggagtggtgcacacctagtctccagcccaggaggagctgctgtgagcctggatgggccaaggggagatggtcgtttcccaccaggggcgccagggaaaggggggtcccacagcaaagaccggccatcacaccacagccccctcctccccagactggctctaccgccccttccctctgggctaccaccctgcccagaagcagctgtgctcggggtgcggccgggacagattccttccctcccagactcagggcctcagcgtcctggctgtctgggctcagggcagtacccccgagtcccagtctgggggtccctgctcgacacctgcaggtgggccacatacatcccttctccattcctctgaattcctcaaccacggggtctgggggtccaagaccctctagtgcccaggggtgcctggtcctcggaagcactatctgcccgtccacgatgtgggcggtgccccaggggagcccaggggtgcgtgctgggcccttcagggcagctgtgggcaatgagtgggcgctgcaggatcctgggaggtcaagggcttggcagctaccggggatggtccaggccccgtcttcagaacctgaggcccacaggtgaggcggcttcaggactgagagctgtgtgcccctccgcagagggtggggttacagcacaaggccaggaacagtgaggagggtcacggggttccctctcccctggctgagatggcacacaacctcctgctacccaggtcccctgcgggtgtggacggccccgtaaggcccgggtcccccacggtgtggacggccccgtaagaacctcctcgcagtgtggatggccccgtaagaacctccttgcggtaaggacggcctgtgaggctgctgtccacaccagggcctcctgccaaggactggaatgttctccttcgaggcttccacagtgtgctctccacacggtcccaccacctcccagggctgctcccaggctggaccccctgtccctcccacggtggccacacacagaccgcagggccccccatcctggcaggggctgctcacgccagcacccagatgacgacaggtacaagggagggaaaggggggtggttgtgggcagagagtttggcgaggttgtcatgcactccccccaaaatccacccacccgctgtgcccgccccacctgccaggggcagcggtaccttaggctgaaaagcgccctgcagggacccgaaggggccggggtgtgggagcagggtgggcagtcccgggatggcaggagggaaggacgggaagaactgtaagagaaggagagcggatggagggggggcccaagtcctcaccccaccctctgcctgtaaccagaaggtggcaccaatgcagcaggggcgaggccaggcgaggggcagccccacccaccgccccgtggccaggacctgcgtgcacagcgacacgcgccgggcccctcggggacactcacactcacgctggaatgtcggaagtaggggctgtccagcttgggcgcatacttgtcaaactggaagggaaggagagg

SEQ ID NO: 24032 - DNA, 1460 bp, Artificial sequence
  DNA replication origin
gggagtgtcccagcctctgtgtggttcaagggtcagctgtatgtggatgctcatgcttcacgtgtgcgtacacgcgtggatgtggatgtgtaactgtgtgtaactgtgtatgtgtagaaaggcgtgcaccgtgcaggctgagacaccatctttggaaaggtctgtgcacacagctggccctcagccagcctctaggcacccagactgtgtccatcccacactgtgggttgaacttcgagcccactttcctcctgggggcctgtgccaggcagtggtgcctacagatcagcaccccagagtcttcgtgcctctgcgtgcctggaggatgacactcgggtgtggtcacgttgtgttgctgggggaggggtgacccgggggagggggtgactcgggggagtgggtgactgagggcagggaggccctcgctgctcccggcagatcccaccctgggccgtgctactgaggacagtacaggccaagtcctggaacccttcctaggaaaccaccgcagctgggcccgtcctgggaccccgggagcaaccatgcatgtgaggaaggggcactggggtgtgggcccagcctggcctcaggagcagcttcctactgttcagcgagaggccaaactcctcctgggaaagcgggggctgggagacagaaaggggcagcctcgcgtgggcctgggtccctgccattcctttgcctctggtggggccagaacagggagccccagggaggaggggtggccaggaccagccgcctcagagccgtgtggcgtgggctgaaggccccccaggacacactgggcaggacttggtggggaggagcagcagccccaggcccaggtccaccctggggaggctggtggggaggacaggagaggagaggtgaggagaagagaggtgaggggtggggtgaggtgagggagttgccaggctttgacctgaataagtggtgagcatcaagaagcaaaggctggtgctgcggtccagagagcgctctcactcctggcacaggaaggcaggctcagctgggcacgagcgggaggtttctgtgccccccacctggcccgactccagtctcacctgtgctggggaagaggggccgggccaggtcctgtgggtagtggaagcctgcaaacacgcccggggcagggggtctgccgaacaggtccagctttgcacccacctccagcttgtgggggtccagctgcatctcctgggaggatagaacgggtgagggccgcctgcccggggactggccctgaacacagggagcccaggcctgaggggccacagggactgggtgtgagccagtccagtaaggggagcaggtgggatggatttcaagggtgtattctctactcaggatgacggaaatgttacacatgatcagcaaaaaagctgaacgggagagctcacgtcctctgaactgtggtacgtacttggcacatggcagctggg

SEQ ID NO: 24033 - DNA, 2483 bp, Artificial sequence
  DNA replication origin
acccacagctcccgcacccccacaggctcccaaaacctacgcgtcctctccccgctgggcggcctggaaaccttggccgggagacggaagcgggatgagccgcctgcagcgacttcggctccccacgggcccctccctgttaggacaggggggcctcccggcagccgcacccccgaactcctccctcaaactccgtgggtcagggcgcggccacctggaggtctcccggatggcaggtgtgggtgcctgtggtggggtcttcaccctcctcatccttcctagccccagggcccaggcttcactccccaccgcagggaggagtcgccggggagcagagctttggcccccgtaccccggggctcagcagagctggacagactgtgagtgcgcagcagtggggcgaggagggtgagagggaatgggggagggggaacggggaaggggaacagggggagggggaacggtgagggagaggaaacggggagaagagggaacgggggagggggaaccggggatgacgggaggggggaaagaacggggtaggggtgtgtggtggggatacggaacaagagggccactcaccgttcctgctcctccttgccattgtccggctctcggtcatggttggtcagggctgacacccgctccgcgtccacggacttgggccacgggggcggagccgggaaggagggcggtgcccggtgcagtcggttccaggcctcatgggggctgggcaggccgtgcacggaggagccctccttgggggcaaagatgctgccaccgggagctgggggcagaggccggggagcatgaggttgggtctgtctgctccccagccactccccaggagaacccggtaggggttttagaagggtcccaggctgacactgagaagggggtgccccaaggaggcccagcccagagaggagggaggtcagccaggcatcggggttcctgcagaggacacaggcatgggggaggggcgcgggcatcgggggaggggggcacaggctgggtcactcacccagtgcatggctgcccaggcccccaaaggcgtggctgctcaggctgcccaggcccccaaaggtgctcggtctgctgaaagggtctgtgggggcaaccgcgggacccagaggtctgtgaggcgtgggctgcggctcccacctggcccagtgggggctgctgtagaggctttgggcctggtgggtactgcctgcatgacccaaggggctccctggggctcggggccaccttcccgcccacctaattcccccgccacaaggctgctgaggaaccagccaggctgcgtgggctgaattcagagacacccacctgtcagggggccagtgggcaggaagctgccaggatgggctgagggtccaaatgggttggaggcaggatgggcggcacctggggggggcagccaggtttgacagaagccaggagagagcaccagggcctcccatctgcagctctgttcacagggagcaccccaatttcctctgtgaaccttcacctcccattctctcgcatgccctgaggggtgaagcgtgtccagtcagagtaagaggtggaatctaccccacaattcggaggaggtttgacttggagccgcagtggcagccatcctgggaccccaaggggggcagggagggaggtgctgagtgcgatgcaaccctcggagcaaaggggctgcaacttgggcagagacaaagtccaagtaacatgcaccttgatcggaccactcctgaagcctttatctcagagctttcacctgggagctgatagatggtcctcacttcttaatgtggtgctgggcctcaggcctggatggacacggttctgtcttggaggctgcacatggcagccccttgtggcattcctgggcacaggcccagcccacagcaccacgtcaacatcagccctggccccccaacaacccttggagagcaaccgtgtggggcctgggcccgggccctgggaggggctgctgcaggggattcagtgctgttggtcaggggccgtcctccacatgggtccagagagcaggtttctggtaaagaccagcagggcgtcatctttaggttactccgactccctcccagccctaatcttagggacctcaaagatggggtgctcatgcctcccatgtaggacgcggcaagttgtattcagagcttctggtctccactgagctgtggcatgaaagctgatgccactcttctaaactagagaggaagacagcctgccccatgctacgaaaacacagcttgtcaaagcgtgtgcaggaggagatggagagtacactgcctcaaatgcccgcactgggagaggctgaggaattaatattctcaaccaccagatcaagctagacagggccagaaaagtgagcgacacacagggaaacacacagagaaggcagcgaggtcagagctgctcctttaaaaatactggtgaaattggccgggcgcagtggctcacgc

SEQ ID NO: 24034 - DNA, 996 bp, Artificial sequence
  DNA replication origin
agctccccgcgcaggcgctcggggctgtagccgtggggctcgcggtcgcggtaggggcgctccgggggctccaagagggcggcggagcccggggcgggggcggcagcggggaaggcgcgacgtggcagctccaggccgcggaaaggctcccacgcgaagcccggcgcgcccaggcgctcgcggcccaggccgagctgcaggggcgcggggtgcaggccgcccgccgggggctcggaggcctcgtcctccccgcgctcctccttgaccttcacgtctccaggggccgccttgctgtggggcggggatgcgcgcgcgggcatcttggcggcctcctccttggccggggagcggctctccttgacccgaggttcggcctcgcgctccgcgggggccccggaccggcccagctcgctctgggcccggagcaggaggccgctgacggggtggccagcgggggtggcgggcgaggcccggctcagcaggcgcgtcttctccaggaggtccctgggggcggcagggcggacccgtcactcccgagacctccgtcctgccgcgcggcgcagccccgggatgttcccgttgcttgtcggggcctccagtttctgggtggccggtgacccctcagcacccacagctcccgcacccccacaggctcccaaaacctacgcgtcctctccccgctgggcggcctggaaaccttggccgggagacggaagcgggatgagccgcctgcagcgacttcggctccccacgggcccctccctgttaggacaggggggcctcccggcagccgcacccccgaactcctccctcaaactccgtgggtcagggcgcggccacctggaggtctcccggatggcaggtgtgggtgcctgtggtggggtcttcaccctcctcatccttcctagccccagggcccaggcttcactccccaccgcagggaggagtcgccggggagcagagctttggcccccgtaccccggggctcagcagagc

SEQ ID NO: 24035 - DNA, 1032 bp, Artificial sequence
  DNA replication origin
ttcctgaccatcactcaaggcaggtgggcctggcgctcactgcactggagggtgggggctgccacctctgcacctggctcctgccctctgagctcctgttccttcgggcacagccagggcaaagccaatcccacaagtccctgcggggccagaactctctggcacaaaggcgggaactaagagcaccttctatgcagaaaaccccgtggatgtgagggaaggcggccagcggggtcgctgggggtgggacgacgggaggccgcgtgacacccccaagaacgaaggagcacaatggggcatccggcagagccaggagctggggtttccaccgggagaggtggcactgggggagggggctgggcagagccggggtggcagcagggctgggaagctgggacctgctgtgcttcacttccggggcgatggcaccggacagcgtggggccgccgaggcgcccagcatcccaaggtgctgcaggagggacgcacggctgcaggggtcagcctgggtgagcctggccccccaacaccacagaacacgcgaccacagtttcatccaaatcaaggctgtatttatcgtcactgattgacatgggaacagaatatttaaaacaaacagggtccaccgtggaaatgtggctgaaacacagaactgagcaaagcaagtggctcgacggctgaccccgaaggctgggaatcccggcagggacacagcccagacatcggggaacacaaaaggccgcaaggggggcagggcatgggggggctcatgtgggtgagggcaaaacccaaactgagaggaggccaggccaagggcctgggaggcgacgaccacaccgaggtgacgctgatgcctcaggcggaagaaaacacacagcagtgattttgtgtgtgtgtgtgtgtgtgtgtgtgtgtgtgtaaaatcagcctttagactcttgcacttctatacctccaccgatctggtctacagattccaagaacactgcaccatccacacaaacgtccacagcatcgcccttgcggctggagc

SEQ ID NO: 24036 - DNA, 1242 bp, Artificial sequence
  DNA replication origin
gaggagggggcgcgcggagaggaggaggggcgcgcggagaggagggggcgcgcggagaggaggcggggcgcgcggagaggaggggcgcgcggagaggaggaggggcgcgcggagaggaggaggggcgcgcggagaggagcaggggcgcgcggagaggaggggcgcgcggagaggaggggcgagcggagaggaggaggggcgcgcggagaggaggggcgcgcggagaggaggaggggcgcgcggagaggagcaggggcgcgcggagaggagcaggggcgcgcggagaggaggggcgagcggagaggaggggcgagcggagaggaggaggggcgcgcggagaggaggaggggcgggcggagaggaggggcgagcggagaggaggggcgagcggagaggaggaggggcgcgcggagaggaggggcgagcggagaggaggaggggcgcgcggagaggaggaggggcgcgcggagaggaggcggggcgcgcggagaggagcaggggcgcgcggagaggaggggcgagcggagaggaggaggggcgcgcggagaggaggggcgcgcggagaggaggcggggcgcgtagtgagcacttcagtagacggtgcgatggcaggatggacagagacagagaaggagagacacagagacagagacacagagagatacacagagagaaggagagacacagagacagagaaggagaggcagagacagagaaggagagacagtcagagaaggagagacagagacacacaaagacagagacagagatacacagagacagagatggagagacagagacagaagagacacagagacagagagacagagatacacagagacagaaggagagacagagacaaagagacacagagacagggacacacagagacaaggagagacacagggacacagagagaaggagagacacagagacagacacatggagacagagatacacagagacagaggagagacacagagacagagacacagagacacgcagagacagaggacagagacagagacacacaaagagacatagagacagagacacacaaagagacacagagacagagacatacaaggacagagacacaaagagagagacagagagagtggggggagaagaagagaaaaccccaaatttgtttttcaccaaatagaacaaggtagacaagcgttgaattgacaaaagaaatagcaatcagcattagaaatgtgacaggtaaaaaagccacag

SEQ ID NO: 24037 - DNA, 1117 bp, Artificial sequence
  DNA replication origin
agggccgggcgtggtggctcatgtctgtaatcccaacactttgggaggccgaggtgggcggatcacaaggtcaggagatggagaccatcctggctaacacagtgaaactccatctctactaaaaatacaaaaacaaaattagctgggcatggtggcgggcgcctgtagtcccagctactcaggaggttgaggtgggagaatggtgtgaacccgggaggcagaggttgcagtgagccgagatcacgccactgcactccagcctgggcgacagaaggagactccatctcaaaaaaaaaaaaaaaaaaaaagaacaagttgtgttggtttggttttccggttgttttttcttttttctttttctttctttctttctttcttttttttttttttttgagacagagtctcgctctgttgcccaggctggagtgcaatggcgcgatctcggctcactgcaacctctgcctcctgtgttcaagcgattctcctgcctcagcctcccgagtagctgggattacaggcgcgggccactacgcccggctaatttttgcattttttttcaagatgaagcccccccgcacagtgctctagtccccggaggggccatcagctccagggaacgtgtaaagtgctttgtggctttaataacgcggtgggggaaggcgggcgcttgctggtgtgtaatgtctgccgggggagatggaagtctgcaattgcaggaggaaactcggtctccgcacagctgcccagtggaggttcagccgtgaagggtcccgagagcccgcggtctgggcccaggtgaggaagcgactgtgagggctgtggccaccgtagggacgccaggaggccaggaccctcactcacagcagaggaggccagtcagcctggtcgctaggagggtttctcagagcaggaagagcaacagtgaggatgcaaacttggaaacctcctgcatcctgactgtgggtggagaggaggggcgcgcggagaggagcaggggcgcgcggagaggaggggcgagcggagaggaggggcgcgcggagaggaggggcgagcggagaggaggggcgagcggagaggaggggcgcgcggagaggagcaggggcgcgcggagaggagg

SEQ ID NO: 24038 - DNA, 1320 bp, Artificial sequence
  DNA replication origin
tgacgccgcctgtgtgagcctccgattctgtgtgtgacgccgcctgtgtgagcctccgattctgtgtgtgacgccgcctgtgtgagcctccgattctgtgtgtgacgccgcctgtgtgagcctccgattctgtgtgtgacgccgcctgtgtgagcctctgattctgtgtgtgacgccgcctgtgtgagcctccgattctgtgtgtgacgccgcctgtgtgagcctccgattctgtgtgtgatgctgcctatgtgagcttcctacactcatggtgtgctgggtctttcaccgtaagtatgttcagttttaggcctaacactgtgttcataatgtcatatgacttttcttaaggaagtcgccaaaactatgtaacttcaggctgtgcagagttgaccgcggccaggtgttcctgcccctgcaggtctctcctgggggagcctcagatggtccggcagtcacagagatggaaatcgtttatgattagttaggaaaggaagacccacgtgccagggaaggactcgggaacaagacaaaaacaaatacacagcagcccaggctgaaaacggcagggatggggtgggctggggatggaggcatttccgggaaggtcaggcagatggaatcagaaaccgaacgaggcagagagacccgcccccagccgcgcagagcccagtgctgccctggggagtcagcggccagaagagttctcggcctgaaccagggatcctccgaggggaggggaggtgaccatggaagctcagccagggcctggggaaggggaaggggcctgggcttgcgtcccggacgcgggtgcctatgtgctgaggactgcccgtgccagggacagggagggagcgatttttacctgcggtgaccacacgggcttgcacccctttatttgacgcccctgcagtgtggggaggtgacagcaaacccgatactctggccctggcctcgcctcccacagcatggcctgtgcctccccaggcttcccagaaggccgctctggcacggacccagccgacgccacctctctgtgacctccaggtttccttcagattttatgcttttattattcaaaacacagaaggggtgagacacggctgctcagtcggccaggagcctttattgatgtttaacaatcaggctacaccccagtgcctgggatttgttctcacagacacttcgcgccaccaggctggtcacagcctttcagttcccacagattttcagagccccagaaacagcagcacaaaccgtaagggaagcttccgctggaaccagcccccgcgcaacgcggtcctgcgtgaacatcccagg

SEQ ID NO: 24039 - DNA, 1630 bp, Artificial sequence
  DNA replication origin
agggcgcctggtggtacccgagggctgtgaacaaacctcacctctgggtgccacgaccctttcaccccagacgggagctctgggctccagcaaacacgcacttgcgcccccaccgcgtttgcgccgctggcgacctggccccctcccctggccccagggctcagcagagcgggagcctgcaccgagcacggcttgtcccatggatttcccgtcaggaaaagccacagcagaggtcgggggagggaggggagaagccaggaccctcctcctccagggctggtgaggctgttccctctccggcctgaagacgtccaaccccagctcccacgggggatggtcctgggtccccctccccgcggctccgcaggctctgacggtctctgaccgggcacccgtgccctgcggggcctggtgggctcagtgccagcccaggagccttctctgcggcccccaccttatgagatgggcggtgaagcgccggcctctcccagcaggggtgcctgggtgctcagagcccacctctcacagccgcggtcccggtccagttgctgtgtttctgtgcgacttccctgtggcggccaagggagggcctggaggctgagcccccgcccgggacttaccaggggcaggcactgggccaggatcccggtccggggaatgcagcggaaggggctgtactccctcagctggatgcagcactggctgtgacactcctgatggctgctgcagaagtcgccgttgggctggggaggcagccaggcagcagtcgtggagaggggctgtctccggctacccctgctccatctgccccgggtgcccgcagctcaccttgcgccagggcacacactgcaggaagacgctttggggcgtgcacaactcctgcgggctgttgttgcggacgcagcagctgctctggcactctgagtcgtgcgagcatctgtacccattgggctatgggacaggagacgcgtcatccctgcacccaccatccactccctggctcttcaggggcaggtaggagggggccacaggcagtctcgctcctccacccccgcccctgcacgcacctcaccttcctccagggcaggcactgcaggaagatggtcttaggggtgcagagcgtgtgtggggccaggctgttgatggtacagcagttgctctggcactcctcgtgtctcctgcatggctccccgatgccctgaaacaccactcaccagctcgctcacctgttcctgggcagggcctgcagactcagcactcaggaaaggcctgccctctccttggctcccctgtgtcaccatccttcaaacttgggtttcctgagaagtttctggaacaaacccagactgccgtggttctggcaggtcagtgctgggggcccggggctgagaaagggaatgtctactgtgagccacgtggaagagggtaaaccaaggcactgagggcaaggatgcagcagcagagcatgggtgaagctctcaggccagcccagtgcctggcattttacaggagaagaaacaggctcagggaaggcgagcaaggtgcccaggattgcacagctggcagaggtgagctgagagccaggcctcccccctgcaccacggcttgtagccaccccccacccacacac

SEQ ID NO: 24040 - DNA, 1124 bp, Artificial sequence
  DNA replication origin
gttgtgattcaatttagcttttatgtagttacattaaaaattatatttaagacgggcacagtggctcacacctctcattccagctactcgggaggctgagctgggaggatcacctgagcccaggaggttgagtctgcagtgagctgcgattgtgccactgcactccagcctgggcaacagagcaaggccccatctctaaacaaagttatattgaacaggcttgatatgattggaaacagggcttactaagtttgcctgatggctggggatgtggccattcatcttggaaagtgtcgacatgactcatttgtctggggtcagggctccaggatcaggtgccaggggcatctaagacctttgacctttgacttcctgtgagggaggtaaaatcagttcctgacctcgtggtgctcacgcagtggcaggaaagacaggagggagtgctgggagcggggaggctgcccagccgcaggcagaggtgtgggtgcggggactgatcacgtggggaggccactgccggggctcagctgcccctgcgatgggcatgggggaggtgggcatccatatttgggttcctctggctggtcttgagtgtggagtggggtcactgactgagtcctgatctgctgcggcttccccagcaggtggctataggttgtggccagagctccacctttcccctgagtgcacgcgagataacatgaggaatttaagaaaaataataatcaaggggattcaagagacagagacagagagagacagagacagagagagacagagacagagagagacagagacagggagacagaaagagacagagagagggagaggcagagaaagagagggagagacagagagagacagacggagagagggagagacagagagacagagacagagggagagacagagacagagaggcagagagagacagagacagaaagagacagagacagaaagagacagagagagggagacagagacagagagagggagaggcagagaaagagagggagagacagagagagacagagacggagagagggagagacagagagacagagacagagggagagacagagacagagaggcagagagagacagagacagaaagagacagagac

SEQ ID NO: 24041 - DNA, 945 bp, Artificial sequence
  DNA replication origin
cacgtatgggctgtttgctcgttatttatttgtgatcgaccatgtgccaggcgccgcggcaggctcagcgggggagcaggctgtgccccggtgtcaacttggtgctctcagtccagtgcaagagctgggcctggcaacgaacacactgcgcagagagtggtgggcgtcgttaggggcacgacggaggtgccagggggacaccgcacagcagggatgccagggagacttcacagagacacctgcaggacacctgctgccaggagcacggcccagtggggatgggagagcgaggagagcgccgggcacggggaggaggggcggggcacggcccagtgtctggggagctgaggcggggagggtggggaggccagggacagcccagggggacactagagagggcggggaggagccagccctggagctcgagtgccagtcatgctgcccttttgaacgccgagaccattaaaggggtctcgggtgagaaccacaggcaggatgtggaagctcctgggtgcatggtggcctctgtaatgggcagggcgaggctggaagcaagaggacccatgcgatagcatgcatgcccggccagaggggataggaggctcagtcaggcagggctgggggaacaaggagcagagagagaggcagggaagagcagtggggacgctgaggggtgtgaatgtggggagtcagggtgggaattcagagtgagccctggcctctggcaacaggaacgaggagcacatgtacccagtctaatgcagcacctgcactgtcgaccaccagaaaacaaagcacccaaaactcagttagcccaaaaacatgacttgtgatggtcgctgtgtctgtgggttgactgtgctcagctgggcggttctcacacgtgttgcttaggcatcagctttcaggtagtttgactgtgctcagctgggcggttctcacacg

SEQ ID NO: 24042 - DNA, 1083 bp, Artificial sequence
  DNA replication origin
ggagtacgtgaagccccccgaggtgcgggccgccccctgccccccgccccgccgtgcaccctaccctagtgggcggagggggcagcggctgccgcctggccgaccgccccctctttctgagcccaggggggcagcgtgttcagcatcatcaccagggtcgaggccacccactcccagacccagggaacctgccccgaggtgaggggatcccgcggcgctgggggaccccgcctcagctaggcgggccagctgtcccttgcggggtccctgactgggccgcctccaccctagagcataagggtccacaacgccacctgcctctccgacgccgactgcgtggctggggagctggacatgctgggaaacggtcggtgtgcgccagctggggctgggcgggtggggcagggctgcgtccccgctaatgcctcagtgacctctgcctcccaggcctgaggactgggcgctgtgtgccctattaccaggggccctccaagacctgcgaggtgttcggctggtgcccggtggaagatggggcctctgtcaggtgcacctgcgccccggcctggggcccagcctcccctctgatccttttcccctgaccagaggccaaacgggcggggcaggagtgacaagatctggggaggggtgggggccaatgccaggcgggggctttgcgggaagaggggactaaacaacccttctgtgcctcctcagccaatttctgggtacgatggccccaaatttcaccatcctcatcaagaacagcatccactaccccaaattccacttctccaagtaagagccgcggggtgtggtgacggcccagcctgagggctgccttctgggaatggggtatttggggtgcaggtctcgcctcctgccgcctcctcaggggcaacatcgccgaccgcacagacgggtacctgaagcgctgcacgttccacgaggcctccgacctctactgccccatcttcaagctgggctttatcgtggagaaggctggggagagcttcacagagctcgcacacaaggcagggcaagcgcaggcagggtggggccagggtgggctcccacctgcacaga

SEQ ID NO: 24043 - DNA, 2011 bp, Artificial sequence
  DNA replication origin
catgctgtcctcccacattttgagatgagccagctttggtttggagtctggggtggccctgtcagaagcaagtgcactgaggaggtggcctgggtcccagtgcactcccagcctgggcagacctgaccgtggcctggctggctgtggggaccatgtgtcatggggcaggcagacatgtgccctgcacacctcgcaggctgcttagaggggagatgacccagacagaggtcaccgtgcagcccagctccaggccgacagggcctgacatcccatattgacaggctcacgatgctcctccccaaggaacgaggccagaaggttctgctcacaggtttattggactgagtatgttgtgacttctaagggaagagtctgggcagattcaaggttacaacgcctgtggggtggggtggggtggggttcccagggcccaagaccgggagcagagcccctcagagctcagctggcttgggttccaggtggctgtgagaggtgatgggaagtgagcagccctgtagggaccagctggggaggaggtgtcaggggctgtatgccagggtggggcacaagcctggggccagagcgtgcccccagcccttgcacagggatcctgtggtgccccgtttcgtggagatgctccgctactgaggtgcccacgtccacgtgcaggtccctagctggggactctctggccccaccaggccgggtctgcagtccagtgagatggaaaggagctcagagttgagccaaacctttggggtctgtgggtgtggaggcttgggcaggctcggaggcaggagtgtccaccatctgctcagaaggggcagagatggggcaaggccgcaggggcgggaaggctgggccacactctgccccttgttggccctcctggcctgatggagggctggggtgctggtcctcggagcggtggccgggttcgggaggggcctggcccaatacacgggcaagggtcacaggccagctacctgaggggtggctcggcgtacacaccttgtcaaatttcttatggctgtagaccttgtttttgttcatgaatgttagcaagatccagtcgcacaggaaggagccctggggccagcagagaccggtgtgtaagggcctggtggaccccccgcacccgctgggaccccagagagggttccttaccaccccgacggaagtcagagctgtggccagattaataatggtgggaatcaggctgaacttcccggcctggggagaatgggggtcgtggtcagaatgtctgacggcgtctgatggggcttaagggaggggtggggcgtgaggagctcagacccaggctagcagggctggccacccacccccagcaggtgcaggcacctgtccatgcacaatgacgtcaatgcggatcccgtaggccttgatgagcgtgcgggtggtggtgccattgatcttgtagtatttggcaaacctgcaatgggaacgccagtgcccactcgtcctctgcactccagggctgccccacaggcattgggcctctcgggaccccaccacagctatgccagtgtggacagcggtgtcccaagtacagcacctgaagttgtagcctgacgaggcaggcacgtgcttggggtcaagcctccggaaggagtacttggggttgcactccgatgcaggcaggtccaggtcacagtcccagttgataatgaccccgatgacaccaccctgccaagaaggagccagagaagggggtcaggagggcacacgagaggcccctcgagagcccgggtcagtcccaggccagggaagggggtcacaagggcacacgagaggcccctcgagagcccgggtcagtcccaggctgcatgtgaggtgtgcactgaggggcccatggggcagctcaggggtactggtgggcgtccagtgtctgaggcacaaggggtgccagcagccagccccatggccagtgtcaataattcagcaagcgccacaccggatgggttgcgctgatcgcatttcttttcctctg

SEQ ID NO: 24044 - DNA, 1353 bp, Artificial sequence
  DNA replication origin
gatgatgtggtctgaatgaactttcaaattcagtgttaagtaagtggagggtacagatagatacaaggggaaataaaggaaagttgagaacaaggtcgatttcactgaagcagcgtcttcaatgcttcctctgcagcatccattcaaaggagaccttccattctctgacaatttctttctctcgatgctgggaatttcttctctggatggatccatctaactatggcggaatcaaaggaaaagtttcatctcgtattcactgtggactggtaagcgagctgcagtgtggcacccgagccagctttgggggtcgcgttcattcctgcagcaagtgctgagtgctcagggccccggcgggcctggccgtgagcagcagacactgcacccgcatcctgccctcatgaacacggggagggaccatgcgcagacaagcacgtcagtgtggagtgtggcgtcagccctggtgatggcaaggcttgccgtgggcaacagggaggtggaggcccatgaggtggtgacagggaatccgagagctgatgaagtgcaccatagttgtgcgagcataaggcgcctccagcggatggacaccagggaggcaaagcacaagtcagtggagcagtggttgcagatgcaggcagagagctgacagagccaggcaacttgggcatggcagggcagggcctcggctttcgtggggatgggagcttctgtgtgggtgatgttggagctttcttggccccatgtggataacccaccattggagggcacaggcaggtaaagccggttagtgcctgtgtcagggagatgctgggcagcgaggttggtgagaagggcctgggtgggctttgaagtggagccaaggggccagcggatcggatgtgtgtaaatgcccaggtgcgggccaggctgtgggtgagtggaggtggctgtcgggagcagtctggggaaggggtcacgtctggctggggctcatggtgtttgcaaggttgagacgtgggtggtcagctggtgcaggagtggccagagagtggctgggtgggttgagaggaggcctgtgtcctccacaggggccctcatagtggactgagaggaagctgtgggtaccagagccaggggctcagatgtcagagggaaagccctttgtaaggacgcagacgcttctgggagctggcaggatgaagccaagactgcccaggacacctggatgggagcgattctggttggagttgggggataaaccctgattgaagggattcagaacaaagtgggagggtagaaactcaggcagtgtagaccgctctgaggaggggatcagcgtgtggtcagggcaggtggcagtgggtgtcggtgtct

SEQ ID NO: 24045 - DNA, 933 bp, Artificial sequence
  DNA replication origin
ctagtcagagaaacggaaagagagcccctgggggagccagagtgtgtgtgtggggtcctggggggctctgggagagctggagaggggcaccctagcttcgtgaatggggtcctggaggggtctgggagagctggagagggggcaccctagctccctgtgtggggtcctgggggggtctgggagagctggagaggggcaccctagctccctgtgtggggtcctgggggggtctgggagagctggagagggggcaccctagctccctgtgtggggtcctgggggggtctgggagagctggagaggggcaccctagcttcctgtgtggggtcctgggggggtctgggagagctggagaggggcaccctagcttcgtgaatggggtcctgggggggcctgggaaagctggagagggggcaccctagcttcctgtgtggggtcctgggggggtctgggagagctggagaggggcaccctagctccctgtgtggggtcctgggggggtctgggagagctggagagggggcaccctagcttcctgtgtggggtcctggggggtctgggagagctggagagggtgcaccctagcttcctgtgtggggtcctggggggtctgggagagctgaagagggggcaccctagctccctgtgtggagggctgggggaattctggagaggcgagctggagaggggtaccctagctccctgtgtggagggctgggggaatcctggagaggagagctggagagggggcaccctagcttcgtgtgtggggggctgggggaatcctggagaggagcaccctagcttcatgcatgaaccagcagcacaagtcccaggctcactacgagctgcacttgcacaggtgacccaaaacaacgcagcagaggctctggaggctgagctgacattggaagctttgcacaaagaggcaag

SEQ ID NO: 24046 - DNA, 1131 bp, Artificial sequence
  DNA replication origin
gttggccagtctaggagaagaatgtacactcttcattgtactggttttttaggttttctatagatttgaaaattttcaaaatactaaaaacctgggctattgactttgtagaatgtgaaatggaagaatctgtgaggtgctccatgttcatgtgcttctcaggtgtggaaaaagaagctctcggcggccgtggaggtgggcgacgcggctgaggtgaagcgctgcaagaacatggaggtgctgtatgactcgctgcagctggcccacaagtgcatcctgaactccttctatggctatgtcatgcgcaaggggtaggtgggcccgggcccgggagaggcttatgggaggaatggatgagtccacgtttagggcagcttcaggtgtaggctgctgtgcatggagggccgttcatctgattcaaggaatgttggagggagaaggctttgggctggggtggggctgggaggttgaagagagtgggggccacgctgactttgagggtctgggtgtccatgagtgatgcgtgctgtggggtgtatgtgtctctgcatcatgggctggagacacgacttgccattttccagcgcgttcatgtctcccagcgtggatcctcactcagggacttgcagagtgtcgggcagttgcttcacagcatgtctgcgtgtccgggaggggcagagaagcaactgacaaggggcatggggctggtgccgggaggggagggtgggacagctgacagcagggctgggacccaggctggaggagggttgggcctggcagctaggcctgggctttctctgagaagctggaggtgagaatggggcttgggaggaggtgtgaagagagtagagaaggcgtgaatgggtctgggtggtattaagagtcctgctgaggctggagtcctgaacggctggacgcagtggcacatactgcacccttccagatccttcctgggcaccaaggtggggacagagaggtgtcctcgggcagagccagattccaccttagttctgtcctggtgcacgcacatttggctgcttcccttgtccctgtcgcatctctcctttcctcctccctactcctcactgcctctgataccccctggaggagccatgccagccccacccacca

SEQ ID NO: 24047 - DNA, 1674 bp, Artificial sequence
  DNA replication origin
cgagaggccgtttcaggtcacccaagagtatggcagctgcaaccctgccagggcccgggatgtgctgtctttgactgttgactgacaattcatcagtgaccaggcacattgagcatcagcctctggggtggggaagccgctggaaagacgcactcagctgacaggtcccagacctaggacctcatggagctgctctgcccaggcaaggttgggatgtggcagcccggctgcctcacaggacaagcctcacgggacaaccacagattccatatgagctagggtgggaggcagctcagagcttcggagagtcacggcgttcgggggctctgacatgactggttgggaagacaggtggatgtggaaatgccaacagaaggaggctggaagggaaggaagggaagggagggaggaaaggagggaagggaaggaagggaagggagggagggaaggaagggaagggagggagggaaggaagggaatggaggggcctccacggcctctgtattctgcacagtgccactggggtgcttgcagcctgaatgcgtttctgtttagctctgatgctcagcacttggcttggagagggaggccaggaggctggggccggtttagcgtgtgacggtgtgacagtcctgatccaaggcagggagtgagggttgtgaggattcaggatctgtcatgtggggcagggggaggcccagggatgctggttcttagggaggggttggcacctggggtttttgtgccatccgtggagacagggaatgggtagagaaggggcttgaggcaggaggtgaccctgctaccgatatgctagcctggaagccccacccatatgggggccctgaagaccaccatgaggcttggtttgggctcgcactgtagattgggactcactgggttgcgggtgggtcttggtgaaagctggggtagtggatgaactgaaggcaagaggtaaagtgagagaagaaggccacagggtggaggctgcggggggtggagaccggacatgacccctggacagctgctccagggaatgcgtctgtagggaggaggtagagacaggttccgggtagagtgtggggggccttcttttcttaatttttattttttatttattttttaaatttttattcttcttggcatctgatcacatcttgccttctattaaaggagggtgggcttgagtgtttccgtgctgaagggacagtgtgaggagagaagatcagtgtggttgatagaactaggccccaggggtgcagacctgaggtctggggagaggcccaaggaggtggggcgcccgtcggagaggccacaaactctgctgaggatgggaggaaggcgagggccggaaggaccagtcctggtgcttccttgtgttgtggataggtctgtgagattaactagatcctgatgaagggttttcacaaggtgtctacaccatgtggggccttggtgtgaggctcctgggtgcctgttaggaacttgcatctgtctgtgtggtgcccagttttgccagttctcaggggttcccgggctgcatgttagaatcatcctggcttctgttctcattctccttccaggtgggtgaagagggacagttaccttcctgtgggcagtcataatctcaaggcggccgccaaggccaagctaggctatgatcccgtggagcta

SEQ ID NO: 24048 - DNA, 1885 bp, Artificial sequence
  DNA replication origin
ctgaagcagaggtggtagccaacggctccatgtctctgaggagcggcgggcggcggcgcgcggacccaggcgcggatggcgaggccagcaggtgaggggcgccctcctgaggctctcgggccggccctccggagggtgccatggggccgtcctcggctggcgccgccgaggcgggagggaggcccggttcccgcagccgcccgcactcgccgcgcctgactggggtagggcggcgcgccccgaccgccgacggaggggctcggggcgggcggaggcgctacgggcgcggcttctttgcggggaaacgaggcgggccgcgcggcctttccctgctcggctctttctgaggtttttcgggcctcgccttccgcgcagctgcgtttgggacctgccgcgcggcgggggcgatgagagcggcgggacccgggccaggccctgcggggtggacgcgcggctggggagggtgcggggaggggcggggccggggaccctgcctgggggcctagcgctgggggaggccgaggcgggcggatcgctggagcccaggatcctgttctagatcagcctgggctacagagagagacctcgtctcctctgttttatttttttgggcagggagtcccgctctgtcgcccaggctggagtgcagtggcgcgatctcggctcactgcaacctctgcttcccgggttcaagcgatcccgctgcctcagcctcccgagtagctggaattacaggcgcccgccaccaggcccggctagtttttgtatttttagtagagaccgggtttcaccatgttggccaggctggtctcgaactcctgacctcaggtgatccgcccgcctcggccttccaaagtgctgggattacagacgtgagactccgcgcccggcccttctcttgtaaaaacaagaaaaattagacaggctggtggtgcgcgcccgaggtcccagctattaatactcccgaatccgagccggaggttcacctgagcccggcaggtcaaggctgctgtgagccgggatcgcgccaccgcactccagcctgggcgacggagccagacccagtctcaaaaaaaatagagcaaggataagacgcggctgcttggtggccagagcaaacggtaaacatgaccggaggactggcctgccataagcagaaaacggatgaggcccggcgcggtggctcacacctgtaatcccagcactttgggaggccgaggcaggaggatcacctgaggtcaggagttcgagaccagcctgaccaacatggagaaatcccgtctccactaaaaaaatacaaaattagcggggcgtggtggcgcatgcctgtaatcccagctacgcaggaggctgaggcaggagaatcacttgaacgcggcaggcggaggttgcggtgaaccgagatcgcgccattgcactccaggctgggcaacaaagaatgaaactctgtctcaaaaaaaaaaaaatagaaaaaacgtgtgagaacgtgaagctttttacagacacttagctgaacaaaattcttcccagaggagaaaccaagtggtaaggatccctaactgctgttgtgctcatcgctgtctgtccatatcaggcaagccctagagaggcaggtacccttagggtctacatggtgtgttggaacttggagcttagagacggttactgactgccctgcttcaggacacaggactgcactcacgtgctccactccactgccctgccccaagctcagtgatggcctccaggcagggggaaggctgctgctgggataagtacaagtgatggcttttaccttacatgctttatgtgggttacctcatctcatccttaaaacagtcctgggaggtgagtgtgccccaggaggcagtgggtgctgtttgcc

SEQ ID NO: 24049 - DNA, 2197 bp, Artificial sequence
  DNA replication origin
ggccagcctgaggtggggtcggtgcccccggcggcacggcgctggggaggcgatggcgccggccgcgtccaggctgcgggccgaagccgggctcggggcgctgccgcggcgggcgctcgcccagtacctgctcttcctgcggctctacccggtgctcaccaaggcggccaccaggtgagcgggggcgcgggaatcggacgccgccccggccccaggtcggccgcagcggcgcggggcctggacgggagcgccgggccgggaccaggctgggggcgcgcccgggtcagaacccccggagcgggcgccctccgacccggcgctgaacttcccgcggcgacacccgcgtccgcagtcagcgattgtgaggcgccttgcggatcccgccctcccagcgcgtggagggcccgcccagacccgggggtcggcgctgaggttccacccaaggacccaacaggggccccgcgcgcccggggaagccacggcaaggggagcgggtccgcaggcgcgggtgaagacagggcgaggggagcgggtctgcggggcgcgggtgaagacagggcgaggggagcgggtctgcggggcgcgggtgaagacagggcgaggggagcgggtcttgggggcgcgggtgaagacagggcgaggggagcgggtctgcggggcgcgggtgaagacagggccaggggagcgggtctgcggggcacgggtgaagacagggccaggggagcgggtcctcatggagcgtgtggagacagggccaagggagcgagtctgcggggcgcgggtgaagacagcgccaggggagcgggtcttgggggcgcgggtaaagacagggccaggggagcgggtcctcatggcgcgggtggagacagggccaagggagcgggtctgcggggcgcgggtgaagacagggccaagggagcgggtctgcggggcgcgggtgaagacagggcgaggggagcgggtctgcggggcacgggtaaagacagggccaagggagcgggtctgcgtggtgcgggtgaagacagggccaggggagcgggtctgcggggcacgggtgaagacagggcgaggggagcgggtcttgggggcgcgggtgaagacagggccaggggagcgggtctgcggggcacgggtgaagacagggcgaggggagcgggtcttgggggcgcgggtgaagacagggccaggggagcgggtctgcggggcacgggtgaagacagggcgaggggagcgggtcttgggggcgcgggtgaagacagggccaggggagcgggtctgcggggcacgggtgaagacagggccaggggagcgggtcctcatggagcgtgtggagacagggccaagggagcgagtctgcggggcgcgggtgaagacagcgccaggggagcgggtcttgggggcgcgggtaaagacagggccaggggagcgggtcctcatggcgcgggtggagacagggccaagggagcgggtctgcggggcgcgggtgaagacagggccaagggagcgggtctgcggggcgcgggtgaagacagggcgaggggagcgggtctgcggggcacgggtaaagacagggccaagggagcgggtctgcgtggtgcgggtgaagacagggccaggggagcgggtccacatggagcgtgtggagacagggccaagggagcgagtctgcggggcgcgggtccgcacggcgcgggtggagacacggccagggaaggtgttttgagaaggtgacattgaacaggctgtgtaaagaagtggagcagaggctctcctggcacagggaacagcagggcaaaggtctctgttaggttttgaagggaaggccggcgttaaagaaaggcggagagaggtgcagcttggactcagtcccgagggagggaagatctgtgtgtggagaaagtgaaccctgagcaagaggcaggagatgtgaagggaatcgccagggatctgatcgagaaggtgtctaggtccgtgctaggaattttggattttatagtccagagagcttctcagaaggcaaatacaaaccaaggcctggagggagccactgggcctgttccacctttttatggaaatttttattgtgataattgtagattcacaaacagttacaagactaacatggagagattccttgcacaccttcccagtgtcccccattggttacattctgtgaaacgtagtgcagtatcgacca

SEQ ID NO: 24050 - DNA, 1012 bp, Artificial sequence
  DNA replication origin
ttggggtcccagacaccggggcccggccgcgcgccccccgcccaggccggcggctcagccgggcgtggctccgcgtccccgcctgcgcgcggcttccctaccgccacggccgagaagagcacggcggccgagcccccggccagcccgcaggccgccagctgcagcgcctgccggaacgccatgccgcttgctcccgcgccggcccgcgcaggcgcccacggccccgacggcgctccgcgaggaacacgcttcccccggctgccgcttccgggcggcgggggcggaagtcccgcctcctggggcgcggcaggacgcggggcagccttgcgcgaaggggcgttttcgtggagccacctgccgcgccacgctccagtcccgtcacttgtgctcgcgagcgccggtgcgcgcaggtgcgggcggggttgtggggacgccgggagggcggcgcggtactttccagaaggttccgcaccggaagcgcctgccgaggccggaggctgggtgcaggggcggagacgcggagaacttgggatcctggtttaagggagctgggaagctgccgcaggtttgtttaaacgatatttttttggtggcggaacacgaagtaaagttttccgtcggcgcagttcctgcgtgtgctgttcaagcggcctgaagtgcgttcaggttcggccgggctgtccctcctcctggtcccgacccctcaaaccccgggccgaacaccgccctctcctgcgggacagtctttctatggccggcgcgtttcgcctagcagggtcctcagagggaccgcgttagagcctgggtttccttccagggggaccagcgctccctgggtggaccgaccccaccgcttacccattgctggacgcctgcgtgcaccgaccccaccgcttacccattgctggacgcttgccctgttgccatctcctcgctagcgtgaacagtgctgcgtgcagatctctctttcattgattgttttgcgtctgtacccagaagtgggattgctgga

SEQ ID NO: 24051 - DNA, 1007 bp, Artificial sequence
  DNA replication origin
gatcgaggccgccttccggaactacatccaccgcgcagatgccaggcaggaggaggacagttacgagatcttcatctgtcacgccaacgtcatccgctacatcgtgtgcaggtaggcagctgctgggctgggcgtggtctaaaataatttcagacttagagaaaagcatgaggaagaagccgagcgagaccctcctccactgccgatgccaccctagtcaggcctcaccagcccccgggcgtccacttcccgcgagtcctagtcagttacgcggtaggtggcgtgttacttggagcttctcataaggctgttttgggcaagggtggtgcagacagggagggacccctgtggtgtcctgggtggggtgcgtgctgggtggggggtcctgagtggggtgcgtgctgggtgggggtgtcctgggtggggtgtgtgctgggtggggggtcctgggtggggtgcgtgctgggtgggggtgtcctgggtggggtgcgtgctgggtgggggtgtcctgggtggggtgcgtgctgggtgggggtgtcctgggtggggtgcgtgctgggtggggggtcctgggtggggtgcgtgctgggtgggggtgtcctgggtggggtgcgtgctgggtggggggtcctgggtacggtgcatgctgggcgtccgcactgccctggttgttttccctttgtaattgaacgtcctgtttcccctcaaactcgaccaaccaccttctgcctccggctggatcccactggcagcatcccgccgctgttgtccgctggggattttgtgcttctggggtcctgacctctttcacttgctgatctgtgggcgctcccacccgtgtgccagcgtgacggctcggggtgtccgctcccctctgggtcgaggccacagctgagtcacgttgctgctcgggctgctccctcggggggcccttgtccctcaacctgctctggtgccccactctcagcaccacagaatgatccgggttcaggttgcgttttccctgc

SEQ ID NO: 24052 - DNA, 1249 bp, Artificial sequence
  DNA replication origin
caggaggctgaggcaggagaattggttgaacctgggaggtggaggttacagtgagctgtgatcgcaccactgcactccagcctaggcgacagagcaagactccatctgaaagaaaggagaggagaggagagtcgaggggatggggtggggggataggggagggggaggtgagggggagatgaggggaggggtaggggagggggagatgaggggaatgggagggtgggaggggagggggaggggaggggaaggtgagaggagggggaggggaggcaaggggagggggaggtgagggaagggggagggggaggtgagggaagggggagatgaggggagtggatgggtgggaggggaaggggagggggaggtgaggggagggggaggggggagggaaggtggggaaggaaagtgagtgcagagggcaacacactcctacccaaaaaggaagagccgcctggccggttccctggtgacctcgagctgatcctcgtgcctggggctgctgggactcaaggacattttagcgatcctggctgacatttcactttctgtcctcctgtggccattcccgagttggtctgcgggagaaggctctaacaagtctctttctactgcattgattcttgaagtcaggatctgatctttagtttttgtactttcatctggtgtcttggaaacgctacgtcctatattttgcaaattcagtttatcaaactcaacagtcaaatccgagacaggtggcagatgggcttcctccccacggggggcctttggtctcttgcccgccagggtcctgctgtgattcagaggatggcagagcccatttctgctgctgtgtggacctcccggctcggcggcttctatgaggtctgcctcctgctccaaggggaaggcgctgcacctcgtatgtccaaaagcaccgactgtgggcgggctgttatttcgagctgcattttgccgattttttatttcttccaagctcatgtcatcttcatctagaaacgccctcacggaaatggaattgctgcctgtgaggacaacaaggagcacttcagtgatgggaacgacaggaagccacggagctgctccgccccatccatgaccaactgccgtgaccccagcaacagcaactcttatacccaaaacctccccactccatccgcgaccaactgccgtgaccccagcaacagcaactcttgcatccaaaacctcctcatcagatttcaggatggaaaaccacccacacgac

SEQ ID NO: 24053 - DNA, 1050 bp, Artificial sequence
  DNA replication origin
tgtaactcaggggtttggggccagaggaagagggagaaggtggccatttattgctttgcggtagactgtcgggtctgggtgatgtggagatcagaggtgggttttggtcgttttaagtttgaggtaactgatacagtgaactgtgtatttcagctccatccccttttcctggcatacaactcttgaaatcccgggaacctccaaagtgatgtcttttgtaggctgagtggactggtggccggcagcccctagggagcttctggatggggctggtcgcaggaaagaccaaggcagggttagaggttctggggactttcagccccacccccaacctctggggaggagagaggggtgaaggttgcgttgatcaccagtggctgatgaatcacgcctgtgaaatgaagttcctgtaaaaacccaaaagggctgggttcagggagcttccagatagtacgtgggggttcctggaggcggtgcccagagaggccctgaatttccaagcgcttccccccggttttacgtcacgcatctcttcacctgtattctttgtaatcctttatactctgctggtaagtgtaagtaaaacatgtctgtgagttcgggagccactctagcaaattaccgcaacctgaggaggtcaccgggttacgccccgtcggtcccaagcgcaggtcaaacaacctgggcactggaagtggggggcagtcttgcggggctgagccgttaacctgtgggggtctgctggtatctccaggaagacgctgtcagaatagatgactgaattaggatgacagacgacacccagcctgtgtccactgcagaactgacgacctgcgtgatttgtggggagaaaatccccacatacctggtgtccgaagcatgttgcaagactagtgggagaaactgagtttgtttttactctaaattgtcagactgttagtcactgcggagaggtgctttctgatgattgagtggggattcctgtccaattgtgtgagtttgtgtctcggccctaccacttttttttttttttttttttgaaatgtagtc

SEQ ID NO: 24054 - DNA, 906 bp, Artificial sequence
  DNA replication origin
ggcgcgggcttctcggcggctgcggcccgggcggcggcgatgctgtggccgcggctggcggcggccgagtgggcggcgctggcctgggagctgctgggcgcctcggtgctgctgatcgctgtgcggtggctggtgcggcggctgggcccgcggccgggaggtctgggccgcagcgggaccccagttcctccgccaagcgcggccgccgcccccgcctcaggtaaggcccaggcggtcgctgggtccccgcaccctggccccttccccgccccgacgccctcctcgggcctggggtcccggccgcgcccctggagccggcagcagttgggcgaggcggccggggaaaccagggccggtcgggaaaggccattccggccgcggaaagggcagttgcggggacttggcttcccgggccgggggcggaggggccacgccgggttcgggggtgagagctttcccgggccctggagcagcctccggggaaggcggcgggggcccggcgaggcgttagcggagactcttgctgcggtctctcgagacctggggagggatggcccaaaggagggcggcgcggggaggaaacccctgggtcccggatgtgtttggaacgtgaagccattgcggttactggtcatggaacataaggcagagacggaaaaggcaaatgtaactcaggggtttggggccagaggaagagggagaaggtggccatttattgctttgcggtagactgtcgggtctgggtgatgtggagatcagaggtgggttttggtcgttttaagtttgaggtaactgatacagtgaactgtgtatttcagctccatccccttttcctggcatacaactcttgaaatcccgggaacctccaaagtgatgtcttttgtaggctgagtggactggtggccg

SEQ ID NO: 24055 - DNA, 985 bp, Artificial sequence
  DNA replication origin
aggggtctggatccttgaggaggggtcctaggccttggggagggttcctggggccctggggaggggtcctgggtcctgagggtttggaggagaggtcctgggtccacaggctttcctatgaaccagtcatgtcctgttgtgcctctgatgctctggacagtgtttggaaacgcttgttggtctcagtaatgagtggtttgtggccgggtgcagtggctcacacctgtaatcccagcactttgggaggccgaggcaggtggatcacgaggtcaggagttcaagactagcctgaccaatatggtgaaaccctgtctctactaaaaatacaaaaattagctgggcatggtggcgggcacctgtagtcccagccactcgggaggctgaggcaggagaatcacttgaacctgggaggcggaggttgcagtgagctgagatcacgcccctgcactccagcctgggtgacagagtgagactccatctcaataaaaaaaaaaaagagtggtttgtaagaaggcagacgtctctctcaggatttttctcaaggcccaagtcctccagggcgagcctgagcagtgcctttggtgggggtgatgggctggagccaggaaggggagacaggctgggggtggcagtgccgctcctcacgccctccttcccttccacagtcgttgcagttcgataaggagcagatggtcgcggtcacagaggccaatgaggcgctgaagaaacaaatcgaagagttgcagcaagaggcccggaagtaagtctgcatgtgcccgggggaggtgcgggggccaggtgggaggtgcgggggccgggggggaggcgaaccagaatgccagacggtcacatcgggataattcagcttcctcctgtgtctccctcatgacaccccagggccatcacggaacagaagcagaagatgaggcggctgggctcagacttgaccagcgcccagaaggagatgaagaccaaacataaggcc

SEQ ID NO: 24056 - DNA, 857 bp, Artificial sequence
  DNA replication origin
tggttgtggggactcgcctcgcacacaggagctggggaaaggctgcgagggcaggagcaggtcggggacgcggccctcagtgttcacagttgatcctgaggagggcatccggggggggtccagggaagggtcctggggtctcaggaagggtcctggggtctcgggaaggggtcccggggtctccggggaggggtcccggggtctccggggaggggtcccggggtctccggggaggggtcccgtggtctccggggaggggtcccgtggtctccggggaggggtcccggggtctccggggaggggtcccggggtctccggggaggggtcccggggtctccggggaggggtcccggggtctccggggaggggtcccggggtctccggggaggggtcccgtggtctccggggaggggtcccggggtctccggggaagggtcccaggggttctggggaggggtcccggggtctcaggaagggtcctgggggctctgggggaggggtctggggactgtggggaggggatccaggggcttgtggggagggttcccgggggctcttggggaggggtcctggggtttcctaggaggggtctggatccttgaggaggggtcctaggccttggggagggttcctggggccctggggaggggtcctgggtcctgagggtttggaggagaggtcctgggtccacaggctttcctatgaaccagtcatgtcctgttgtgcctctgatgctctggacagtgtttggaaacgcttgttggtctcagtaatgagtggtttgtggccgggtgcagtggctcacacctgtaatcccagcactttgggaggccgaggcaggtggatcacgaggtcag

SEQ ID NO: 24057 - DNA, 946 bp, Artificial sequence
  DNA replication origin
ctgtccgtgtcgggttgactcatttgatggggaggattcggccaaagtgcttgtcgggagggtggggcctgtgtctggggcggggcctgtgtctggggcggggtctgtctgggtcggggcctgtgtctggggtggggccaaggtgggagaggcttttggaagaacagctgggaacaaggcccacctggagcataggtcccagaggggcagtccggtgaggcctgataagtccaggtggtgatggtgcatgaagggagggagtgaggaggccccgtgaggcacccagcttctccccattgccatgggctcccgggatctagcatgtgagaggacagcggctgtcatgcagaaagcaagggtgagtgttttgtggagaccccacgtcagggcagggcgtcggggcccggggaccctgggagtccctcgtggctgagtgcggagctgggactgaccagagctagtcatgttcctgtggaagctgagcctgggctggcttctgcacacagtgggtgtccgagatgctggtgacagtttctcggctgcaggtagcagagcaggtgaggggtagaggcgggggacggaggccgcagtccaggatcctgtccagacatccaggctgaggaaccgggaggtgagacgagaaatcaggagagcaacagtaaatttggggagagtcgtctgatggcacgttagaccaagtgctacgttttgcttatgaagtttctgaagttgccggagaggaccgagccaaggtcccagcaggcagattggtcagcatgtctggctcattaggagccaggctgaggcctgtgagtaggcggtgtggccggcaccatcattgttggaaagtgagggctgatggattagcgctggtgccggggtggggaggtgggccaaggggagggccggctctttggactgtaggaggcttggaggactcagcagt

SEQ ID NO: 24058 - DNA, 959 bp, Artificial sequence
  DNA replication origin
gcagaggtgggcggggtgggtggaggtgggtggggccaacagaggggggtgtggggcgggcagaggtgggtggggcggtagcagaggtgggtggggccaacagagggggcggggtgggcagagacgggcagggcaggcagagggcctggcctgagatgttgcttcccgggcccacggctctccgcactggaacaggtgatacacagcttttcttcctgattctatccttagtcttgacatgaacatttaattcataacaagtctgctgctttttaatcagtagaattagatcagcaatggtctgtgttactaaaatatccagtctcccgtttacatagacttgtcactaagctgcacgacgcttgcatgtctcatgtttctgtaacagttcccactgcgtgaggtgccaactgttggcaggaatgttcatccgtgcatcatgcaagcctcagctctctacttaaatctcttacttaattttaaaaaattgggagagagcagcaggggtgtgtggaatttggagaatgtggaggagtgtgaaagaaaatgaggatggctcgcacaggcctgacccgtgcctttgtccccagcgtgtccttggagagctctgcagcagaaacacaggaggagatgctgcaggtgctcaaagagaaaatgcgactcgaaggacagctggaagccttgtcactggaggcgagtcaggtaacggacgttcgactgacatctcagcgtgcggcgaagtcggaaagcatgtgtggctcctctgttgggtacgaggtttcacagatgtggttgggaatcagccgccgcagcatgtgtggcagccgagggttctgcatctttacgttttttgtctacttgtcagccttagaaagagttgtgagttttctgcctcatcgtgcatgggcgtgtttctccctgcgtctctaccagaatatttgctagatgttaggtgtctc

SEQ ID NO: 24059 - DNA, 775 bp, Artificial sequence
  DNA replication origin
accaagggttccctgaagcagaacagaagcagtgcggcgtccgttgtgtctgagatcagcctgtcccccgacactgacgaccgtctggagaacacctccctggctggagacagcgtgtctgaggtggatggaaatgacagcgacagctcatcgtacagcagcgcctccacccgagggacctatggcattctgtcgaagacagtgggcacgcaggacaccccctatatggtcaacggccaggagattcctgcggataccctgggccagttcccctccattaaggacgtcctccaggccgcagccgctgagcaccaagaccaggggcaggaggtcaacggggaggtgcggagtcggagagacagcatctgcagcaggtggtggggacagcagaggtgggcggggtgggtggaggtgggtggggccaacagaggggggtgtggggcgggcagaggtgggtggggcggtagcagaggtgggtggggccaacagagggggcggggtgggcagagacgggcagggcaggcagagggcctggcctgagatgttgcttcccgggcccacggctctccgcactggaacaggtgatacacagcttttcttcctgattctatccttagtcttgacatgaacatttaattcataacaagtctgctgctttttaatcagtagaattagatcagcaatggtctgtgttactaaaatatccagtctcccgtttacatagacttgtcactaagctgcacgacgcttgcatgtctcatgtttctgtaacagt

SEQ ID NO: 24060 - DNA, 2188 bp, Artificial sequence
  DNA replication origin
aacactgctgttaccagtgcctgctagaaagattgtcagctgtgttttaagtgtttgtggttttcgcttgttttaaactggcgactttcataagatttcttattggttttacttaaatggaaaggaaacattggctgggtgcggtggctcacgcctgtaatcccagcactgtgggaggccgaggctggtgaatggggaggagtttgagaccagactggccaacatggtgaaaccccatctctactaaaaagaccaaaaattagccaggtgtggtggtgggcacctgtaatcccagctactggggaggctgaagcaggagaatcgcttgaatctggtgagtggagcttgcagtgagctgagcttgtgtgactgaactccagcctgggcagcagaatgagactccgtctcaaaaaagagaagaggaaatgttactgtcgttactacataaattctacagccaagagtgtggaggtgtggagggtgagttcaccttatagtgtagaggtgtggagggcgagttcaccttagagcatggaggagtggagggtgggttcaccttagagcatggaggagtggagggggggttcaccttagagcgtggaggtgtggagggcgggttcacgttagagcgtacaggtgtggagggtgggttcaccttagagcgtggaggagtggagggtgagttcaccttagagtgtggaggtgtgggggggggttcaccttagagcgtggaggagtggagggtgagttcaccttagagtgtggaggtgtggggggggggttcaccttagagcgtggaggtgtggagggtgagttcaccttagagcgtggaggagtggagggcgggttcacgttagagtgtggaggtgtggagtgcgggttcaccttagagcgtggaggagtggagggcgggttcaccttagagcgtggaggtgtggagggtgggttcaccttagagcgtggaggtgtggagggcgggttcaccttagagcgtggaggagtggagggtgagttcaccttagagtgtggaggtgtggggggggggttcaccttagagcgtggaggtgtggagggtgagttcaccttagagcgtggaggagtggagggcgggttcacgttagagtgtggaggtgtggagggtgggttcaccttagagcgtggaggtgtggagtgcgggttcaccttagagcgtggaggagtggagggcgggttcaccttagagcgtggaggtgtggagggcgggttcaccttagagcgtggaggagtggagggcgggttcacgttagagtgtggaggtgtggagggcgggttcaccttagagtgtggaggtgtggagggcgggttcaccttagagcgtggaggtgtggagggcgggttcaccttagagcgtggaggagtggagggcgggttcacgttagagtgtggaggtgtggagggggggttcaccttagagcgtggaggtgtggagggcgggttcaccttagagcgtggaggtgtggagggcgggttcaccttagagcgtggaggagtggagggcgggttcacattagagtgtggaggtgtggagggtgagttcacgttagagcgtagaggtgtggagggcgggttcacgttagagtgtggaggtgtggagggcaggttcaccttacaggaaggacgtggacaccagaggggctgtgggccttatcctggccaccccgcctgtgggacggggcccatgggctgctcctctcagagtgaagcctttgtgggatgagaaagtgccgtgctcatgagtctggatcctcttctctcctactccagctgcatgtctgaaaagcgacgtcaccttgttgttaaagccatggtggtccagcgtgctctgtctttccaggtgccgaggtaaacagagcatccacggaaggggaaagcccggatggacctggccagggaggcctctgtcagaacgggccaacgccacccttcccagaccctccgtcgtctctcgatcccaccacaagcccagtgggccctgatgcctctccaggtgtggctggtttccatgacaacctaaggaagtctcagggaactagtgctgagggcagtgttagaaaagaagctttgcagtctctcagactcagtcttcctatgcaagaaacgcaactgtgtaagcatccgttaccccgcttttcccaccctccacgtccgc

SEQ ID NO: 24061 - DNA, 1064 bp, Artificial sequence
  DNA replication origin
agggtggccacttgaagaagaggaggacgttctctgttccggaacgaaagtagcgcgtgcaggctgtttccggggacccgaggccgatgcaccgctcgccccgcccctctcacggccacgtctccgccggagcatccgggccgggcggcctccggggctgccagagcagcagggtgaggggctcggaggccgcggcgcctcggggctcgggctcccgctcccgctcccgctcccgcagtgcatgggcgggggaggctcgaggggcggcggcggggcctgggcgcgtccctgcagcgtggcgggacggccccgttccagtcacccccgcctcgctgcggtggcctcgggcctgggcgcccgccttcagctgcggcggagctggctctgtaaatgccggtgcccgcgagccctcctgaatgcttgtctgcgcccgacgagcgcggcctgtcccgaagctgtccactgccaccactcgggcagtgcttgctttagcctggccctttgcagctgaaaggcgtgacatggtgtcgggtggttcgtgggaagtcggggtttcaggagtccgtgtacttccttgtttgtctttgtcgctggccgacttgtcttcattccaggtggccagagcgagtggggccgggcgttgtcacgggtatgaacccgacgaatgtcagtcgtgtggcgggtcctgggtattgtgggtctgggtcactgcccccgcggagcccacctaggacagggacacccagggtcgccagcgagagggtaccgggcggtggttgggtggggtccgctactctaagtgggagcctggggggcgggcgacttccgtgctaaggcctctatgacgagaagcaagccaggcaaaattgtgagaaaagcgcgcctcaggcagaaagtttgaagaccctgagggcggaggatgtggccacagtgtaatggcaaagggggaaagcgatggcggtaaggatgttggtgtaggcaggtgctggattcttaagaggttggagtttattgtcactgggccagtgtaagccatttacagatgactcatggatttttttttt

SEQ ID NO: 24062 - DNA, 1251 bp, Artificial sequence
  DNA replication origin
gagcctggcactgtgagtgccgtgcgccgtgctgggagcctggcactgtgagggccgtgcgccgtgctgggagcctggcactgtgagtgccgtgcgccgtgctgggagcctgtcactgtgagtgccgtgcgccgtgctgggagcctgtcactgtgagtgccgtgcgccgtgctgggagcctggcactgtgagtgccgtgcgccgtgctgggagcctggcactgtgagtgccgtgcgccgtgctgggagcctggcactgtgagtgccgtgcgccgtgctgggagcctggcactctgagtgccgtgcgccgtgctgggagcctgtcactgtgagtgccgtgcgccgtgctgggagcctgtcactgtgagtgccgtgcgccgtgctgggagcctggcactgtgagtgccgtgcgccgtgctgggagcctatcactgtgagggccgtgcgctgtgctgggagcctggcactgtgagggccgtgcgctgtgctgggagcatgcatttgtgagacccgccctgcccagtgctggccttgaatgtgggtccacttgggccgctggatcaaaacgccgcagaacaggcggcttaaacaacagaaagtattttctcacagttctggggcctggaactctgagatcagggtgtcagcggggccggttcctctttggtctgtctccttggctcgtgggcagcatctccttgagttctcacgtcatcttctcttcatgcgtgtttgtgccctaatctcttcctgcgaggacaccagtcctattggattagggcccacaccagtggcctcattttatcttaatcacctctttaaagaccacacctactaaaactggaacgatatagagaagattagcatggcccacgtgcaggcatgacacccaaattcatgacgtgttccatgtctgcagatacagtcacctctgaggtcctgggatttagggcttgaacatattgtaacactctgccatcaaagctcgcacgccacggggttttataaaaattgggtggttttgtttgttgttgtttggcaaaccccacatgctggataccattgacactccgtggtgggctgagccatgtccccgtcccgccaccacagatacccgtatccgatcacttgagcctgtgatgatgttgccttgcaccgtaaaaggggctttgcagatatggtggaattaaggaccttgagatgaggggaggatcctggattagcttgtgggccctctgtgcaacagtaggag

SEQ ID NO: 24063 - DNA, 1849 bp, Artificial sequence
  DNA replication origin
ccatgtcatctggaataatacttgaaattttgatttttggaaaaaaaagttttttatcttttgttgaaatcacctgttatccttgtttgtaaactgataacttttttgcttcttctcaggaatacagttttcaactgttgtcttgctcttgatagaaactgagaagcagcaatctgtatttgtggaggaaagtcctctcttttgcatattctaataaatgagccgcgtttgctcctccgctctcgtgttgggctcgtgtctggggctgcctcacttccccatgcgagggaggcaggccccatgcagagtgagctccgagtgcctcactgctagtgatggtcactctgtcacctgctgtccctcagtgactcctgtgaaacctgctcaggtctcttcattctgccaatgctgggaagccacaacctgttcatccagtgtggaggctttgtcttcagctgagcaccagaagaagccacaatgcagagaccctgagtttgtgcaagggtggggctgagaggggaggtcccgtgttagtgcaggggtgaggccgggaggggaggtcccgagtttgtgtaggggcgaggctgagcagggaggttctgagttagtgcaggggcgaggctgagcagggaggtcccgagttagtgcaggggcgaggctaagggggaggtcccaagtttgtgcaggggtgaggctgagcagggaggtcccaagttagtgcaggggcgaggctgagaggggagatcccgagtttgtgcaggggcgaggctgagaggggaggtccctagttagtgcaggggtgaggccgagaagggaggtcccaagtttgtgcatggatgaagccaaaaggggagtttgcacgtttgtgcaggggtgaggccaagaagggaagtcttgagttggtgcaggggtgagggagaggggaggtcctgagtttgtgcagaggcgaggctgagaggggaggtccctaagtgcaggggtgaggccgagaggggaggttgcaaatttgtgcaggggtgaggccaagaggggaggtcctgagttagtgcgggggtgaggccgagaggggaggtcctgagtttgtgcagaggcgaggctgagaggggaggtccttagtgcaggggtgaggctgagagggggaggtcccaagtttgtgcaggggtgaggccgaggggaggttgcaagtttgtgcaggggtgaggccaagaggggaggtcctgagttagtgcgggggtgaggccgagaggggagttcctgagtttgtgcagaggcgaggctgagaggggaggttgccagtttgtgcaggtgcgaggctgagaggggaggctggcattcgccaatgaagtgggctggggctaccctgcgtctgtgtcttagagagatcggttgatactcactcttccccttcccatctccaaaaagtagaaacaagaacacttgccctgtagaggatgctggtctttcctcaggaccagctgcacctgtccaggaagggcaggcagctcagagagcctctgggctccaggtgtcctagggactcactcctgcttccttagtccttcagagaagtccaactcctggcccactgtgaagaggatttctacctggagcagtcggaacagcttgggtttggctgtgatgtgagggaggaggccttgggagcagggcagttatcctcccagcgtggtaaggagccgtgttttatggaggcagggagatcagggcagttactcctcgggtgtggtaaggagctgtgttttatggaagcaggtggccgtgaactcattccgtcttttcatgagcttctgtacttcctcgtcctcaagacccagccatcccacccagcaaa

SEQ ID NO: 24064 - DNA, 1625 bp, Artificial sequence
  DNA replication origin
aggtcaggagatcgagaccatcctggctaacacggtgaaactccgtctctactaaaaatacaaaaaattagccaggcgtggtgacgggtgcctgtagtcccagctactcagaggctgaggcaggaaaatggcgtggacccaggagaatggcgtgggaggcggagcttgcagtgagccgagatcgcgccaccgcactccagcctgggtgacagagcgagactccatctcaaaacaaacaaacaaaaaacaaaaaaaaattagctgggcgtggttgcaggcacctgtagtcccagctactcgggaggctgaggcaggagaatggcgtgaacctgggaggcggagcttgcagtgagccgagatcgcaccactgcactccagcctgagcgacagagcgagactccgtctcaacaacaacaaaaaagagcacgcatgattccatgtctgtgaagtgtctagaacagaaaaatccagaggccgaaagcacacgcagctgccaggggctggggggaggggacatggggagtgactgctgatggggccgaggggaaggggacatggggagtgactgctggtggggccgaggggaaggggacatggggagtgactgctggtggggccgaggggaaggggacatggggagtgactgctggtggggccgaggggaaggggacatggggagtgattgctggtggggccgaggggaaggggacatgcggagtgactgctgctggggctgaggggaaggggacatgcggagtgactgctgctggggtcgaggggaaggggacatggggagtgactgctggtggggccgaggggaaggggacatggggagtgactgctggtggggccgaggggaaggggacatggggagtgactgctggtggggccgaggggaaggggacatggggagtgactgctggtggggccgaggggaaggggacatggggagtgactgctggtggggccgaggggaaggggacatgtggagtcactgctggtgggcaccggtttccttttcgtgtcaatgagtggtgatggtcccacaccttgtgatgtactaaaatccactgaaatgtacacttcggctggatgacttttatggtatgcgaattatagtctcaatgaaactgcaaaatacacaatggtactagagtccctgatcttcacttctcttgggaagtgaagggaacaacacactcaatattgactcctacagaaatctcactactgagaacctcatgccagtcctcagtcgcttatctgcctctgtaacaacacaggtaaagagtagtgaacaaaaaccatgcaaccagcaccaagacctcatgagatgtgacctcaccacaactggaggaacgctctcgccctgcaggagaaggctccgtggaagaggccgaggctgtggggaagaggtctgacgtcgatgttgatggctgtggttcctcaaagcacacctgagtggcgggcgacgacggagggacccggggatcggcccctcgccctgcacctgcacctgaggtatctttggtcccatggaacacattttccttgttagcttctgtaacccaaaaggagcagaagcagcacacaaccagggctcaagcagacactctagggattga

SEQ ID NO: 24065 - DNA, 926 bp, Artificial sequence
  DNA replication origin
tagaagttagtggccttagctgggcaccgtggctcacacctgtaatcccagcactttgggaggctgaggcaggcagatcaggaggtcaagagatccacaccatcctggccaacatggtgaaaccccgtctctactaaaaatacaaaaattagctgggcatggtggtgggcgcctgtaatcccacctactcaggaggctgaggcaggagaattgcttgaacccaggaggcagaggttgcagtgaaccgagattttgccactgcactccagcctgatgacagagtgagactccatcttaaaaaagataataataagttagtggcctttgggtatctgtgattagtggtctatactgtgccagtctgtggagtctgtggtcaggtgtttctggaggctgttgtggggccactagagttaccgcctggggtctttgttggatggtcactggggaacccatagtgtgtgtctctgaaggccctggaggggcggcctcttggggagagagactgggtggcctgtgaagtcagccattgtggtcctgtgggagtgatgggggcacatggggtgagtgagagtggggttgatggggttcggtggttgtgtggtctggaggtctgtgaagcaggcctattggattcagtgatctggggatgtcttgggatgtggacctggagaattctcaggtggtcactgtgagtgactgggggacttgggatgctggaggttggcaggggcttggagctgcggagttcagtggtttgtgtctggggtgtgtgtgtgatggaggccctctctgggacttggtaatccggggaacttggcagggccgtgttggtgggtctggaagcagatccgaatgtgaatgggtcgtgggttggctcaggcaagcctctcgtgagtgacaggtctttttgccctttggccctc

SEQ ID NO: 24066 - DNA, 1054 bp, Artificial sequence
  DNA replication origin
catggagtggattagagaatggggtgtcatgggggcgaatgcttgggggccccggggataagggattagggatccctgggcattgagtgactggggtctaatttagggggtctgtggcgcaagcctcagaatgtcagttacaggggaggggctctgtgagcgcctgacttgggcacctgatgaagtgagtgaatggagaccagtgtgttcgtcccaggacagaagccccttctcctcccctccccacccttctcctcccctccctacccttctcctcccccatccttctcatcccctccccacctcacctgcaggagtgactgaagccccttctcccccgctccccacccttctcctcccctccccagctcatctgcaggagtatctgagttctgtggggatcctttgggactcagagtttggggtttcagtctgtggtgattcttaagtggggctttgggggtgctggtgattatggtgtctggcatctgtatttaaaagccctgtgggagtcactgaggtccagtcatcagttgggcctgtagggataactctgcctggcctgtgaggtctatggtgtgacgtaggaatggtaagtgtctgggggcctgtggaggattaggaataaagggtccagtgtacatcgttgaatgggggacagttttattggctcgtgccctggcattggctttgttatttgagggtgttggaaccaggtgagaaggagcttgtttgtattagtgaccgggtaccagagatgactgaatgactgatggggtgggcagtgaggtctgtgaggaggaatgatcggagggcttgggatcaatgccaagtatgcgtgcaagtgtctgtgatgggtgtgcgggtgggtgagggtgagaaattggggaccctgtgggtgtcagtgagagggaagcctggggagcctaagagtttgtttgccatttgcggtgaatgtggagttagaagttagtggccttagctgggcaccgtggctcacacctgtaatcccagcactttgggaggctgaggcaggcagatcaggaggtcaaga

SEQ ID NO: 24067 - DNA, 962 bp, Artificial sequence
  DNA replication origin
cactggaccctttattcctaatcctccacaggcccccagacacttaccattcctacgtcacaccatagacctcacaggccaggcagagttatccctacaggcccaactgatgactggacctcagtgactcccacagggcttttaaatacagatgccagacaccataatcaccagcacccccaaagccccacttaagaatcaccacagactgaaaccccaaactctgagtcccaaaggatccccacagaactcagatactcctgcagatgagctggggaggggaggagaagggtggggagcgggggagaaggggcttcagtcactcctgcaggtgaggtggggaggggatgagaaggatgggggaggagaagggtagggaggggaggagaagggtggggaggggaggagaaggggcttctgtcctgggacgaacacactggtctccattcactcacttcatcaggtgcccaagtcaggcgctcacagagcccctcccctgtaactgacattctgaggcttgcgccacagaccccctaaattagaccccagtcactcaatgcccagggatccctaatcccttatccccggggcccccaagcattcgcccccatgacaccccattctctaatccactccatgctggagcattcactgacattcccacaggccctcccaaacaccacctggaaagggattgtggggctctgcacaaatgccgatcccgcaggcccctccaatgacgccaagtatgacccccgttgtccacgcactcacaacttgcaacaggtccaccattaacttacatccagactcccttgtcacaaatacacagcgccattcctaatgcttccatcataagatccccaaacacaagcacagaaacaaaccccagccactcgccagcataggccaccccatactcgcctccgctattggagacaggggttgaaagagcaaccact

SEQ ID NO: 24068 - DNA, 907 bp, Artificial sequence
  DNA replication origin
tccttcactgagatgcacaggagctggggaaaagtctggagaggggggatggagttcttttgggattcatgatgtgcgagatgcattttagatgtccaagtaggcactgggatgacacaccttctacagacaagtaatattggtgcatatatcatcttttccttatgaaatattcaaatctgctcagcactagagaggagcataaccagctggaacacccccagtgtccaactccagcattgctcagacacgcatccctttgtcatctctgtgactgatactgaaatcctgggagcgcacagagaaaggggtcctctgtgttcaggggacagacctctgggactttgcagcccagaggaggatgaggaagattcagctgagacatggccagtgagaggaagaggaaatccagcagtgcagagttcagaagccagtgaggctgaggaggtgccagttaagaggagagctgagaaatgaacttcggattgtgtgagctgggcaagtgcttttagtggcaaggtgcaaggatccaggtgtgtcacagagacaaggagacagtggcagtgatccaagatcattctttgagaagtttagctggaactggagcagactcatgggatcaccactggaggtgagaaatttacagagcttagcagctcatgagaatgacttactagaagaaatgctggtgatggcaagcagggaattagttcaggggagtgttcttagtgagatgggggatgagcaggtgccacggctggagcctcccctcaccaggggccccacaggcatttggggagtgcagaagggctggcaggtttgctgggggcacaggtggtgcttctcttctgagaacatcttggtgaaatgagagccagatcacccaaggacattaagtcttgggagg

SEQ ID NO: 24069 - DNA, 1111 bp, Artificial sequence
  DNA replication origin
gcaggaatttcggcctccgcagggagcagcgtgccagaaaggtaggggggctgggggccatgggcgggggtcccgccaaagtcaggaagccaagcagagccacctcccgcgacccttcccctccattcagctggagccgggtgcccctcagggcaccgggcggacaggccaaggtaccccacaggaacctttttccttcctgaagtggcaggaaccccgcccctcccagagccggtgggggtcggcgttgcaggaaacccaggcctgggagcctcctctgccctcctccaaggcccctgcaggctctgttcccccaagggaccccaggtccagggcctcctgcccactgtggcagctggaaactcagagccccgagtcaggacccgggtgagatggcgctagagcccgggaacgggtggagtagacgaggtcgcgtccccttggcgggcgcacggcagaaagaacccctcgccagggagcgcgcagcctacctggttcttcgcggctgtgaggatttacaaaccttttggaaagcagtttggcaacacctactaccctgcccctacttctgtgaataaaagtgtattccgcagaagtaagatcgattggggagggttttctgttgggaaaagcagtcactggcagctgcctgaatgtccttaggtgaggcaccgttagaacaagtaaaggttcctcctgtgtggatgcaggaccaagcgtgtgattgcaaagtgtgtctttgacattgtttggattaagtattggcgtgagcagtttctgctgttaaaacaagtgcatgtatgtgggttcagatgaaaggccttggcatccactggtgacccctgcacacaaggtccctaccctactgagcccagagcagtggaggagctgttgcagacagtacccagcccagtgcttggtgcacagccgtgttcgttaaggactaaagtatttgggggattagaaggaaattctagagggtgtatgctatggtgctgccctctctcgggatgtgtgaggtcttattcctactctacaagtgtccacggcacaagagccgtgcatcacctgctttgcagagtgggttgggcgattgactgacagaaaggac

SEQ ID NO: 24070 - DNA, 1620 bp, Artificial sequence
  DNA replication origin
agcatatgtgccaggtcatcaaatgcccccatgactctgaggtgggcacctgccaacctcatgacaaaatgccgacctgaggtgagtcatgggtctgcagtcgcagaaatggtacaggggtggtttgattaaaccaaagcattgtaagttagcagaatatttcctgtgaacagtggcttagaggtataagccaaagaaaataaaagtacattgtgaaaggacagaatgataaagatttttaaatctgtattttctctacggaagtagacattagttgaaacaactgattcttaaaaatgtgcatgtttctataatcattctttctaaaaagggatagtgttagagtgagaatttagggatgaggctttggttaagggttcagtgttacagagaagaagtaaaggttatggttgaggagttaggtgttatagtcaagaattacaggttaggtcgggttaggggttaggggttaggggttgggggttgggggttggggtgcgggtaggggttaggggttagggttaagggttaggattagggctagggttagggttaagattagaatttggattagggtgaggttgaagtttagggtgatggttagggttagggtgaaggtgaggatgagggtgagggttagggttacagtttgcattatgttgagggtaagtgtgaaggtgagggttagggtgaggtcatgggttactactgttcaggttaatacttttcatgattagggctgagataagtgatacggtctctggcaagctgtccctggatgcagattatgagacaaggatattggtgaaattattattcagctataatttgcatattatccattgaataaaggagaggaaccaaaacagatggaacaaacagggcaaggtgttgggagaagcactagagccctgcctgggcttgggcggctcagagcttgggtgatagtgcttcagtgttgcatagaatcagaattcatcctgactgcaggcatagacagtgggtattttatcctccctcagacagtgcgtggcttaggttgagttgtggggtaaactcccaggcgcttttactccttttgggtgaattgacccgacacccggggaaattctctgaccctccagcaacaatgcacgaagatctatggacaagcaagacctgtggggtttgggaggggcccagggtggaaaccaacctgggcaacctgggttagggtcagggttatagactggagaagctgaggaacagtgtctttgtatgataagggttgctataacctggtacgtgagactgcgtgatttataaatttacttggctcacagttctggaggctgggaagtgggagaagcaggcatagcatctgcttggtttctggtgagggccatgtgctgggttaaaacattggcagagaagagccagagggattggacacctgcaaagagagaggcaaacgaaagaacatcctagctttgcaacaaaccacgctcacaggtactcatctagcattgccagatcaagaactctaccatgagaaggcagcaagccgatgacgaggttccactctagattcaaacacctcccactaggtcccacctgtcaacactgtcatgcccagaccac

SEQ ID NO: 24071 - DNA, 909 bp, Artificial sequence
  DNA replication origin
tccagcgctgcccccacctcaactccattctgcgtcagcatccgcgaggggatcctgtggactggacccagacccactccttcccggggagcgggacccgcatcggtctctgtgacacccacgggaggggccgtgctgacctctcccggggatctgggggcgaggtgggggaatctcggccacctcttgaagctcgctgagccccccaccccagagagcgctcaggagcaaaggaaaggacggagagcccacacattttctatctttcatttccgttttttcttttttcccccctccaaaatgaaagacgtgtgtagctttgtcccctgtacaccatccattccccatggccgctgtgcggatccagcccgctggttgcctctagggtcctgggcgcccggcggtccgcatgcagcccggggcctgcccaggtgaggtctgcggccgccacagcgctgaggtcccgcctggccggggcgcacgggccgctggggatgctggctgcgaggctccggggaggtggagcgggaggttgtcccaggccctggctgcagagctcttgatgtcacgcctgacaccctccatccaccgcctcggggcagcgcttcagagccccggcagaggcaagaagtcgatcactttgttcttcattcgttggaaaaatggaaaagcacattataatccctggaacaaccacttcagagaaagagcaaaaaattaaaataggattgtaaatgacacactgaaataagttgattttaaaaatggtagtcaatggaaaaacaggatcagaagacaggagagacagggaaaacaaataagttatctgactgaaacagaattagaaactaacaacagtaagaaatattggacatctgaaaatatgtgaaaatttaacaacccacctct

SEQ ID NO: 24072 - DNA, 725 bp, Artificial sequence
  DNA replication origin
cgcccccgggctcccacaggacgaatgtagacggtgaggccaaggacgccctgctgccctcgggactgtccctccagcccccagctttccgtggctattgggccccctctgcagaggggcaggggagcccaccctggatcctgaggcgccgagcttgagggaccccagagctccagccaggccgctttctttgaggatggtgaagctgaggtcccgaggagggcaggggcaggtcccgggcgctcctcaggcaaagggagccgatttaggggctggggtcacaggaggggcttctgcgacctctagggccctagagcccgggaggatgacagactgggggcctttcttccacccctggggctgggcagacgctcagcctgtgcaacccgaagctgcttctgcccagtcccagccgcggcccctttaagagggggtggtgcttcagcctggcgccagggacgctgccagcatgcaggccccgagggaagccgagactgcgcttcgtgcgaggcccgggcagcatcggcggcgtggtcagagcgagtctcggagaagatgtggtggcttccgtttgttggtggaggaggtggcaggcctcggcggtaagtggagggggatgaaccccacctggaaccctctgggtctccctactccttcccggccgctccctgctttcgggccctgacttctaagtgggcatctgggcccgagtcgtcagcgttggg

SEQ ID NO: 24073 - DNA, 709 bp, Artificial sequence
  DNA replication origin
tcttccacccctggggctgggcagacgctcagcctgtgcaacccgaagctgcttctgcccagtcccagccgcggcccctttaagagggggtggtgcttcagcctggcgccagggacgctgccagcatgcaggccccgagggaagccgagactgcgcttcgtgcgaggcccgggcagcatcggcggcgtggtcagagcgagtctcggagaagatgtggtggcttccgtttgttggtggaggaggtggcaggcctcggcggtaagtggagggggatgaaccccacctggaaccctctgggtctccctactccttcccggccgctccctgctttcgggccctgacttctaagtgggcatctgggcccgagtcgtcagcgttggggcggttgtgggatcctggcctctgcagcgtccacacccccgccgggaaggctatgccccggtccgacccacgtccagcctataggagcgccctggcccagagccggcggtgaagcgctggactgggtccctccgagccccacgggcctctgagctggggtctagggttattttttatgcctcaggacctttagaaagagacctcgctagagcaggggacatctgtagtttcaattctttgaggagtttccagctatttaactgttttccatggtgtgtaccctaattttcatttccacctacagtgtatgagttcccgtttctccaaa

SEQ ID NO: 24074 - DNA, 1387 bp, Artificial sequence
  DNA replication origin
agagagtccgtggttaaggcaagcacagactgacaggaaaatagtaaagacagtgggcattcaattcaataatttcagttgtacagtattcagcgagcacctactctatgcaaagcaccatgctaggcattgcagggtggaaaaggctaagaaacaaaagaatttcaagataattaggtggagcgggcgggcgggctgctgaggacgcgccgcctgcgccttcctccctgcgtgcctcgccccgggcggcccggggctgccgcggtgcgcgggtgccgggccctgccttgccggccatgggggaagggggcgccgcggcggcgctggtggcggcggcagcagcagcagcagcggcagcggcagcggtggtggccgggcagcggcggcggcggctagggcgcagggcgcgctgccatgggcctggccgggctgcaggcgggaagatgtccaagccctgcgcggtggaggcggcggcggcggcggtggcagcgacggccccgggcccggagatggtggagcggaggggcccggggaggccccgcaccgacggggagaacgtatttaccgggcagtcaaagatctattcctacatgagcccgaacaaatgctctggaatgcgtttcccccttcaggaagataactcagttacacatcacgaagtcaaatgccaggggaaaccattagccggaatctacaggaaacgagaagagaaaagaaatgctgggaacgcagtacggagcgccatgaagtccgaggaacagaagatcaaagacgccaggagacgtcccctggtaccttttccaaaccaaaaatctgaagcagcagaacctccaaaaactccaccctcatcttgtgattccaccaatgcagccatcgccaagccggccctgaaaaagcccatcaagggcaaacagcacccccgaaaaaaagctcaaggaaaaacgcaacagaatcgcaaacacggatttctaccctgtccgaaggagctccaggaagagcaaagccgagctgcagtctgaagaaaggaaaagaatagatgaattgattgaaagtgggaaggaagaaggaatgaagattgacctcatcgatggcaaaggcaggggtgtgattgccaccaagcagttctcccggggtgcctttgtggtggaataccacggggacctcatcgagatcaccgacgccaagaaacgggaggctctgtacgcacaggacccttccacgggctgctacatgtactattttcagtatctgagcaaaacctactgcgtggatgcaactagagagacaaatcgcctaggaagactgatcaatcacagcaaacgtgggaactgccaaaccaaactgcacgacatcgacggcgtacctcacctcatcctcatcgcctccc

SEQ ID NO: 24075 - DNA, 892 bp, Artificial sequence
  DNA replication origin
ctttcgagcgctttgtccaggcgttgggggtcacttcgtttactaatgatgggaaggtgaaaggtgggggaggccactccctgcagtcggggtggcaggtgtcagaggccacatgcaacccactggttttgtcttttctaggatgctgataagtttcccgcggcccccggagcagctctgtaaggccctgtagttgcctttcgttcccttctgctctattgaggagtgggaggatgacaaagtgtttttgctcaacccgaaggaaaatgcacatggaaggacacactgggttattatttgagtagcccaggcaagagaccagcggtctgcttcagccatgagaccacctcaggccaaaatagccttgtggttgttttacttcttttcaccaaatgggtctttttggggtttgtggcgtgtcccatgtaacgatgatctcttggttcccctttctcattcacacccgggagctgaggtggggtggaagagtgggggggggaaggggagtggccacctgcgccaggtgtgagagaagccacacctgagaccagcccctctgtcctcctgcctctgcatgcagcgtccctgcaggaggcagaaggggtgaaaagtagcctcgatgtgaaagtgcttgtgtgtccctgaggggggaagcaagtcacagtcagggcactggttcctgtcattgggtgcagtacaaagaaggaccccaggacatgcggtgcagacgggagcacagagagggtgggtgctactggggtgcacaggcagcttgaggaggatggagatggcaaacttccctttgtcacaccaggtccacgttcagggccagaggaccaccagatccccaaagcctccggtgcttccgaggcagaggagaggcaaggccggt

SEQ ID NO: 24076 - DNA, 2357 bp, Artificial sequence
  DNA replication origin
gggaggaactggacgagctgactggctaggtggccggcggggggacgccgctgctcatcgccgcctgctacggccacctggacgtggtggagtacctggtggaccggtgcggcgcgagcgtggaggccggtggctcggtgcacttcgatggcgagaccgtggagggtgcgccgccgctgtgggcgcggaccacctggacgtggtgcggagcctgctgcgccgcggggcctcggtgaaccgcaccacgcgcaccaactccacgcccctccgcgccgcctgcttcgagggcctcctggaggtggtgccctacctggtcggcgagcaccaggccaacctggaggtggccaaccggcacggccacacgtgcctcatgatctcgtgctacaagggccaccgtgagatcgcccgctacctgctggagcagggcgcccaggtgaactggcgcagcgccaagggcaacacggccctgcacaactgtgccgagaccagcagcctggagatcctgcagctgctgctggggtgcaaggccagcagggaacgtggatagctacggcatgaccccgttgctcccggccagagtgacgggccacaccaacatcgtggagtacctcatccaggagcagcccggccaggagcaggtcacaggggtagaggctcagcctgggctgccccaagaaggctcctccaccagccaggggtgtaggcagcctcagggggctccgtgctgcatcttctcccctgaggtactgaacagggaatcttaccaaagctgctgtcccaccagccgggaagctgctgtggaagccttggaattgctgggatctacgtatgtggataagaaacgagatctgcttggggcccttaaacactggaggcgggccatggagctgcgtcaccagagggttgagtacctgcccaaactggagcccccacagctggtcctggcctatgactattccagggaggtcaacaccaccgaggagctggaggcgctgatcaccgaccccgatgagatgcgtatgcaggccttgttgatccgggagcgcatcctcagtccctcgcaccccgacagttcctattgtatccgttacaggggcgccgtgtacgccgactcgggcaatatcgagtgctacatccgcttgtggaagtacgccctggacatgcaacagagcaacctggagcctctgagccccatgaccgccagcagcttcctctccttcgctgaactcttctcctacgtgctgcaggacccggctgccaaaggcagcctgggcacccagatcggctttgcagacttcatgggggtcctcaccaaaggggtctgggaagtagaatgggccctgcagctgctcagggagcctagagactcggcccagttcaacaaggcgctggccatcatcctccacctgctctacctgctggagaaagtggagtgcacccccagccgggagcacctgaagcaccagaccatctaccgcctgctcaagtgcgcacccaggggcaagaacggcttcacccctctgcacatggctgtggacaaggacaccacaaacgtgggccgctactccgtgggcagattcccctccttgcacgtggtcaaagtgctgttcgactgcggggccgaccgggacagcagggattttgacaacaccccgctacacatagcagcccagaacaactgcccggccatcgtgaatgccctgattgaagcaggggcccacatggacgccaccaacgccttcaagaagacggcctacgagctgctggaagagaagctgctggccaggggtaccatgcagcccttcaactatgtgaccctgcagtgccttgcagcccaggccctggataagaacaagatcccttacaagggcttcatcccggaagatctgaaggcattcatcgaactgcactgacctgcccagaacatctgcaccctcacctctcccctctcctgctgagacgggggaaatcaggctggggtatagcagatgctcgttcttgcctccttcaggcaccaatcaggagaagggttctgcctcccatcccctttacctgaagacagggtctgaggtgttagcgagcctttggtgctagaagccttcagggtcacatgccaagaggacagtctttctccgggagcccactgactcagaaattctgagttaggaaaagacacaagaccttccccacatcctgtctgcctgggttacggaggcctttgccttgttacctagaggcggagggactgaagccattgcgttccttccctgctagaaacacaggaagaagttgaggacggtctgccttcccttgtccttttacatggccaggtaactccccctgctgaatacagtgtt

SEQ ID NO: 24077 - DNA, 1034 bp, Artificial sequence
  DNA replication origin
ggatcccaagacagaagttttcttagtacagaacaaaatgaaaagactcccatgtctacttctttctacacagacatggcaaccatccgatttctcaatcttttccccacctttccccgctttctattccacaaaaccgccattgtcatcatggcctgttctcaatgagctgttgggtacacctcccagacggggtggtggccgggcagaggggctcctcaactcccagtaggggcggccgggcagaggcgcccctcacctcccgggcggggcggctggccaggcggggggctgacccccccacctccctcccagacggggcggctggcctggcggggcctgatcccccacctccctcccggacggggtggctgccgggtggagacgctcctcacttctcagacggggcggctgccgggccgagggtctcctcccttctcagacggggcggttgcggggcagagaaggtcctcacctcccagacggggtggcggccgggcagaggcgctcctcacatcccagacggggcggcggggcagaggtgctccccacatctcagacgataggcggccgggcagagacgctcctcacttcccagacggggtggcggccgggcagagacgctcctcacttcccagacagggtggcggccgggcagaggctgcaatctcggctctttgggaggccaaggcaggaggctgggaggtggaggttgtagcgagccgagatcacgccactgcactccagcctgggcaccattgagcactgagtgaacgaggctccgtctgcaatcccggcacctccggaggccgaggctggcggatcactcgcggttaggagctggagaccagcccggcaaacacagcgaaaccccgtctccaccaaaaaaatacgaaaaccagtcaggcgtggcagtgcgcgcctgcaatggcaggcactcggcaggctgaggcaggagaatcaggcaaggaggttgcagtgagctgagatggcagcagtacagtccagcttcggctcggcatcagagggagacc

SEQ ID NO: 24078 - DNA, 973 bp, Artificial sequence
  DNA replication origin
agagccgagattgcagcctctgcccggccgccaccctgtctgggaagtgaggagcgtctctgcccggccgccaccccgtctgggaagtgaggagcgtctctgcccggccgcctatcgtctgagatgtggggagcacctctgccccgccgccccgtctgggatgtgaggagcgcctctgcccggccgccaccccgtctgggaggtgaggaccttctctgccccgcaaccgccccgtctgagaagggaggagaccctcggcccggcagccgccccgtctgagaagtgaggagcgtctccacccggcagccaccccgtccgggagggaggtgggggatcaggccccgccaggccagccgccccgtctgggagggaggtgggggggtcagccccccgcctggccagccgccccgcccgggaggtgaggggcgcctctgcccggccgcccctactgggagttgaggagcccctctgcccggccaccaccccgtctgggaggtgtacccaacagctcattgagaacaggccatgatgacaatggcggttttgtggaatagaaagcggggaaaggtggggaaaagattgagaaatcggatggttgccatgtctgtgtagaaagaagtagacatgggagtcttttcattttgttctgtactaagaaaacttctgtcttgggatcctgttgatctgtgaccttacccccaaccctgtgctctctgaaacatgtgctgtgtccactcagggttgaatggattaagggcggtgcaagatgtgctttgttaaacagatgcttgaaggcagcatgctcgttaagagtcatcaccactccctaatctcaagtacccagggacacaaacactgcggaaggccgcagggtcctctgcctaggaaaaccagagacctttgttcacttgtttatctgctgaccttccctccactattgtcctgtgaccctgccaaatcccccactgcgact

SEQ ID NO: 24079 - DNA, 1823 bp, Artificial sequence
  DNA replication origin
tttgacttgcagggggtttgtaaatcccatctgtgttttgtgcttctttctagcaaatgtcttctttttggctgggaatgtttacccaatgctcgtacaatcattgtaccttggaagtagttaatttgatgtgtatttcagagtctcagggcagaagggactgcagccttgtctcagaagagactttgggctttggatatttgagtaaatgctggaatgagttaagatttgggggactctagggaaggcatcattgcattttgcagtttgaaaaagacatgagatctgggggaccagggacagaataatatgtttttgctctgtgtctctaccaaaactcatgtggaattttactgggaaatgttaaagttgggggctggtggaaggtgatttaatcatggttgagcgtggagggtggatcctgggggtggtggggagggttggggctataggtgggtggggagggttgggggattgtggtacagttgtggctgaaaggcaggggttgggggtggatccttcacaaatggacatttgagtaaatgctggaatgagttcagacattgggagactgtagagaatgcatcattgtattttgcagtataagaaggatatgaaattggggaccacggggagaataatatgatttggctctgtgtccctaccaaaactcatgtggaatgtaatggggaatgttaaatgtggggcttggtagaaggtgatttaatcatggtagagaatgggggttggaaggtggatgtgggagaatgggggtgcatggtatgggtgggggtgaaacgtgggggtgggtggcagatccttcacaaatggttaaatactatctccttaatgcagtctgtgtgatagtgagttctcatggtaaatgaatgctgtcctgctgggttttggactcggattgggcctgtgtcccatttgtgttatttttctgggaaaatcttccctttggattgagaaagcttacccagtgcctgtgccatcattgtaacttgaaagaaaagaattgtctttcacattcagggactcataggcagaagggattgcagccttgtcttggatgagacttgaacttactacatttgagttactgctggaatgagttaagacttttggaaacttttgaaaaggtatttttgtatttttctgtgtgagaaggacatgagatttggaggtgtcagggtcagaacaatatggtttggctgtgtttccccacaaaaacttatggggaattgtattcctgactgttgtaggtggggcctggtgggaggtgatttaatcacaaacgggaggttggtaggggtggaagggaaaacaagtaggtagggtggggaggagtaggctggcagtagggtggtgagagtgtggtgggcagtaggaagagggagtagcctgctgcagaggcagagcctcatggaaaacctctaccggggcagtgcacttgtggctttgcaggctttagcccccatggctgccctcgtgggctgggctggtgttgagtgcctgtagcttttccatactgagaatgcaagctgttggtgggtctatgaatctgtggtctggaggatggtaaattcctgcgtggggcctccaagcccatatattttttctgcactgtcctagtagaggttttccaagaggctctgcctctgcctgaggcttctgcctggaaacagtggggggtgggggtggtagggggcagatctttcaccaatggttaagcaacatcttcttgatgctgaccttgtaatacggagttctcaggaaatctggttgtataacagggttacacaacgtgtggcacattt

SEQ ID NO: 24080 - DNA, 1828 bp, Artificial sequence
  DNA replication origin
tgtgttttgtgcttctttctggcaaatttcttccttttggctgggaatgcttacccaatgcctgtacaatcattgcaccttggaagtggttatcttgctttgtatttcagaggctcggggcaaaagatatggcagccttctctcagaagagactttgggctttggatatttgagtaaatgctgggatgagttaagacttgggggactctagggaaggcatcattgcattttgcaatgtgagaaagacatgaattttgggggaccagggacagaataatatgttttggctctgtgtctctaccaaaactcatgtggaattttaatgggaaatgttaaaggtgggggctggtggaaggtgatttaatcatggtggagggtggaggttggacggttgggagggtggggagggttgggggaattggggggtggggagggttggggggattgtggtggggttgggggtgaaaggcaggggtgagggtggatccttcacaaatggacatttgagtaaatgctggaatgagttcagacattgggggactgtagagaatgcatcattgtattttgcagtatgagaaagacatgagattggggggccaaagggagaataatatgatttggctctgtgtccctaccaaaactcatgtggaattgtaatggggaatgttaaatgtggggcttggtagaaggtgatttaatcatggtagagaatggggattggaagggggatgtgggagaatgggggtgcatggtatgggtgggggtgaaacgtggggatgggtggcagatccttcacaaatggtcaaatactatctccttaatgcagtctgtgtgatagtgagttctcatggtaaatgaatgctgtcctgctgggttttggactcggattgggcctgtgtcccatttgtgttatttttctgggaaaatcttccctttggattgagaaagcttacccagtgcctgtgccatcattgtaacttgaaagaaaagaattgtcttttacattcagggactcataggcagaagggattgcagccttctcttggttgagacttgaacttactacatttgagttactgctggagtgagttaagacttttcaaaacttttgaaaaggcatgtttgtatttttctatgtgagaaggacatgagatgtgggggtgtcagggtcagaataatatggtttggctgtgtttccctacaaaaactcatggggacttgtattcctgactgttgtaggtagggtctggtgggaggtgttttaaccaaaaacgggagagtggtaggggtggaaaaaaagcaagtgggtagggtggggaagaataggctggcagtagggtggtgagagggtggtgggcagtagaaagggggcgtagcctgctgcagaggcagaggctcatggaaaacctctataccagggcagtgcacctgtggctttgaaggctttagccccatggttgctctcatgggctgggctggtgttgagtgcctgtagcttttccatactgagagtgcaagctgctgatgcgtctatgaatctggggtctggaggttggtaacctcctgtgtgggtcctccaagcccatatattttttctgcactgccctagtagaggttttcctagtggctctgcctctgcctcaggcttctgcctggaaacagtggggggtgggggtggcagggggcagatctttcaccagtggttaagcaacatcttcttgatgctgaccttgtgatagtgagttctcaggaaatctggttgtataacaggtttatacacacatgtggcacctttttcctctctctgtcttgtttctacttctgccat

SEQ ID NO: 24081 - DNA, 1168 bp, Artificial sequence
  DNA replication origin
cgcggcaggggggttggttgcgggtccaatccgtggctgcatggcccacggcagggggcaggttgggggagttatctggtgctgcagcgtctgaggcggggaggttgggggagctactgggttctacgctgcagcggcgaggggagggtgttaggggcgccatcccggggccaacagcgggcggcgggttaggggcgctatcggggggggggtgccctgaaggacactccggtggccgcgaagtgcccttgccagcacccgatctcccttccgaggagaagcagtgcgggccgcaagggcagacaggccctcctcctcaggccgggctggctgcgcgcgtgcgattctggggccgcccaggcgagcccagtagaaccggcgagcccagcagtgcccgcccgcagctgcagccccacctgccagcgcgtgccgcttcccagcgacttccgggagcccggcggccaccgcggtgcaggcgcgcgcccaacggctttgccaggctcactaggtctgagaggtcagaggctgcgagtgtcgctgctgaaggctgtggtggaccgggctggatcgcggattttggagatcatagatttgggatcgcggattgggggttggatcggggatttggggttggataggggatttggggctgggtcggcgggggcggggggtggtagtgaaaaggtgacagggattttgatgtaatacacctaataaggtctgaatatttttaaaaacgttttcttgaagctaggcacagtgacatgttcctgtagtcccagcttgagcctgagtttgagttcagcttgagcaacatagtgagacttgcctctaacaacaataacagcaaaaaaataaacaaaaaaacccctcaaggtttggatacactcctgattaagaaccccagaatagataattgcaacctataaatttctgtatctcagaaacataagaaatctctagaagaagtggcgtttgataggtgctacttcaaagttctccttttcagtaatattagcctgacttatctgtctttctctacgtctgtgactgggaagtgaaaggaaatattattggcaatatctctcagcttacagaataacaccttttccttcccacaattaatcattcactaccattcagagtctttagaaatttgcttatgggt

SEQ ID NO: 24082 - DNA, 1301 bp, Artificial sequence
  DNA replication origin
taggcttgttatgaaaattaaataatacatgtaatatccttattaatgtgctttcttgttattggctcaataaatgttaataaaatgagtgattcttattttcactatggaattccagaaaggaccatttaaagaaaaaagtcattcttactcctttgagattttaagaacttgttcaatagcattttaattttatttctttctagtcacctggccttagtaatagtacctaccccacgaggttgtgaagagaattaagtgagataagatacataatgtactttaaaaggcttctgtgcctgatggtagtcatgcaacctgtgcagccactgttattatttttctattgtacaggactattttctatgttgctaaaatctatgaaagttgagggttaccaaaaaagtgggcaaaggagacacacagacacttttcaaaaaaagacatttatgcagccaacaatcatatgaaaaaaactcaacatcactgttcatttgagaaatgcaaatcaaaaccgcagtgagatatcatgcatggcagggatatggcaggggataggttaggggcagtatccggtgatacactgcaggtgggtggggggcgggaaaggggggtacagggaggtgattggagggggtggtttcgggcgctgtggcgggctagactgctcatgatagaggggggcgttgggtgcgctattgggggctacactgccagcggcaagggacagtttgggggcgataccccaccagtggcgggtgaggaggtgtgggttgtgggcaccattagggggctgtactgtggtcaatgggagcgagttaggggagctatcagctgctgcactgcctgtggcggggatcaggtttggtgcgctatcgggaccatattatcggtagtggcatacgggttaggggagctgtcgggggctaagccgtccacggggggtgcgggctgggtgcgctatccagggcatcataccccgcggctggggaatggttgggggtgctatccgctatctgggactgcattgcccatcgtggggagcgggttgggggccttaaggatccgtggctgcactattcacggcggggatcaggttgcagcgctttctggggcgtcactgcccgcggcaggggggttggttgcgggtccaatccgtggctgcatggcccacggcagggggcaggttgggggagttatctggtgctgcagcgtctgaggcggggaggttgggggagctactgggttctacgctgcagcggcgaggggagggtgttaggggcgccatcccggggccaaca

SEQ ID NO: 24083 - DNA, 2114 bp, Artificial sequence
  DNA replication origin
cctgccacctttctaccatgctggccaagctgcaacctccatcacctccaccaaccgcagtgaggtgagcctagataccacaggctcaagccgccagctcggggtatgtggctcccacttcctgttctctaagctgagctcccagcttcgattctgattggatgagagcaagtcttaggacaaccaatcacagcatgaaaataaagtccaatcagaataggcctagaggttttctctcatccaatcagaatatgtagtccaggaacctcatttgcataagctcatgtataaggcatgcagaaggggcatcaggccattccaggctcttgtgtggctgcctgcgcagctgctccgtgccaggcttagaggaccaggagaaggggtagtcacttgccacagctggaggctggagcgtgtggcaccacggctcgcctcgctgtggtgggtgctggcgacagagacggcagctcggctggagtggtaggagggggtacatagtttttgggtagatggagggataaagagggtggctagcagcaaagggaaaagaggatggcaagcaggagaaggcattgcaaaaagacggtggggaaaagatggttgaaaaaagtttttgggtatctagggggtaaaaaagggtggcatgtagaaggaggaaagacagggtggtggggggggaaaacggggacaagtaggaaggagagaaggtttgcaaaaagacggtggggagaaacacggtgaggagaacagaaagactggggaaagaaaagatgtgtaaaaagattttgggtagatggaggtgggaaagggtggcacgtgggaggaagaaagagggtgcagagagggagggggaagacagaaggtggtgagcaggagggagagaagattttgtgaaaagtcggtggggacaagatggtggggaaatacttttttttcagtagatggagaaaaaagggtggtgatcaggagaagaaaaaagggtggcgagtaggaggaaggagaaggttttgcaaaaagacggtgggaagaaaagacagtggggagaaaaaactgggggagaagcttttgggtagatggaggagagaaagggtggcaagcgggagagtggaaggaggattgggaaaacgacgatggaaaaatagttttggggtagatggagggcgacaggaaggtggcatgtaagaggaggggcaggaatgaggaaaagagggtggtgagcaggagggacaaaagagggtggcaagcagagggagacaaggttttgccaaaagaccgtgaggaaaagacagtggggagagaaaagtttttcggtacatggagggggaaaagagggtggcaagcgggagaggggaaaagaggatggcgagtgggagggagacaaggttttgtgaaaagatggtgggcagaaaagacagatggtggggaaagaaaagacagacggtgggtaaaatgtgggtagacgcagcgggaaaagagggtggcaagtggaaggagaaaagagggtggcgagagggaggagggaaaaagttggggaaaagacgatggggaaaatagttttggggtagatggagggcaaaaggaggatggtaaggatagaggaaagaagagggcgagtgggaacggggatggcttagtgaaaagacggtggggaaatttgcgggggtagatggaggaagaaagagggtggtgagcaggagtggggagaaggctttgtgaaaagacggtggggagacgtttttgcgtagatggagaagggaaagagggtggcaaggaggaggggggaaagacgatggggaaaacagtttttgggtagatggaggttggaaaagcgggtggcgagcagcaggaatggcgagaaggccttgggaaaatatgagggaaaagttgggtagatggaggagcaaaaggagaatgagagcagaagggagaaaaagagggtgtccagtgaggggggaaaagtttttgggtagatggatggcgaaaagggtggtgagcaggagagtagagaaggctttgcgaaatgacagtggggaaaaatagtgggagaaatgttttggggtagatgaagaaaaagggtggcgagagggagggggccaaaggtggttgagaaaaga

SEQ ID NO: 24084 - DNA, 1375 bp, Artificial sequence
  DNA replication origin
aatgaggttcctggactacatattctgattggatgagagaaaacctctaggcctattctgattggactttattttcatgctgtgattggttgtcctaagacttgctctcatccaatcagaatcgaagctgggagctcagcttagagaacaggaagtgggagccacataccccgagctggcggcttgagcctgtggtatctaggctcacctcactgcggttggtggaggtgatggaggttgcagcttggccagcatggtagaaaggtggcagggtaggtgagctatccagggatgcgctaccctgggtaggagcactatcaaggtcacattgccggtggggtatcgggggcatgggttggcggagttggtgggggctatactgcctggtggtgggggtggttgtgtgtactaagggggctgaccgccagctagggggagggttaggggtgctatcagctcctgcactgtcatggcaggggggcaggttgggggcactatctgggctgtcactacccccagcaagggctggttgggggcactatccctggctgcactgctgggggcagtggggcagtttgggggcactatcaggtttacatgccctgtggcatgccggtgggggggcactattgggggttgcactgcactgctgcttctggcaacgggctacgggggtggctgcgatagctgtggcctccaaggaaggggccgtcctcctcttcccagactctagattctagagggcaacctctgtttgctcatgctggagcgtggcaggtgcacaatgtttccttgggaatcctcagcagggtaaggcccccacacccgccatggttcccgggcctgccccttctcactgtgttgcagagacaatctgggacccctgggcacggagtattgggcaccacgggggaacagggtcctgtgggtggaggcatcagaaacaggaactggcacttggttggagagagctagctgggtctgagtttctgcttctcctgctcaccaaggagtgcagccagcgtgggcccagcagttcctggccagctggacctcgccaggggccggtttcagcaaaggcagtcacacccaccccaggtcccagttgtgcctttgatgaaaccagcccctgccacccagtggccagcatgacaaggtgagcctctaacactaccactccctgcatcctgttctaggcacgtctggcttttaccacccagttgcttcgagccaggagatggaggagtcatctgttgcacgctggaggctggagcctgcagatggcatggttctgtggctcacctcgctgcagttggtggcagagacagagactgcagcttgaccagagtggtggagtggtaggagagtgtctgcg

SEQ ID NO: 24085 - DNA, 1532 bp, Artificial sequence
  DNA replication origin
ctttctcgtttgaatggttttactgcaagtgcctctggtgcttctgggaagtggtggagaggggatgggcagctcgagagacagtgatgctgatgcaggagtcctggaggggtgggtccagggagcagagggagaggacagcaggcaccccatgtgccccaagtatgggcccaggagtgcccagatgcagtgacagatgtggccgggcctcccctgtagggggggtgggctgccttgtcctggggccaggtttgggccatggggaagtgggcaggggtgaggactagaaagggacgttgcagggggtacctgctgggctgaaccacgtgagtggtggggaagcctggggcacctgtcctggctacacacagcatctggagcccagggcagactcctgactcagagtttttgggtggggcctgggccttgacatttgtaaagctgcccaggtagttctggtgcacagacaggttagggtcctggctgtagggatgtttgggctggggtggggcagggccccatgaagaggccagggctggatcccatgggagggcccagcagggaggtacccaaagagcccaggacttggccttgggggtccttgccatccagcagcaccaagcccctggttctctgggatgacagtggtcatcccatctcaccactttgtgtgtctagacaggctgatcacatatcgggtgtttcagaagcttctagaaggaggagagccagtgtagacaggaggtgtgtgcacaggtatggagcataggacaaggatgtagatgagagagaggctgggcactatgggaggggccacctgaagctgagggcagcgcaaagagaaagcctgagagtctgtggagcctgccagaagggagtgagcttgtgctgagctgaggtgcagctgtgcctgttcaggtgcacatgtagctgcaggtccatgtgcaggtgggtgcaggtgtggggttaggtgcaggtgtagatgcagctgggggtgcagatgtgggggtagcacaggtgtagatgcaggtgtgagtgtggagttggtacaggtgtagatgcagctgggggtgtagatgtgggggctagccacaggtgtagatgtaagtgtgggggtaggtacaggtgtagatgcaggtgtgggtgcaggtgtgggtgtggagaaaagttgcaggtcactggggagagcatgtgccatgggagggagtgggctgtgctgccccttctcagggtgacacgtgggaaggttccctgcgaagtggggtaaggaatgcccagggctagttctgcagttgggaaagagggacagggtggaatgaaggagtacacagagtggctggggtgcaggagggaagtcgctgagtctgcttgccagctttaaggtgggagagaccaaaccgtgaccatgtgagggtctggaccctccttcccatctgctgtcttcccaattctcctctccatgcccatctctctccccaggcctccagccttccctgtggagtatgggtgggtgaacagagctggatggggga

SEQ ID NO: 24086 - DNA, 1258 bp, Artificial sequence
  DNA replication origin
gaagggcagaaagaaagaacagaaggacagaaggcagaaggccagaccagaaggcagaataccagaagaaaagaaggccaggccagagcaccagaaagccagaaggctagagggataagccagaatgcagaaggccaaaagacagaaggccagcaggaaagaaggcagaagacgagaacagaaggcagaaggccagatggcagaaagccatgctagaaggcagaatgctaggccagatggccagaaggcacaaggctaggccagaagggttggcaagaaggccagaaggcagaaagccaggaggccaggccagaaggaacatggccagaaaacaataggtcaaaccagaaggccagaatgccagaaggccagaagactggcaagcagaaggaaaggaaggaagggagggaggaagggagggagggagggagggggggagggaaaaggccaaaggcctggctagatagccggaaaaatgaaggcaataggccagatggccagaaggcagaagaccagcacagaacgccagaaagcagaaggccaagccagaaggcaagaggacagaaggccatgccacatggccagaaggccagaagacagcgggccagaaggccagaaaacagaaggcaaggcaagaaagcagaaagtcaggccagaacagaaagcagaaagaggacagaacaccaaacaaaagaaggaaggcctggagttccagaaagccaggaggccagaaggcagaaggccagaagaaaggccaggccagagaaccagaaaggcaaaggcaagaagatagaagtccagaaggcaaaagtcagaaggccagagggcagaaacccaggccagagaaacaggccagaaggcaggtggccagatgaccagcaaggagagaccaggaaggaaggaaggaagtgagaaggccaaaggcccagccggatagccagaaggcagaatgtcagatagccagaggcagaagaccagagaagaatgccagaaggccagaaagcagaaggccaggcaagaagggtgaaagccaggccagaaaacaaaacgctgaaaggaagaaggccaagctggagtgccagaaagcctgaaggccagaagtaagaaggacagaagaacaaaaggcagcaggccagaaggccagaaaagagagggccaggccagaaaacagaaggccagaaaacagcaggccagatgaccagaaagcaaaagacaaggcaagaaggcagaagaacaagacgaggaggccaggccagag

SEQ ID NO: 24087 - DNA, 1430 bp, Artificial sequence
  DNA replication origin
tcagagtaggcctaaaggtttttctctcatccaatcagaacatgtagtccaggaactgcgtgtgccttaacctcggctataaagcatgctgaggcggagtcccctcgtttcaggctcttcagtgtcagtgctcagtatctgccttagagaactacgagaaggggctgctagcagccgccatccggggcactgggtggctgcaggtggtggtggcgatggaacggtaggagggcggccagcagcgggagcttctcctgccgggcaggaggacgagtagaagggagaggcaccaccacatgctggaggctggagcttgcaccgccgcagctcgcctcactgcagttggaggtgacgttggacactacagcttggccagagtggtagaaatgttgttgcataggtgagttatccggggctgcactgtctgtctctgggggcaggggttgggtgtccaattgtggctcactgcccgaggctgctctgcctgtggtagggggctggttgggggcactctccagggttgcattgctggcggtggggagggttggctgcctaaccagggggctacattgcccgcggtggtgggggtgtttgggggaggcaagttgtgtgcactaatgtgtactgtcggtggcgggggacgggttaggggcgctattttctgctgcactggctgcggcagggggtgggtggggtggttatccggagctccaatgctggtagtgggggtggtttaggggcgttgttgggtgttgcactgcccttggggcgtgctatcaggagctgcgctgaccttggtggggcacgtgtgagggactggtttggggcactatctagtgcaacaacacccatggctgggtcaggtcgtgggcactatccagtgctacactgcctgggtggaggtgctttgggggaatactggggttacactgcctgcaaactggtacggggtgtgttgggtgtgctatccaggagatacacctccagcagcagggggcaggttaggggtgctgtcgggggtacactgtcagcggcgttggtgggctgcagaggtggcagtgacagtgacagcagtggtctccttctggtgaccattctcctcttcccaactccagactctagtggataacctcctcctgttcgtgcactctcgaacatggcagggcccccacaccaacagcggttccctggcccatgcccccatgctctgtgttgcagagaccacctgggactactgggcagggagtagtgggcatcacgggggacagtggggacagggcactgagggtggaggtgtcaggaatgggaaccagcacttgtgtggggatggctggctgggtctgagtttctcctactcctgctctgtcagccctggtgggcccagcaatttgtggccagctgcacttggctgggggtggtttcagcgaagg

SEQ ID NO: 24088 - DNA, 2573 bp, Artificial sequence
  DNA replication origin
cccgctgctggccgccctcctaccgttccatcgccaccaccacctgcagccacccagtgccccggatggcggctgctagcagccccttctcgtagttctctaaggcagatactgagcactgacactgaagagcctgaaacgaggggactccgcctcagcatgctttatagccgaggttaaggcacacgcagttcctggactacatgttctgattggatgagagaaaaacctttaggcctactctgattggactttattttcatgctgtgattggttgtcttaaggcttgctcttatccaatcagaacatgataataaagtccaatccgagtaaccccggaggttccttctcatccaatcagagcgtgcagtccaggaatcctcctgtatataacctcagtatatgaatgctgctgaagggaagtcaggcccttgcaagttcacgtgtcttcatgtagagctgcttactgcccggcttagagaaccaggaatgggttatcagcggctgtgcactggatggtggggccacgacaacgtggctcgcctggctgcggttggtggtggcggcaacggagacggcagcgtggctggagtgataggagaaggaaaatagttttgggatagatggagggggttaaagcgggtggttaggagtaaagtgggtggttagtgccaaagggaaaagaggatagcaagcaggagaaggcgttgcaaaaagacgataggaaaaagatggtgggaaaaaaaaattttgggtagatggagggggaaaaacagggtggggagcgggagggagggaaggttttgcagaaagacggcggttaaaaagtttatgggtagatggagggggaaaagagggtggcaagtgggaggaggaaagagggtgatgggggggaagtgggggtgagcagtagggagagaaggttttgtgaaaaaaatggggagaaaggttttggttagacgggagaaaagagggtaacaagttggggaaggaaaaagagggtagctaggaggaagacaaggttttgcgaaaagatagcggccagaaaagaaagacggtggagaaagaaaagacggtgggtaaaaagtgggtagatggagtggggaaagagggttgggaaaaaagggaacttagtttggagtagatggagggcaaaaaagagagtggcaagcaggacaggtcaaagaagagaacgagtgggaagaggggatgactttgtgaaacggcggtggggaaaatttgggaggatagatggagggggaaaagagcgaggtgagcaggagccggggagaaggctttacgaaaatacggtggggaaaattttgggggatagatggagggggaaaagagggaggtaagcaggagtggggagaaggctttgcgaaaagacggtggggaaatgtttttgggtagattagagaagggaaagagggtggcaaggaggagcggagggaaagacggtgaggagaacagttttgggtagatgaaggggtaaaagagggtggtgagcagcaagagtggggataaggctttgggaaaagacggggaaatgtttttacttagatgaaggagcaaaagagggtgatgagagtgggacggggaaaaagaaggtggccagagagaaggggaaaagactgggaaaaatcagtggggaaagtgtttaggtagacggttggggaaagggtggtgagcgggagagtagagaagggtttgcgaaatgacggtggggaaaaagttttgggctagatggaggaagaaaatgggtggtgaggggggagggggccaaaggcggttgggaaaagaaggtggggaaataaaggtgggagacaaaggttttgggtagattttttaaaaatcagattgtttatatttttgcttttgagtagtttgagttctttatatattttgtgtcttaaccccttggctgatgcatagtttgcaaatgctttcttccattctctgggttgcttcctcattctactgattgcttcctctgctttgcagaagcttttaagtttaatgtaattacatctttggttttgttgcttgtgctttgacaagtttaatgtaattaaacttttgcttttgttgcttgtgcttttgatatctatttgaaaatcccttgtcctaaccaatttcatgaagcgtttatcctgtcttcgtctctagtactttcatggtttctggtcctacttttaaatttttattttgagtagatttttgtatatggtaagataacggcctagatggattcttgtacatgtggctgttgggttttcctagcacagtttattgaagagattgtccttcctgaatgtgtgttcttggtgcctttgttaaaaatgagttgactgtaaatgcgtgaatttatttctgatttctcattctgtttcattagtctatgtctctgtcattccttcatttctcggtctctcccccgcccattttttgatagtcttatgctgttttgatagtacctggcttactataggtttgtagtatattttgaaatcaggtagtgtgatgaatccagcttttctttttattccagattattttgtctatgtgaggta

SEQ ID NO: 24089 - DNA, 1365 bp, Artificial sequence
  DNA replication origin
tgctgtgacttgggtagatgccgtgaaggcctctcaaaggcggccatgtttgcaaagatctgaataaggcacctccagaggaaccggtctggggcaactggggaggaggcagcggcacaagttcgtggtcaagccactgcaaggctgggagcttacttacaaagcaatgttcctccacctataaagacgcagtagctgctccatccccggtcagaggacccccggaaacgtctcagcccacgcactgccctctgaccccactgccttcccgccagtcctgcatccagtcagagggccctctctgagcctgctgccttcccgccaatcctgcatccaatcagagggcgtccccactacgtggtttgcacaacggccaatcaaaactaggatccgagccttggcccgcctcccaggacgtccggaccaatggtggcctggcaccagcaggccaatcccagacagcgcacggcgggaggctgtcgttgggcgtgcgcagctgcagcggcggttgaggtcaagtagtagcgttgggctgcggcagcggaggagctcaacatggtaaggccaggtcactcccaccccgcagacgcccaggctggagggtggacgaagttggcctcctgaggtggctggatggagggatgctgttgcgggccagggtgcagaaaggaggtcagagaaggatgcggggcccagggcgggacacgaggacacggcatcgtctgctgggtctgcgggctccagggcagggatggcagcttttgttttagacgaagctgccggccttgagtcagtggacggggagcattgaccgtgtcctgtcccccagagagcaaacagtggtgccgcctcctgaagacagaagggcgctgctcccgctttccggtctccaaatgtctctgtcctattggaaaccactgaggagccccaggagccttgttgatggaggcaagggctgtggacattggtcagatcaggaattaaagctcagacgggagttggaggcggggaatcccctgaggtcaggggctcctcactagcctggccaatatggcgaaatcccttctctactaaaaatagaaaaattcccggggtggaggcgtggatctgtggttccagctactcgggaggctgaggtgggagggtcagctgagcccaggacttcgaggccgcagtgagtcatgatggtgccactgcactccagcttgtgcgacagagagagaccctgcctcaaaaaaaaaaaaaagcaaccaacgcattcacataaagaatagatttctaagtcccaagtctgaatagcagtggccgtggtttgtcaagtatctttttttttttttttttgaaacggctcaacaacagctctgt

SEQ ID NO: 24090 - DNA, 1139 bp, Artificial sequence
  DNA replication origin
cctcatggtgggtttcggggccaaccggccggctcgccgcctgccttctcttgtgctggtggtgctgctggtagtgaccgtcgtcctcaccttcaactgctggagcatctcttcttgccacgtcctgcttcaggaggaggtggccgagctgcagggccaggtccggcgcaccgaagtggcccgcgagcggctggaaaagggcaattcggacctcttgctgttggtggacacgcacaagaaacagatcaccagaaggaggccgactagggccgcctcaacagccggctgcaggtcagacagggcctggggaagagatgcgaggatgacaaagttaaactacagaacgacatatcatatcagatggcagacatacatcatttaaaggagcaccttgccgagggcttcgtcaggagtttcttcgacaagaagaccagcttcaggactataggaagaacaatacttaccttgtgaagaggttagaatatcaaagttttcagtgtggacagcagatcaaggaattgagagcacagcatgaagaaaacattaaaaagttagtagaccagtttttacaggaacaaaaggaagaggccctcaagattcaatcaaatgacggaaaagaactgggtataaacgatcaagtagtacctaaaaatattccaaaagtagctgagaatgttgcagataagaatgaagaaccctcaagcaatcatattctacatgggaaagaacaaatcaaaagaggtggtgatgcagggatgcctggaataaaaaagaatgacctagcaaaagtcgatgatcttccccctgctttaaagaagcctcctatttcagtttttcaacatgaaagtcatcaggcaatctcccatcttccaactggacaacctctctccccaaatatgcctccagattcacaggtaaaccacaatggaaaccctggtacttcaaaacagaagccttccagtcctcttcagtgtttaattccaagctcaaacttggacagtgaacctagaattcaaacagatatactaaagcaggctaccaaggatagaatcagtgagttccataaattgaagtaaggccacttctttgatgagaatgaatctcctcttgatctgcagcatggctctaaactggcggat

SEQ ID NO: 24091 - DNA, 1307 bp, Artificial sequence
  DNA replication origin
ggtggctggccgggcggggggctgacccccccacctccctcccggacggggcggctggccgggcagaggggctcctcacttcccagtaggggcggccgggcagaggcgcccctcacctcccagacggggcggctggccgggcggagggctgacccccccacctccctccgggacggggcggctggccgggtgggggggctgacccccccatctccctcccggacggggtggctggccgggctgaggggctcctcacttcccagtaggggcggccgggcagaggcgcccctcacctcccggacggggcggctggccgggcggggggctgacccccccacctccctcccggacggcacggctggccgggcgggggggctgaccccccacgtccctcccggatggggcggctggccgggcggggggctgaccccccccacctccctcccggacggggtggctgccgggcggagacgctcctcacttcccagatggggtggctgccgggcggagaggctcctcacttctcagacggggcagctgccgggcggaggggctcctcacttctcagacggggcggttgccaggcagagggtctcctcacttctcagacggggcggccgggcagagacgctcctcacctcccagacggggtctcggccgggcagaggcgctcctcacatcccagatggggcagcggggcagaggcgctccccacatctcagacgatgggcggccgggcagagacgctcctcacttcctaaatgtgatggcggctgggaagaggcgctcctcacttcctagatgggatggcggccgggcggagatgctcctcactttccagactgggcagccaggcagaggggctcctcacatcccagacgatgggcggccaggcagagacactcctcacttcccagacggggtggcggccgggcagaggctgcaatctcggcactttgggaggccaaggcaggcggctgggaggtgtaggttgtagcgagccgagatcacgccactgcactccagcctgggcaccattgagcactgagtgaacgagactccgtctgcaatcccggcacctcgggaggccgaggttggcggatcactcgcggttaggggctggagaccggcccggccaacacagcgaaaccccgtctccaccaaaaccagtcaggcgtggcggcgcgtgcctgcaattgcaggcattcggcagactgaggcaggagaatcaggcagggaggttgcagtgagccgagatggcagcagtacagtccagcttcggctccgcatgagagggagaccgtggg

SEQ ID NO: 24092 - DNA, 1239 bp, Artificial sequence
  DNA replication origin
ggccgcccctactgggaagtgaggagcccctctgcccggccagccgccccatccgggagggaggtgggggggtcggccccccgcccggccagccgccccgtccgggagggaggtgggggtgtcggccccccgcccggccagccgccccgtccgggagggaggtgggggggtcggccccccgcccggccagccgccccgtccgggagggaggtggggggggtcagcccccctgcccggccagccgccccgtccgggaggtgaggggcgcctctgcccggccgcccctactgggaagtgaggagcccctctgcccggccagccgccccgtccgggagggaggtggggggatcagccccccgcccggccagccgccccgtccgggagggaggtggggggggtcagcccccccgcccggccagccaccccgtccgggaggtgaggggcgcctctgcccggccgcccctactgggaagtgaggagcccctctgcctggccaccaccccgtctgggaggtgtgcccaacagctcattgagaacgggccaggatgacaatggcggctttgtggaatagaaaggcgggaaaggtggggaaaagattgagaaatcggatggttgccgtgtctgtgtagaaagaagtagacatgggagacttttcattttgttctgcactaagaaaaattcctctgccttgggaatcctgttgatctgaccttacccccaaccctgtgctctctgaaacatgtgctgtgtccactcagggttaaatggattaagggcggtgcaagatgtgctttgttaaacagatgcttgaaggcagcatgctcgttaagagtcatcaccaatccctaatctcaagtaatcagggacacaaacactgcggaaggccgcagggtcctctgcctaggaaaaccagagacctttgttcacttgtttatctgctgaccttccctccactattgtcccatgaccctgccaaatccccctctgtgagaaacacccaagaattatcaataaaaaaataaattaaaaagattttgtatcgtccagacagagaacccaattttgaaaatcaaagttccaggccggacacagtggctcaccctgtaatcccagcactttgggaggccaaggcgggaggatcgtttgagcccaggaattcgaaagcaacctggacaacatggcgaaacaccgcctctacaaaaaatacaaaaattaggcaggcttgggggtgcgtgactg

SEQ ID NO: 24093 - DNA, 1282 bp, Artificial sequence
  DNA replication origin
tgcttgtcgccgaagcggggtgggcttgttcgttccgcgcagccgcagccagaaccgggtgacgcttatccccgctgtctttccagtccagggccgctgagagtgggggtggctgggagcagcgcagcctccggaggaggaggcggaggccgaggtgagtggggaggcggagatgggtgagagcagcctccggaggctcccaccgacccgggattaataccccgcggcgcggccgccgtcgccgttgccgcttcggggcctcgagggcagctcggggctgccctcctgtcaccggcgcttttgcgtccggcctgaggggctgggagagtgcgagcgaggccgggagggttgggtgaggcggtcgccagcggcggaggtcgcggggccggcggggaggcggggtggcggggcgggttgccggccgcccggggaggtcgcggggcatttttctttctctcctgccgcatagtggcggggggcgggttgggcgagggaggggcgccccggccgggtcttcgctgtcaggaccgcgctgccaccctgccgccggagccgaggtccccaggtttttcgggcgagggcttctgcctctgccccgctgggtcccctccttcgctcatcttttcccaggcgctgcgcggcttttactctttgctgctgatctgggcgagtttaatggcggatctggggccctgtcgtcgactgctggggccccagggcaacttcttgaggcaactgtgggcccagaggtgatgcgcgccgcccgttacctctgaaatggtgcttggagtgacagagatgacgctgggtgggcaaatttaggagggaatacaaatcccttgctggcgtcgagacgacgtttacccttccctctcccgtcctgggagcaggcctcggatccccgagcccactgcatccccagtactgcagttggacgaagcacttttagctttgtctcgtcgttgcggttcctatagttcttttttttcaacttagtttctcggtaacattagggtgggggagggtagcagagcccaggaactccttggcctcttacccctttgccacctcacggtgttgagttggttgtgcatccagattggttgtaccgaaattggttttcaattctcattctaggaccaggaatcaccttcaagcctatgtcgtgaggctttggcagaaattaagaaggaaatatctccattgtgagttgtttttttttttttaccccgctttgctgtctaatataattagtgcagtagtagggtgttcttcctgaggg

SEQ ID NO: 24094 - DNA, 1222 bp, Artificial sequence
  DNA replication origin
ccgggactggaccgagcggagttgtgcgtgtcgccgaaggggggtgggccgggggaggggaggttcgttccgcggagccccagccagaaccgggtgaggcttatccccgctgtctttccagtccagggccgccgagagtgggggtggctgggagcagcgcagcctccggaggaggaggcggaggcggaggcgactagggaggcggagatgggtgagggcagcctccggagcctcccaccgacccgggattaataccccgcggcgcggccgccgtcgccgctgccgcgtcggggcctcgggggcagctcggggctgcgctcatgtcacaggcgcctttgcgtgcggcccgaggggctgggagagtgcgggcgaggccgggagggctgggtgaggcggccgccagcggcgggggtcgcggggccggcggggcggcgggacggcgggacggcggggcgggggtgccggccgcccggggaggtcgcggggcattttcctttctctccggcggggggcgggggaggggcgccccggctgggtctccgctctcggggcagcgctcccaccctgtccaccggagccgaggtccccaagtttttcggggtgagggctgctgcctctgctccgccgggtcccctccttcgctcttcttttcctcggcgctgcgctgcgcggctcttgctccgcacgtattgtttggctgggtctctaatggcggacggggaggcagcgctgccggtcgccgactgcaggggggggcaaacctcaggcccagggcaactgcttggggcaaatgtgggcgatatcggcccagcagtgacgtgagccgccccttacctctgaattggtacttggagtgacggggatgacgctgggtgggcaaatttaggagggaatacaaatcccttgctggcgtcgaggcaacgttttcccttcccccctcccttcccgggagcaggctcggtgtccttaggccccctcccttccagattttgcctttcacatgggttttggccccaaatatgtattttgcgctgttttgccccacttacgcaggagggggctgttgtgcgcatggtgggggtaataatagaaggaccgaacctccttgacctcttattcccttctctgcctccttctggcagaaagggttgggttctcccaccaggttgtgtgtttttgatacatttttcttttttcctcctatcccaggaccaagaatcgc

SEQ ID NO: 24095 - DNA, 1485 bp, Artificial sequence
  DNA replication origin
tgcctgcgcgattcaaacgctggagctactctaaacaaggcctggccaccccggacacgccgagggagctggcggcggtcaggctgaaggagaggggccgtcaccgccccgcgggaggccgcggtcgcacactggcgggcaggggacatgggacacccagctgccgggcagcaaagaggggcaaactcgagagtgggaaagtaggcgatgctgacttagcggctgcgggggagaacggcccagcggagggcgccacgccacggccggtgccgggaagctcctgttccggggctgctctgtcgcccgccggatgcggacgcgcacgctgggcacctcccctcggccaccagacctcacctcacagctgacctcaccctcagggccccagcattgaccctgagggacgcgcgggctggccctgctgcccactcggggtacgcccccgagggacacgcccgccttcgctctcgcagggcaaggttgctcagcaacttccccagccccatggacacccggggcggcatcctgatgtttcagttgggaggaaccagagagaatcaagacttggtccaggtcctgcacatggctcacgcctataatcccagcactttgggaggccgaagtgttaggatcacttgagtgcaaaagttcaagatcagcctgagaaacacagtgagaccccgcctccaaaacaagtttaaaaaaaaattagccgggcatggtgatgcaacgcctgtaggtagtcccaactactagtgagggtgaggagggtggggggtgtggaggctgcagtgagctatgatggcgccactgcactccagcctgggcaacagaaggagaccctgtctaaaaaaaaaaaaaaaaaaagaaagaaagaaaataaataaaaaataaaaaaagctttggtctgaaggaaaaaacgtggcctaaagacttgcttgaggtcacaccaggatgcagaaaacataagcagtggctccgggaaggactgtgggttaataagcacggttggtaaatggcagacccccagctgaagcccaggtcctcagatgcaagcccacagctcctccactaagctgtgactaacactagagccaagggagccgcaggggtacagaagcgatgcttgccatcaagaaaggaggtttgggtgtggtgagaggtagaggaggggggtgagaggagagaagggagggggtagggtcagaaaggcgggtcggcacccctacctcctcactaacagagcaggcagagctctcagcctgggcatggtggggcccactatggtgagatcctgctgaaaataccctgcgctttgaaaacagccgcatccagaaatccaggatcactgggaggggattgcagtccaaagagatgacgctgagcaacgatgctacccacgtttgtgtgagctgagcacttcctaaaactagaggctccgtttcatagtagcctactgcttctctaattttagcttacccaaga

SEQ ID NO: 24096 - DNA, 1607 bp, Artificial sequence
  DNA replication origin
cctcctcctcgggggtccctgccagggcgctcccctccagactgctgccgctcccatccagcagcaggggcgccgcgcccgcctcagcctcgtgcgcgagtggcggggagctgctgccgacggggctgggggctgcaggcgtggacgctgccgggtaagccttgagcgccgggggctgccgctcggccgcctggttggcccagttctgctcagtcatcagcaggtggtggtggccgttgtagagcttggcggactggccctttccgcgcgcctcggtcagggctagcagtttgaagtccgcggctggtggcggggccccggggtagcccacggcgcgggcctgtcccaggggcgcagcggtgtgcgcatagtagggtgggaacccgatggcaacggcgggcggccgggagctggggggcaggggcgggggatcggctgtccccagcggggcctcggaggcgtccgggccgaggcggctggtcacgccctgcttgagcttcttccagcccaggtggtagatctccagcatgttgagcagcagggacgcgcaggccaccgccagcatgaagatgatgaagatggtcttctccgtgggcctggagatgaagcagtccaccgtgttggggcagggccagcggtcgcagcggtagagcggcttcagctcgaagccgtacagaaagtactggccggcgatgaagcccacctcgaacagcgtcttgaagatgatgttgaagacgtaggtccgcagcagcgccccggccatgcgcaccctgccgcggtcgtcccgcgacgagggattgtcctgcggtggctccttggggctggggctctctctcttcagctgctcctcctcctccctctctttcttcttctcttccatgcgcacgatgtgcagcacgtggcccaggtagatgagggtgggcgtggacacgaagatgatctgcagcgcccagaagcggatgtgggagatggggaaggccctgtcgtagcagacgttctcgcagcccggctgctgggtgttgcaggtgaagtctgactgctcatcgccccacacgtcctccgccgcggcccccagcaccaagatgcggaagatgaacagcacggtcagccaaaccttgccgatgaccgtggagtgctcctgtgcattttctaagagtcttcccagaaagctccagtcgcccattgcttcagattcctaacctgtaagaggaaaatgctcatgaacaccgggctgcaacggctgagtgccgggtccgcacccatgggcggcggcagcggcctggatggtactgggatggggctgatgggcagcttctccacaggacaggcatcgcagctccccaggacctggacgagcaggcactacacaagtgcaagcgtccatgaggaaccacaggttaaactcttcatttcagagaggaggaagccagagccagaagagaaaatgccctcctctggcctccagactgctcaagccctctccctgaggctgaccctacaggagctctggggctctgcggccccttaggccacttctgaatcatgacctttctgttcaggtgggattagagcaacctcttcccaaattgctgccatccccatgccca

SEQ ID NO: 24097 - DNA, 871 bp, Artificial sequence
  DNA replication origin
aatctatttgtggaggtggaaaaattcagcaaattagggagctacataatatatacatgcaaggggatttcagagaaaagggatattcgtatcatactaaaatgggcagttggggaaaagtgggatttcagctgggattaggagttgcagttttggataagaggtgggagaagggaatgcatttccagaagagagcaatgtttccatgaaggtgggaacaggggttgtgggttggaagcagtgattttaaaaggtggcttctgcacagcagagccaggctgtggccatactctgcacatagcagacgttcaataaacacttgcaggacagatgaatgaaagagtgggagcccctcaacaatgctgagagggagcaacaggctggaagtgctcttcacgaatgaggcagggcctcaggaacagcgtggtaatctcggagtgagtgtccaaggcctgggctgggtgacaggcagacgaatggaaaaaagaagggacagcaaggagacacattctgaagacaaaaataaagcagaacgcagcgtctgactagagtcagggaataaaaaagctatgaaccagaggctaaccctggtgaccgggaaaatgatggcaccgtttaaagaggaagaagttggggcaagtgctgacctgagctggaagaaaggtgagggggtggctgtgaaagcagtggtggagacaggaacgaagacaatcaggaggcagctggcggcatggggctggaggggtcaggaggagggtctgcactgcagcttcccctttcaggcaggaccacggagcaaagaacagagatgaagagggaggcaggagaccactgctcctggtgtgtgtgtgtgtgtgtgtgtgtgtgtgaa

SEQ ID NO: 24098 - DNA, 1342 bp, Artificial sequence
  DNA replication origin
tggggatgcaggcgctaggcatggacgtgcgcgcggggtagggtgtggaatgcggacgcgggcgagtgctgtggctgcgcgtacagggtagggatgcgggggcggtaggtgtgcgtgctgggaagcgcgcggggcggggctgttcggaggcggcgggggcgtggcgcggcgtcctgagctgcagcttgggggcgtcgggcgcagcgcacactggggctgcagggatggcgatcagggcggggaggtcgggccctggcgcggggcgcacgcgtgaagcagcaccgcacgtgtgaaaggaattcttttcagagcggccgggagccctgctccggaggaacgcacccgggtcgccgccgcggcagagcggggtaaggcgggccgggcgccccggaggccaggcacaggggccgagggcagcgcggggcggggacgggcgggtcggcggcgcagcggagctgccgggcgagcccagcgggctgagactgccgagctgggaagccgagccccggcacgtgtgcggctcccagccccctaggattctttcaggattcttcaaaaagttgtggggagctcgggaaatttgtgagaaacttttggaataattgatcttcctcctttgctcctggaggtctggagagcagcgcctcgtttggcttcccttgatggacagtccaaggccgagtttaagttgttttcctggggttgttttccccctcgggtggaggaagccgggctgtcccggaccgtcaggctgtagggctcctagcgatgctgaaatgcttgaaaactctaagcagatgtcaccgcgccagctaacggcgcgcacccagccgtccacgggcattcagcatcgccgtgctcctaaaagtcctgttgggattgtttagaaacaaggttggctcgcctacatttttttcagaaactttttaaaactttttatttttaagaaacactgtagctattaatgccacgaccagatttctcgacctgtatgtttgttatgatgtgttcaactataaggaatttgcagaggagtggaaaagcactgtccgagccccttcccgtaggagacttgagaaaacaaacggcagtgacgcggctgcatttgctttgttgccgactccacactagtgagcaaaattcatcctaccatgtagagttctcggttcgtgaatatgtgactgcaactttagaactccagtttttattttatcaagatgtctccaaaacatgccatttaaaaatgattctatacaaacagctgacaagcgaattatgggtctcatcacccaggaattaaaaaccatggtgatttatgatgtgcgcatcacttcactggcgg

SEQ ID NO: 24099 - DNA, 1988 bp, Artificial sequence
  DNA replication origin
ccgagggaagaggcggggtgtggggtgcggttaaaaggcgccacggcgggagacaggtgttgcggccccgcagcgcccgcgcgctcctctccccgactcggagcccctcggcggcgcccggcccaggacccgcctaggagcgcaggagccccagcgcagagaccccaacgccgagacccccgccccggccccgccgcgcttcctcccgacgcaggtgagcccgccggccccggactgcccggccaggaacctggcgcggggagggaccgcgagacccagagcggttgcccggccgcgtgggtctcggggaaccggggggctggaccaacacacgtccttgggccggggggcgggggccgccttctggagcgggcgtttctgcggccgagctccggagctggaatggggcggccggggaagtggacgcgatggcaccgcccggggtgcgagtggggccgggcgcgcgcgggaggggaaaaaggcgcgggcgagccgccagcgcgaggtttgtggtgtcgccgatgtcccttcggggtactctagcgcagccgcctggctacttgacccactgccaccaaacgttttaaattcaccgaaagcttagcttcgaagcaaagctccgtttcgccggtgaagcaggaagccttcgctgcaggaactgacctttacctcttggagcggcttctgcagaaaaatccccgggcagagatttgggcggagtttgcctagaactaacgcggagccagccgatcccggcctaccccggggccaagatttcagtggcttccctttttcctaaacacttcacgagggtctgtttccgggctgtgctccccgcctagaaggaaaatttttaggacccttgttcgcgaagaggtggtgtgcggctgagacccgcgtcctcaggacggttccatcagtgcctcgatcctgccccactggaggaggaaggcagcccgaacagcgctcacctaactaacagctgctgagagctgggttccgtggccatgcacctgggactgccttgagaagcgtggtacggccgtgtccccatgtgaccttagagtccctttcgaaactgctgtgcacagtcggtcacaatttcagacactggtgagaagggtggaggaaccctctggggacagccaggcaaggtcgaccacccatcacctaagggtggagaaatttaaggggtgaagagtcccttttgccttttctggatcctggtgattcacctagtgtcttccctaaggaactgaaccaactcctccgctggcctctggcagccctccaggcggtgcaggatggcgtgggcccggtaggaagctgcatgtaaccgcccagggtcgggaggccaggagggcagctcctcctctgacttgaatattgaaaacaacttcgtcctgcttctgagcccctcttaacccatgaccccctagcccattggggagtaaatcttaatttactcctcttcctgaaaaaggatctttaaaacaggtagcttcaactcaagctttataaaataacaatatagggtttctcggaactgtatttttctcagctgatggtaactggacaggtctgtagaagggtgtatgacctgggtttggcaggtggaagagggcaaaggataaacccctcctcctgcagccccatattcttggccaggtgtattgttgtaaaccaggagagagtttacttcggggagtatcctgttttccactcagtgagggccaatgaagaatgtctaattccataagatgcttttgttaaaatcggaatgttgctgtcctcggtggttctgctgttgggacgggactggcctgagctgtgggtgctgtagcaggacaaccagctcacctaagggcctcccagtctggattatcaatgggtcagtgctgaacctgggctaaaatattgttttttccaatgatgttgtctttcccaagctcagtgaagctaaatgtttcacaggcctatgtcaatct

SEQ ID NO: 24100 - DNA, 1082 bp, Artificial sequence
  DNA replication origin
gacagcgctcgcctcccgcagcccgcccgagccgcgtcagggcagaggcggggtggggcgcggttaaaaggcgcagcaggtgggagccggggccttcacccgaaacccgacgagagcccgacagccggcggcgcccgagcccgacctgcctgcccagccggagcgaagggcgccgccccgcgcagagcccgcgccagggccgccggccgcagagcaggtaagcgggcgcggaccggctgggtcttgcggggggcgagcgggcggtgccacctcggccccccagcggaggaatttcctccaagaaaacaaaacaggtgaggtcggcggctggtccccacctcgcccctgtcgctcctgtctggcaccggatcagagccggcagagcgcggccgggatgggtgtctggccgcacgtggggcgaccgggcccccgatctgcctctatccgcaccctcctgtccacgcgccccggccccggcccgatggcagtgggcgccgcccgcgctggaccctctctctgtacgcagaggaacgaggatggactggtttgacttttaccccagcgtggtcccctttgacttgtacaacaggttttatgaaggtttcatatcgtgtgtctaagaggccagagtgagggccggtgcccctttcccccgtttcatttgctgcgtgttggattttctaagcttttgtgggtcaccggggtgtccccttggatttggggagaagaaagccaggtctaggatgcgggtttcagttcagacaaaccctcaacttgggccgatgcataagtccccggagaaccgcagggtatgggctgcgtgatgggcttccgagaaacttgtgaaatgctgatgacaatagcgtggacgacagtaattaaaagtaattggcgacacatcttagttaaaacgtgcaggcaccagaaggcacttcctgtcggtgaagaagacctgtctccggtgtcacgggcatcctgtgttttgcaaacggggctgacctcccttcctggggagcaggaagggtcagggtgagtgtggcctgcccgcagctctgcactcccggaggggttagggacctgca

SEQ ID NO: 24101 - DNA, 1184 bp, Artificial sequence
  DNA replication origin
ggccgaggtggcaccgcccgctcgccccccgcaagacccagccggtccgcgcccgcttacctgctctgcggccggcggccctggcgcgggctctgcgcggggcggcgcccttcgctccggctgggcaggcaggtcgggctcgggcgccgccggctgtcgggctctcgtcgggtttcgggtgaaggccccggctcccacctgctgcgccttttaaccgcgccccaccccgcctctgccctgacgcggctcgggcgggctgcgggaggcgagcgctgtcactcgacgagccccccgcccccacctacccggggcgcactagccgctgggcgcggaccgtccccctgaggagcaaggagtgcaggaccggggctgtccctccggggccggatgcgcagagcggggacctttttcccgtggcgggggcgcagggtgggggacccctaagaagtgcacagtgcgcggggccctctttccggcccttggagggaacggggtaccggggatgcagggggtagggctctccctcgggagcgcagagggcgggcccagccccctctgcacgggtgcaggtgtggggcgcctgctcaggccctcgagggaactcttcctccctagtgcacccgtggggagcagtgtgaggggcaggctgtgtttttgccaggacacatcctcagtctttctgggtgatccagccttctcatagcccgcggggtgcacagacctctcctataggagcctggaggttctttattaattaatgaccacttagaggaggtacaggggttgtttttattaattacctccatcctttgaagactcctccggggaagcggagcaggccttcctcgggacagtgcaccaggagagaccacattgcctccccgcttttcagtcaagactagaaagctcagggccagtacagggagtggtgcaagggctggtggggtggaaacgttggaagctatttaggcacctggctttacaggttcaaacctgtcacgcatcggacaaaagatgtgtgacttgcttattctacaaaactgttcggtaattaaacgtccccacctaaaccatatgccacttgttgggtcatattctcccacgaaacaattaagatgtctgttaaaggtcatggaatttgagccaagacttcataaaaatccgctttccaaaatattttattt

SEQ ID NO: 24102 - DNA, 1044 bp, Artificial sequence
  DNA replication origin
tgggcatcaagagggctgagatgtgccttacagagcaaacacgcgtgttagagaaacttccttcaggcacaagctacagtgccaatggccgtgaatacaatcttaatgaatcaacaatagatattagattgggtgtcttcaaacagaaacacacataacacaagtttatatatctatctattgatgaaaatgttgtgaccacaggcttgcagcaatctaaacttgtatttctcctagaagcagtggttcagtattagctctttcagagtgtgtggcaattttatagaaataactattacaactactgagaattgactatttgatattttgtaaactattgtaaacgttatcttttgaaaattccacctctgtgaaacaaaaaaataaacctttgtcctttaggaaataagcctttttgggatacttacaaatctgttcttcccttaaacaataaggggaaaaaaccatggcacaggttagggtggaggggtggcagtgggccatgaacatctgtgggctgggtagggctgtgcagattgggaataacagagagaagactggctggggtgaggagactgctggagtcagagcttgggagctgtgtgtgtgtgggctccacacccacaggacctccacacccacaggtccatcatagggcgaccctagctcagcgacaatcagggttgcaggatagggcttgcaaaggaggagtcagcctggagaaaggggcgaaggtactctaggaggagggactggtgctgggacagtgctatcatccaagccgagaggaatgctctctgcaaaggaaatgaccaaccaagtcaaatgccagagatcggtgaaaaattgagggcggcaagagtatccactgcctttagcattcaggcggagcggctccctagagctatggggtggatgtcagattgcaatgcgtcaaagagttaagtgagaagcaagaagaaaatgaatgcaaaggctttccagaagcaagaccctgagagaaaagaggcggggtgaccacaggagatggatatggggttaagg

SEQ ID NO: 24103 - DNA, 1083 bp, Artificial sequence
  DNA replication origin
aacttcctggccttgattgggctctgctactagagcggcagaagcaactcacttccctgcttccacggacctgtttcatgtaatgcattttgcagagatttgaagacagggtccttgacttgggcagctaacagcctgaggctagaggcagccacccctgaacagtgaacaattctgcaaggcgcctggcaatagtactatgcggggagggggtaggaacaaggtgctgcagggcggggtggaggaggaaatgaattctgcctgggagaagcgggagtgcgtatttgagtggggtctggagcaggtgcatgcaaagaagcacctcaaaggcacgggcaggtgtgtgcaggcgtgggcaggcgtgggcaggcgtgggaaggcgtgggcaggcgtgggcaggtgtgggcaggcgtgggcaggcgtgggcaggcgtgggcaggtgtgggcaggtgtgggcaggcatgtgggcacggcacagggcttgtccaggccagatgccattaagcacaggtatctgtggtgggcaggggacacagtggaagcagatagagaaggtttgctggggtcccatggaggggcgccttgtaggccatggtcactctaggctgatgcaaggtgctcaaggttgaaggcagaggtgactgacctgtgcttgagagagggtagggaagagaagctgccggacttgaggggctgaaattgtcctgtaatagtccaggtcaggagtgttaatgatgccccagctcgggcagtgactacggcaaggagagtttaacatgtggttcagttcagcagacatggggaactcactatgtgtgaagcaggacacatcacggaggcagccctcaaatgcttgaagacagtaatcctgcccctgtgctgtggcgggttctttaaggggtgtgacttcctcatcagacccattgctctcacacctaatgatgctgccatgtggcagggctgtgggcagagccatgccctagcaggggaagtggaggacagcggcggggagggagtgtgggcagggctttcctgccctctgggtcctctcctctctttcgtggcagggccttgaggtccatt

SEQ ID NO: 24104 - DNA, 839 bp, Artificial sequence
  DNA replication origin
taagcaaagggtgggacctgacacacatggttataggtcactcaggttgcccttgcaaaagagatgagaaggggcgaggggaagaaggttcttgtttgggtctgggtcccctcagcccacccaggctttctagcaggaagtttgttggagatgttggcatggagcagggtgaagagccagactgtgaccagtgctgagcccacggagccttccgaggagcctcgccaggcgtcccagactcgtcctcggagaacaaaaaggggagcctgtgccacgtaccccggccctcctttggtcatgggcggccctgcgggcctgggcgtgggcttgtgctgagtggggggtagggtgttggggggccaccttccgctgtggtcaggacaggaagcggctggaagagcctcaggcagaggcgctggcgggccgcgctgccccaagcaggctgccaagagggccccgtgccccttgccacagtccagactggcgctccaggcacggcccacgcgagaagggactcccgaggcccagttgtggtcctggtgggagcagggaaaggaggtcagccagagctgggtcccagatggagcagagtccaggcctgcatgatcctgtggaactagtcagggaaactgagatagagcctcaggccaggcagccctggaaagggttacggggaagccaaagctgagtggagccagcagggcgcaggagtcaccaggcttgcagtcacgaggctcctccctgctaaggctggctcaggaaagccgggaagggaagcaaggggttgggggaagaagggaggcagggggtgcaaggaggaagggaggcgagggggatgg

SEQ ID NO: 24105 - DNA, 993 bp, Artificial sequence
  DNA replication origin
cccagatggagcagagtccaggcctgcatgatcctgtggaactagtcagggaaactgagatagagcctcaggccaggcagccctggaaagggttacggggaagccaaagctgagtggagccagcagggcgcaggagtcaccaggcttgcagtcacgaggctcctccctgctaaggctggctcaggaaagccgggaagggaagcaaggggttgggggaagaagggaggcagggggtgcaaggaggaagggaggcgagggggatggggaggaagggaggcgagggggatggggaggaagggaggcgagggggatggggaggaagggaggcgagggggatggggaggaagggaggcgaggggtagggggaaagggaggcggggggttgggggggaaggaaggacaggggttgggggaaacgggaggcaaggtggaggggagagagtagaggggtggggggaatggaggcgaggggtctgggtggggaaggaaggcgaggggttgggggggaagggaggcaaggaagagggggagaggcgagggttggagggcaagggaggcgaggggtcggggttggggaaaggaggcgatgggtagggggaaggaaggcgaggggttggggggaaagggaggcaaggaggaggggagagcggcgaggggtggaggggaagggaggcgaggggtcggggtggggaaaggaggcgaggggtgggcagggaagggaggtgaggtggagcggaaggcaggaagaggactctcgcagtcagccggaggggttgggcgcactgcaccgggaggcaccaccttgcggaacaggtcgggtcggtgctggggccaggcctggaatgttcctgcgtcctcctggtcctccttctctggactccagagacttgccctctctcgcaacgctgccccgcatcacccctgcctggctggcttcacctctcaggaggcaccgacgatgcgcacgcccccttgtgcagcccaaaggcctct

SEQ ID NO: 24106 - DNA, 2549 bp, Artificial sequence
  DNA replication origin
agcgtcgctgccatagagggcccaactccggacaaagggaatggaacaggaagaggaattctgacggggtctttcgcctgctggggctgctgccccaccgtgcagtgccacgcccgggaggctcagcccgcagagaactgcttctcacgccatggggctgcgagccagcgtcaggggccggccgggctgctctcggcttgcaggcggcctcttcctcgccgcgtcctcacagggcctgtcggtgtgtgtgtccgcgcgcgctcaggccaccaatcctttcgaatgaggaccccaccctaagacctcgttacttcctaaaatcccgacctccaaatgcagtcactcggggcgttagggcttcaacatatgaatttgttgcggctcagtccacagaacccctcaaagaacgggaaggggaaccctgctcagcccaacgcgatcttgtccctgccgcatcctccgaggggagcattgaagcgattcaatgtgagtgtggtgtgtgatatgtgtgtttcgtgtggtgtgtgttttggttgtgtgtgatgtgtgtttttgtgtggtgtgtggtgtatgtgtttagtgagtgatgtgtttgtgtatgtgcaatgtgtctgttttgtgtgtggtgtgtgtgagtggtgtatgatgtgtgtatgttttgtatgtggtgtgtgatacgtttttgtgtaggtgtgtgtgatatttgtgtgtatgtatatgtgtgatgtcttttttgtgtgtgtattgtgtgttcactgtgtgtgtttggtgtgtgcgaggtatgtgttttgtgtgtggtgtgcgatatgttttttgtgtgtgcctttttgtgtgtgtttgcttgtgtatgaaatgtgtgtgtgaggtgtgtgtagagtgtgtgacacacatgtggtgtgtgtgaggtgtgtgatatgtgtgttttgtgtgtggtgtgtgtgatttgtgtttgtgtggtgtgtgaggtgtattttctgggtttgtgtggtggtgtggtttgtgttttgtgcgtgaggtgtgtgtgatatacatgtgatgtgtgtgtgaggtatgtgttgtgtgtggtgtgtgatgttttgtgtgtgtggcttccatgtttttgcttgtgtgagaagtgtgtgtgtggtgtgtgtagagtgtgatatgcgtgtgatgtatgtgtgagatgtgtgtgatgtgttgtgtgtgtggtgtgatgtgtgtgatgttttgtgtgtgtggtgtgtgaggtgtgttttctgggtgtgtgttttgtgtgtggtgaggtgtgttgtgtgtgtgatatgtgtgtgaggtgtgtgggggtatgtgaagggtgtgtgtgtgaagtgtgtggtgcatattgggtgtgtgtgtagtgtgcgtgtgaggcgtgcgatatgtgtgtcatgtgtggtgtgatatgtgcaaggtatgtggtgtgtatgaggtatgtggcgtgtgtgttgtgtgtgatatgaatttttttgtgagtgatgtgtgtcttgtgtgagatgtttggtaatgtgtgcgtggtgtgtaatatgtttttgggtgtggtggtgtgtgttctgtgtgtggctgtgaggtgtgtgacttgtgtgtcatatgtactttggggtgtggtgtctgtgcgtgtgtgaggtatgtgtgatgtgtgtggtgtgtgttggctgtgtgtggtgtgcgttgggtgtgtgtgacgtgtgtggtgtgtgatgcatgtgaggtgtgtgtgatgcatgtgaggtgtgtgtgatgtgtgttttctgtgtgtgtgtggtgtggctggtgtatgatatgtgttgtgtgtggtgtgtgttgtgtgcgtggtgtgtggtgaggtgtgtgtgatacgtgtgttgtgtgggtgtgtgtttggtgtgcggtgtgtgagatgtgtgtggtgtgtgtaatatgtgggttttctgggtgtgtgtggtgtgttttgtgtgtgtgatgtgtgtgacgtgtgtgatatgtgtgtttggggtgtgtggtgtgtgttgggtgtgtgatgtttgtgtgtgttgggtgtgtgaggtttgtgttgtgtgtgatagcgttgatgatgtttgaggtgtgtgatgggagtgtgtgtgaggtgtgtgatgagtgtgtgaggtgtgccattgtgtgtaatgtgtttgagatgtgtgaggtgtgtgatgggtgtgtgtgaggtgtgtgttgggtgtatgtgacgtgtgtgtgggacgtgtctgaatgtgtaatatgtgtgttttttaggggtgtgtagtgcatgtgatgtgtgcagtgtgtgaggtgtgtggggtgtatgtgtgtgatgtgtgtgttgggtgtgtgtgtgaggtatgtgtgatgtgtgttgggtgtgtgtgagaggtgtgtggtgtttgacgggtgtgtgtgaggtgtgtggtgtgtgttgggtgtgtgtgtggtgtgtatgtgaggtgtgtattggtgtgtgtgtatgtgatgggtgtgtgtgtgaggtgtgtggtgtgtattgggtgtgtgtgtgtggtctgtgtgtgatatgtgtgtgtggtgtgtggtgtgcgggcgggcgctgcgggctggcg

SEQ ID NO: 24107 - DNA, 1181 bp, Artificial sequence
  DNA replication origin
cctggctcctgggccaggccgcctgctcccgcttcaccgccgcgctctctgcagacgcagggcggtgtccaagccagcacacggacctgaggcacctggctgtcgcccgccgcagccggttgcggggcacggcgggggtttcgaaccccttttctcgcttctcgggggacccctggggctgccctggaggcccaggaacctcgaggccaggcccaggcgccccaggctcgcagcagggcagagggtgcctccctgcaggccgctgtgccagggtccccgcagagccctccgggcggagcaagcccccagcttggagacggccttctgggcaaagacaggctctacccgcaagcctgggagggactggggccgggtgcgggcgaggggaggtgccccggggtagggaaaccgggctcagccgagggcaggcgggcccgcccaggccgcgatgggaagggcgcgacgcatcgtccacggtcgggctctcgcaggcgggccagcgctactgcctcagtcctacagagctctggtgaaagacagcgctcagatgagacctggggcggcggattccgcgggagtgctgcctgtctgagccgtgaaggcgtaggggaaaaggtggcggcttccctccgtccgccctcctgacagtggaaatgcccaagggggaggcatcctctgacgggagggacctcagtggagcgcagctcttgcagatcattatctgcgcttgcctgcctccatcccaaagccacgtgaggccaaggaacacaggtggctgatcagacgtctaaccttaatacataacaacttgcctcttgctttgcaatttacattgcagaagattccagggccccaccttagcaaacaaacccatggttctaagctgcatttcatcaaagaatatcactttttacgaactcattaaaagctgaacaaggccggacttgcaggcatgtgaagcctggagagcaccttcccacgtcttttgatggctctaatcttactcccccctgggtcctaggcagaaatctagaaaatccttcatgtccttttactacgatgccccgtcctcacgctccccttgtcgtcagcttctctcactccctgcagctgcaggcggtccgtaggttgtagggtgagctaaggaggcagggaggtcaagaggaattgatttcaacccc

SEQ ID NO: 24108 - DNA, 936 bp, Artificial sequence
  DNA replication origin
tgcgtcgcgcccttcccatcgcggcctgggcgggcccgcctgccctcggctgagcccggtttccctaccccggggcacctcccctcgcccgcacccggccccagtccctcccaggcttgcgggtagagcctgtctttgcccagaaggccgtctccaagctgggggcttgctccgcccggagggctctgcggggaccctggcacagcggcctgcagggaggcaccctctgccctgctgcgagcctggggcgcctgggcctggcctcgaggttcctgggcctccagggcagccccaggggtcccccgagaagcgagaaaaggggttcgaaacccccgccgtgccccgcaaccggctgcggcgggcgacagccaggtgcctcaggtccgtgtgctggcttggacaccgccctgcgtctgcagagagcgcggcggtgaagcgggagcaggcggcctggcccaggagccaggacggccacagccacgccaccaccggcgagggcgagggccagggccactcactgtgacccgcgactcccttttagagagccactttgcgtttcgttttgtttgcgcacacgggacacaagcatatcgaggctgaacaagccacagtccacgtttccaggagaattacaaagcaaacgcttggcctcgcctgccgcagactccgcccgcttctagaggcccgcaccctgactcctgcaattgcggctttcccgcttttcagactggccgcccgtgttcacattcctcagctgcagcgtttgctgctggcccatttctaatcttcctgtaagtggaatcactgagcgcgcgttctttcgtgacttgtctctcaccatcctgtttctcagattcacctgcgtcatgtgtccatctccttgatgcagagatatgagtttagtcatccaccctgcggccatgagcctttggctag

SEQ ID NO: 24109 - DNA, 911 bp, Artificial sequence
  DNA replication origin
gtgggtggggggagtgaccagctttttttccctaattggcccctcccctgttccatttctgtcctatcagagttcccttttttcaatccttcccccgattagctacttttagaatcctgctgattggtgcattttacagagcgctgattggtgcgttttgcagagtgctgattggtgcgttttacagagccccgattgatgtgttttacagagcactgattggtgcgttttacagagtgctgattggtgtattttacaatcctcttgtaagacaggaaagttcctgattggtgcattttacaatccttttgtaagacagaaaagctccccaagttcacacttgacccagggagtccagctggcctcacctctcaatggaaagtgagaggggctagggagaggcaggggccaggaacatttctcctggtactgacttgggtgtggggatgtgacacattctcactgagatcaggagcctgccagggttggggaccatggggataacccacatgagacaagtctgtgctggggtgtgcccaagggaaggcgtccagcactcagttgcagatgtgggccagggtgaggctgggatctgtgtgagacatgcaggtgtattctgtgtcctcaagtcttggtggtggtgacaccagggagtgggcacagatgggccactgtggcagactgggggtcaccatcactcagtgaaagtgtgagcaggaaaaatcgcagagaagactgagaggagggaactggtgagttgtacatagaaatgctttctaactccttgtctcagtctgtttttgctaccagtgaggcttacaatgtttgaaagaccccaatcccagcatgcctgctttatataaaataaggtaaaattcatctgagaaagacacacttccagttcttctaat

SEQ ID NO: 24110 - DNA, 1545 bp, Artificial sequence
  DNA replication origin
ctacttttatatgtagtatgaagtaaaatttattaatctttattaaaaagacctggcagctctggataccaatctttctttaggcaggaggctccagagctggggtgaaggctggcaccacaaagcaggcagccacggtctcacctccagcagctcagaaccaagtggagaaacggccagatacacaaagccacaacacagcatgactcaccccatctcaggatcatggaaacaacttgggggtgggagaaaacctgattgattctggtgggagtggggcaggaatcattcaccaaggcctcccagaaagaaacactcttgagactgggtgtctaaggtgaacagaatgtctcctgagagaggaaagcagtacccagaactgcagaggtgccaagccatcttcccaagcacaggagtgcttttgggcctccaggggctcagcattgtgggaggagagggtgggaggaggacaaccttgtgggagggatggggtgggaggaggaggtgggagggcagcctgggggaggaggaggcgggaggactgcctggtgggaggaggggtcaggaggacagtctggagagaagagagggtgggaggacggcctggtgggagggatggggtgggaggacggcctggtgagaggatggggtgggaggatggcctggtgggagggatggagtgggaggagggccttgtggaagggataaggtggcaggacgacctagtgggaggacgacctagtgggaggagggggcaggaggagggcctggtgggagaaggaggcaggaggatggcctggtgggaggccctgggggcgcccaggggatggcagtacagatggctgttaggacaccatttcaacactcatacaataaaagcaataaccaaatctgttgcctgaaaacagaaacaaaataaactatgacaggtttgagcgttaccctaaaggaagctctggaatccagccaggcctcttaggaagagaacggtattttaattgacttgccagtgtgaatattttcttggcagcccccattatctaggatgccattacataccaacacaagccatttagcagcctgcgtttaaaataataactaagtagttgtttcactcttggccatatttccaaggagagatcacaagtttcatccatttgactttgtttaggcctgtggctactgcctaaatgtaaagctctcatcggaagggcagtttacctggagccttaagtttggcacttcagcttcgggggaggggctgctgagtttgttgtctcctaaagcagcaggcatacgatgcaggttttccaatacctgcaggaacggtaccatcccactgccttaatgattagccaaacgtgcctaaattgtacttaaatgtgaaaaagcacaggcaaaactgttggcataagaaactctaaaagtcaaccattatcattactagtatctcccagcaatccaaacagtacctggtacgcagcaagcactttatatgccttttcatttaactctcagagtaagctatacttaccttatccacat

SEQ ID NO: 24111 - DNA, 1235 bp, Artificial sequence
  DNA replication origin
tgtgtagtgtgtatatggagtgtgtgtagtgtgtatggtggtgtgtgtgtagtgtgtatatggggtgtgtgtagtgtgtagggtggcatgtatgtagtgtgtatatggggtatgtgtagtgtgtatggtggcgtgtgtatagtgtgtatatgcggtgtatgtagtgtgtatggtggtgtatgtgtggtgtgtatgtactgtgtatatggggtgtgtgtagtgtgtatggtgttgtgtgtatgtgtggtgtgtgtgtagtgtgtatagggtgtgtgtgtagttgtgtgtgtagctctagagacagaactgtgaccaaaagcatcaaaaatgtgataagttcaatgccaaagttatcaaagtaagacaactagttttcaatccatcattaaaaaatggtaaatgaaaacattagttttggaaattcaatatgagtataaatccttatattgtactgtgtatatatggtgtgtgtagttgtgtgtatgtggtgtatgtatggtggtgtgtgtgtagtatgtatatgtggtgtgtgtagttgtgtgtatggtggtgtgtgtagtgtgtatatgagatgtgtgtgtagttgtatgtatgtggtgtgtgtttgtgtggtgtgtgtagggcatatatgtggtgtgtgtagttgtgtgtatgtggagtgtggtgtgtagtgtgtgtatgtggtggtgtagttgtgtgtatgtggtatgtatgtagttgtgtgtggtgtgtgtggtgcatatatatggtgtgtgtagtgcctatatgtggtgtgtgtagttgtgtgtgtgtggtgtgtggtgtctagtgcgtatatgtggtgtgtgctgtgtgtagttgtgtgtgtggtggtgtgtgtgtagtgtgtatatgtggtgtgtgtagttgtgtgtatggtggtgtgtgtgtagttgtgtgtgtggtggtgtgtgtgtagtgtgtatatgcggtgtgtgtagttgtgtgtatggtggtgtgtgtgtagtgtgtgtggtggtgtgtgtgtagtgtgtatatgcggtgtgtgtagttgtgtgtatggtggtgtgtgtgtagttgtgtgtatgtggtgtgtgggcacgcatggctctcgcctctcagggtgtcctctatctgaagcccctggtatctgtagcaccccccaacggcctcttgtgtctggcctattgtggttggatttctttagtagtggcaccgctttcagtaaactcttgtcacctcccactcctcattca

SEQ ID NO: 24112 - DNA, 1112 bp, Artificial sequence
  DNA replication origin
gtcagcgacgcccgtcccagttcagaggagcaagaaaagcctgtgagctggggacaccgatgtgagaaacaacgcccgcgtttctgagtagacaactcgggagcctgaggaagaaaagcaggggcaggccgagtccatctggggccccgcctcagaccgccccggggccgacaggggcgggcaggagacgggcgaagaggccctcggcgggatgcgccacacaggacgccgcaggggcacggctgccaggggccctgaggcactaggccccagcgcccttctcctacctcacgctgagggaagcgggcgacagttattcgggcccagggacgacgcagcggttggccaaagcgcgacgccgagccgttgccaagcgcggaatccaaggaagccgctcccacagtcctccgcgcgggggcgggcggggccggaagcgcgggggcgggagagagcgcggcgggaagggggtggtgcgggaggcctggggaagtgggtgggggcggagaacggcgggtcagagagaaggcagcccggtccccctcagtggaagggagtggcggtgggcggagggtgttgaggggacggtgccagcggcttgcgggaagccgggcgatgcgggtagaacggtggaggagagggcagggaggccggggcctcccgtggaacggaaccggggggttgggaggctgggggcggcctgtgtgaagggggcggggagggaaaggctcgcggccagtagatgcaggagggaggagggcctagaggggctccgggctggcggcctctgtgaggaaggggaaggatatggaaccaagatcctttaaatcctgatgaactcatccgtaaagcagatgcccaaaggatgatagtaagcttactgtgacataactcccggagccgcagcacgagccttgtgaaccttggaagcccgttttccgcgcagtcactaactcgcttagtcaccctgtgtaaaagttattctgggatgacacctgcctgggaagtctcacctttccccccacctcctcctgtctgcgtattgttctgtagcaccccgtgcgcaccttgattgtagcgcttaaggtgtccgttttatttactagacagggatt

SEQ ID NO: 24113 - DNA, 930 bp, Artificial sequence
  DNA replication origin
gccgcctcgcagacccacccttgcccctgcgcctcgtcatccgcccgccccagccagcccgcgcagggtccgcggcccgcttttccgcgagaagccccctgtggtctttcctcgtacccggggactcggaccgagaagccgactgagcgaggtcgccgcccggcctcacggacacagagcgactctgcacctttcgcctccaggagctgaaaacattttgtcacttgtgcagtgtactcaccagtgcccccaacatcttctcccccgaaagcgctttcagattcgcgccgagatggggcgacgcggcggctcttgagcggaataacccgaagggccacgcaaactggggcttccagccgcgagcatgcggcggggcgcccagggcctggggtcgcgcgctcagggcctgtgctgcgccacgcaggaggaggagagggctggccctgccgggcgcgggtgcgggcccgactggctgaaggaggagtggggactggcttggaagtctccgaagcagaaaagtggggccgacaggatggaattgggggaggccgattttggctcagagagatttctctattaaggaaagcagtccaagaataggccccctggaagaggaatgcgctcaaacccagagggattctccttagagctacctcttgagattctgtacttcgaggaaattagaggtttttttaaatctctatttttaataaggtgggaggaggctgttgctcctttctcctcaacaacatgaaatgatcctgtgcctctatccaacaactctacaacaaagcactgaatacttccctgactggcactttcatggctgttcatgggcatctcttggtctatgacgacgatgttggagagttcctactccgtgataactcagttctaagtgcaagcagtcacgtgaaatgagcctgatag

SEQ ID NO: 24114 - DNA, 2356 bp, Artificial sequence
  DNA replication origin
cgcgtgcggacgctgagcgtggcctgtccctcaggtctggatgctggtagccggcttcctgctggcgctgccgccgagctgggccgcgggcgccccgagggcgggcaggcgccccgcgcggccgcggggctgcgcggaccggccggaggagctactggagcagctgtacgggcgcctggcggccggcgtgctcagtgccttccaccacacgctgcagctggggccgcgtgagcaggcgcgcaacgcgagctgcccggcagggggcaggcccgccgaccgccgcttccggccgcccaccaacctgcgcagcgtgtcgccctgggcctacaggtgagccgcgggcgcgtcctggcggggcccggcaggtggggagggcagggctgggcggggagagtgggtggggccgggccgaggccgggcaggcggggagggtggggcggggaaggggaggtggttggggcggggcgacgcggagggggcgtggcacgcggggcgaggcggagcaggtaggggtggggtggtgcggggcgagacagggtagggtacggtagggtggggtggggtgcgaggggcgctgcgatgaggcggggtggggcggggcagttggagcactggggggcaattcctaaactgcgaaggcccacccccaccacctcccttgaaggagtcctgcttcctctctttaccctccagtatttcctatgcaacacgtatctcttgaacacctcatctcctccaggttggatgggtccgcaaggcactagctggggacccttccgtgatgtggacacagtgatgtggaccgtactctgcacagggggcccggggaggtgctgctggggggtgcgcggtactatccacatatttcctgagtgcccctgtggtccagaggctgctggagtggagccctgggaagcgccctctgagcccctctagtttaatagcctaaggaaggagtggggataattgggaaagaaaccacaccatcaggcagtgcatgaagtgacatgaacagtttcgagagtattttggtcttggaacagaggtcatttcagaagaaagggacagcctgcagaaggggaaggctggagaagttgggggcgtgtaggcagggtgccgcagtgtcctcagcaggcacctgtgaccgtcttccctctagctggagcaggaggagctgccctagggggcaaggcctcccagggccacagaggtcaagaaaggcttcgtgaaagagctgagtcttgatggaggagagcaagtcgcctacaaaggcagtgctgagggaagggacagctgatagcaagcgggaacaaagcgcttggaaaatggggagagccacaaggcgagcgggggcggtgggggtgggggggcgtaggcgaggtgtttgcctgtggggtgggcatcgatgtaaggctggagacaggtgcaggagctggatccccgccttgtcagcagtgcagagcttcaccctcacgcctggaatcccagcactttgggaggccgaggcaggaggatttaagtccaggagttcgagaccagcctgggaaacatagcgagatcccatttctgcaaacaatttttaaggattagcgaagtgtggtggcacgtgcctgtggtcccagctactccagaggcttaagtgggaggatagattgagcccgggaggttcaggctgcagtgagctgtggtggcgccactgccttccaacctgcgtgacaaagcgagaccccgtctctaaaataaaaattaaagagaaaaaaagtcttgacacttgagatggaggaagccatacagccactctggtttaggagggtgtcccaatggggcatggattggacaatgctctccagcacttccatccaaaggatctagggcttcactcaggcagcgcggtgggaaggggagactaggatcagcgtgaaagatgctcattaaagaagacaagtgctgtggagagtcagaggaaatgtgatgattttgtctaaaacgcatctgggctttcctggagcctctccctgccggctgctgggtagggagatttccttttactcaacaacacacaggacccctatgctgtcctgggaagccaagttttagggcctcctgcctcctggctactctgcagaggaccaagctcactgtggcagagccccctcagagcccctgcccacggggaagttgggtgggacccctcccgcccttctcactcctgtccttcagctggagcctgcagggcacacacatggcgccattcattctggtatcttggtgctcttgcttttcctctctcttcctccatttccaggacctgaagggatggactacggcattcttctttctctaacctcgtgttatg

SEQ ID NO: 24115 - DNA, 2100 bp, Artificial sequence
  DNA replication origin
ggacgtgaccaacaaaggacggaatgtaggaaacttgatatatcccgtgttgttccaggagaaaaacaagagggagggaacctacacgagcgccttgagtagaggaacacaagccgggggtgtcctggctgggcccacacctgccgtcctggcgcagtgacatgaagccagccacttccactcccagtatcaccacctgcacaatcatttatcaaacacatgcaacccaaactcggggacattccacaaaacgagtggctgctggaggttggatcctagggcagaaaggggcatttgtggaccccctaaagaaggcctgcggggcagataatagtgtcgtgtctgttcattttccgatctcagcattttgctgagtgatgatgctgacatttggggaacccaggtaaatggtatatgggaactcgtcctaatttcacaatagttgtgttagtttgaaattatttcaaaatgaagtattagaaaatagagaaaatcatttatgggacaatacagaaatttgaccgtgaacatgagtgtgagcatgtgtgtatggcaggtgtgtgggtgtgtgtgggcaggtgtgtgtgagcgaggcaagtgggtgtggtcaggtgtgagtgtgggaagctgtgagcatgggcaggtgtgtgggcagatgggtgagcgtgggcatgtgtgtgagtatgggcaggtgtgtgtgggtgagtgtgggcatctgagtatgggcaggtgtgagtgtgggcaggtgtctgagcgtgggcaggtgtgggggtgtgtgtgggcatgtttgggcaggtgcgtgtaagcatgggcgtgtgtggtgagtgggcaggtgtgggtgtgggcatctgtgagtgtaggcaggcgtgcgtgatgggcaggtgtgcgtaagtgtggataggtgtgtggatgagtgtgggcaggtgtgcgagcatgggcaggtgtgagcatgggtagttgtgtgtcagcatgggcaggtgtgtgtgggccaggtgtgtgagcacgggtgtctgtgtgggcatgtgtgagcatgggcatgtgtgggtgtgtgagtgggcaggtgtgtctgagcgtgggcaggtgtgtggaggcaggtgtgagcgtgggcaggtgtgtgttggtgtgtgagcatgggcgggtgtgtgagcacgggcaggtgtgtgtgagtgtgggcatgtgtgtgggtgagggggcaggtgtgtctgagtgtgggcaggtgtgtgtgggcaggggtgagcgtgggcaggtgtgtgtgggtgtgtgagcatgggcgggtgtgtgagcacaggcaggtgtgtgtgagcgtagccatgtgtgtaagtgggcaggtgtgtgtgagcgtgggcgtgtaagtgggcaggtgtgtgtgagcgtgggcatgtaagtgggcaggtgtgtgagcgtgggcctgtgtgtggggggcaggtgtgtctgagtgtgggcaggtgtgtgggggcaggtgtgagcatgggcaggtatgtgtgggtgtgtgagcatgggcgggtgtgtgggtggggggtaagtgtgtctgagtgtgggcaggtgtgtgggggcaggtgtgagcgtgggcaggtgtgtgtgggtgtgtgagcatgggcgggtgtgtgagcacgggcacgtatgtgtgtgagcgttggcgtgtgtgtgtaagtgggcaggtgcgtgtgagcgtgggcatctgtgggcgtgtgtgtaagcatggacaggttgcgtgctcacacgcacgcggcatgcagcaggctggagtcatggtgagctattcgagaggtgcacaggagccctggagaccacagcagttagtctgtatgtgatcttgctcctggaaactcatgaagggcaccgggcagctgcacacacgtgagatgtggttttggaaaggctgtcagaacagtaccgaggatgtgccgcaggaaaaccaaaggcgggcgggcgggtcaggcattcctctgtggactcagtctcttcacgggtggggtgagtgacgtgagggcatcgcccggccctctgagttctcgtcacctgggactggtctttccgtgccctcggtatgtaggtaactgctcatatttcaccatcgtttgggttcttcatgaacaactg

SEQ ID NO: 24116 - DNA, 1337 bp, Artificial sequence
  DNA replication origin
ctgtctgcctagggccccggagccgctgcttcccgccggcaaggctctgcagaccccgaggggagcgtccacctggggcctaggctgggggcaggtagggcgggtttcaaggacaggcttggggcaggtctagagaaagaggggctgggggcggacagtgctgactgggccgggagccagaggcctgcagggctcccacgggagtgaaggacaagagctttctccatcagggagatttggtgccaagtgccagctctcagtggcctgtgaggttcgggggctcaggaaggcataggatcctcttcttccgtttgtgtctgagggactagagcacgcctgggaggtgaagagtctagaaatggtgtgttctcgccattggaaatggatccagtgccacctccgtgccaggacctaaggagggagtctgccgggggaggggggggggggttgggagggaggtggtctggtgtaggaagagcccgaggccaccggccaagctgccatcagaggaagccggtgactgacacaggactgcacccagccacctcttgtgcttgcggaaccccagagggacatttccaagcactagtccactgtttgaatgtgggggatgaggtcggacagaaagtcagcaatgactccaaggcttccagtcggggtggccagaggatggggcagcgcagggatcaggagcttggccaggtggccttgctggcagtggagccgcagaggtgggagcccagggtgaaggcaccggagagggcagtggggaccgcctgcaaaatgaacaagttgtctctgaagcaaaaacaaaaaagcacaatctgacttcatttattcatgcttccctccaacataccaaatagttgtagaatttttttccacaggtctcatgtcaaagcatagggtcaagggacagtcaccactaggaagtacaacgagaaagagtgtccctcagatggaattttagaaagatccctcagactattggggggaagatgggctggagccgcagagggagctcttggctgaaggcagagttttaagttgtccaccgatagatggtggttaaataagatgatagtctccgggggcacatggagggagaacaaatagaggcagaggagagcagagtacaccgacttcccggggagaaggctgatggtggagactgggtgcatcctcagtccacgaagggcagaggcttgagggggctgggtcaaacctgaacttgaacctgatggagccaggctaccagaaatagagagaaatgacactatgaggacgtgaccaacaaaggacggaatgtaggaaacttgatatatcccgtgttgttc

SEQ ID NO: 24117 - DNA, 1363 bp, Artificial sequence
  DNA replication origin
ggggcaccgcgaggccggggcgccggacaccacgcatgcgcggggctgggagcttagcggggcgcgcggctgcagcagtctgggcagaccgcctcggcctcgcccggtgccggctgcggccgcccccgccccagcgcggcggccgggctcacactagtcccctcccagccacccggaacccggcagcccggccagacccgccgaggccgcgacgccggtgtcgacagcggctgcgacggccctgggagcgcgtgaggctccggggtcgcggcggcgattggccggccgcggcgcccgctcccagaatgcagcgcatggcgcgtcattgaagagagaccatgatggcggcggcgctggggcccccagaagtgatcgctcagctggagaacgcggctaaagttctgatggtgaggacgccgcgcccctcagaccccgggattcgcgggcccccggtcggccctgccactccaggccttgctgctcgctgggctggcgactggcaagggcctgcagggagcctggaagtggaggaggaggtggcggtggcgtggcgcaggattcttcagcctactttcctcctgccgtcgtcccctccttccaggagctgtccccttcccctggctgcccagcaccccagtcgggcgtgggaatatagtggtgtagcaaagagaatttcttcaccttacaccctgccccacagactgggtcgcagagcaaggcgccgggaaggagttggggttatccccgcagggcttcggtaggggaaatttgtagggctgtgtgagcgctcttggggagttggtgtcgggagggattggatggcacagcctgggtgctgttagcaacccttgtttcctgtgcattcgcatcctctagcgcttccctgacatgcagccacctctggagtaattgcagccggcagcacgtggaagggccgggccggctggagggagggaggggaatcgttgagaccaaggtcattggggcaaaacttggtctagtgctaagctccttaaagctcccgcgatttggagaactgagtctatgctactctttgacttcatgcttacactacaataagcagtttgatgagattgtttactaagggaatttgagaaggccgagtcaaaggataaaagtattacatgcaaggaggagaagtaaggataaactacgttcagttagtaaacagtgtttctatttgctggctcagctttgtttttgcaaattatgacttcggtgtttgtagatgttttgggaagttagaggttcatttgatacctggattgattcagactttctaagaattggatacagccagctttgttacctttttggacttttttccttttggtttggtgtt

SEQ ID NO: 24118 - DNA, 943 bp, Artificial sequence
  DNA replication origin
ccctggcccgccgggactccctgcagaagccgggcctggaggcgccgccgcgcgcgcacgtggccttccggcctgactgcccagtgcccagcaggaccaactccttcaacagccaccagccgcggcccggtccgcctggcaaggccgagccctccctgcccgcccccaacaccgtgacggctgtcacggccgcgcacatcttgcacccggtgaagagcgtgcgtgtgctgaggccggagccgcagacggctgtggggccctcgcaccccgcctgggtgcccgcgcctgccccggcccccgcccccgcccccgccccggctgcggagggcttggacgccaaggaggagcatgccctggcgctgggcggcgcaggcgccttcccgctggacgtggagtacggaggcccagaccggaggtgcccgcctccgccctacccgaagcacctgctgctgcgcagcaagtcggagcagtacgacctggacagcctgtgcgcaggcatggagcagagcctccgtgcgggccccaacgagcccgagggcggcgacaagagccgcaaaagcgccaagggggacaaaggcggaaaggataaaaagcagattcagacctctcccgttcccgtccgcaaaaacagcagagacgaagagaagagagagtcacgcatcaagagctactcgccatacgcctttaagttcttcatggagcagcacgtggagaatgtcatcaaaacctaccagcagaaggttaaccggaggctgcagctggagcaagaaatggccaaagtaatttcacacttcatttttactatttgttcccggctcatccctctactggcaataggaagcacgcacaatcccttttctgtttcgactgtataccccttatcatcaaaacggctaatgggcgacagtctggttctggggccaacaacttggagaagttgcaa

SEQ ID NO: 24119 - DNA, 1076 bp, Artificial sequence
  DNA replication origin
gcgggccagggtggcagccggccactgctggacggaggtgctgcccaattcatacaggtccacgttgaggctgttccgcgagggagtgagcaggctctgcggggggctgtcgctggcgaacacctggctgcgggagcccagcacatgcagctggtgggccgcgggaccggcctgcttgtggtgtgggtgcggcacgtagagcccggcggcagggggtgggaaagcgaggccggcgcctggcggtcctccctggcccttcgtgggcaggctggcgtaacccccggtctccggcggcgtcttgctctggaaggaggggctgcgctgcactccgtagcccaggggttccccaggcaccagcaggtgcggccgcccgtagtgcgcgccctgcagcgggaagtgtgcccctgctgcctctacgctggcaccgtagcccttgggtgggtgctggtgctggtggccgggcccgtgggggccgactccggggaaaaggtagtccacgtacggccgcggcatctcctccagcgccgtggggccgtcagcgccgaagcttgggccctcgtagggggtaccgctcagctggtggtaggacgcaaacgaatcgccggttccttcgaagctgggcctccgcgtcactggggttggcatgagcccctttcctgcagtggaaaaaacaggaagacagcatcagagtgggtgtgatcagtgggttctggcacttccaggctggtccccactctagcgctgccctcggggctgagggtcttgaaccctgggccctgacgtgctgcattctgcccagcacagggtcagtggactcccctctgccctgccagcaggaccagttgccctaatgtgttagcagagtggagacaagctgaagggcacatgggagggccaagggcagaagagaagactgcgtccacatcccgaggtgcgtccctgccccctggggaccacactggggtcactctcctgtcaggctagggagccgtctgcatagccagctttgctttttcaaaaccctatcatgcccaaattgtggggggctgagtttaccgacacacggttcccaaagc

SEQ ID NO: 24120 - DNA, 1394 bp, Artificial sequence
  DNA replication origin
ggcttttcactagacgcccggccgggcgcccctgacagcctcgggacccccggtccggcggcgcagcggtcccacggatccggggccatcctcccggccgcgccatcgtcccacgggccaatcagtccttcagagcccgccctgttggcccccgccggccgccccgtcgtcccgcgagccgacggacccacggcggtgccgcagtcgaggccgcgccgcccctcagcccccggtggctgcgccgcctcacccactgccgcgcggttcccaccccgttccccgcggccgcgccgccggctcacgggccagtcagcccctcagaggccaccggaccctgggggcgccgttcctcccgggctgcgggcggccaggccctgctcggcgtctcccggccggctgccgcgccaactctgcgagtttgctcacggtcttggcgggacgcggcccgaggcgcaggagcgctttcgtggccacgcgaacggcggccgttgcataacacgccattcccgtgccctagtttagcgacgtgtggggggtttggctttctcttctgatgtaagctcacctgcgcttagctccccagccggactctggagatggggattctgacatcattcacatcttgccatcacatccttcagcccaactccagaacttctggggagctttccctcggggatggagtgcggcctggagcaaacccgtttgtgaaatgcaagtctccagtgtcccgagggttgggaacggggggcgaggcgaggaatggaccctgaagaaggtaaaacccacccgaccagggcgccaagcagccggtaacagggtcccgagttagctcggcggctggcggctgttctgaggcctttggatgagaaatgctattttgcgaggatcaccatgaaagaacttaacttgcagatttttttgacaaaaatgttgttattttaagacaagatctcgctctgtctcccaggctggaggggagtggcgcgatctcggctcactgcaacctccgtctcccaggttcgagcgattctcctgccttagcctcccacgtagctgggattacaggcccgcgccaccagcccagctaattttgtattttttagtagagacgggtttcgccgtgttggccaggctggctctcgaactcctgacctcaggtgatccacctgcctccgtctcccagagtgctgggattacaggcgtgagccaccgcgccccacctgacaagaattttgaacaagaacttttacattttcacgcttctctaggatggatatgagtgttttttgttgttgttgttgttgttttttgagacgttgtcttgctctgtcgcccaggctggagtgcagtggcgcgatctcggctcactgcaacctcgcctcctgggttca

SEQ ID NO: 24121 - DNA, 1028 bp, Artificial sequence
  DNA replication origin
cttcccggagcctcggcaccacagtaggtgcgcggagccgcagggctcgaccgcttcgcggaaactctcgccaccctccgagctgccgccccgaccccagctcccagccccctcacctccaggggcgcggtctacaccctcgggggcgtcctggccggcggctcccgggcctctcgcgccgggagaccgggcactggtggctggagctgctgctggccccgcagggacgggggagccccgggcggcggcggtggcgtggacggcgactgctccatcttcccggggcgctcacgccgcggttccaaagcgcagacccaagtgggacattcgctacattgttggcattccacgggcgtcacgtgaccccgcctcccgcgtcactctcggccgcataccagtccgggcggggcgcctgcggcccctgctcctccgcggccgctccgcccagccccgcccggccgtgcttcctgcctccggcctcgaccgccacctgcccacggcctccctgctggcctgcggtagctcgccagggcctctcggacctatttgactggctgctatctgcccccaaacttgagtatttgccctctcgactgcatttgtattaaaagttggtaactgtcgttaaagccactattcttaagtatctcataccagtcttggtgaaagaaaaaaaaaagttagcaggcctgaaggagccaccaagttaccaactagtggctggacactaaaaataggggcagaaaaggacagacggctattgggacagtggaatcaaacaattaagaaggacgtttgccagaagcggtggctcacgcctgtaatcccagcactttgagaggtctaggcgggtggatcacctgaggtcgggagttcgagaccagcctgaccaacttggagaaacccccgtctctattaaaaatacaaaattagccaggcgtggtggctcatgcctgtaatcccagctcttcgggaggctgaggcaagagaatcactggaacccgggaggcggaggttgcggtgacctg

SEQ ID NO: 24122 - DNA, 904 bp, Artificial sequence
  DNA replication origin
cccggctgcgaccccgtctgggaggtgaggagcatctctgcccggccgccccgtctgagaagtgaggagcctctccgcccagcagccacccagtctgggaagtgaggagcgtctccgcccggcagccaccccgtccgggagggaggttgggggggtcagccccccgccaggccagccgccccatccgggagggaggtgagggggtcagccccccgcccggccagccgccccgtccgggaaggaggtggcggtgtcagccccccgcccggccagccgccccgtccgggagggaggtgggggggtcagccccccgcccggccagccgccccgtccgggagggaggtgggggggtcagccccccgcccggccagccgccccgtccgggagggaggtgggggggtcagccccccgcctggccagccgccccgcccgggaggtgaggggcgcctctgcccggccgcccctactgggaggtgaggagcccctctgcccggccaccaccccgtctgggaggtgtgcccaacagctcattgagagcgggccaggatgacaatggcggttttgtggaatagaaaggcgggaaaggtggggaaaagattgagaaatcggatggttgccgtgtctgtgtagaaagaagtagacatgggagacttttcattttgttctgtactaagaaaacttcttctgccgtgggatcctgttgatctgtgaccttacccccaaccctgtgctctctgaaacatgtgctgtgtccactcagggttaaatggattaagggcggtgcaagatgtgctttgttaaacagatgcttgaaggcagcatgctcgttaagagtcatcaccactccctaatctcaagtacccagggacacaaacactgcggaaggccgcagggtcctctgcct

SEQ ID NO: 24123 - DNA, 1258 bp, Artificial sequence
  DNA replication origin
ttctcaatcttttccccacctttcccgcctttctattccacaaaaccgccattgtcatcctggcccgctctcaatgagctgttgggcacacctcccagacggggtggtggccgggcagaggggctcctcacctcccagtaggggcggccgggcagaggcgcccctcacctcccgggcggggcggctggccaggcggggggctgacccccccacctccctcccggacggggcggctggccgggcggggggctgacccccccacctccctcccggacggggcggctggccgggcggggggctgacccccccacctccctcccggacggggcggctggccgggcggggggctgacaccgccacctccttcccggacggggcggctggccgggcggggggctgaccccctcacctccctcccggatggggcggctggcctggcggggggctgacccccccaacctccctcccggacggggtggctgccgggcggagacgctcctcacttcccagactgggtggctgctgggcggagaggctcctcacttctcagacggggcggccgggcagagatgctcctcacctcccagacggggtcgcagccgggcagaggtgctcctcacatcccagacggggcggcgaggcagaggcgctccccacatctcagacgatgggcggccgggcagagacgctcctcacctcctagatgtgatggcggccgggaagaggtgctcctcacttcctaggtgggatggcggccgggcggagacgctcctcactttccagactgggcagccaggcagaggggctcctcacatcccagacgatgggcggccaggcagagacgctcctcacttcccagatggggtggcagctgggcagaggctgcaatctcggcactttgggaggccaaggcaggtggctgggaggtggaggttgtagcgagccgagatcacgccactgcactccagcctgggcaccattgagcactgagtaaacgagactccgtctgcaatcccggcacctcgggaggccgaggctggcggatcacttgcggttaggggctggagaccggcctggccaacacagcgaaaccccgtctccaccaaaaccagtcaggcgtggcggcgcgagcccgcaatcgcaggcactccgcaggctgagtcaggagaatcaggcagggaggttgcagtgagccgagatggcagcagtacagtccggcctcggctcagcatgagagggagaccgtggaaagagaggg

SEQ ID NO: 24124 - DNA, 806 bp, Artificial sequence
  DNA replication origin
ctgtgtgagctgctaccggggacggggtgcgggggggggggggttagggagcagcggctgggggccctggctgataactccctcttggacaccagcaccaaacaggtgctgaggaagaaggtattggggcagacacaagaggacttaactattattcattattatccaaatgaaatggaagtgttatcacatttcaggaaacattaagattaatatttgcaagagaacacaataaaagatacaacggcaatctaattactttttgatccaaagctactgttagatattggtatatcctactttccgccaccgcgcccgaccacttagttcttgaaattgtcgaatgcggcggcagggaggcgggcggggcgggctgcaggcggggtctggctctggggccagtctgggccacggtcgggacccagtggagggccggactggtcagggttcaggcgggatccggcgtccgagttctggtgggcaggcctggggcaggatctggctctggctgcgggtcctggcccgggtcagggttgggcctcctatccagcccgccccagggcagggttcaatcccgcacttgccgaagtccctggggctggcaagggtgcaagacgcggagggctctatgtcgggaaaggggctctgaagaccacgtgggggcgctctaaggggtctggggccaccctgctctctgggtcaaaggtcatcgcaatggccgggaagaacttcctcttccttggctctccccacttacttcctgataacctggtagcggtctcccgcgggcgtcggggcttgggggg

SEQ ID NO: 24125 - DNA, 1038 bp, Artificial sequence
  DNA replication origin
agggccggactggtcagggttcaggcgggatccggcgtccgagttctggtgggcaggcctggggcaggatctggctctggctgcgggtcctggcccgggtcagggttgggcctcctatccagcccgccccagggcagggttcaatcccgcacttgccgaagtccctggggctggcaagggtgcaagacgcggagggctctatgtcgggaaaggggctctgaagaccacgtgggggcgctctaaggggtctggggccaccctgctctctgggtcaaaggtcatcgcaatggccgggaagaacttcctcttccttggctctccccacttacttcctgataacctggtagcggtctcccgcgggcgtcggggcttggggggaggcgtagcaacttcagggaacttcccaaaggtgtgcgcaggttggggggcggggcgcggcgccccgggaggtggcggcctctgcgacagcggaagtataagagtggacctgcaggccggtcgcgaggaggtggagtgggtggcgcccgctttgtgcctgggatcggcatgctggggcaggagggcagccgcgtgtcaggtgaccagaaccatgtccagccaggtggtgggcagtgagcctctctacatcatggcagagccggccaggcctgacagtccaaagggctcctcggagacggagacccgagcctcctgtggccctggcccctggtccagctcccacccactgcctcccaggccacaaggaagaggaggatgggaaggggctgggcctggcgagctgggcggtgggaagctggtgctcagcttcctgtccaagagcctctgcctggtctgtggggacgtggcctccggctaccactacggtgtgtcatcctgtgaggactgcaaagccttcttcaagaggaccatccaggggagcatcaagtacagctgtccggcctccaacaagtgtgagatcatcaagcggagacgcaaggcctgtcaggcctgccgcttcaccaagtgcctgcgggagtgcgcctggatcgcgtccggggt

SEQ ID NO: 24126 - DNA, 1116 bp, Artificial sequence
  DNA replication origin
tggttccgtttattggggtagctcaggtccactgcttcgtaggtgtgatttcactcagtccttcacacaaaccgtgaggttgacctcatgttcatccccacaacacagatgagaaaaccaagggttagaggacaggcagtgaggggcaggcaaagccaggggtcagatctgttctggcttcagagcctcgactctgtctcacaaatagaatattttcttctaaaagtcatagcactgtctttggggtggggtggggccacggattttcttgtcgaaaaagatctagagctctcatatggaaatgggtccacaggggcaaggagcctggccaggagttggaacactgatggatggatacttttggaaggtgctgggaatgggcacgctgtcaaagtcactggccactgctctcacctgtacatggtattgagtactggtccacgtactcagccagttccttcacaagtctgcgagagtgggcacatacctgaagaatgaggatggggcggggagggtgaggagggaaaatgggagcataatgcagggtcctacctgggggactggatattgattgggagcttcccggacaagtgaggcaggtaagactaggtgagggctggtgaagacagatgaggctaggtgagactaggtgggggcaggtgagagcagtgagactgggtgagggcagatgagtctaggtgagggcagctgagggcatatgaagctaggtgagtctgggtgagggcaggtggggcaggtgagagcagatgagactgggtgagggcaggtgagggcagatgaggctaggtgagactagctgaggtcaggtgagggcaaatgagactgggtgagggcagatgaggctaggtgagactagctgaaggcaggtgaggacaaatgagactgggtgagggcaggtgaggtcaggtgagactgaatgagggcagatgagggcaggtgagggcaggtgaagccaggtaagggcctgggctttactgggagatgcagaaaggcaaggacaaccctgaagagcaaatgcagacttgctgagcctgaggacatccaaccacatgccttcccggagtccctctgtttcctgctccagcctcatatgac

SEQ ID NO: 24127 - DNA, 1121 bp, Artificial sequence
  DNA replication origin
agaccagcctgggtcagatacttaaattagtatagtgagacctcatctcgacaaaaaataaaaaattagccaggtttgtgttgatgcacacctgtatagtcccagttacgtgggaggctgaagtgggaggatcacttgagcccaggaggtcgaggctgcaatgagccaagatggcacaagctgcactccagcctgggtaacagagcaaggccctgtctcaaaaaaagaaaaaagaaaaaaaggtgacttttgtccactattgaggaaattcgacccagagaaaaatgaccaaaattaaaggctctaagaaagaaataagaggtttatctatgttatatggtttgtaaaagacacagcaagagaaaattgctaagtaggaaattaccacaaacatggagcttatcgcatttatcatcctgttcctgtataacaggagtttgtttttctagaggcatcttatctttagtgtcagctagaggagcatctgtttcctcacttgtgggcttgtcctcagcagttaggtccttgcagaggacctggagcctgcgggcagggctgcagccagagcctaagacccaggacggagtcagatcacaggcactaggggtggaggtcacgtcgggcagagtcagatcacaggcactaggggtggaggtcacgtcgggcagagtcagatcacaggcactaggggtggaggtcacgtcgggcagtcagatcgcaggcactaggggtggaggtcatgtcgggcagagtcagatcgcaggcactaggggtggaggtcacgtcgggcagagtcagatcgcaggcactaggggtggaggtcacgtcgggcagagtcagatcacaggcactaggggtggaggtcacgtcgggcagagtcagatcacaggcactaggggtggaggtcacgtcgggcagagtcagatcgcaggcactaggggtggaggtcacgtcgggcagagtcagatcgcaggcactaggggtggaggtcacgtcgggcagagtcagatcgcaggcactaggggtggaggtcatgtcgggcagtcagatcgcaggcactaggggtggaggtcacgtcgggccgagtgcgctgcagtcagaagaggagctgtgtcccgcat

SEQ ID NO: 24128 - DNA, 1579 bp, Artificial sequence
  DNA replication origin
cccccccacctccctcccggacggggcggctggccgggcagaggggctcctcacttcccagtaggggcggccgggcagaggtgcccctcacctcccggacggggcggctggccgggcggcggggctgaccccccccacctccttcccggacggggcggctggccgggcggggggctgacccccccacctccctcccggacggggcggctggccgggcggggggctgaccccccacctccctcccggacggggcggctggccgggcggggggctgacccccccacctccctcccggacggggcggctggccgggcagaggggctcctcacttcccagtaggggcggccgggcagaggcgcccctcacctcccggatggggcagctggccgggcggggggctgaccccccccacctccctcccggacggggtggctgccgggcagagacgctcctcacctcccagatggggtggctgccgggcggagaggctcctcacctcccagacggggcggctgccgggcggaggggctcctcacttttcagacggggtggttgccaggcagagggtctcctcacttctcagacggggcggccgggcagagacgctcctcacctcccagacggggtctcggccgggcagaggcgctcctcacatcccagatggggcggcggggcagaggcgctccccacatctcagacgatgggcggccgggcagagacgctcctcacttcctagatgtgatggcggctgggaagaggcgctcctcacttcctagatgggatggcggctgggcggagacactcctcactttccagactgggcagccaggcagaggggctcctcacatcccagacgatgggcggccaggcagagacactcctcacttcccagacggggtggcggccgggcagaggctgcaatctcggcactctgggaggccaaggcaggcggctgggaggtgtaggttgtagtgagccgagaccacgccactgcactccagcctgggcaccattgagcactgagtgaacgagactccctctgcaatcccggcacctcgggaggccaaggctggcggatcactcgcggttaggggctggagaccggcccggccaacacagccaaaccccgtctccaccaaaaccagtcaggcgtggcggcgcgtgcctgcaatcgcaggcactcggcaggctgaggcaggagaatcaggcagggaggttgcagtgagccgagatggcagcggtacagtccagcttcggctccacatgagagggagaccgtggggagagggagagggagacggagagggagagggagagggagagcgctcacatcttctatctgtccaaactgggacgagtcctcggcctcggaggctccacgctccctctctcacagcccgcacctcggcggtctctggttgtttaaagtaacttaagttttagggtgggttgttaatgccacattatcacctatattgtagtatccttgtaaacctgtctcttcctgtgctccacccccacctttattccatgtattctccaggaagcagtcagaatggtctttttcaaattaatacca

SEQ ID NO: 24129 - DNA, 881 bp, Artificial sequence
  DNA replication origin
gggcgcctctgcccggccgcccctactgggaagtgaggagcccctctgcccggccagccgccccgtccgggagggaggtgggggggtcagccccccgcccggccagccgccccgtccgggagggaggtggggggtcagccccccgcccggccagccgccccgtccgggagggaggtgggggggtcagccccccgcccggccagccgccccgtccgggaaggaggtggggggggtcagccccgccgcccggccagccgccccgtccgggaggtgaggggcacctctgcccggccgcccctactgggaagtgaggagcccctctgcccggccagccgccccgtccgggagggaggtgggggggtcagccccctgcccggccggccgccccgtccgggaggtgaggggcgcctctgcccggctgcccctactgggaagtgaggagcccctttgcccggccaccaccccgtctgggaggtgtgcccaacagctcattgagaacgggccaggatgacaatggtggctttgtggaatagaaaggcgggaaaggtggggaaaagattgagaaatcggatggttgccgtgtctgtgtagaaagaagtagacatgggagacttttcattttgttctgcactaagaaaaattcttctgccttgggatcctgttgatctgtgaccttacccccaaccctgtgctctctgaaacatgtgctgtgtccactcagggttaaatggattaagggcggtgcaagatgtgctttgttaaacagatgcttgaaggcagcatgcttgttaagagtcatcaccaatccctgatctcaagtaatcagggacacaaacactgcggaaggccgcagggtcctctgcctaggaaaaccagagacc

SEQ ID NO: 24130 - DNA, 1779 bp, Artificial sequence
  DNA replication origin
gcagtccccggggacggtactcacacacgcagagctccaccacgtacgcgtagtaggaccagacgaccacgaaggtgatgaagagcaccggcacccagcccacgacgcgctggcagcagcgccacagcgtccagggcgccatgttccgctggcggctgccgagccccgcgtcccaccgttctggggagcgcgggagccccggcgacggtgactcggacgctccaggcggctgctggtccagctcccccgcctccgaggcaggacttgtgggagcaaaagtccgaggcgccgccgggactcctcccgtcccggcgcccagccaggccccgcccccaccccacatcccgtcgcccccctccccccgcgtccgtccccgccagcccgcccgccgcgggccgcgggccgcccccggtctccgcgtcgttggggcggggtttccgcggccggggaggcggtgagggggcggggccgcagctcgggaccgcccatggggcgtggcggggctggatgcggacaggctgggcggacgcgggaggccggggaaggagaggcgaaaaacacgcccttgatggatgagagggacaggggatagcttttgtggatcgagactcaataggggagggagactatggaaatgattccttagctgatttgtggatcttggccctctctgtgtacagaactcgctccactggggttcctgggacattgagtagttggggcactgtttcaaacatgacaaggccattccccactcagtgtgcgaagaatgcacattgttagaaggctcctcctgtgatttttatgttcgtccatcttggcggaacccctccctttcttgaagatggaacggtagatacctgtaatttcgggtagaagccatgtagggtccatcagtttgattcgtaacccaaatttaagattgagtagcgagaaggaaagggcatgtaaatgaccctctccttgccccgcaaacgactaaggaaatttaaagaatttatttacaactagaggttgctaagcaatgacgataatcatatagaacccagaagcatcactgtgaagacttcacaatgcaaggtcagacgcattagaagggattccagaccgcaatcttcataccagttcctgctactagcattcagttttggttagaatgaatttttgtgtttgttttttgaaacagggtcttctcgctctgtcgcccaagctggagtgcagtggcacgacctgggctcatttaagcctcgacctccctgctaaagcactcctcctgcttcagcctgcagagtagcagggactacaggcccgccaccatgcccagctgatgtttgtattttctgtaaaaactaggtttcgccctgttgccatgctggccctgaactccaaggctcaaggaatcccaacccctctccgcctccacctcccaaagaagtgctgagattacaggtgtgagccaccacgaccggcctacactgagctttaaattagctactgctcactaaagtctccatgaagaagacgtcaccctttgctgtgtcagagaaatgtagtaaaagcgagtaagtatttaatcactgcacactgctgcttgagtaataaagcatgtataaaagattctgttctccctgattttgtgccttaaaagtcatattagttagtggcctagttgacagtaggtttaggttcaagttcaactagttttccagagaggctgcttaggagggttagacctcaacatagaattcggatggacatggaagaacataaagccgtttc

SEQ ID NO: 24131 - DNA, 951 bp, Artificial sequence
  DNA replication origin
aagttgagccccttcgctttctctttgtgtgtgagagtgggtctggcggggctgacagccgccgccctgggctgcacggtggtttgcggtgtgggaacggctggaggcgcgcgcagcggcaggagagttggtggcggggacagaggacgggctggaggtcggacccctgagctcccctgtcccattccgtgtccttcttctgaagcacgcagccgggttttggagactcgaagggctccgtggtgcccgggaggtgggtcgggggcccctggccggagccgcagggaaaggagtgggggtgggggggacaaagggccgcggaggcgggcggagggggcggcgtgctattgttaaccgctttccgagagcagagctcgcgagctcgccgatcgcgatctggctttcccgcgcccccgcctccgctccggcttcacaaccgggggagcccggggtgtgcgcgggagcgcggcgggggcgcacggctgcaggggcgccgcggcgggcccgagccggttttattgtgtggatcagccgagcctgtctttgagagaccctattagaactccggtgcagcacgactgggccctggtgtgcagagattatgggatattctagttggcgcttcttcacgcaccccttccctccatgagcattttttttttttgatgcagtcacctttaggataggacgtttgccacatgcagtcgagtcattagaaatcccgtaactctgccactggagagagcgcggatgcaagggcgggggccacgcgggaggggagggcaggagaggcgcattctagggtgagcggatgaggacagcggcgggctacagtggctcaatagaaaccgttaaacaaaaagctagacccctcacccctagaggtcagagaaaggtgttgtcagggaagtggcatctccactccttagacgctctcggtacagtgttgcg

SEQ ID NO: 24132 - DNA, 899 bp, Artificial sequence
  DNA replication origin
agtgccgcggtctcccgctgctgccgctgcggcaggtcccaatattagcaacctccgcagagcggtggtgcgtgtgccgggagcctcctaccctcgccttcccagccccgcccggaacgaggccgcggcggcgctaggacaccgcggctcgcgcggggagggcggagggagggcacaggcgccgggagggggcgagggggctgcggtgccccggctctggcacacctggcgctcccgcgcgccgccgcggcctcaccttcggccctcctcctcctccggcagcagcctctcctccgcagcccggctcccctctggggagttcgtcctcacactcagtttctctagaaaagagtaactgtaggtggggggtgcggtgggtttacaccttgattaaaatagaaggtgcattttctacctgaaatcaaacagcagaaggaaacgcgctggaaaaaggatttttgccgcccccatgcagccgcaggtgactgcagctgctggcaagcttggcagtgacacagcagcagcagtgcagaggacgtgggggtgggggagtcttactgttccagcaggagctgcagaggtgacaacttaggtgggaccttgaaggagcctttttttttttttttccccctcggattggtggtgtggagataagattgaacaaggagaaaaggaactcgcaattgtatctctgtgcagtaggctgggggagcgagatgtcttgtttcatctgtatatctatatgcctatatatagagctcacttttaaagcactccagccttgctagatggatagaaatgtgagcagaaaatcatttggggaaatagtaatgtaaaataataaaaacatgaacgctgggcctgatctgctatttaacttgtttaggaaacctaagtct

SEQ ID NO: 24133 - DNA, 1739 bp, Artificial sequence
  DNA replication origin
tgtcttaaaaaaaaaaatccatctggccaccctccattttggaagcctcagccttgaggtcttgagggttggactgcagtgggtctgaggtcctcagggaccaggcgggagatgcattccacaccatctcttgttttcttggtctgcagaaacgatgcagcaacccaaggagggttctgctgctcaaacagtggaccaggccggctaccaccacaggcttagcacgtgctctgcctggaatcccgtttcctccgggggttgttggcttgttccctcacaatgcacaagtttctgcctgaaatcaccttttcaggaaaaccatcctgctcttaaggtagtctccacccacctctctcaccagaatttcagtttcatgagaggagtgacattgctggtcttggtcactgcatcaccgtgttcttatcagtattggatcattttcaatttcacatgaaaaaagtgtgtatggtgtgtatgtgcatggtgtgtgtgtgtgtgttgtgtgtgatgtttgtggtatgtgtggatgtttgtggtatgtgtgcagtgtatgtatgtgtgtgtagtgtatttgtatagtgtgtggtgtgtgtaagggatgtgtatgtggggtgtgtgatgtgtgtatttctctgagggatgtgtgtgtatatggtgtgtggcgtgtggggtttgtggggtgtgtggggtgtctggaatgcatatgaggtgtgtgtggtatctgtaagggatgtgtatgtggggtgtgtgatgtgtgtgtttctgtgagggatgtgtgtgtgggtgtgtggtgtgtggggtgcatgtgaggtgtgtgtggtgtagtgtgggggtgtgtgtggtgtagtgtgggggagtgtgtggtgtgtatgttatgtgtggggtgcatgcgtggtacacgctatgtggtgtatgtgtctgtaaggggtgtatatgtgggatgtgtgatgtctgtgtgtctgttagggatgtgtgtatgttgtgtggtgtagtgtgtggggggcgtgtggtgtgtgtgtggtatatatgaagtgtgggttgtgtgtctgtaagacatgtgtatgaggggtatgtgatgtgtgtttctgtgagggatgtgtgtgtgttgtgtggtgtgttgtgtgtgtggggtgtgatgtgtgttttgtgtgggtgtggggtgtgtgtggggtgcatatgaggtgtgtggggtgtgtgatgtgtgtctgtaagggatgtgtatgtggggtgtgtaatgtgtgtttctgtgaggcatgtgtgtgtgttgtgtgtgtgggaagtgtgtatgttgtgtgggggtatgtgcatgtggtgtgtctgtaagggatgtgtatgtggggttgttgtgtgtggcgggtgtgtggtatgtgtggggtgtgtggtgtgtgggggtgcatatgaggtgtctgggtgtgtggtgtgtgtctgtaagggatgtgtttgtggggtgtgtgatgtctgtgtgtctgtgagggatgtgtgtgtgttgtgtggtgtgttgtgtgtggggtatgtggtgtattgggggtatgtgtggtgtgtggggtgtgtggtatgtgtggggtgcatatgaggtgtgtgggtgtgtggtgtgtgtctgtaagagatgtgtttgtggggtgtgtgatgtgtgtttctgtgagggatgtgtgtgggtgtgtcgtgagggatgtgtgtatggaatgtgtgtgtgtgtgtgtgtgtgtgtgtgttgtgttgtttgcttgttgggggtgtct

SEQ ID NO: 24134 - DNA, 1319 bp, Artificial sequence
  DNA replication origin
actccaacctgggtggcagagtgagaccgcatctcaaaaaaaaaaaaaggggggggggtatcttgggatcttagaggcagtctaaaaaatctaaaagtgtcaacaagtagaaaaacagatcacctgaagagtgaattgccagaatggctgtggatttctcaatagcagtgcagatacctaaaagacaattgagtgaaacctttggaaggctgagaatatttagaattttatacctagccagccataaatcaagaataagtacagtaggagagggtggcaagcgggagcggggaggagagggcggtgagcaggactgagggagaaggcagtggggaaaagagcttttgggtagatggaggcggaagaggcggtggcgtgagtggggaaaagatgttgggggaaatgacttgggggaaaagtttttcatttattggaggagaaaaataaggtggcgagccagagggaggaaaagaaggtggcaagaggggtaggggaaaagagggtgggaaaaaggtttttgggtagttggaggggggaaaagagggtggcgagagggagggtcgccagagggagggtcagcaagagggtagagaggggaaggagggaaaatagggcagtggggaagagagtggagaatgggaggagggaatagcctgtgggaaaaagacagtgaggtaaagacagtagggaaaaaagtttttgggtagatggaggcagaaaagagggcgagagggagcagggagaagatggaggggaaaaatgcatttgggtagaaagagggggaaaagagggtggggaaagggagtgaggcgggaagagggtggcagctggagagaggaaaagagggagcaggaagaagacagtggatacgtttttggatagatagagggagaaacggtggcaagaagaagtggtcggtgggaggggggaatgagggtggccaggaggaatggggagaaagtctggggcaaagacggtggcaagagggaggtgggagaaggcagtggggagaagagggtgggaaaacgaaggtgggggaaaatgtttttgggtagatggatggtaaaaatagggtggggagagggagtggggaaaagagggtggcagagtggagggagtcaaaataatgagtataataaagacattttcagatatgtgaattctcagaaaattgacctgccaagtaccgtctctcagggaactctggaatatgtcttaccctaaagtgaaaagtgatccaaaagagagagaaaggcacaggaccagggaaacagaatcgaaatcagaacagaagtaaaggaaattctcctggcaaaggt

SEQ ID NO: 24135 - DNA, 946 bp, Artificial sequence
  DNA replication origin
tcttcccggccgccatcccatctaggaagtgaggagcgtctctgcccggccgcccatcgtctgagatgtggggagcgcctctgccctgccgccccgtctgggatgtgaggggtgcctctgcccggctgtgaccctgtctgggaggtgaggagcgtctctgcccggccgccccgtctgagaagggaggagaccctctgcccggcagccgccccctctgagaagtaaggagcccctccgtccggcagccaccccgtctgggaagtgaggagcgtctccgcccggcagccaccccgtctgggagggaggtaggggtcagcccccgccaggccagccgccccgtccgggagggaggtgggggtcagcccccgccaggccagccgccccgtccgggaggtgaggggcgcctctgcccggccgcccctactgggaagtgaggagcccctctgcccggccaccaccccgtctgggaggtgtacccaacagctcattgagaatgggccatgatgacaatggcggttttgtggaatggaaaggggggaaaggtggggaaaagattgagaaatcggatggttgccatgtctgtgtggaaagtagtagacatgggagacttttcattttgttctgtactaagaaaaattcttctgccgtgggatcctgttgatctgtgaccttacccccaaccctgtgctctctgaaacatgtgctgtgtccactcagggttaaatggattaagggctgtgcaagatgtgctttgttaaacagatgcttgaaggcagcatgctcattaagagtcatcaccactccctaatcttaagtacccagggacacaaacactgcggaaggccgcagggtcctctgcctaggaaaaccagagacctttgttcacttgtttatctgctgaccctccctccactattgtcctatgaccctgccaaatccccctctg

SEQ ID NO: 24136 - DNA, 1266 bp, Artificial sequence
  DNA replication origin
ctgccttcaagcatctgtttaacaaagcacatcttgcacagcccttaatccatttaaccctgagtggacacagcacatgtttcagagagcacagggttgggggtaaggtcacagatcaacaggatcccacggcagaagaatttttcttagtacagaacaaaatgaaaagtctcccatgtctactactttccacacagacatggcaaccatccgatttctcaatcttttccccacctttcccccctttccattccacaaaaccgccattgtcatcatggcccattctcaatgagctgttgggtacacctcccagacggggtggtggccgggcagaggggctcctcacttcccagtaggggcggccgggcagaggcgcccctcacctcccggacggggcggctggcctggcgggggctgacccccacctccctcccggacggggcggctggcctggcgggggctgacccctacctccctcccagacggggtggctgccgggcggagacgctcctcacttcccagacggggtggctgccggacggaggggctccttacttctcagagggggcggctgccgggcagagggtctcctcccttctcagacggggcggccgggcagagacgctcctcacctcccagacagggtcacagccgggcagaggcacccctcacatcccagacggggcggcagggcagaggcgctccccacatctcagacgatgggcggccgggcagagacgctcctcacttcctagatgggatggcggccgggaagagatgctcctcactttccagactgggcagccaggcagaggggctcctcacatcccagacgatgggtggccaggcagagacgctcctcacttcccagacagggtggcggcctggcagaggctgcaatctcggctctttgggaggccaaggcaggcagctgggaggtggttgtagcgagcccagatcacgccactgcactccagcctgggcaccattgagcactgagtgaacgagactcggtctgcaatcccggcacctcgggaggccgaggctggcggatcacttgcggttaggagctggagaccagcccggccaacacagccaaaccccgtctccaccaaaaaaatacgaaaaccagtcaggcgtggcggcgcacgcctgcaattttcgcaggcacttggcaggctgaggcaggagaatcaggcagggaggttgcagtgagcggagatggcagcagtacagtccagcttcggctcggcatcagagggagac

SEQ ID NO: 24137 - DNA, 1069 bp, Artificial sequence
  DNA replication origin
tgcagccagccctgctttgtgtctagatactccggcatgcttggcgcccccatgcccgaggtcatgtgctcctgccataatttaaacaaatgcctgaacagcaaaatgaaattagaataggcagctagacgtggtctggagcgcaagaggaaggtgcggtgcggtgaggtgagaagagagaccgcgctagaccaggcgatgtcttagggacgggagaggggtgaggcccacggcggtcctggggagcggcccacgaccggcccacgcagagcttgtagccagtgaacaggaagtattggcgagagggactgagaaacccaagagagtgtggggtgaggaaaaggtcaaggaaggcccaggcttccaggaagggcctgggccggggcggggcgggtggtgggaggcagtggttaggacgggcgggggtgggggtgggggtgggggtaggggtgggggtgccacaggaggccggcgtggccttggaagccgctcagccgcgcgggggagcccggggatccgaggagctgcggagggaaggggaggagcagggcgtggttggaaaggcggtgggacagggagggctgggctgtgcggctgtcccgtcctcgtgaagaggagcgttgggaggagccgggagagacaaggctatgggcggcgggcggggacggctgtccctccctcaaggagtggagttagcgaggctgcgctggggtgctccgttgccgaggatgggccgagttcgaggcggcaaaggtgcgggtgtgcaggggggaggcggcgccctcctcgctgggtctggggtcccgcagcgcctcgggccggagcagtgagcgagcgtgggtgggagctgcggcctgggtccttgagcccggctgccccgacggcaggtgcaccggggttgcgggggactcggcgcatctccagggcgagtgagtccagggccttcggcctacaggctgagcaacgcggacaacagcgagggggctccgtggcacagctggcggggtcacggcgcacgcctgggcgccctggagcccggagactcagcagccatcgctcggggctacca

SEQ ID NO: 24138 - DNA, 910 bp, Artificial sequence
  DNA replication origin
tcgaggcggcaaaggtgcgggtgtgcaggggggaggcggcgccctcctcgctgggtctggggtcccgcagcgcctcgggccggagcagtgagcgagcgtgggtgggagctgcggcctgggtccttgagcccggctgccccgacggcaggtgcaccggggttgcgggggactcggcgcatctccagggcgagtgagtccagggccttcggcctacaggctgagcaacgcggacaacagcgagggggctccgtggcacagctggcggggtcacggcgcacgcctgggcgccctggagcccggagactcagcagccatcgctcggggctaccacggccctccaggctcctgagccacccgcacggaggacgagctgcggagcgcggtgtgcggatagccaagctcctgccgccaaggccaccccgagcccaggctgccagggcggcatccacagccggcggcccgcgggcctgggcctgagacccgcgcagcagccccgcctgccctgccgtgagagggaagtagaccgcgcttggtttccgcaggttagagtctcagatgcattgttacagctgcacaaactaccctaccccgacagtgcgtgggtgccggagccttggtccataagggagccttgtgggcagtggcttaggcaagagcctgactggtgtcatcctgtccacttgtttactaaaaccctctgctgtggtcattcattgctgaccattcacataggacagacatatcttcatgatttttgcccattcgcgaggcctattcacatatcttttccccaaatatcttcaccaccaatttttccaatcgttctttccatgtctctgaccatccagcataaacattgagcacagctggcgaaatagtccatcactgcacaactggccactgctccttc

SEQ ID NO: 24139 - DNA, 2048 bp, Artificial sequence
  DNA replication origin
ggcctggccgagttacacagaggagccccctcagccaaaaagagccaggggatccagaagctggagagctgctcaggagttggggacactacaggcaaggtccctgcttgttcctgagtcttggcttggatgtggcttagcatcgaactttcatgttcacccaggcttctctgagtgaccctgacagggatcaaaggcccagcggcccacacatcacccttgactggcacgaggtggtggtggggcctctcagggtaccaggaaagggggctgggcttgagctgccaggtaggggacccctgtggggcttggggtgggtggggcaggggtggagctggctgggcctcacaggcccgggagcctaggagacagcttcagtgccttccctggggatccccagaccaggcactccgagaagccggctctgcaccatgacagccattgctgccaccccacgtaggtcccagaacgagccctgccagcccaccccagaggccgagggacaggtaggtgagctgcagaagggacccgagggcactgagacagaggcttaaaaggccaaatctagctttaagtcgtggagtcaagcagccgaccgtcccgacacgtggccacaatggcatccagagagcggtccccccagcagtgtcattcgggtagtaatgcgggaaggccccgtccggttcgtgttcagggcccggaaggcctccgtgatttggcggcacaagcctggggctgtggcactgtcggaggacctgcctggcctcttcatgccaatgaggttctcatgtaacccccaacataacccgcagggccagattgaccttctcacctaaccggagacggaaaagaaccaagaggctgtcaggaataaggcatttctccgggcaatcaggtgtgcaggggctgagctgggattccaattctgggttacagtgggctccaggttccgcagcagtttcaggggcgacattaccgaggtcctcgtgggcgggagaaggaagtgcgatggggcacgtcaaggacgaggtgccagctggtcattgaaggatggtggggctccattcagcagaggtgggggctgtgatgggggtggatgggtgtgtgaggtgattgggtttgtgtgtgatgagtgtgtgtgtgtgtggtgcatggtgtctgtgtgatggcccagtgtgtgtggctctgtgtgcaggtgtatgcgtgatgaggtgtgtgtgtgtggtgtgtgtgcgtgtgatggttgagtgtatatatggtgtggtgtgtgtggtgtctgggatgtgtgtgtgatgactgtgtgtggtgtgcgtgtgacgagtgtgcataatgagcatgtgtgtggtgtgtgtgatgtctgtgatcgtgtgtgatgtgtgtgtgagtgtgatgagtgtgcatggtgtgtgtgtgatgagcatgtgtgtgccgtgtgtgatgaatgtgtgtatggtgtatgtgatgaatgtgtgtgatgagtgtgtggtgtgcatgtgatgagtgtgtgaacatgtgtgtagtgtttgatgaatgtgtgtgatgagcatgagtgatgagtatatgtgtggtgtgtgtgatgagtttgtatgactgtgtgtgtggtgtgtgatgagcgtgtgtctgtgatcagtgtgtgatgagcgtgtgtgatgagtgtgtgtgctgtgtgtgatatgtgtgtgatgagcatgtgtgtggtgcatgtgtgtgatgagtgtgttatgagcatgtgatgcatgtgtgatgagcatgtgtgtgatgagtgtgtgtgatgagtgcgtatggtgtgtgtgatgagaatgtgtgtgatgagcatgtgtgtggtgtatgtgtgtaatgaatgtgtgtgatgagtattatgagcgtgtggtgtgtgatgagtgtgtgatgagcatgtgtgtgacgagtgtgtgtggtgtgtgtaaaatgtgtgtgatgagtgtgtggtgtgtgtgatgagcgtgtgtgatgagtgtgtggttgtgtgatgagtgtgtgtgtgatgagtgtgtgtgtggtgtgtgtggggagcggggatgggtgcaggt

SEQ ID NO: 24140 - DNA, 850 bp, Artificial sequence
  DNA replication origin
ccaagagcagcccccaccctccatggggccttccccaggcctccccaacccggggatcggggatacgccctctccacccacctctccagggacctgggaataggaaagctgtttgctcaaacacgcctgggcccccagacacagaacccagtcagtgttcctgggggcagtgccaagggtggctgggggcgagctgaggcccagccttcctccctgatgtcaggcgtgtctggaagccgtttcagcattcatcagcccttcgacttctccctcggtggccctgcaggtaactatctctaggttgatttgtgttctctgccccttaggagagcctggggtctgcggtgactctcaaatgacgctgtcagagatgtcaacccctctcccagtgataagagtcgcacacctggtcagtggccaccctggagttgggtccaaccctgccttttctgcaaagtgtggacaaaactcagaaagcctggagagagagggagccagggacagaagaggggaggagagaggaactggggttgggggatccgaaggagaacagggctcctggctccgtggcttcccgctagctcaagatggtccccttggtcccacattgaagtctcacaaaactcctaggagctacacaccagcatcaaaaagacaaacaacccaaccaggagctgggcacaggagtttaaaagacatttctctgaagaagacctgcaaatggccagcaagcacatgaaaagactcaacgccattagtcattagagaatccaccaaaaccacagcgagatgccacttctcactccccaggatggtgaggaggagtagaaggggaaggaggggaaggagg

SEQ ID NO: 24141 - DNA, 1251 bp, Artificial sequence
  DNA replication origin
aacgccattagtcattagagaatccaccaaaaccacagcgagatgccacttctcactccccaggatggtgaggaggagtagaaggggaaggaggggaaggagggaatgaaggagagagggagggagagaagaaaggaaagaaagagggaaggaagaagggaaggaaggagggagggaaggaaggaaggaaggagggaaaaaaggagggtgggaagggaaagagggcaagagggagagaaagaagggagagaggaagggagggagggtgggaaggaaggagggagggagagaaggaaggtaggagggaggcaaggagggttaaaaggaaggagggagggagggaaggaaggaaggaaggaaagaaggaaggaaggagggaaggaaggaaggaaagaaggaaggagagaaggaaggaaggaaggagggaaggaagaaaagagagaaggaaggaaggagggaaggaaggaaggaaggagggagggaagaaggaatgaaggagggagggagggaaggaagggtcacaggagggactccaaggccctgggctcccattaggggctgctgggcaggcaggttgtgctggaaatgcaggtggaaacaggcatggggaccctggaggcaggagatggtcacagcaccagctgctctctgttgaaaatagcgagtgttggcgaggacatggaggaattggagcctcgcctgctgctgacgggaatgtagaaggatgcagccactgggtggaacccagcaggagcctgggaggccttcgatgtgacttggtaaccagcggagtgaggcaccaaccacatgctaacaggggctgagcacaccatgctgggcgaggcagccagtcacaaaggccacacagcaaatggccccttctatacgaagtgcctagaacaggcaaagctgttgaagacagaaagtagctttgtggttgccaggggctggggttggggcagatgggaagtggccacgatggatatggaggtttcttttgggggtggtggaaaggttctaacatcagatgatggtaatggtttgattgtgcagctttgtagatatactaaaaaccattgaattctgcacgggcaaaaagcctgggaggtatgaggcagaatcaacatcttacagaagaggaaactgaggctcgggcattttaaataaaagtcgtcttactgctgtgcccgatgccttgaaaagccggctaagacttctcatgggaactgtctccgcaacaggccccagctg

SEQ ID NO: 24142 - DNA, 740 bp, Artificial sequence
  DNA replication origin
ggtttgcgggggacaggctgggtggcaagacttttaaaggctcgcaaatggaaccactccctccagagggactatctaaatctcctcaggtgctgaccctttctgacagtaaaggacgagggccagaagtgtaaagattgtggtcccgcgctccaagcccaagatgcgttcagcaggagtagttgggttggaaagaaggcacccagcgtctgcagcgaaggactcgcgtgggagcgagaaatgtccctgcccagtgccccgcgcgctggatcgcgggggcgagtctgagggtggagaggccgccgggtggaggcgcgcaggggtgcgtgggtgggtgcggaaggagtgcagggtatggaggggaatcttggggcggcgcgaaggaggagcgcttggaaaggcgcggtgtttggtcacagaggggctcggagtgggagtgcaggggtgcggggagggagtgcagggacgcggggagggagtggaggggtggggacgtgctggaggggcgcgcctcgatagaactggagaaactggaaaagtggaggggcggggcagtggctggaggaacctctgaagcgacgcggggaatatgtgaaggagtgctatgttggaacttggaggggaggggggatgctggagaggcacacggtgatggacatggaaggacccgggaggtgtggagtggtgggcccggcccgtcgcgggaaggacacagagggacataggctgccctggagagg

SEQ ID NO: 24143 - DNA, 883 bp, Artificial sequence
  DNA replication origin
tgaagcgacgcggggaatatgtgaaggagtgctatgttggaacttggaggggaggggggatgctggagaggcacacggtgatggacatggaaggacccgggaggtgtggagtggtgggcccggcccgtcgcgggaaggacacagagggacataggctgccctggagaggcgctttcggacatctggaggggcgcatagtgctgggacttggcggcgcctggggcggaggggcgcgccggatccagccgggcgcgctcgggggccgggcgcagtgggagttgacgggcgtccagccggcggcgccctgggctcggctaggcgcaggacggccctggcagcggtgcagcagcccaggctagttcctggggggtccctggtccccgcctccccgcgcgccccggccagcaccgcccggagtccgggcggggaagtgggcgcccgcggcttgggaagctgctcccccgccctggagcagagtcgtcgctgcggtcgctgaggaaggacggagcagaggcccgcgctgtctggggagaagactgtggtgtcatcccgtcgggaatgaagggaaatgcagcggctgtttgcgccccgggactccaagaagtacagcaggtaaagagaatagccacggcccgccacttcgccttcagttcccccaattcctgggtcccttccttctcctccaacctcctaaactaacccctctgttgttagacgtccctatgccggttccagccttcctcctaggactccatcaccacccgtgccctctttctcctcgccttctctgccccagacagcactttccttcccctgcccccttgtgggggctcagggacaagagtaaaatgtaatttagacagttggcttttctttgcccaaa

SEQ ID NO: 24144 - DNA, 1792 bp, Artificial sequence
  DNA replication origin
ataatattaatcaaattaaaacaatgagataatattttcacctatttaattgacaaggatttgaaaatactgataaaattcaatgctagcaaaggtgaggttttgcgtccacaacgtgttttcatttcacacactgctggcaatatcatccactgatccgacctttttgagagtagagtggaagtgccatatcatttcaaatgtgcacaccatcaaaccgagcaatcttgtaggaattttccctgtataaatattagcacactcaacaaaggtatgaactatgatgtcgttcaccataaccggttggaaataatgtctaccaataaagaaatatgctagcattctgatatctttaatctacagaagtaggttataaaacaatatagtagaggatattataagcacctgtttaaaaaaagtgtccatgtgcttgagtgtgtgtatggcacgtgtggtatgtgtacctgtgtgaggtgtgtatagtgtgtgagtgaggggtgtgtgtgttgtgtgtgtgactgtatacgtctgtatgaagtgtgtgagggataggtgtctgtgaggtgtgtgtttctgtgtaaggcatttgtacgtgtgtggtgtgtgaagtgtgtgtttatgtgagatgtgtgtgtgagttgtgtgtgtgtggtgtgtgtggcatgtttgtgtggagcgtgtctttgtgtagcatgtgtgtatagtgtgaggtgtgtgtgcatgtgtggggtgtatagggggtgtctgtatgagatgtgtgcacgtgtgtctgtgagaggtgtgtgtgtgcatgtgtgaggtatatgaagtgtttgtgtgatgtgcgtggtgtgtttctgtgtggtatttgtgtggtgtgtacatgtgtgatgcatggggtgtggggtgtgaagtgtgtatgtggtatgtggtatgtgtgtgcatgtatccagtgaattaaattggagactttatcccaaggtgagagctcaggctgcactgtcacgtgtaaagaaatcatttataccttaacaacaatcatctaaaaatattgacatcagaaggcatgcaaacactgaaaaccctccagcacagaggctaagtactctgaaggtgactcgatggcttgattttgctgttagaaacaaggagacactagtgtgagtttgtgtagcatgtgtatggtgtgtttgtgtgtgaggtgggtgtgttacatgtctgcatggtgtgtgtggggtgtgtgtatatatatgtgaggtgtgtgggtttgtgtgtggcgtgtgtggtctggatgtgtctgtgtgtggtttgtgtgtgtgtgaggtgtgtgtgtatatgtgagatgtgtatgtggtctatttgtgtgtgtggtgtgtgaggtgtgtttgtggtgtgtgaggtgtgtatagtgtgtgaggtgtgtggtgtatgtttgtgaggtctgtgtgaggtgcatttgtggtgtatgtgtgaggtgtgttcgcatacatgtgtgtggtatgggaggtatgtgtgtggtgtgtgaggtgtgtgtctgtgtgaagtatggggtgtgtgaagtgtgtggtgtgtatgtgtgaggtgtatatgtgtgtgaaatatgtatgtggtgtgtttgtatgtgtatgtgtttgaggggtgtgtgtgtatgtgtgtgaggtgtgtgtgtgtgaggggtgaggtgtgtgtggtgtgtgtgcgaggtgtgtggggggttgaggtgtgagatgtgggaggtgtgtggtgtgtgtgaggtgtgtgtatgtgttggaggtatttgcgtatgtatgcgtgtgaatgtgtgtatgtgtgt

SEQ ID NO: 24145 - DNA, 1735 bp, Artificial sequence
  DNA replication origin
gcacagagaatgtagtcccacaggcacagaagagcctggaatggcttgaggcctcctcagcataccttatatactgaggttatgggaatgtggttcctggtctccaaatttggattggatgagagtaaacctctagacctactctgattggactttattttcatgatctaattggttgtcctcaggcttgctctcatccaatcagaacatgtagtccagaaacctcatttgcataacatctgtatataaatgatgctgaaatcagcccatttaaggctcttctgtgtcttcctgaccagctgctctgttcccagcttagaggaccagagggagaagccacctgctacacgctggatgctgcagcctgtgccactgtggctcacatcgctgtggttggtggcagcaacggagactgcagccagctggagtggtaggaggaaggaaatagttttggggtagatggaggagtaaagagggtggtgagtgccaaagggaaaagtggatggcggggcgagcagaagaaggagttgcaaaaagatggtggggaaaagatggtggaaaaaagtgggtagatggaggcggaaaaacagggagacaaacaggagggggagaaggtttgcaaagatggtggggaaaaacactgtgggaagaaaagaaaggcagtggggaaaaacattgtgggtagatggagggcaagaaagagggtggcaagtgggaggagaagagagggtgctgagagggagggggaagagagggtggtgagcaggagggagagaaggttttgcaaaaagatgatatggagaaaagacagtggggagaaaagtttttgggtagatagagggggaaaagaggatggcaagcaggagaagaaaaaagaggttggcaagctggagggagacaaggttttgcaaaaagatggtgggcaggaaaagaaagaccgtggagaaagaaaagatggtgaggaaaaagtttttgggcagatggacagggaaaagagggtgacaagcaggttaggggaaagaagatggcgagtgggaagtcagggttggggggaggctttgtaaaaagatgggaaaaattgggtgggtagatggagaggaaaagaggatggtgagcaggagttgggagaaggctttgcaaaaagacagtggggaaatgtttttgaatagatggagaagggaaagagggtggcaaggagagggggaaagacgtggggaaaacagtgtttgggaagatggagggggaaaagagggtggtgagaagcaggagtcgggagaaggctttgggaaaagatgggggaaatgtttttgggtagatggaggagcaaaagagggtgatgagagcaggagagagaaaaacaaggttgcccagaagagtgggaaatgatggtggggaaaaacgtggggaaaagtttttgggtagatggatggggaaaaagtatggtgaatgggggagtagagaaggctttgcaaaaagacggtggggaaaaagttttggggtacatgaagaaaaaggctgatgacaaggagagaactgaaggctgtcagaaaaagaaagtggggaaataatggtgggggacaaaggttttgggtagatctttttctgatttttaaatcgggttatatgtatttttgcttttgagtagtttgtgttctttatctattgtgtgtattaaccccttgcctgatgcatagcttgcaaatactttcttccattctctagattgtttcttcat

SEQ ID NO: 24146 - DNA, 1824 bp, Artificial sequence
  DNA replication origin
atgttctgattggatgagagcaagcctgaggacaaccaattagatcatgaaaataaagtccaatcagagtaggtctagaggtttactctcatccaatccaaatttggagaccaggaaccacattcccataacctcagtatataaggtatgctgaggaggcctcaagccattccaggctcttctgtgcctgtgggactacattctctgtgccgggcttagagaacacgaagagggagccatctgccacactctggaggctgaagcctgcaccagtgctgctcgcctcactgtggtaggtggtggtgatggaaactgcagatcggccagagtggtagaaaagttgctgcagggtaggtatgctctctggggcaaccgcagactgcggttgggtgtgctgttagggctgcactgcccatggctgcactgtgcatggtaaggggggctggtttggggtgctatccgggtttgcattgcaggcggtggggccagctgcggtatggcggtggcggggggtggttacactgccagaggctacactgcccgagccaggaggcgggttatgtccgctattgtggactgctggcggcagggtgatgggttgggttgggtgagctatccgaggctagaatactggcgggggtgggggggggcagtttgggggcactgacaggggtgtggggcattcgttatcaggcagctcagggctggctgggggcactatacggggccatggagggtagcaagttgggggtgctatctgggactgcactgcctgtgccagggagggcacggtttgaagccctacgatgtgctggaatgcctgtggcagggatgggtcgggggccctatcaggggctgcactgctggtggctgtgggcagcagaggtggcagcgaatagtggtggcctccaaagaaggggctgttctcctcttcctggactccagactctagagggcgacaacgtcctgctcctggtggagctccgcaggcgcacagcatttcctcaggaatcctgaacacagcagggcccccacaccaccgtggttccctggcctgagccctctcactctgtgttgtggagaccacctgggacccctgggcacggagtagcagataccatggggagagagggccctgtaggctgaggcattgggaacgggcacttgggtggagagggttggctgggtctcagtttctgctgctcccaccctccgaggaaggtatcccctgtcccccggggttcctgtggagtggggagccgggcactgccatgtctccagtccccaccccaggccccagttcctggccgcttagaccaaaaggagaggctggactttggagggagggtgcgagtgccttcactgaaactggccagtggcgggcatgacaaggtgaggctctaactctaccacctcctccatcctgttctaggtttttctggctttgcctgcccagctgctccatgcctggctagaggagaaggaggagccacatgtggtacactggaggctggagcctgcagatggcatggctctgcggctcaccttgctgcagttggtggtggtgacagagactgcagcttgactgtagtggtaagaggatgcctgtggcagccagatgataggggccttatagggtgggccagtgcattgagggtgacagcagaggtggttgtattggcatcagtgctagtggtggcagcagcagcaagtctgggaaaagaaaagatgaaaaagaaaaattcacaactgccagatcttctcctgtctggaagtgttgtgtgtgctgccagtacaggacacccgtgggccactggaggggga

SEQ ID NO: 24147 - DNA, 1259 bp, Artificial sequence
  DNA replication origin
aaagctggagtgaacccagctgagcctgggccgcccagccctggaggctggaggcgctgtggtcaggaagcgctcggaggatggagcccttttccctgtaagcagggggccagggtctcacttctgagccggcttcccacggaccccaggccccggcagggtcctgcagtgaggatgatcatgcccacggggtgggtggggtgttggcaaagcggggccgcagggcaggttctggaagccactccgcgtggctgggctggagtgtgcagacgtgggagagcccggaatggggagcgcgtgtccggttggaggcccgagactggccttccctcgctgggtctgcgccggcaggctgcctaggtgggcctgtcccggagctcccctggggcggaggcgcgggaggcggggaagggccgggcggcgggacaggtgtccccagcgggaggtcgggaacccgtcggggccgcccgcggtgcagcggttcgaggccaggcgacgcgggcgggagggagctcggccagaactgctgagagcccccagccgcgctgggactcaggggctccctgcctttagccactaagaggcggggcaggctgcggggtgcccgggagaagccagatgcctctcattttacacggactaattggatcctgccgcccgcctgggacctcggcattgtcttgtccgctgcactgacggggaaactgaggcacggtgtgagtaaggcgggggagggagtcgccgcctccgagcaggggcgcggccggtacccacccgcacacccggctcccgcgtggcctctgctcctgctcggtgcaccgcggcatctggggaaaccgggctgggctcctctgtcctctagaagctattcataagttttagataaatgttactactaaacacgaggaaagtgaatccatgattggcatagaacaaatggttgcaccgcgttctccgcgttagatggagtgtgtgattgtgagtgagaggggaatgggcactgaatccttacctacacaaatgcctaaactcgtaaggcattacgacacacacatctgaaaatctaagtgataggaattctaatggtctgggatccaaatgagacccagccactgttagcagccttcagttttgtcctgttgcccataattaccccaaggtcagggagaagcactgaagcaaaggcatgaacatcactttgaaaaagaaacctgcctggggcactccttccttcagactccccttgaaagtattccctc

SEQ ID NO: 24148 - DNA, 1252 bp, Artificial sequence
  DNA replication origin
ctctgtgacccactccctattcgtacacccctccgcttttgaaatccctaataaaaacttgctggttttgcagctcggggtcgccatcacagtcctaccaatatgtgatgacacccccggaggaccagctgtaaaatttctctctttgtactctttctgcttatttctcagaccggccaatacttagggaaaatagaaaagaacctacattgaaatattggggactggttcacctgatgttaactgacttattacccatcctggcagaaacggccacttaaataagagtctaatgactcctctcaaatctagaatgacttggtgggaaagtgggagataaggagcttatgaatagcaaaatcaagtgggattttgagtttacttgtccctgttctacccaagaggttggtgagcgggagggagacaaggttttgcaaaaagacggtggacagaaagaccatggagaaagaaaagatggtgaggaaaaagtttttgggtagatggacgggggaaaagagggtgacaagcaggttaggggaaagaagacggcgagtgggaagttggtggggaggctttgtaaaaagacggtggggaaacatttggggggtagatggaggaaaagaggatggtgagcaggagttgggagaaggctttgcaaaaagacagtggggaaatgtttttgaatagatggagaagggaaagcgggtggcaaggtggggaagacatggggaaaacagtttttgggaagatggagggggaaaagagggtggtgagcagcaggagtcgggagaaggctttgggaaaagatgggggaaatgtttttgggtagatggaggagcaaaagagggtgatgagagctggagagggaaaaagaaggtggccagggagaggggaaaacgacggtggggaaaaacttttgggtagatggatggggaaaagggtggtgagcgggagagtaaagaaggctttgcaaaaagatggtggggaaaaagttttggggtagatgaagaaaaagggtgatgacgagagagctgaaggctgtcaggaaaagaaggtggggaaataatggtgggggacaaaggttttgggtagatctttttctaatttttaaatcaggttatatgtatttttgcttttgagtagtttgtgttctttatctattttgtgtattaaccccttgcctgatgcatagcttgtaaatactttcttccgttctctagattgtttcttcattctactgattgcttcctct

SEQ ID NO: 24149 - DNA, 1149 bp, Artificial sequence
  DNA replication origin
tgagagtgatctctaggaaccactgcacaagggggcagatgagggaaccctgacatgggacagctgagggttacgccaacacgggggggaaagctgtgtccaggctccaccggactccgccgaggacagagcactgccctgactctagggtgcggggtcactgagggttaggacagtctggagttgggagagggccatgctgcagctggggcacatcccacctgcacctctctagatcttggagatgggacccccacccacatgctccccaggtgggtcccatcctggggggtgcaggagggagctccatgtgcccctgctgatctgcccatctgagcctcaggggtcctgggcactgagagctgggctgggctcagcgggggtatgcattgacattggggacagagaggggatgctgaagcgggtgctgtctgggtggggcctgcctgatcgacccagcaggtgcacccagcagccggaggtgcttctagcagagtgaacgccctgtccttaggggcatgtgagctgaggctgggggcctggagctgcagggggaggaattggggagagcagaggtcccaaagatgtcccaaggccccaagaccctggtgaaggaatggaggagccagcattggtcggcgagaggggagtgggagttggatggcctggctctgggctggacacacggtttgcagccacagctgagctgtgctgtggagcccagttcccacctgggcatgtcctgtcctctgaggcttccgggagccggacggccaccgcggtgcaggcgcgcactcaagggctttcgaggctcactctgtcggagaggtcagagactgagtgtcgctgctgaaggctgtggtggaccgggctggatcgcggattctaggttagatcgcagatttgggatcgcggattggggattggattggggatttggggttggatcagggatgtgggggctggataggggatttgaggattggatcggggatttggggttggatcctggatttggggccgggtcggcggtggggggcagtgaaaaggtgacagagagcagcccctgctcaggagccggtggttgggggtctgagaagtcaccaccaccaagaagttcttcggcttcgggagccgcgggggcgagat

SEQ ID NO: 24150 - DNA, 1305 bp, Artificial sequence
  DNA replication origin
atgacgtttctggactacatgttctgattggatcagagaaaacttctaggcctactctgattgggctttattatcatgttctgattggataagagcaggtcttagaacaaccaatcagagcatgaaaataaagtccaatcagagtaggcctagaaatttttctctcatccaatctgaacatagagtccaggaacctcattcccataatctcagtatacaaggtatgctgagggggcctcccagcgttccagcctcttcggcgtctgctggactgagtgctgcgtgctcggcttagaaaacgcgtgtagagggagcatgctggaggctggagcctgcaccactgtagcttgcttcactgtggtttgtggcgacggaggctgcggttggtagtgacggagacttcagctcagccagagtggtaggctgcggggtaggcgcgttatctgggcagccacggagtgcgggtttgggtgctgttagggctgcaccgcccatgtgtgcactgcctgtggcatgggggggctggtttgggaccctatccagggttgcattgctggcagtggggcgggttagcagcgtatgaggggctacactgccggtggagtgcgggggaacagggaagcaggttgtgtccgctattgagcattgccagtggtggggagatgggttgggtgagctatccggggctacgatactggcagtgagtggtggccggcggggggagcagtttgggggggctgtctgggctgcagtagggagcaagttgggggtgctatggggctgcactgtctgcctgggagggggcagtttgaggcactaacaggcactggaatgcccatggcagggacgggtcggggagctattcggggctgcactgctggtggtgtggtggtgggcagcagaggtggcagcaaacagcagtggcctccaaagaaggggccattctcctcttcctggactccctactctagagggcgacttctttctgctcgtggtccagcgcagcaggcaaacagtgtttactcgggaatgctgagcacagcagggcccccacacccgccatggttcccgggccgagctttctcactctatgttgcagagaccacctgggacccccaggcatgaagtagcggacaatgcggggaggggaggtggctggggtgtgggacagggccctgcagatggagttgttgggaatgggcacttgggtggagagggctggctgggtctgacttggttgtggtggtgagaggtgacaaagtgctagcagccctctctcgctcttggtgcctccttggcctcgcc

SEQ ID NO: 24151 - DNA, 1711 bp, Artificial sequence
  DNA replication origin
taagggggtgctgagtgccaaagggaaaagaagatggcagggcgagcaggagaaggcattgcaaaaagacggtggggaaaatatggtgggaaaaaagtgggtagatggaggcagaaaaacagggtggtgaacaggagggagagcttttgcaaaaagatggtggggaaaagatggtgggtaaaaagtttttcagccagatgcggtgtctcaggcctgtaattccagcactttgggaggccaaggccggcagatcacctaaggtcaggagtttcagaccagcttggccaacatggagaaaccttgtctccactaaaaatacaaaattagccaggcatggtggtgcatgcctgtaatcccagctactcaggaggctgaggcaggagaattgcttgaacccgggaggcggatgttgtgagccgagattgcgccattgcactccagcctgggtaacgagcaaaaactgcatctcaaaaaaaaaaaaaaaaaggtttttgggtagatggagggggaaaagtgggtggcaagtgagaggaggaaagggaggatggtgagggggtggaaatgaggtggaacaggagggagagaaggtttgcaaaaagatggtaagggaaaacagagtaggaagaaaaagacaggtggggagaaagattgtgggtagatgcaggggggaagaggatggcaagtgggaggagaaaagagggtgctgagaaaggacggtgctgagggagggggaagagaggatggtgagcaggagggagagaaggttttgcaaaaggatggtgtggagaaaagactggagagaaaagtttttgggtagatggagggggataagaaggtggcaagcaggagagggaaaaagtgggtggcgagctggagggagagaaggttttgtgaaaagacagtgggcggaaaagaaagaccatggagaaagaaaagacagtgaggaaaaagtttttgggtagatggagggaggaaagagagtggcaagcaggctacaggaaagaagagggtgagcaggaaatggggaaggctttgtgaaaagagggtggggaaaaattcggggggtagatagatagggaaagagagtggtgagcaggagtggggagaaagctttgcaaaaaaacgggaaaatgtttttggatagatggagaagggaaagagggtggcaaggaggaggggggaaaagacaatggggaaaagaggttttgggtagctggaggggaaaagagtgtggtgagcagcaggagtggagagaaggctttgggaaaagacaggggaaagtgtttttgggtagatggaggagcaaaagaaggtgatgagagcaggaggggctggccagggagcgggggaaatgatgatggggaaaaaacggtggggaaagtttttgggtagacgcatggggaaaagcataataataccatcaccattatttgtgcaagccattggagtgaaactatctgcatcattgtatttgacgctcataaaaaccctgtgaagttggtctgattataatttacagacagggaggctaaggcttagaaataaagtactttgccctgtattctcaactgcttctctcaggtggaactagggaaaatcagcatgcagaggtgtgacctgtgatctgactcagccttgcgtggtttggagtttgttgctgtggtgtctgaccgtacatgccaaaaggcacaccctgcattgtatcacatca

SEQ ID NO: 24152 - DNA, 983 bp, Artificial sequence
  DNA replication origin
ctgcctggccgcccatcgtctgggatgggaggagcccctctgcctggctgcccagtctggaaagtgaggagcgtctctgcccggccgccatcccatctaggaagtgaggagcgtctctgcccggccgcccatcgtctgagatgtggggagcgcctctgccccaccgccccgtctgggaggtgaggagcgactctgcccggccaccccgtctgagaagtgaggagaccttctgcctggcaaccgccccgtctgagaagtgaggagcccatccgcccggcagccgccccgtctgagaagtgaggagcctctccgcccggcagtcaccccatccgggagggaggtgggggggtcagtcccccgccaggccagccgccccgtccgggagggaggtggggggtcagccccccgcccggccagccggcccgtccgggaggtgaggggcgcctctgcccggccgcccctactgggaagtgaggagcccctttgccaggccactaccccgtctgggaggtgtacccaacagctcattgagaacgggccatgatgacaatggcggttttgtggaatagaaagggggggaaaggtggggaaaagattgagaaatcggatggttgccatgtctgtgtggaaagtagtagacatgggagacttttcattttgttctgtactaagaaaaattcttctgccttgggatcctgttgatctgtgaccttacccccaaccctgtgctctctgaaacatgtgctgtgtccactcagggttaaatggattaagggcggtgcaagatgtgctttgttaaacagatgcttgaaggcagcatgctcgttaagagtcatcaccactccctaatctcaagtaccccgggacacaaacactgcggaaggccgcagggtcctctgcctaggaaaaccagagacctttgttcacttgtttatctgctgaccttccctccactattgtcctatgaccctgccaaatccccc

SEQ ID NO: 24153 - DNA, 823 bp, Artificial sequence
  DNA replication origin
aaaagtctcccatgtctactactttccacacagacatggcaaccatccgatttctcaatcttttccccacctttccccccctttctattccacaaaaccgccattgtcatcatggcccgttctcaatgagctgttgggtacacctcccagacggggtagtggcctggcaaaggggctcctcacttcccagtaggggcggccgggcagaggcgcccctcacctcccggacgggccggctggccgggcggggggctgaccccccacctccctcccggacggggcggctggcctggcgggggactgacccccccacctccctcccggatggggtgactgccgggcggagaggctcctcacttctcagacggggcggctgccgggcggatgggctcctcacttctcagacggggcggttgccaggcagaaggtctcctcacttctcagacggggtggccgggcagagtcgctcctcacctcccagacggggcggtggggcagaggcgctccccacatctcagacgatgggcggccgggcagagacgctcctcacttcctagatgggatggcggccgggcagagacgctcctcactttccagactgggcagccaggcagaggggctcctcccatcccagacgatgggcggccaggcagagactctcctcacttcccagacggggtggcggccgggcagaggctgcaatctcggcattttgggaggccaaggcaggcggctgggaggtggaggttgtagcgagccgagatcacgccactgcactccagcctgggcaccattgagcactgccaagtacacaaatgttttt

SEQ ID NO: 24154 - DNA, 1617 bp, Artificial sequence
  DNA replication origin
tctcaggaaagggcaacaggacatgcagaagccctgtggggaaagaggcttgtgttcaagaaagggaattcaggaaagccttgggttagaggtgtgaatttgggagagctctgggtcagaggcatgaatttgggagagccctgggctagacatttgaattctggagagctgtgggtcagaggtttgaattcgggagaaccctgggtgagaggtgtgaatttgggagagccctggatgagaagtgtaaattcggcagagccttgggtgaggtgtgaattcgggagattccctgggtcagaggtgtgaatttgggactggacagtgtttacttcctaggctgctgtaacatagcaccactgtttttcagcttctccccactccgagttcttggctgctgtgctctgtgtttcccccttgttcactcccctcaccccctgtcctccttggctactattattatgatctgacacagttcttccaggctggccgagtggcctcttctactctcaccccctactctctccaggtaatgtcatccaggctcacagccacattacattttaaggttacagtagagcagaagtagtcacatatacaagaacacgggggaaagtaacagtgttacatcgctgaggtggagggtgagcaggtgagtggcatgagaggaggtgacgcctctgcgctaaggtcaggatgccggggataatgtgtctcgtgggaaggctgcaggagtggaggttgggggagtgtctggggacacctgcttcttctgagaaggagggtgtgagagaggtgaggtgtgagagagggtggggttcggtggggctggaagtttgaggagagtggagattgcgttaaggagtggcggtggagaggggagaatgagctggcggggaaaggcaggagggtggccgggctggctgccgtgtctgttagggtcaatcccatgaatgcccctgtgtcctgatggtgatgcttcccaggagaccctagcagagacccaccagggcaccacactcatcccagtgacttgggtgggaagcaggaggggtgaggagttttggatactggcagggatgttcaatgatggccgtggatatggagggaaatgaagaaagagaacctgatgggttgaagaagtaaaaagagtcagcactgggtgggggccgggaggtgagggagcaggggtgaggactgagcaggtgatctgtggggagaggctccggcactgaccccagagattcaaacagtgatttcagaagatgaggctggagtgtggctgtgggaaggatggtgagataaaggggacatgggaggtgaggaggagactgcatggccacaatgtcactcatgtagacattgaagtcacccagggggcgggtgggagcagaggtggatggtgcactgtgagccacatgtcaacatcttacatggccgagagggagtgacgagaggtcactgtgcagtggcagaggtggggtcaggtacatgtttgaggcatgggcttcaaaaaagcagtgtcatagcttttgacctctgtcacatgaggtcatttacaagcagaggtctaagatgatggtcatgtatgtgtccatccacctattcaatagctcactg

SEQ ID NO: 24155 - DNA, 903 bp, Artificial sequence
  DNA replication origin
taattttcacttttcattgggtaatataatttttgttttttattttacagattgtgggtattgttctttgattataaaagacaatagacatttataaataatagtgctggccactaaatgaatcatctaaaaaactacactggtagaaagcatgcatttattttatgaattccattagctgcctatcagggaacatggagcactggggcacagatcccagcacagaagggtttgcttctcttctgtggttttcatgtcaattaatgattaggccttgagcctcacaagaaaggtgataggcctttgagtcggtttactgcaacagtctactcaagacttgccccaggccctgggaaacatgtaggtttaaaaatccctaccctgcgttttcctttcacagggagtgaacttctggcccaggcagtgggcagtggggcacggttgccccggagatgagactcctcttcccgccctggggggtgggggctggctggtggctgagggaactatttttgtttgtttctttttttaaaaaacggagtctggctgtgtcctccaggttggagtgcagtggcgcgatctcggcacactgcaacctccgcctctcgggttcaagtgattctcctgccttagcctcctgagtagctgggatcacaggcgcctgtcaccacgcccggttaatttttatttttattagagacggggtttcaccatgttggccaagctgctctcaaattcctgacctcaggtgatccgcccacctcggcctccaaaagtgctaggattacaggcaagagccactgcgcctggccggggaactgtttttgatgggtggggtccccggctgtggttggtagtgtgggggcgtggccgagggtgtggcctgagggagtgagctaaccg

SEQ ID NO: 24156 - DNA, 1452 bp, Artificial sequence
  DNA replication origin
ggcagtggcaagaagccatgccggttacctcctctgagccttccttttctcatctgtcaaatggggacagtagtagatcctacattatagggatgtgtggaggattttaaatgagtactgatgcacgttaagccctcagaacagtgcttggcacacacccagagtttggtagatgctacctaacatcaatattgacattaattctagaactatgtagaggatacgacttcaataagaaaacaatcagtcagaagcagtggcagaagggagggtcctgaaatccagagtcctcctgcagagatgcagctgccactcctcgcctctgacacttgcagacattcggagagaaagccgtctgcaaggtgacagagggcggactggaagaacacaaggaacccagggatgctgatggagcatggaaaaccgcagcagaaggcactgaggcaaggtgtgccctccaggcggggcaggctgtggctgggcagagcgcctgccagggagaagtagggcaaagggaagaaagcacctgtgggagaaacatggggaaacaaggaagaaacctgcatatgcacgggagcacaaataaggaaggagatgggagaactgggtggaggcagatggcaaacgtgggggccaagggaggtagatgagaattaggatatgggataataagacaaagccacatgaaactctaaagtgcgggaggagggcagagaacagggagggtgcatgacaggcaccccgagaataatgcagtgaggaagtttgcaagacgggggagggggacattaggaaaaaaggagaatttgttgggaaaggtggaaaaagaaaaggagtgagatttctccgcctgttagcaaggggaataaaggagagcaaatcgctgggtgaccaggaaaggttcacagagaagaaaacacgaggcagcaaaaaccgaaggtggggacagagaaaatgctggcagggggaggtgcataatataaggctatgggaagccatgggaacaagagctgaataaattcacagtattattctatttatccacatccctatgcaatgctgggaagcaaatgacccacagggttttgtttgcttgctttggtttggttttcctgcacttggagggaggggaaatttgctcaagctctgtaaccttgcagtcagatgggtggcccagcccaagtcacccgagctccccctgacgctggcagcagcgcgggcttctacctgcctggggctggagtaccaattcccccacctcctgcacagaatgggaccaaaccaactccgccaatgcattccctgcagtccacagacgatgggcaccgggtcccaaaatctttcccctgggacgagactccgctggtaccaagagaaacttgctttctaaactaagctctccaaccgcatcgctccgggtccccggaggcaccagccacgccacccgatgga

SEQ ID NO: 24157 - DNA, 1288 bp, Artificial sequence
  DNA replication origin
cagcagccccggaggctggaggcgctgcagtcgggaaacaccaggaggatggagcccttttccctgtaagcaggaggccaggatcctgattcctgagccggcttcccacggaccccaggccccggcagggtcctggcgggaggaagaacccacggagtgagtggggtgtcagcaaagcggggccgcagggcaggttctggaagcctctccgcgtggctgggctggagtgtgcagacgtgggagagcccggaatggggagcgcgtggccggtggaggcccgaggctgtgcttccgtcgctggctctgaggcagaggtccaggccggcaggctgcccaggtggtcctgtctcagagctctccggggcgcagaggcgcgggaagcggggaagggccgggcagcgagacgggtgtccccagcaggaggtcggggacccgtcgcgcgttccgtcggggccgcctgcggtgcaggggtcagagaccagccacgcgagcaagagggagcccggccagaactgctgagagcccccagcggagctgggactcaggggctccttgcgtttagccaccaagagtgggggcaggctgcggggtgccggggagaagccagatctcactcattttacaccgactaattagatcccgccgcccacctgggaccacggcattgtcatgtccgctgcactgacggggaaattgaggcacgggggcgagtaaggcgggagagggagtcggcgccgccgagctggggcgagccccgcacccacccgtacactcggcctctgcccctgctctgtgcgtgggctcctgctctgtgcgtggcctcgccgccgagctggggtgagccccgcacccacccgtacacccggcctctgctcctgctctttgcgtggcctcctgctctgtgcgtggcctctgctcctgctgcgtgcactgcggcatctcgggaaaccgggctgggctcctctgtcctctggaagctactgtaagttttagataaatgttactactagacacgaggaaagtgagtccatgattactggcattgaacaaatggttgcaccgcgttctccgtggtaggtggagtgtgtgattgtgagaggggaatggacactgaatccttacctacacaaatgcctaaactcgtaaggcattacgacacacccatctgaaaatctaattaagcggtaggaattctaatggtccgggatccaaatgagacccagccacttaacagttagcagccttcagttttgtcctgttgcccgtaattaccccaaggtcagggaga

SEQ ID NO: 24158 - DNA, 1520 bp, Artificial sequence
  DNA replication origin
ggatcggcgggccccgcactcaccgcggctggccggcgcctgctgggcttgattggacgctgggtctcgtgcatggaccgcccttccctcttcgcggtgtcgttggccacgatggcgggtctccttctgttactagcttctcctctcttcctcttgattggctgggaagacctccctctgggaagcaggagtgcctgggacaggtgccgcaaagtcccgcctggactgcgagaggtgaagccggttgcgcttctgggtccagtgaggacttggagaacttttctgtctagctaaaggattgtaaacgcaccaatcagcactctgtcaaaacggaccaatcagctctctgtaaaatgggccaatcagctctctgtaaaatggaccaatcagcaggatgtgggtggggccagataagggaataaaagcagaccacgcagaccaacagcggcaacctgcttgggtcactttcttgggggggggtgggggggggggagaggaggaggggtttttttggttttttgaactaaatgttgttattcctagcactttgggtctgcactaggtttgtgagctgtaatactcaccaggaaggtttgcagtttcactgctgaagccctcaagaccaggaacctaatgggaggaacagacagctctggacgtgctaccttctaagagctgtaacactcaccacgaaggtctgcagctgcattcctgaagccggggagaccaggaagccaccaggaggaacgaataactccagacatgcggcgtttaagagctataacactcctagcgaaagtctgtagcttcgctcgtgaggttagtgtaggccacgaacccaccagaaggaagacacttcggaaacatctgaacgtctgaaggaacgaactccggacacgccattttaaaaaactaacactcactgcaagggtccagggcttccttcttgaagtcagcgagaccaagaactgaccaaatcctgacacataggaattgcagaggggtgaggcccatggcggtgctgaggagcggtccaggaagtattggtgagagggatggggagacccaagagtgtaaggtaaggaaaaggccagggaagccgcagacttcctggaaggtcccggggcgaaggcagtgggaaggatgggccggcggcgccataagaggctggggtggcgttgggcaagcggctcagagctgcgggggagctccagcatcccgggagctgctgagggaaggggaggagcagggcctggctggaaagggggtgggatggggagagctgggctgtgtcgctgccctgtccccggaaagaggcgccccccggtagcagcgggaggagctgggggagaaaaggctgtcactctctaaggagtggggtgagcgaggccgtggtggggtgcttagtagccgaggatgggccaagttggaggaggagaaggtgcggcggtgcaggagcaggcagcgccgttctcgctgggcctggggtcccgcagcgcctgggaccggagcagtgagtg

SEQ ID NO: 24159 - DNA, 909 bp, Artificial sequence
  DNA replication origin
cgccgttctcgctgggcctggggtcccgcagcgcctgggaccggagcagtgagtgagcgtgggtgggagctgcggcctgggtccctgcgcccgactgccccgaaggcaggtgtggtgggggggttgggggggtgggggtggggtgtgaggggcgggtgaggcgcatttccagggggagtgagtccggggcccttggcctgtaggctaagcagcgaggacaacagcgagggggctccgtggcattgcttggcggggtcaccgcgcatgcctactcgctgtggagcctggggactcgccagccaccgcgcgggtttaccacggcccaccaggctcccgagccacctacatagaagggtgagctgtggagcgtggtgagcgggctgccaggctcctgccgcttaggccaccctgagccaacgctgcccaggtggcatccacagccggtggcccgcgggcctgggcatgagacccgcgcctcagccccgcctgccccgctgggagaggtaaatggaccgcacttggtttacgccggttagagtctcagatgctttgttacaggggcacaaactaccctacccctactgtgcgtgggtgcgggagccttggtccataagggagccatgtgggcaatggcttagggtggtttagggttcctcagagacagagaaccagctggagacacacacacacacacacaccacacacacacacaaacacacaaacacacacacacacacacacacacacacacacacacacacacacagagtcccgcctgcatctcagtgattccaagcacggacctctcacatacgatctatagcccgtaagaagaaaacgcagcggaaagcctctatgggttagtgacatctcgatggtcctgatcttgcgtgagcctaggctaatgtg

SEQ ID NO: 24160 - DNA, 1111 bp, Artificial sequence
  DNA replication origin
aaacactaggacaaagaacacagatcatgaaggaaaacaaaacctaagaagaaatacaagaaaacaaaagatgctagggtcgcagaatagggtgggaaagcgagccagtggagtcaggcaggacaggcgtgaaagagagaaaccagctcagaagcaagcaggggagactgctggagggggtgtcaaggacatttattcattcaacaaataatcactgagcactgtgagtgagagtcagggcctggggactcagaggcgcctccccgcggggagagaggcaaacagccaggaagaacaagtccaaaagatttcagattgtactgctgagggctgtggagggctgtgcctggtggtgcggcggaaacaggacaggtgggcttgctctgcaggggtggacccaggacccagggcagcagggccggcgctcagagcctggccagcttggtgccggcagcgggagtggccaatgcagggctggctggagggggcttggtgggggcttggtgggcctgggaagagaaaggcgcctacttggttgggggatgagaggaggctccggtcctctccggccaaggtgtggacctggagctctcgctagagctggaacacttcatctccatgggtgtttgagcggggacatcagggccacccaggacgtgcgggggagctgtgggtagggagcgagcttcctggggaactggaagcccagccgggaaagggagcctcaagcttcgggaaacatcagagtggcaaccttatgcagtggcgtggcctaggaaccacagggagagcagaggagcatggagataaaggcgcttagggagaagaggtatccttctgtttctacctccaaacaaaagaaaaagaaaaaagaaagaagaacaacaaaaaaatgaaaagaattcaagcatggatgggtttgggtggggctgggaaatggagcgctccaagcagtagagcagagggtccagtgcagagaggtgaggtgggaagggctggaaagaaagccaggatgggcccagcctgaatcactgtggcagggatcctcaggggttgcccaggaaactgccaccaatctcgaacccatctgtagtggtgacaggggaatggg

SEQ ID NO: 24161 - DNA, 1291 bp, Artificial sequence
  DNA replication origin
aaggagaacagggctcctggctccgtggcttcccgctagctcaagatggtccccttggtcccacatcaagtctcacaaaactcctaggagcatcagcatcaaaaagacaaacaacccaaccaggaactgggcacaggagtttaaaagacatttctccaaagaagacctgcaaatggccagcaagcacatgaaaagactcaacgccattagtcattagagaatccaccaaaaccacagcgagatgccacttctcactcctcaggatggtgaggaggagtagaaggggaaggaggggaaggagggaatgaaggagagagggagggagagaagaaaggaaagaaagagggaaggaagaagggaaggaaggagggagggaggttaggaaggaaagaaggagggaaggaaggagggtgggaagggaaggagagcaggacagagaaggaagaagggagagaggaagggagggagggtgggaaggaaggagggaggaaggaagagaaggaaggtaggagggaaggaaggagggttaaaaggagggagggaggaaaggaagggtcacaggagggactccaaggccctgggctcccattaggggctgctgggcaggcaggttgtgctggaaatgcaggtggaaacaggcatggggaccctggaggcaggagatggtcacagccccagctgctctctgtagaaaatagcgagtgttggtgaggacatggaggaattggagccttgcctgccgctggtgggaatatagaacaatgcagccactgggtggaacccagcaggaacctgggaggccttcgatgtgatttggcaaccagcggagtgaggcaccaaccacatgctaacaggggctgagcacaccatgctgggcgaggcagccagtcacaaaggccacacagcaaatggccccttctatacgaagtgcttagaacaggcaaagctgttaaagacagaaagtagctttgtggttgccaggggctggggttggggcagatgggaagtggccacgatggatatggaggtttcttttgggggtggtggaaaggttctaacatcagatgatggtaatggtttgattgtgcagctttgtagatatactaaaaaccattgaattctgcacgggcaaaaagtctgggaggtatgaggcagaatcaacatcttacagaagaggaaactgaggctcgggcattttaaataaaagttgtcttactgctgtgcccgatgccttgaaaagccggctaagacttctcatgggaactgtctcctcaataggccccggctggcc

SEQ ID NO: 24162 - DNA, 1104 bp, Artificial sequence
  DNA replication origin
gaagtaggggaccagcctaatgccacagcccactgctaagtcttacaggctaagggtacttataggtatgggcgggaggggtctgggcagcatggcttgttgccctgcaagatatcgataagatgttcccatgatttgtattgatttgtacaataagggttctggcccttattcaggtggatgtcatcatggtgttccttggacgtttgcccaagaagtcatgagagggaagtttcttcagataagcctctgttggccttgcggtcaagtggttaggaaggatgtttctcaccgcctaaaccccccagaaatgtttcactttgcccaaagtctgcaaaatagcgggcagcttacaaaatgttgcagtttgtgctaacgctgggttcaagcaattctcctgcctcagcctcccgagtagctgggattacaggcccgcgccaccacgcccggctaatatttttcatttttagtaaagacagggtttcgctatgttgcccagactggtatttgtcaatttttaaaaacaaggagtcacgtctaacaggctccccgcaaagtaagctgccatttggcgacagcagtttccaagtcctgtattagtttgaggatcgcggttccgggtcctgtgttagcttgggcaggcaggtcaggttctctgccgcggcccacgcgtcttgggactaagctgagttgctgaaagcccaccgccctgcaccgcgattgggctccgccatttcccctttgcctgccctttcacctcccactcctacaggccagaggccccaccctacctagtgctgtgtctggaatttgtgggttcttggtctcactgacttcaaaaacgaagctgcctggaccctcgtggtgagtgctacagttcttaaaggcggcgcgtccgaagtttgttccttccttggtctcactgacatcaagtatgaagccgcagaccctcgcagtgagcgttacagttctttaaggcggcgcatccagagtttgtccggagttgtttactcctaccggtgggttcgtggtgtcgctggcttcaggagtgaagctgcagacctccgcgatttaaaggcagtgcggacccaaacagtgagcagc

SEQ ID NO: 24163 - DNA, 1396 bp, Artificial sequence
  DNA replication origin
ccaccttcctgaagccccttccttacctctgggagcgtgaggctggagacgcctgggtaggtctgagggtgagccctgggtgtggggtagctccaccctgcaagtgcctagaggccccacacctccagcctccctctgaattcagggttctctgtcctgaggctgcccaggggagcctggctggggcgagatgggccggacatgggcctgggcgagtctcgccacagaggggcgccgctgagcagccaggcctcctgaggagtggacactctcccggcaggccctgggatccgccacccacaagcacacttggaggcagcatccttgcaggactcgcgccggagcctgagccctccagccagcccagcgcgccaccgcccttctgtccccagccacccacgagagaatctgggtcgccagggccttgtccttcaccaaggcaaagccggctcagcctcagagccacaggcgagagcgcctgtctgcatgagtgagcatatgggtgtctttgagtctgtgggtgtcacagaggagatcaggagctgcctgctcacaggcactttgggaccctgaaagaaaaggctgtgccgagagagttcttccagtcaggaggtttcggaatgggggagaagggagtgcctggaatcccgacctcagaactgagcctcccaagtgggcaacggtggctcccccacgcgctcaagggccaggcaggtgcatccaccccgccttgcatggcccaggtgtgagccggtgggcagaggtgtggccctgggtccagctgagaaggctcccgcattgactggttggggttggggagttctgccttcctgcttggcccagtgctgggacgggtaaggggtgggggtaggggtcctatagctgggtcctaaccccgcaggccacccagaccctgcccatgtgggcactcaggggtcaggtgttcttagagggaactaagctgggcagggtcagcgtcccattctgcagaggaggaagctgaggcccacgaggtaaacagtgggctgggagtgggcctggtagaccccaaccccaggccatggagaccacctactcagggagcaccacaaatgccccttaacgactggatcctccagttttcatgcagtgggatctacactgaacctggggtctcactgggggagagcaggaggtggcttgaggctgggcatgggtggccacgggggtatggactggctgacccctgtgcattgaccgcactctccgtccccaaggtgtcatgaggactggacatgggtctatcaggaccatcggcatgatgtcagccaaggatctcgtggcctgcctctgccaaggggggaccagcaccttgtcctgagcacttccagcctcccattgccttcaacctggctgc

SEQ ID NO: 24164 - DNA, 1616 bp, Artificial sequence
  DNA replication origin
agttcacactttatggaaatgcagagactgaagagttcttagtgtcatgcacgtccgtgtgaagagaccaccaaacaggctttgtgtgagcaacaaggctgtatttcacctgggtgtacgcaggctgagtccgaaaagagagtcagccaagggtggtgggattatcattagttcttataggttttgggataggcagtggagttaggagcaatgttttgtgggcagcgggtggatctcacaaagtacattctcaagggtgaggagaactacaaagaaccttcttaagggtgggggagattacaaagtacattgattgttagggtggggcagaaacaaatcacaatggtggaacatcatcagttaaggctattttcacttcttttgtggatcttcagttgcctcaagccatctggatgtatacatgcaggtcacaggggatatgatggcttaacttgggcccggaggcctgacacgcaggactggcgctccagcctcttcctccagctaaacctaaaatcgtataaaactcccaggcctaaggagttcagttaaattcacatcaattcaacagatgtatagcaaaaccttgcattatggcaggtaaaactggttactatatttgctaatgtccttaatgtcagtggctcaacacaatggaagttgctttctcatgtgaggtccaggggaggcgcagtagagtgggagaggaggggtttcctcacagctgttccggaatagggcccaggggaggctctgccatgtggcctcgccctgtgtgtcaacacccagcctggggaaggaggagggagagagagtgggagctatcttttaggagagagccacggggcagtcatggtgcctgctgttgctggtgcagactcactcacatggttctggctagctcaatgtgtgaggaaatggggaagcagagcctccgggcagatgctttcctgcaatagccctgcattctacgggcgagcaggctcttcggtggctatgtctagctgtctctgccacacacctactatgcgcatggcatcagctcccagagagctaacagtgtagccagtgaggacgtgcgctttgctaaaaggaaatctgttttgcttctctcccctaaaccagtctggcagcctaaaggctattggttcaggcttcggcctgttttcctcaaacgctgttttcatcagtccctgccttgctgggaactcctggggactccttgctacaccacggacaccctcttttgccttttgcttaataccaagggtaatgtggcccctactcctgggccgagcttatctctcatgtccctttgctcccccacagggaatcgatcctgccctagtggggtgtctgcaccaccatgatctacccaacctctggacctcacatttttgaagccggtccagctccacctgcaagggtgaggcctcccgggcttgggccaactagaacttcttttggctggcgccgtcctgctccccagttgttggatgcctgattcggtgtctttccttgaactacccgctctttagagaaccaggctgacacagagtgctcctgcttattccctgctccgcgccctgctcccgcggctggcctgtaaccgacaa

SEQ ID NO: 24165 - DNA, 1533 bp, Artificial sequence
  DNA replication origin
tccccgccacggctccgtgcggccgccggggctggctggggaaagaagccagtccagaggagcgagaaggggccaaggggtcctaggccagctccatggcacctgcgggctccgactcggaggatggggtgacatggattcgttgcggtctgaaaagacttccggttagggccccctgatcaggactgagggtcgtaagcttagtgggtgcctcctccccaagaaacaggacgcacagctgttgtgtcccctgggaaggacacctcagaggaaacctcgaggtgcctaaggaacctcgaggttctaaggaaacctcacagctccttggaggcatcagtcaggagttgggggggtaacttcccacctgctccacccagagaagggtcaccctgaggagctgctggctggcctgtgcccaccccgcctcccctctacacggacggagaggaagccaaggtcggcgggaggtgggggagagactccactgtccgactccctccggcctccccagaggagggaaggaaagggagaaggggctcctgactcctgcaggtcctgaccccgcagaggggcgctcagcacctcttcggaaaccccatttggggccaatattgcacctgggcttctctttcagaaaaccccagaaatttactccgtggagctcagcggaactaaggacatcgtgaaaacagacaagggggatggcaaggagaagtataggggtctgaagaacaactgcctggaactcaaaaagaaaaatcacaaagaggagtttcagaaagaactccatctggtcagtagccttaagccacggggtcctgccggctatggcccttccccgcaagagcttgcccctagaacccacctcttaccacagacattcagtctgagggatttgaaatccccttgagattgtgtgtggtgtgtggtgtctgcgtggtgtgtctgtgtggtgtgtgtgtgtggtgtatgtgtggtgtgtgtgtatgtgtggtgtgtctgtgtagtgtgtggtgtgtgtgtgtatgtgtggtgtgtggtgtatggtgtgtggtgtgtgtgtatggtgtgtggtgtgtgtatatggtgtgtgtagtgtgtggtgtgtgtatgtgtgtggtgtgtgtgtatggtgtgtgtgtatggtgtgtgtatgtgtggtgtgtgtgatgtgtgtgtgatgtgtgtgtggtgtgtgtgtgtggtgtgtatatgtgtgtggtgtgtgtgtggtgtgtgtatgtgtgtggtgtgtgtatgtgtgtggtatatatgtgtgtggtgtgtgtggtgtgtgtatgtgcatggtatgtgtggtgtgtgtgtagcgtgtggtgtgtgtgtagtgtgtggtgtgtatgtgtggtgtgtgtatgtgcatggtatgtgtggtgtgtgtgtagcgtgtggtgtgtgtgtagtgtgtggtgtatatgtgtggtgtgtggtgtgtgtgtggtgtgtggtgtgtgtatgtgtgtgtgtgtgttttgaatggtgtgatagtatccacccagaggtcagggcctctgc

SEQ ID NO: 24166 - DNA, 1430 bp, Artificial sequence
  DNA replication origin
caggcctctctaatctcagccggggtccaagtgaacttggcatcaggagctgcgcctgggaacgcgcggagctgcgggccggggcctggtctcggtctccgcggagcgcccctgaccaccgcgacgggcggctgcggtggtggtggcgcaggaaggggaggcctcgggaagccacacagtgggacagggatcccggagcgaggaaggccccctccgtccagctggagcccttgccggcgtggcggcagtgcagtccgtggctgcgcgggaaagccggctgtggcggaggcgcgggctggggaccctgcgcgccggggtggcccacgggcagcggcgtaagcaaagcggtgggcgggccctgcgggcgcgaggctgccctaggcagccaccagatcttggacttccccgcgtggctcaccctgcaggccgcccgctgcagcgctggggctaaccggcgcctgcagccaggctctgggacctccttggccagacccaagagcgagccttggggttgagcacgttggcgctgccagccgggagccctggttccgggtgagggcggcaggggcgcatgttcctcagtcctgtcttcgtcgccctcgttgttctggtcgccatcgtgggtgttggtcttatggagatgcatgctctccaggtcaatctctgccttctcggggtcgccctcagtgtcgctgtcgaagaggcctccgtgctcctggtccttgctgtgcgcgccccacttcaccgtgctctacttgaggtgccggtgggcgttggtgaagctggtggggactggcgtgagggtcatcttggtgatggtggccagcattctctcctcgcctttggtggggaaggggttcttgcggtgccccttgagccagaccttgagagtgcttgtgctctcgcacgcggctttctcgggtcacctggagatccccttactcgaactggccatagggacaatgagccggtacagtgtgggccgagaaggtggcagggtgcaccccagggttgcccttgagtttatcctgcgagcccttcagccacagggcagagccagagaggagagagaggagggaggtggagagagagaaaaagagagagtaagatatgagtccccgaagccgaagctgggaaagtcaggagcacccgcctgtggactagagggggcctccctggcgctttgcaggggagagggccctgttctgcttcctagagcaggaagccctctcagcccacccacccgagtccactgctgtgggaaaaggggaatcagaaccactagctgactccaagaactgccctttcactgaccatggagatcttattttttccccccactctagaaaagttccaaaaaccacacctctccagaagagcatgcaggagttctgctccctacgtgctccctaggccacccttggtcccca

SEQ ID NO: 24167 - DNA, 895 bp, Artificial sequence
  DNA replication origin
ctgccgccctcacccggaaccagggctcccggctggcagcgccaacgtgctcaaccccaaggctcgctcttgggtctggccaaggaggtcccagagcctggctgcaggcgccggttagccccagcgctgcagcgggcggcctgcagggtgagccacgcggggaagtccaagatctggtggctgcctagggcagcctcgcgcccgcagggcccgcccaccgctttgcttacgccgctgcccgtgggccaccccggcgcgcagggtccccagcccgcgcctccgccacagccggctttcccgcgcagccacggactgcactgccgccacgccggcaagggctccagctggacggagggggccttcctcgctccgggatccctgtcccactgtgtggcttcccgaggcctccccttcctgcgccaccaccaccgcagccgcccgtcgcggtggtcaggggcgctccgcggagaccgagaccaggccccggcccgcagctccgcgcgttcccaggcgcagctcctgatgccaagttcacttggaccccggctgagattagagaggcctggcgaggtgtgggggtgcgcagggagaatgggctgtggtcgccatggtgcgtgttggtcttgtggagatggatgctcctccgggtcaatctctgccttctcggggtcgccctcagtgtcgctgctgaaaaggcctccgtcctcctggtccttgctgtgcgctccccacgtcaccgcgttctccttgaggggccggcgggcgttggcgaaggtggtggggactgtcgtgaggatcatcatgggcagggaagggcgcgcggcagtggcctcgagccctgggtcttctccttcctgaatttgcaaagccaggcgaaggccctcgtgctctccca

SEQ ID NO: 24168 - DNA, 1199 bp, Artificial sequence
  DNA replication origin
gtcgccctcagtgtcgctgctgaaaaggcctccgtcctcctggtccttgctgtgcgctccccacgtcaccgcgttctccttgaggggccggcgggcgttggcgaaggtggtggggactgtcgtgaggatcatcatgggcagggaagggcgcgcggcagtggcctcgagccctgggtcttctccttcctgaatttgcaaagccaggcgaaggccctcgtgctctcccagagagctgcgctccacccgcgggcctgcctgcgcgtggggagagcggggaggcggggacaggagacctgagcccctgggcgcccctaccacgtgtcccccgtcccaacactggacctcttcagattccttgccgagaggggcctcgtcccaaggctggatgcgccgcgcagcggtgaaagccgccctcgcagcccgcaggcgaccagtgggtgctgttggctttcgccccggggagggaacgggcttgggggcactggcggcggcggagcgcggcggggaagctgtgggggtcgtgcgatggttatggagagtgctccatccgccaggcctgggctctgggcgagctgaggagaccggagtttttccccaggagggagccgcgcaggccggcgacctcttcccaaggctctactgctggaccgcgcccgcggcgccgctcccgccccccttcagcgcactctgcgcctctcgctgggtatggccagctcgcagtgcgcgtttatgctgcggtaaacgcattgaaggaacgcacagcttatctaatagggttttgaaataattttcggtatgccagctggggtgtggtttgcccaattctgatcctgtttccagagaacacagctgcttagacaatctgttatcttcgcgtcctgtcttccttttgacgccagaacatcctagggatcaggggcctctcccatgccctggaaccatcctctcacggtgctgctcttcactggtgccaataacagagctcccgcaggcaggcctggatcagtggggactggggccctgaagtgagatggagcaagacagagcggcccttgggagaggggcatggggcggccctgtgctttagactcggcaccctatggcttgaggaggtgacactgtgtcgacgtgcgtttgaagggaggacggctgaaggtacatgcagtctcccggacgtcacaaactccgcggacgcgggt

SEQ ID NO: 24169 - DNA, 992 bp, Artificial sequence
  DNA replication origin
atgatttttcaagcattgctgtaaacgggtactttgcagactcatttctctaattcctatggaggaggtttgccacagtaggcagatcatctctgttaaaacagaccagggagattttggccaagagtggcacgcatatgacactttttaatcaagtaattggtctttcattcatctctgtgaacaaccagggtgtgccaggcactgcattaggtgcttggggtacagcaataaacagacaaaattccttgcccttatgaagcttacattccagtggtggaagaaagactgtaataagccaaataataaaacgtgtggtgtgtgagatggtgacgagaccttcggagaagcagggctgtggagtggcgtcgccgtctgggtgggacggtctgggaagcgcatgtaaggagtggcctgggtggccgcctgagcctgcagaggagccccaggctgcagcagcacctgagtgggcctgagacggggcaatcggattagtgggcgaggagcggtgggccagccctcggggtgggctgggacagtgggtggtggatgggattcctaacagatggcagcatgcacatgggcattttttgagtgagtgggagtctggagggctctgaatgaagggtggccgggcctcttattttagctccgactgctgtagaccgggaacaggtggaagggagcatgggcaacaccaggaatgcagtagggcttggggggactgggtggcagtggcgggtggagagaagcagactgtgtttgttgttgagctgtgtgtgtgattggtggtgacagcaaggaaggagtcaggaatggcctcaactgtgcttagttttgtgttttggtctcatgaaggtcccactgactaggagcaaccgcaagaagggagcacatggccaccaggaactcaggcttggacaggggaagttgaaatgcctacgagacacacaggagatccgactaggcagctgcacacgacagcacaggct

SEQ ID NO: 24170 - DNA, 1101 bp, Artificial sequence
  DNA replication origin
ttgttttagaaagactaaaataagggaagaatatgctggaaatgtctagaagcaattcgagatcacgtgcagctgcaagtgatagcgactgacctagagtcgaggaaggagcagggcaccgaagcccatcagtggtgaggcagcaggtgcggcccggcccatgcccctgcacctcagtaatccctgcggcagccacacggcagcctggtgaggatggagaggacatctgggccccaccacagagggtgtggactttggattgggtgacatcaaggttcacatccgagttttctgacttgaatgcttaaaacaaggtaagatccacaacctccatgaatatcaggtttcccatttgtgagacggattatgaccaataaaagaaaaatttctggtaagcacttttatcatgcaggaatatggatttaatatgaaaatggtaaaatacaagtctaaatgggttcagaattcaagagcaattaatatttacaaaatatctgttatcaggcactgtcacaggcccttattatactaagaacaaagctccatctcatgaggctcactctgccggggacagtgggagggtgatgggagagtggctggggcaggtgagggggtgacgggagagtggccagggcaggtaaggtggcggggctgtgtggggaggcaggatgacacgtgctgggtgtcactgaacagagctgggggaggcagcgcgtgtgggaagcaacaggagggtgcctggcacagtgccagcactacaagggaccagcgcagatgacaagtaaatggcaggaggactggccagggacaggaaggggaaaaaaggcccagtcacatagggactgaggttcttggaggaaggaaagcagaggcatatggaggtgtctgagcgaaggggatccgttgtcacgtggagcgacgccacagggacggggtaagagcggaggccaagccgccagcaagtcattaacccagaggtggcaactggaatctgagtggactttctgtcagaacagcaaggaatggaagagcaagagaagcctcgagaatgattcgaggcctctggcccaagcacaggggaagacggcaccaggatggaca

SEQ ID NO: 24171 - DNA, 916 bp, Artificial sequence
  DNA replication origin
tgcccggccgccatcccatctaggaagtgaggagcgcctcttcccggccgccatcccatctaggaagtgaggagcgtctctgcccggccgcccatcgtctgagatgtggggagcgcctctgccccgctgccccgtctgagaagtgaggagaccctccgcccggcagccgccccatctgagaagtgaggagcccctccgcccggctgccaccccgtctgggaagtgaggagcgtctccgcccggcagccaccccgtccggaagggaggtgggggggtcagccccccgccaggcgagacgccccgtccgggagggaggtgggggggtcagccccccgcccggccagccgccccgtccgggagggaggtaggggggggtcagccccctgcccggccagccgccccgtccgggaggtgaggggcgcctctgcccggccacccctactggaaagtgaggagcccctctgcccggccaccaccccgtctgggaggtgtacccaacagctcattgagaacgggccatgatgacagtggcggttttgtggaatagaaaagggggaaaggtggggaaaagattgagaaatcggatggttgctgtgtctgtgtagaaagaagtagacatgggagacttttcattttgttctgtactaagaaaaattcttctgcctttggatcctgttgatctgtgaccttacccccaaccctgtgctctctgaaacatgtgctgtgtccactcagggttaaatggattaagggcggtgcaagatgtgctttgttaaacagatgcttgaaggcagcatactcgttaagagtcatcaccattccctaatctcaagtacccagggacacacacactctgcctaggaaaaccagagacctttgttcacttgtttatctgctgaccttccctccactattg

SEQ ID NO: 24172 - DNA, 1351 bp, Artificial sequence
  DNA replication origin
atgaaaagtctcccatgtctacttctttctacacagacacagcaaccatccgatttctcaatcttttccccacctttcccccttttctattccacaaaaccgccactgtcatcatggcccgttctcaatgagctgttgggtacacctcccagacggggtggtggccgggcagaggggctcctcactttccagtaggggtggccgggcagaggcgcccctcacctcccggacggggcggctggccgggcagggggctgacccccccctacctccctcccggacggggcggctggccgggcggggggctgacccccccacctccctcccggacggggcgtctcgcctggcggggggctgacccccccacctcccttccggacggggtggctgccgggcggagacgctcctcacttcccagacggggtggcagccgggcggaggggctcctcacttctcagatggggcggctgccgggcggagggtctcctcacttctcagacggggcagcggggcagaggcgctccccacatctcagacgatgggcggccgggcagagacgctcctcacttcctagatgggatggcggccgggaagaggcgctcctcacttcctagatgggatggcggccgggcagagacgctcctcactttccagactgggcagccaggcagaggggctcctcacatcccagacaatgggtggccaggcagagacgcacctcacttcccagacggggtagcggccgggcagaggctgcaatctcggcactttggggggccaaggcaggcggctgggaggtggaggttgtagccgagatcacgccactgcactccagcctgggcaccattgagcactgagttaacgagactccatctgcaatcccagcacctcgggaggccgaggctggcggatcactcgcggttaggagctggagaccagcccggccaacacagcgaaaccccgtctccaccaaaaaaatacgaaaacccgtcaggcgtggcggcgcgcgcctgcaatcgcaggcactgggcaggctgaggcaggagaatcaggcagggaggttgcagtgagccgagatggcagcagcacagtccagcttcggctcggcatgagagggagaccgtggaaagagagggagagggagagggagaccgtggaaagagagggagagggagagggagcataaaaacatttttctagagaagcaaatgccaagagagttcattaccactagaccagtcttacaagagatgcctaagggagttctaaacatggaaatgaaagaatgatacctgctatcataaaaacacacttaagtacacagctcacagaccctataaaacaaccatac

SEQ ID NO: 24173 - DNA, 953 bp, Artificial sequence
  DNA replication origin
gtcagcccaccgcttgcaggtggcagctgcagctcgggctccggcgggggctggcggggctcccctgggatggcctcctgggcccagagtgcgccgcccatccggccagagggtgcgcgcctcctacaccctgggccgaagcccatgcccggcgctcctgccgcagactgcctgacttgccgcggccgggctggcccaggggtccgcgcggctggaggcgcccgcctggtcggggattcccaatcctcggcgacccctgctccatgtgctggtggcggctgcagctgcagcgcccatgggctgatgtggcttaccggagctgcggccggccacgcccaagggcctcacaggctgcgctgcccttgccagctgctcctgacccgcgcccagagagcaggacctggcgcttggcactgtgcagccacggggatgaggctgagcgccggttatcggcctcgtggcgccactggggccacagcctgacttcacctccccgtcgcccaagtcgtgtgatgggcacatgtgaggaggggcaatcggggttcccaaggctgctgcctgcatgccactccgtggccactaggatagggctgaggagccgccaggggatgagcacgttgtggccatcgggatggggctgagagtctatctttatccttatgcacctgcccagccgacttcctgacagccactaccgcagcgtcctgtcagggagtccttgctgttggggcggggatggggagggcatggagaatcagggatggtctggccattgctgctggtgcctgacgtgcaggtggcagctgcacctagggcacgggctggtaggtcttctcttttggatggtttccaggtgccccattgcgcagtgaccaagccagagggtccactccaccttagcccacactaggagtccaggggctacaggcatgggtactgcgtggccaaccaga

SEQ ID NO: 24174 - DNA, 845 bp, Artificial sequence
  DNA replication origin
caacaaggctgtttatttcacctgggtgcaggcgggccaagtccgaaaagagagtcagcaaagggtgatgggattatcattagttcttataggttttgggataggcggtggagttaggagcaatgttttgcgggcaggaggtggatctcacaaagtacattctcaagggtggggagaattacaaattacaaagaaccttctcaagggtgagggagattacaaagaactttcttaagggtgggtgagattacaaagtacatcagttagggtggggcagaaataaatcacaatggtggaatgtcatcagttaaggctattttcacttcttttgtggatctgggatgtgaggagcgcctctgcccggccgccccgtctgggaagtgaggagcgcctctgcccggctgccccgtctgggatgtggggagcacctctgcccggccaccccgtctgggaggtctaccacgggggccagacgcagtgttggggctggacgtggtggctcacgcctgtaatcccagcactctcggaggccgaggcgggttgatcacttgaggctaggggttcaagaccagcctggccaacatggtgaaacatatgaaaaatacaacaaaccaaccaaccaacccagcaacaacaaaacaggtctaccctggagtcatactctaattttttctgttttcctccctttcccatcctttatcccactttctttttcttcctcttccttctccttcttgtcaaagacatagaggattgagttattatcattgatccatacaaagtccctctctcatttattttctttcattctcaccccccatttctattccccgtcttcccatgtg

SEQ ID NO: 24175 - DNA, 1510 bp, Artificial sequence
  DNA replication origin
gagcctgtggacgcgagcaaggccggcggcaaacaaaagcgggggctgcgggggctgttcagcggcatgcgctggcacaggaaagacaagcgggccaaggcggaggccgcggaggggcgcgcgcccgggggcggcttgatcctacccggctcgctcaccgccagcctggagtgcgtcaaggaggagacgcccagagccgcgcgcgagccggaggagcccagccaggacgccccgcgagacccagcaggtgagcccgcagggggagaggaggtgcccgcccccgccgaccgcgccccagcgcggagctgccgagaggcagagggcctcgcgcaccccggcgacaccggcgcccggggagaggacgccgcggggcatcggcgcgccgagccggggcccggggaggtccgcacggcagaggacgcttccaggacgggggccgttcccgtaaagacggtcccccttgtcgactccgaaggcggcagcggccgggcgcccgccgccccagaccctgcctctgtcgatccaccctcagacccgtcggcagatcgtatttgtttgatgttttctgacgtgacttcactgaaaagctttgactctcttacaggctgtggagatattattgcagaccaagaggaagaggcaggtcccagctgtgacaagcatgtccccgggccaggcaagccggctctgtctaaaaagaaccccggcgtggtggcctaccaaggaggcggggaagagatggccagcccggacgaggtggacgacacctatctacaggagttctgggacatgctctcccagaccgaggagcagggacccgagccccaggagggcgcggctaaggtggcagctgcgctggaaaccaaggtggtgcccgagacccccaaagacaccaggtgtgtggaagcggccaaggacgcgtcctcggtcaagcgcaggaggctcaaccggattcccatcgagccccatcctaaggaggagcccaagcacccggagaaggagcagcaggaaggcgtccccaacagcgacgagggctactgggactccaccacgccaggcccagaggaagacagctcgagcagcgggaagaaggcgggcatcccccgggatagctacagcggggacgcgctctatgatctctatgctgacccggacggaagtccagcaacccttcctggagggaaggacaacgaggagacgtcctccctgtcccggttaaagcccgtatctccaggcaccatcacctgtccactgcgaacaccaggcagcttgctgaaggactctaagatccctattagcatcaagcacctgaccaaccttccatctagccatcccgtggtgcaccagcaaccctccaggagtgagatgcccagaacaaaaatcccggtttccaaagtgctggtccgcagagtcagcaaccggggcttggctgggaccaccatcagagcaacggcctgccacgacagtgccaaaaagttgtgaggtcttccaggccaaggtggatgggccc

SEQ ID NO: 24176 - DNA, 1258 bp, Artificial sequence
  DNA replication origin
tacaactaagaactccaaggtctaaattttaaccagctgtatctcataacaacagaagctgcaatggccaacatacgtcatttataaaacgccaacttatgtggatggggattgggatttattggcctaatgcaaagagcatataaaaaatgagtagggaaaagactactgtttgtgtatatatgtaattattacatatattcttaaatgatatttaataaataatcaaatgattaaataatatatactatatatacatgttatatttatatatgtatatgcttctccaaatttctttttgctaaaaagcactcagctgggattatgaaatcagatgtcaagattagaatattagcagtcactttttaaatcagaacacagaacagatccctagactgagctgttcccagaaaaaaggttttccctctccccagaccaggcaggtaggaatgtctgcagagatccctggacacacagggacccctgccaagcttttcctgctctgtacattggggaaggggactacaagtcagccctggtggtatgggggaggggagtggtaccgcagtgacaggaataatgccactgtcctgctgagtgggaaaggagagggcagaacccggactcgaaggcccacctgtggagtgggtctgagattcccagcctgtgtgtctcggtcagcttgtctattgttatcagatgtgggctgtgccgcagcatctgtgacttcatcccgtggtggctggagtctgggataaaagtcatggttgtcccaaaggtgcaggcaaactccaccccggggagctgttgtgcttgcattgctgggctgctgatagactgattgagtggtggcgtgtacttttgtcacaagaaccataaccacaatgacagccacacagcatggacctagcgtgtgctcagctctggacaagacatggatgtaggcagacatgcttcctgcctgctgggcttagtgcaccaatgctaaggacagacatgaagggcttgggaaaggcatgaagatgcagggagtctaggagagaggataagaaaaacaagcattttgtggtgggttgaattgcgttgtcgtttttagaggcatttcgtgatccatggttgcgctcccgtgaagagcgagtctagagaaggaatccgaaggtgggtgagagttgagggaatttgaattccataattacgactcgaatttctgcaatcagctcgcggctgtgttgcctgctcctgccacaaaaacgccatg

SEQ ID NO: 24177 - DNA, 1095 bp, Artificial sequence
  DNA replication origin
cctgcagcccagagagcccagggagcccagggaggggagcggggcgcgggcggggcagtgtcgcataaccgcaggcgcgccccgcgccgcccccgccccgggcccaccctccctcgccgcgcccctcccagctcacccacggacgagcggatcctcgacctccgcggcagggacatcttaagagctttgtccaggcctgcgccgttcagcatctcgcccgtgtcgggggctcggcggccccgggcgagagacggaggctacgcgcagggctgggcgcaggggccgccgcccgaggaccatgggtgggccagcgcctcgccgggctgctagctggcggggaccgccggcgcctgtgccgggccgcgcccgaggctgcgccgtccgtgccgcagcggccaatgcggcagcatccgcgaacgccaccgcggcgggccccgctggcccgggctgcggcgtgggggcgggggaccggccctgagcggagccccgcgggaggaggagcggacgggaggctgggagggatccgcaatattacgcaggaccggggcttttaggtgtcggggaaggcgatggggagggcttggtggggtgggagattgggcctgtactttcgggggctcttccaggagaggggtgcacctgggggactcggagtctctgcctgtctgctacctatttacctgcctgtcacttgtcctgtgcaagtggaggcgctgtgattccccaggactcatccagtccctttcttttcgcagtttctgttcttccgtgcccagcctggtgggatctgtgtagggacttcgtggaagggttatttccaaggtgtctgatgtgtggcttggcactcagagaagtcgggggtctccagccccccactctccacaacctgcctgacattctaactacgcatattaaagctgcaggtagccctagggaaccttaacagcaaccttctcaacccccgcacgcacacacacacacacacacacccatcgacacacacacacacacacacagacccatcgacacacacacacacacacccatcgacacacacacacacacaccttctttcataaaacaaaaccatcgaga

SEQ ID NO: 24178 - DNA, 1056 bp, Artificial sequence
  DNA replication origin
acacgggcgagatgctgaacggcgcaggcctggacaaagctcttaagatgtccctgccgcggaggtcgaggatccgctcgtccgtgggtgagctgggaggggcgcggcgagggagggtgggcccggggcgggggcggcgcggggcgcgcctgcggttatgcgacactgccccgcccgcgccccgctcccctccctgggctccctgggctctctgggctgcaggatccgccgacgcggcgcgctggccgcacgggggctgggcgtcgctgcacctgcggggccaaaaggctccaggccggggcgaggtgagcggcgggcgtcagagacccccggctcgtccctgtacagatgtgtgtgtgtgtgtgcggcctccctgtgcgcgtgcccgtgcgcccctacgcgcggatgcggctcagggatgcgacctaggcggcagtcaccgcgatggtgggcacggtttggcggcgcagagaagatgcagccttccctgccggcggccggcaccgctgtgctgcagagctcaaaagcagagggggaaaaaggcatccgaagggtccctcgagtgattctcaccacttggagccccgggtcctcgcgcgctcacagcggcgacgtactggctcataaccatccgtgcatacaaccatctggagacgaacacacacacgcacacgcgcgcgcacacacacacacaggtacacacacacgtacacacgcacgcgtacacataccctgcctgcaggcgcctgggtgttggaactcgaaacctaaagccaaacacgcatgtaccatacccgaccactcacactgttagaggcccgcgttctatgattatagaacacatttagaaactatgatgtcgtggagctggatgttatgtggctatgacacttgatagggttacctagaccattagttaatgcagacgtaaagaggagccccaaaaatgatttcttaccgtttcaggactgcggcaagtttgcaggtagatctttgacatgaggaaggtagagggtgtacagtttggagctggggtcacttgtcttcgtgcttttt

SEQ ID NO: 24179 - DNA, 1120 bp, Artificial sequence
  DNA replication origin
gccccgtctgggatgtgaggagcgcctctgcccggccgcgaccccgtctgggaggtgaggagcgtctctgcccagccgccccatctgagaagggaggagactctccgcctggcaaccgccccgtctgagaagtgaggagcccctccgcccggcagccacccagtctgggaagtgaggagcgtctccgcccggcagccgccccgtccgggagggaggtgggggtcagccccccgcccggccagccgccccgtccgggaggtaaggggcgcctctgcccagccgcccctactgggaagtgaggagcccctctgcccggccagccactccgtccgggagggaggtgggggggtcagccccccacccggccagctgccccatccgggagggaggtggggggtcagccccccgcccggccagccgccccgtccgggaggtgaggggcgcctctgcccagccgcccctactgggaagtgaggagcccctctgcctggccaccaccccgtccgggaggtgtgcccaacagctcattgagaacgggccatgatgacaatggtggttttgtggaatagaaagcggggaaaggtggggaaaagattgagaaatcggatggttgccgtgtctgtgtggaaagaagtagacatgggagacttttcattttgttctgtactaagaaaaattcttctgccttgggatcctgttgatctgtgaccttaccccccaaccctgtgctctctgaaacatgtgctgtgtccactcagggttaaatggattaagggcagtgcaagatgtgctttgttaaacagatgcttgaaggcagcatgctccttaagagtcatcaccactccctaatctcaagtacccagggacacaaacactgcggaaggcctcagggtcctctgcctaggaaaaccagagacctttgttcacttgtttatctgctgaccttccctccactattgtcctatgaccctgccaaatccccctccgtgagaaacacccaagaatgatcaataaaaataaaaataaaaataaaagaatcatacaacaaaaccacaaattggaaattatacttattaataatgcaattacaagaaaataaaaagcagcagaattgacactt

SEQ ID NO: 24180 - DNA, 1442 bp, Artificial sequence
  DNA replication origin
ttccacacagacacggcaaccatccgatttctcaatcttttccccacctttccccgctttctattccacaaaaccaccattgtcatcatggcccgttctcaatgagctgttgggcacacctcccggacggggtggtggccaggcagaggggctcctcacttcccagtaggggcggctgggcagaggcgcccctcacctcccggacggggcggctggccgggcggggggctgaccccccacctccctcccggatggggcagctggccgggtggggggctgacccccccacctccctcccggacggagtggctggccgggcagaggggctcctcacttcccagtaggggcggctgggcagaggcgccccttacctcccggacggggcggctggccgggcggggggctgacccccacctccctcccggacggggcggctgccgggcggagacgctcctcacttcccagactgggtggctgccgggcggaggggctcctcacttctcagacggggcggttgccaggcggagagtctcctcccttctcagatggggcggctgggcagagacgctcctcacctcccagacggggtcgcggccgggcagaggcgctcctcacatcccagacggggcggcggggcaaaggcgctccccacatctcagaagatgggcggccgggcagagacgctcctcccttcctagatgggatggcggccgggaagaggcgctcctcacttcctagatgggatggcggccgggcagagatgctcctcactttccagactgggcagccaggcagaggggctcctcacatcccagacgatgggtggccaggcagagacgctcctcacttcctagacggggtggcggccgggcagaggctgcactctgggcactttgggaggccaaggcaggtggctgggaggtggaggttgtagcgagccgagatcacgccactgcactccagcctgggcaccattgagcactgagtgaaccagacaccgtctgcaatcctggcacctccggaggccgaggctggtggatcactcgcggttaggagctggagaccagcccgggcaacacagcgaaaccccgtctccaccaaaaaaatatgaaaaccagtcaggcgtggcagcgcgcgcctgcaatcacaggcactaggcaggctgaggcaggagaatcaggcagggaggtttcagtgagccgagatggcagcagtacagtccagcttcggctcggcatcagagggagaccgtggaaagagagggagagggagaccgtggggagagggagagggagagggacagggagaggaacagggacagggacagggacagggacaggagtactggtcttcatagttacttcccaatattgtttttgcccacattttctgatgggacatgcagactgcatttcccagtttctcttgtaactagcgactgt

SEQ ID NO: 24181 - DNA, 1027 bp, Artificial sequence
  DNA replication origin
gccccccacccggccagccgccccatccgggagggaggtgggggggtcagccccccgcctggccagccaccccgtccgggaggtgaggggcgcctctgcctggccgcccctactggaaagtgaggagcccctctgcccggccagccgccccgtacgggagggagatgggggggtcagccccctgcctggccagccgccccatccgggagggaggtggggggggtcagccccccgcccggccagctgccccgtccgggagggaggttggggggtcagccccccgcccggccagccaccccgtccgggagggaggtggggggtcagccccccgcccagccagcctccccgtccgggaggtgaggggcgcctctgcccagccgcccctactgggaagtgaggagcccctctgcccggccagccgccccgtccgggagggaggtggggaggtcagccccccgcccagccagccgccccgtccgggagatgaggggtgcctctgcctggccgcccccactgggaagtgaggagcccctctgcccggccaccaccccgtctgggaggtgtacccaacagctcattgagaacaggccatgatgacaatggcggttttgtggaatagaaaggggggaaaggtggggaaaagattgagaaatcggatggttgccgtgtctgtgtagaaagaggtagacatgggagactttttgttctgtactaagaaaaattattctgccttgggatcctgttgttctgtgaccttacccccaaccctgtgctctctgaaacatgtgctgtgtccactcagggttaaatggattaagggcggtgcaagatgtgctttgttaaacagatgcttgaaggcagcatgctccttaagagtcatcaccactccctaatctcaagtacccagggacacaaacactgcggaaggccgcagggtcctctgcctaggaaaactagagacctttgttcacttgtttatctgctgaccttccctccactattgtcctatgaccctgccaaatccccc

SEQ ID NO: 24182 - DNA, 1297 bp, Artificial sequence
  DNA replication origin
ctgggcggggggctgaccccccacctccctcccggacggggtggctggccgggcggggggctgaccccccaacctccctcccggacggggcagctggccgggcggggggctgaccccccccacctccctcccggatggggcggctggccaggcagggggctgacccccccatctccctcccgtacggggcggctggccgggcagaggggctcctcactttccagtaggggcggccaggcagaggcgcccctcacctcccggacggggtggctggccaggcggggggctgacccccccacctccctcccggatggggcggctggccgggtggggggctgacccccccacctccctcccggacggggtggctggccgggcggggggctgaccccccccacctccctcccggacggggcggctggcctggcgggggctgacccccacctccctcccggacggggtggctgccaggcggagacgctcctcacttcccagacggggtggctgccgggcggaggggctcctcacctctcagatggggcggctgccgggcggagaggctcctcacttctcagacggtgcggttgccaggtggagggtctcctcacttctcagacggggcggctgggcagagacgctcctcacctcccagacggggtcgcggccgggtaggggtgctcctcacatcccagacggggcggtggggcagaggcgctccccacatctcagacgatgggcggccgggcagagacgcttctcacttcctagatgggatggcggccgggaagaggcgctcctcacttcctagatgtgatggcggccgggaagaggcgctcctcacttctcagactgggcagccaggcagaggggctcctcacgtcccagaagatgggcggccaggagagacgctcctcacttcccagacggggtggcggccgggcagaggctgcaatctcggcactttgggaggccaaggcaggcggctgggaggtggaggttgtagcgagccgagatcacgccactgcactccagcctgggcaccattgagcactgagtgaaccagactccgtctgcaatcccggcacctcgggaggccgaggctggcggatcactcgcggttaggagctggagaccagcccgggcaacacagcgaaaccccgtctccaccaaaaaaatacaaaaaccagtcaggcgtggcggcgcgcgcctgcaatcgcaggcacttggcaggctgaggcaggacaatcagtcaaggaggttgcagtgagccgagatgggagcagtaaagtccagcttt

SEQ ID NO: 24183 - DNA, 793 bp, Artificial sequence
  DNA replication origin
gcctcctgggcgtcgcggcagaggggagtggcccgcgcggaaagcgccgcgggacagtcagtgacgaggcccgggggtcgccggggccacgacttctcggagaccgtcctgcgctctctggagacgcgctgtccgcgcccagggtggtgccatgtggggcgctcgccgctcgtccgtctcctcatcctggaacgccgcttcgctcctgcagctgctgctggctgcgctgctggcggcgggggcgagggccagcggcgagtactgccacggctggctggacgcgcagggcgtctggcgcatcggcttccagtgtcccgagcgcttcgacggcggcgacgccaccatctgctgcggcagctgcgcgttgcgctactgctgctccagcgccgaggcgcgcctggaccagggcggctgcgacaatgaccgccagcagggcgctggcgagcctggccgggcggacaaagacggccccgacggctcggcaggtagggcggcctgcgcccagcgcgaaagggaggacggttggcgttgcctggacgtcagggacctgggagtttgaaggggggaaattcaggaaagggcctaggaccaggaggcggagtctgccttctggcttattatttggtcggtgtgggtccctaattcaccctcacgggcctcagtttctccatctgtcagccaaagggtggcttagagttaattttccgaacaaaatcacactcctaaggcagtgtgggccacagacagcccccatattccttctgaccagggtcctccgggcccctctggcgtc

SEQ ID NO: 24184 - DNA, 1151 bp, Artificial sequence
  DNA replication origin
gccgagggagcgctcctgaccccgggaacgtccaggacgcaggcgagggtcctgcgcgcccccagccgcagtcccgggagcctgcccagctggcggcggccgcggctgctgctgggcgcggatccaggcgggcggctcgccccggttccccttctccgcctccccggctgcagcgcggtcccacaggagcccggcagcctccggccggctctccctctcccggtcgctgcctcgccctcgggaggtgtgcgcaccgatggaagcctcccacggaagtttctttcctccgggctacgggagaagccgagcgcagcagccgcccacagcctcgcctcgccccgcccggcgccagaccagctccgactccgctcgctgccgcgctgagccgcgctcttatagaggccggcggctccccggcgcgcatgcgcgctgcgcggctcccccccacccccgacctcagggacgcccgcgggcgccgggcagcccctcactttcctaccccgggcaaggagaaaggtgtggccaagggcggggtctgcctgctggaataggcgcgggaggaaacccaacctaagcaatccaggcctcgctaacacaaataacaataataacggaagaaactcaacttgctttgtgaagatctttggcattcaacattcggttcgattctgcaaacttctcaagggattatgattactttccactctgcagatcataaaatcgccactcagatgaactctctcggcttccagcagctgatgtcctggccacggttggtcccaggccctgtgcaggaagagcaccgatgtttgtggcagggttcacacgcctagggctgtgtttggtggactggaggcctccaccacaaggtggaacggagagagttcagcaaagatgtcacacattcggccacggtgtggatgatctgtgtccctttttctttctatatttgggtgtggtgatttatcggattccagcaggaaagtgcctccgtccaacatgtggccttagtggtttagacagctgcagtcaggaagaaaacaaggttcagacagaccagaaattcagctttgatgaaggagaaattaatagcttctctcttgcagaagctggaacaacaggtgctgatgttattaaagcagcagtgctta

SEQ ID NO: 24185 - DNA, 1036 bp, Artificial sequence
  DNA replication origin
ccccgcgggctccctgggcgccggctccgccgctctctccggccgcgcgttctgctcctgctgcggcgggagcggcggggcggccaggcgggctctcgtcctctcacacgcgcactcacgcctcacgctctcacacacacgctcacactcactcactcactcactctcccatacactcaaacagaagggcagagccgcacaacagccggtacctcctcaaagagaggaggagggagggcactcgcggaacacggccgcggctgtcgcaaaaacgtcgcgaagcctcgggctgcctccgggccacactctagcccgctcccgcggtggctggccgcccctgctggcgctggcaccctgaggaccgtgtggagggagcaggggagccactgcccaaagctgccgccaaatgcaccacgtggaaccagccccagcggtggccgggccccagactacaatacccagaatgcacaggccgccgccgctgccgccccttctacgactccgccccacacggtgggaatatgggagcgttgcatgatgggactcgtagtctagggtgaaattcgtttcaatcatttggggaaaatttatttttatttttacagcgatctaactagagtctgatttcagccacaaacttgatcaaagaggtgcacgtgggaaggagagtcgtttgcattagaaacacattttgtgccactctgaactccagattttaaaggccactatcatcgataaaagccggtatgatatttgtaaacagctcgcgggccagcagttggggtactcttggtgttcacaatctgataagggctgcacaatgatgtcaacatactgacattacaagcaccaataaaagtgaatcaatgaccagtgtccaagctactcctaaacattgttactcttgtgacagatgaccatccaaacctttcctatccatatacaggaagtattgagtacagtacagccttctgcgatactacctataagaacaccagtttctagctatgattacagaaaggatctaaatccatgg

SEQ ID NO: 24186 - DNA, 1349 bp, Artificial sequence
  DNA replication origin
cctgggcaacagagcaagactctgtgaaaaaaaaaaaaaaaaatagaatgggagccacatgagtcattttcaattttctagtagctgtactaaaaaaaaaacccaaacaaggaaacaatgtgttttacttgacccaatgtatctacaatattattatttcaacatgtagttgataataaaaactaatggatgagcttttttgcattcttctttcttttgtgttaagtcttcaaaacccagtgtgtatttgacactcacagcacatctcggttttgaccagccacatttcaaatgctcaataaccatatgtgaccagtggctccgggagtgggcagcagagcctagaccgcatgaagaccttggctttccctctgaggatgttttagaatgtaggttttattattattcaggtatggcaaggccaacagatcaggagcggactgccattgaaaagtgagctgggagcgctccacaccgtaggggccccctggggaagcaagggggggagggagtggagggaaacatgggcgggagcgttgattctgattttcatgggaaagaacaggcaaggcagggtaagcaggtttaggattggctggtctgagtaatttctgcaggccctgggcatgggacagtccctacttgtctggtacctggccctggggtgattagggcaaggggccaggggccaggagcatagtggtgtagcggggtgtgagctctggcttaattgctttgcatatgaaaggtgcttgcactcagtcatttgctctctctaggacctggctaaatggggagaggcagcctctctaaggtcagcagagcctcaagagcctcaagaggccaaagcatcagaaacccatggttaatggagagggttcaggagctgcagggctgggcttaggagggctgggctcaggagggctgggctcaggaaggccgtgatcccgctgctgtgtctgccgggctctggcttctcctggaagagaggtgggatggggcaagggggcaaggatgggaacaaggctgtggccacaccccagggagggggcagggcttgggtgaggctgaggcttcgggggtggaaggaggtggtccctgctagacagactggcagacaaagcaactacggctgattcctcacgtaagcacctggatgctgaactgaatgacagcaggcgctgactttagaggaagagtgggatagcacatttgctgaaatacttaggtatccaatagaattccaggggcgtttagacagtgaagtaatgctgagagagacagagctattctccattggctgctcaccacattgaccggtccttctgccaggcctggttaggtcactg

SEQ ID NO: 24187 - DNA, 1178 bp, Artificial sequence
  DNA replication origin
agaagggccgcctggccgcgccgtgacggcgagaagcccctgccagcgcgggagccggccgggagaatgcggccgggctgcagggataggcgcgaggcggcgccgcagcccgcagtgggccccgccgcccggccggagcgcgcggcgatgcagcaacttcagttcgccgtggggccgcccctcccccgacagccgcccggcccggagccgagagggccacagcagcctacagcggagagccggggcgaccgcagccctcactcaccggtccgcggtcccgccgccggcgccggggctgcgctctgagctccatggtcccgccgcgccgcggccgcccggcgcacccgcctcgcaccacaccgcacgcagcggcgcgagcgacgccgcctccggcccgtccacggccgcggccacgccccctcccggcgggggggctcggccggagcaggaggggggctcagtgccggctccaccaaccagggccaactcacggggccgcttcaccaggattggcgagtgcctcggccaatagggagccggcgagcgcgctgagcgacggtgccgaggggcgggggattgcggaggcggtggctctcacccttggtcctccgcccccagctcgggatgaggcttaggcagcgtcctttccagcgaggagaggtggggatacttcgggccaagagacccttgtatcacctctgattgctaggtgcccattacagtacctttgagtttgcgcttatatcctaatcctccctgggtgttgagggctcctgcacagaggtcctctacctgtaaggtgtcagacgtcctccagggctgaggcttcaggcaaccctgagaggactgtagccctgttcatgggttggttttatgccctgctcaaattcgttagcattcttaaaatcttcccatctccttcaacacagattcttctgtttttatcaccctataaccaatctctctccaccctagatgtgaggaaatccacaatacttattaaaactaagatatccctgaaactgccagctaagccctgccacagtggaacatagccacgtgcgaccagatgactgaggcataaacaaacttaagaaaaagaaaggaggaaaggaaaggaagagaagaaaagatagaaaagccaagatagaaaagctaggtcacaaaggaaaggggtt

SEQ ID NO: 24188 - DNA, 1287 bp, Artificial sequence
  DNA replication origin
gagattgttaggtgagatcaccaagggagggcacacagagaaagggtccaaatcaatatgtcaaaagtctgctaagctaatatttctctgcgttcttctatgtaaaatgtgggaataaaatgccacatacactttttatcctttcagcagtgagttattgcacacctactgtgttccatgcactgatctgggcactgggacacatcagtgaacaaaacctcaaaaaaatccctgccctcacaaagctgacattttaatgggagaattgggcagtaaaggagacaaattaataaattattcacatgtagcatattagaagataatagatggtaatggagagaactaaatcatttaaaaagggtaaggaggttcaggacttgcagttttaattggggtgaggcagaagtaatatttgggcagagatttgaaggaggtgtgagggactgagccacgcaggtgtaggtgggtggggcggaacattccaggagagatggtagcaagtgcaaaggtcttggtgggctgctctctagtgtgtgtgttcagggaggagacctgcagtagaatgaggaggggagagggagagagtaagagatgaggacagagtggttaggggagggaaggaagcaggtcatgtggctctcttaggtcatcgtaaaggttttagattttcatcacactgtgtgtgctgaacggccaccagagggtttgaaatggaagagagatgtgatccaacttctttgacagaaatgctctagcttctcaggaaaacagtctgttggggaacagagaataaagtggagaccagccgggaggcttgggtgaggatgcaagcagttgaggtgggggaagcagtaggattttgatgtatttagaaggtggaaacactagtaggatttactggtggatctgacagtgagggagggaaattaaggatgcccagggtttttgacttgagcagctgagatatggggttgccatgaactgagagggggagactacgagctctagattgctggggaacgtcaggagttcaattttgggcatgttatatttcatattagggttgtgtattagacatccacgtgaagacactgagttagctgttgagtatacagtttcaaagttcatggaagtggtctgggctggagatgggaatttgggagttgtcaggatatatgtggcatttaaaaccatgagatcaggaaaggagggagtcgggatagagaagagaaaaggtccgaggactgagttgtaggttcttgaggtcggggatgctttaggaacggc

SEQ ID NO: 24189 - DNA, 1296 bp, Artificial sequence
  DNA replication origin
tctcccatgtctacttctttccacacagacacggcaaccatccgatttctcaatcttttccccacctttccccgctttctattccacaaaaccgccattgtcatcatggcccgttctcaatgagctgttgggcacacctcccagacggggtggtggccgggcagaggggctcctcacttcccagaaggggtggccgggcagaggcgcccctcacctcccggacggggcggctggccgggcggggggctgaccccccccacctccctcccggacggggcggctggccgggcggggggctgaccccctacctccctcccggacggagcggctggccgggcagaggggctcctcacttcccagtagggatggctgggcagaggcgcccctcacctccctgacggggcggctggccgggcggggggctgacccccccacctccctcccggacggggcggctgccgggcggagacgctcctcacttcccagacggggtggctgccgggcggaggggctcctcacttctcagacggggcggttgccaggtggagggtctcctcccttctcagatggggcggctgggcagagacgctcctcacctcccagacggggtcgcggccgggcagaggcgctccccacataccagacggggcggcggggcaaaggcgctccccacatctcagacgatgggcggccgggcagagatgctcctcacttcctagatgggatggcggccgggaagaggcgctcctcacttcctagatgggatggcggccgggcagagacgctcctcactttccagactgggcagccaggcagaggggctcctcacatcccagacgatgggcggccaggcagagacgctcctcacttcctagacggggtggcggccgggcagaggctgcactctgggcactttgggaggccaaggcaggcggctgggaggtggaggttgtagcgagccgagatcacgccactgcactccagcctgggcaccatcgagcactgagtgaaccagataccgtctgcaatcccggcacctccggaggccgaggctggcggatcactcgcggttaggagctggagaccagcccggccaacacagcgaaaccccgtctccaccaaaaaaataggaaaaccagtcaggcgtggcggatcgcaggcactcggcaggctgagacaggagaatcaggcagggaggttgcagtgagccgagatggcagcagtacagtccagctttggctcggcatcagagggagaccgtggaaagagagggagagggagaccgtggggagaggc

SEQ ID NO: 24190 - DNA, 964 bp, Artificial sequence
  DNA replication origin
agcgcctctgcccggccgcgaccccgtctgggaggtgaggagcgtctctgcccagccgccccatctgagaagggaggagaccctccacctggcaaccgccccgtctgagaagtgaggagcccctccgcccggcagccaccccgtctgggaagtgaggagcgtctccgcccggcagccgccccgtccgggagggaggtgggggggtcagccccccgcccggccagccgccccgtcagggaggtgaggggcgcctctgcccagccatccctactgggaagtgaggagcccctctgcccggccagccgctccgtccgggagggaggtagggggtcagccccccgcccggccagccgccccgtccgggagggaggtggggggggtcagccccccgcccggccagccgccccgtccgggaggtgaggggcgcctctgcccggccaccccttctgggaagtgaggagcccctctgcccggccaccaccccgtctgggaggtgtgcccaacagctcattgagaacgggccatgatgacaatggcggttttgtggaatagaaagcggggaaaggtggggaaaagattgagaaatcggatggttgccgtgtctgtgtggaaagaagtagacatgggagacttttcattttgttctgtactaagaaaaattcttctgccttgggatcctgttgatctgtgaccttaccccccaaccctgtgctctctgaaacatgtgctgtgtccactcagggttaaatggattaagggcggtgcaagatgtgctttgttaaacagatgcttgaaggcagcatgctccttaagagtcatcaccactccctaatctcaagtacccagggacacaaacactgcggaaggcctcagggtcctctgcctaggaaaaccagagacctttgttcacttgtttatctgctgaccttccctccactattgtcctatgaccctgccaaatccc

SEQ ID NO: 24191 - DNA, 856 bp, Artificial sequence
  DNA replication origin
cggcccgcgggggcgggggggtcatcgagggggtcaccttggctcgcccaggccgagggggctcctccggtgcttccgaagcgcgtgggctactcgtgtcgcatgtcggcgcagttgcccgctgtggcaaggggggggcggccgggctccggagcgggccgggagggcgcggggcgcgcactccgcggcaggtgagcggcgcggctgcaggtgagcagcagcctcggctcgcgcgcccagctttccccgccgcgcccgcccggcccacacgctccccgcgcgcgcgccgcccccgccccgcgcgcgcccggccgcccgcccgcccgcgggatccccgcgaggccgcgcgcccccacgggtcagggctgctctagggtgcgggcaggcgagggcggcccaggggcgcggggcgaggggcgaaggagccaggaggctgagaactgcatggtagccctgcctgcctgccgcgctgcgcgccccaccccagccggcggccccgggcttgcaccgggcggggcaggggagcgctgcctggagccctgtgacctatttcgttcctgtggtttccctggggagctccaagtctctacagtcctggcttttccacgcctttacctaaaccactacattcagggccaaaagaattgcttaggatgatattcacgatcagcagcagggatgcggggtggacaggttagggaagcagatctttaaaacaacaaaatgccccgcacgctcttttagaattgcccatggtcctggacctggttcattatcactgttccccaggaacatttgcttgactggatagatgctgctgctctgtggatcatcattatcatcaccaaattgcact

SEQ ID NO: 24192 - DNA, 1394 bp, Artificial sequence
  DNA replication origin
ccaacaacacccagcagagggctccatgggcaggtgggtggaggggactctatggataggtagggtgggctccatgggcaggtgagatccatgggcggggtggggggtgctccatggggaggtggagggtgctccatgggcaggtagagggtgctccatgggcaggggggtgggctccatgggcaggtgagatccatggtcaggggggttgctccatgggagggtggggggtgctccatgggcaggtgagatccatgggcaggggggttgctccatagggaggtggggggtgcttcatgggcaggtgagatccatgggcaggggggttgctccatggggaggtggggggtactccatgggcaggtggagggcattccgtggggaggtgaggggtgctccatggggaagtggggggtgctccatggggaggtgggggggtgcttcatgggcagggggtgggctccatgagcaggttggggggtgctccatggacagatggggcaggctccatgggtatgtgggctccatgggcaggtaagctacatggctaagtgggttgggctccacaggtagatgggctccatgcgcaggtgggcaggtgggcaggtagggagggctccatgggcaggtgagattcagtgggcctcagcgttgaggtcactggggctgaggatgcatgcacctgggcaagtagaaacagcagacatgaggctcaactgtcactggggaccaaggacaagcagctgggggtgttgaagatgtcccaaagtgctggtcatcagcatcagtcaacagtggtttggcgaaaagcctccaaggtaggggacaggcatggactcaacctataagatgtaggacccgtttaattaataggccatgttatttaggtttatatctgaagtgtacccaagtgattctgagaccagggactagagtctattttcatggggaatccagcccaaggaagcattagtctttcagaaaacccactctgttgggccatttcctgtccaccactatctctgggccagagaactccagtgctgtgagctgcaaccccaaggagaggggagtgctggtctctcagaaagggctgtaagggagacaggatgagaagttctggggacagcagtccctgtagcacaggcacacaggttcctgttacccagggcaggcccccagcattctccacaagtcaagaggccacgaagcatggagttccaaagcacaagcctctatcaactgcctggattctacccccagctcttgcacttacgaccttcaacattcaattctgcactccagttctctcatttgtaaattgacggtcatgatgtacgtgtgacatttagaggattccatagttgttagccatcgtcattattgtcatgggg

SEQ ID NO: 24193 - DNA, 1742 bp, Artificial sequence
  DNA replication origin
ctccaaattcgcctccatctgtaccatggtaggtggcggcgagcgggcggccggggctgccgggacctctcgggcgggcgggcggcgctggacccgcctctcccagtggccgctcgcggggcctagcgccggggcgggcgggcgggctgggcggcccgggcggcccgggcgggggcggttggacggcgcgcaggcggggagcgcgggggtgagcggcccaggcggctggggagggggcgccgcctggtgggccagggcggcgcgagggtagcggtgagtgggcgaccgtgccagacgcggcgtcgggcgggcaccggcctccgggagtccccggctgaactgctggggtccgctcgggacgcggggacgagggccgaggcgcgcccggcctgtgccggggtgaggggtgggcgcgcgcgagccagagcgcggccccgggccggggtcgtcggggagggggcgcggagccgcgcgggctccatttccttctggtcgcgcgccgagcgggaggggtccccgggaggggtgggggtcggcgggcaggaaggaagggtctcggccggggcgggcagcgctcattcccgcctgggagaggacggaagtcaagtgcagatttcctcgcgccgctggctgggccgagtccccgaccccgcgctgggggaaaggggcgtgtgtgaaggtggaaactttaaataagtactgttgaaattctctccattttctcctctgagaggcacgagctctcccgtttccagccgtgtgtccaggtggcagtcttgtctctgggaatgcacgttaatcttgaaaagcagcattagctttcctgtcatttgtttacttcagcccaccagacacatctgtatgtggctggagctaggtctgtctgtgcggggaccgcctgccaaggcgatggtatttgttttcctagggcgtttaaatagactgtaagggaaaagtgctaatgcccgctggaagtcccgaattaagcaaaacgtgggcgcgtttaaaacttggtgttttgtgcgtggccagaaggaccacagttttccacatgatgagacaaattcgtttcattagttcctcatgagcttatatgtagggatcataatttatgagtcatcaccgaaaaaagttgttctttgcaacgtgggcctagtggttgttattagagacttctgaaatcttgtgtttcatgcctcactggccctatttatgcaactgatttcatataggagatccccaagaaattttccatctaagggtggtacattgtatatatttttctttaaggagtggtgaatcagatctgaaagatgccttaaaaagcagattctctactacacgctgaggaacagtacaaaaaatgactgaaatcaggtggacataaaatcgacagtattaaagaaatcatattgaaggatgaatcattgaagactccatttcccaactggatgattgttctttctcacagtttacattttaggaaagcatttgtattaaatggactatattaaaatgattttggagaattgtttgggctaattatttttagatacgccaattattatcttagtcaatttcaaaaggaatgcgataattaggtcttttacagtgacaattttgccacatggctgagctacacacattgtatgggtcatagttcattgtcaaagactagatttcaggagtggtgtgatactctttaccgactgttcattcactcaagtactgtatatcaagta

SEQ ID NO: 24194 - DNA, 1070 bp, Artificial sequence
  DNA replication origin
ccaaccaccgagcccgctgggccgccgctgccgtcgtcgccgccggcgctcaggcactcccggcctcgggccccagcccccgcctgccggccgccggcccgcccccggctccgccccggcgcagggcgcagccgctgcctccgggcccgcgcctgcacgcgaagccgccctccgcccaccccgcccagcgcacaggggagcgggctccgccgaggccctaatgcccggcctgccaggcagcggcgcggccaggcggcgcagccccgcccacccctcggcaacccctccgcggcccttgtgcgcgagccggggaactccggtccgtccccaccccgcgcgcggcagagggcaggaccgaaggcgggcgccacctcctgcccgcgtccctgcggtcctagagccggggacccagagacccccgcgtaggaaggggtgcggcggggaggcgcgggggtggcggcggcgatctgggagaaccctggaggggaccagctgcgacacccaccgcgggcgaggggacggcgagcccccgctgcctaaacagaaaacggaggcgatgatctgggtaactacgggcggagtgggaggaaacctgctctgcacagttaagataacccgggtatgcgtcccaagcacttggtttgtttctttttacgtatattggatgaatcaccggagtcaaacacaacttagaaaaagacaaaataattaaacaaaaatgaagaggcaaagaacaaattacacatgtttaactctttgaattaagaagaaagataagtaatgggggaaggagaggagcgaaacctgttggcctgttggcgataaatttataataggcttctaaatatctgcacattgagctgcaaaatagggaggatctcaagccagcagtgatgatgatattaccagagacaggaagcccgcaagcaagaaaaatgccctgtgagaaatccttaggcagtgctggctactggcatgggtagttcctctttctccttttataaaattcatatttgcaccctgttcttcatgcctggcagctcagctttattttttcctatttgagaaag

SEQ ID NO: 24195 - DNA, 1483 bp, Artificial sequence
  DNA replication origin
tttgatgtccttgggcagtaggtagtccgaggaggactcggggatgggtgcgagcagaaagtgcccggacatgctgagcggccgcatggagcgcgtcccggggtccggcgcgcaatccgagagggctgggcctcgccgcacccggagccggctcgccagctgggagtgcgggactagaggtccgggaccgcggcggctgcctgcagaactgtcaaggcccgcggcttttaaagggcttggtgcgcccgggagcgcggcggccgtcccagctcctcctcgtctccgccccttcccggagcggccgggaggggcgggagcagaggccgcggagctgactatcgccgaggctgtgcgcttcgccgggctgctagctgctcgcggctccaggcgctctgcggcaggactgcggctccggggctcagaccctggagatacggccaccgtccagagcgcgcgagtggcctctagtcaggcattctgcgagtctcctcgccccgcagcagccagccggagtcactagacctgtgggtgaacttgagataggagttacgagttgacgagagaagaagaaaaagtgcaatcagttggatgtttctgcaacaatgggacagattgctgtaaaacgctgccctttttatttttaaaaggtgctaaggggctgggcgcggtggcttacgcctgtaatcccagcactttgggaggcccaggtgggcaagatcatctgcggtcaggagttcaagaccagcctggccaacatggcgaaacgctgtctctactaaaaatacaaaaattagcggggcgtggtggtgggcgcctgtaatcccaactactcgggaggctgaggcagcagaatcgcttgaactagggaggcggaggttgcagtgagccgagatggcaccactgcactccagcctggaccacaagagcgaaactccgtctcaaaaaaaaaaaaaaaagaaagaaaagaaaagatgctaaggggtaacattaatatgggaaaagggcggggggcggggggcaagagctctgaattagtatcagtggaggcaactgcagtcactgtgaccttgctagggatagatgaagtccccttaggggcagtgatggttagcatctcagtatccatgcccagcccctcctctgcaggcaggggttgcactggctcattcctgaacactcatgagcactccactggctgggggccctggccctgcactaagtgtccatcattaatactatcctatgtgcttgagtcatgcatttgcttcagtatccaaatatttacttctaggtgcatggtggggtctagggtggggtggggggcagtgtgaggaacaggacacagagctatagactggttcttggatttctggagcccaccagaaatagcacagcagaagcctcaggactttaaccttgaacagttagaagaccttcatgcctctgacctcctgtgttccagcctcacttgcctaatcgccta

SEQ ID NO: 24196 - DNA, 1737 bp, Artificial sequence
  DNA replication origin
gccctggctgttagcatggcttgtctgcatggatccccaccaccgcatgatttaacatgtaaaaaagcaagcctagggcagaggaacgagggaggcctgtctcatcccagacaagcccagggtctgtgctaggataatgccaagcacagctataggaaagtgtgtcacacctgaaaaagctcacaggtgccagggcgaagcaaagaaaacagctcaacaccctaaatgcaaccaccttttgtaacccaggagttgggagggggtgactcattttgaacctatagtaaaagccaaacacacaccccaaataaccaaataaccagtttggtgcatcaaactatgaaaagcatactaccaaggcgtccaggagggaggcaccgaggcctccatgagagtactaggagcaaaacaagcaaacaggaacacagtgagctacataccaccaggggcggagccacagaaccttgcacagcggcaggcgtggagtaggctcaataaacatttgtcaaattaatctgcatgagagatctgggacaacaaagatgactccaagtttttcaacctgtattaaggaaactggtagcgccagtatccaaaatacagcacaccggtctaaaaggaaaggcaagctcttacgtggatctactggtaatacagagcccagaatttagaggctagaacgggcaagaggaagggcagaggggcaaagcataaaggatgttatgagtcatgccggtggctatgtaagaccgcaagagggagctgggcggggtggaacatgcagagggcagaagaggatccaacgaaaagggcagacgaggaagaggaaaagaaccagagaaggtctcaaggaagaagcggtcggccttccagtgctggagaggttaaggaatgaggccccggaggacacctggagaaggtggcccataaattagaggaggtgcaaggggcaaaggtatggactgcagcccagtggtttaagaaattaagggctttaagctgaggcagtgtgaagcctagctctgccaaaaactgggaagctgggcagattccttgacctccatgaccctcgttttcctcacttgtgtgtgacatgggctgccacgtcatatcatggtatctgacattctcctgccctcaaaataaaatccaaactcctaatgggcctacttctcagacctcatatggtgatctccgcacccaaacacacccacctgcctcccaccccaagggtcacaggctccctttgtgttctctctacctagcacaaatgtctgcatggctagatccttccttcttacacggctcacacagagaggcctttcctgaccacaacactgcatgtcattcccacctatcctgtggtcggctcgacccaggaacaaaggtccatggcagcagaaaccttgggtttgcctgttttgctcactgctctctccagtgtggagttacgaagaaatgagcacatgctgctttcacgacccctggtacatgtaacccatcttctgtaccagctccaggggccagtgtttggcaggtgtctagtagcggtgggccccctcaaacctcacacttatttgcagattacgggaggcacttggctggccgagactcacgatcaatgactgcttagtaaatcccgagcccctgccatggatatcaaggtcgcagaacgaaggtcctacaacttcctgtctacttcctcagctccttccccaagtcctggatgtcaaagct

SEQ ID NO: 24197 - DNA, 1053 bp, Artificial sequence
  DNA replication origin
gcgcacgggctcctggcgccgctgctcggcaccagctcccgctctccgcggcccgctgagggagcggagagcctgcccggctccgctccgccaggaatcgccgccgccgccgccgccgccgcggatttcctggcaaaaagcaaactccggccaagacttcacttctcaaccgcccctgctgccttcccgggggcagcgccaaggccgagcggcccaacccgcacccgggccaatcggaggtagcacagggcgggaggtgggcggaccagagggcggctccacctatccgagagctcgggaggcgggccagaagggacccgtcactcccgggttagagtgagaccactccgccctcgccgcccgcctcccccactcgccccgggctgtccccgccgcccgcctgattcccctgcggaagccccgctggctaggtgtctgcgcgcacccccggccgccgccaagagtggcacagctggggaaggagtgaacatccagaggaatcgcggggcggggtggggggaggccaggagaacaggtggcgcagggaagcagaaacgtagttgcgctggacagctggagtcgggcagggtcggggccagcggcgaggggacaagaagggccgattcgagaggaagcgcacctgagggagcacagcgaaggccgggacgcagggagctggatggagagcgagcctgggcggcgaaaggttgccgaggcgggggctgggcgcctgggaacaaaggtgagggcgggttccgcaggtgaggaggtttgaggagccactggggagaaagggaaaaggaagtctacagccggagaggacgcgctctgggggtagaaggaatcctaggacggaaaggataaggtgggaaacagttttctcccaaactctcactcccccaaaagagacatttctttcttgccctattttgacccagttgaaaatgcaactgcaagctccccggtgaaacaaataccgccttcaaccttcgtattctgtggtgactcatctcgcacgtgacccccctccctcttcaaggtgtgttgaccgac

SEQ ID NO: 24198 - DNA, 991 bp, Artificial sequence
  DNA replication origin
gcaggtaaggccgcgccccttcgccatcacctggggaaaggtaccagagttgagccggggcgcccgcaggcctgtctgggcctcggggtaaggcggcgctggccccgccccctgcccctcccgccgcgagtggcctcgcgtggtcgcccaggtgagccgcggggccgcgagccaccgctcaccccgcgtcggggcgggggctgggggtggagcctcatgccccgccccgcggctgggccctgccgcgccgctgcggctcctcctccctccttccgtcctccgcgccttccgtcggtcggtccttgcttcctgcttcgcctccgcgcctcgcgctatgggacagagcccccgatccgccagcaccacctgaggatccagaaaccgccccagcgatggaagaggatcaggagctggagaggtaacggccgaggaggaggcgggcggagcgggccgcgcccaaggggagcgggtggccgaggggcacgctgcctggcctggcagccggggcctgactcggggcgcagagaagaagcatggagagagaagtggggaggagacatgaatgtgtttcagttgagaggctgagaggtacactagctatcaaggagggaagacaagttgggagaccagagttaagtatccgaactgcccacccccgttacaacagcagtgtgtaaaaatcacgccccgggcctctgctcctgaggacggtactcgtgcctctgtccctgtaactacggctcaccttctttctatgtgcagactgctcctaaagccactctgtgcgctgagctctttttctccctgctgcttgactcctgaaccttccattctcctagtttccttctcttgcaaaatggaagccgtagttgggcctgcacattgatcatctgtatcctctatttttatactagagcaatcgggatttctatgcctttcaaccctctcttcatcctctagcaggaccagtcctattctaatcctatccctt

SEQ ID NO: 24199 - DNA, 1143 bp, Artificial sequence
  DNA replication origin
tggagagccgaaaggtgcggtgggcgcagagggcgggctggctgcggggcgaccgcgcgccggggccatgccgcgctccttcctggtggactcgctagtgctgcgcgaggcgggcgagaagaaggcgcccgagggcagcccgccgccgctcttcccctacgctgtgcccccgccgcacgcgctgcacggtctctcgcctggcgcctgccacgcgcgcaaggctgggctgctgtgcgtgtgcccgctctgcgtcaccgcctcgcagctgcatgggccccccgggccgcccgcgctgcctctactcaaggcttccttcccacccttcggctcgcagtactgccacgcgcccctgggccgccagcactctgctgtgtcgcccggggtcgctcacggcccggccgccgctgctgctgccgccgcgctctaccagacctcctacccgctgcctgaccccaggcagttccactgcatctctgtgggtaagcggggccgccgcgcagagggaccgggcagaggtgatccgaagcaggatggagagccagagatggaggaagagggaccctgggctttctgggggcggtgagggtcatgtcggggactaaggggggcgcttggggtggagtgaggatagagggccgggacacaacgccaggaggcggatgagggcagacgtccaggtcctggagtgtgggccggggtaagtgagggctgggatccaaggctctccatgaaggggaaggggttccagggctgcatgactccgggagaatcaggatctcggagctggacaaggagcgctcactgtagctctgctgtggattgtgttggggcgaagagatgggtaagaggtcaaagtcgtaggattctggcgaccgcctaccaagggattgggtccacagcacagaggtctgatcgcttccttctctgctctgccacctccagacagcagctctaaccagctgcccagcagcaagaggatgcgcacggctttcaccagcacgcagctgctagagctggagcgcgagttcgcttctaatatgtacctgtcccgcctacgtcgcatcgagatcgcgacctacctgaatctgtccgagaagcaggtgaagatctggtttcagaaccgccgagtgaagcacaagaagg

SEQ ID NO: 24200 - DNA, 1358 bp, Artificial sequence
  DNA replication origin
ggaggtggggacgattgcagcgcagttcagccctcgtcctgcctcaggaccttcgccttagcaagaaagtgaactaggaagaagagagtcccgtggaccccaggcaagctggggtccccctccctctcccgcacaaagcccctcctggctgcgcctggggtcagtgtcaggcagggctggccagaccccgcagatgggcgctgaggattttcggggtgggccgggggacgccggctcgagctgcttccccctactcccggctgccagttgaaaggaaaaggcaactatttgcggtgcaggtgtgaccagaagtggctgaggcacggcagcgatgacagtgagtagcggcgacgacacaggccgcgccggaacttgccgctcgcgcggggccgcaaaggacccgggggctaccccgtgcctccggctcccggctccgggaaagaccttctgttctctgccggcgcggagggccgcaggaaccaggcctctcgcctccccaccagctaggcagggagcgcccatctcctgaaaaattacttcctgggaagcggtgcggggagacagcttcaattgctttcggttggtgaaaaacgaattcgcttctcagattgctctcctagctgccaggctctgacgttgagaggccggctttcagcctcgcggtgagcccccgccttgccccagccccttcctctttactcctatcctgtttccacaaccagggcagccggacactgctgggttgggtgcagtttcctttccctccctgcctttctgcacctacctggcgcccctagatgcctgcccttccttaacgaagcgcgggaagtgaggggctccggggctccgaaggcgatctggggcctgggtccgaggcacccatgtccctactcggcttcctcgatgtgcactaccaaggagtcctgggttcccggatcccctgctggaggaggatctgtagtgtccgaagccctgagcaggactcagcctcggctctctaaggatggcgctgggagcgcgggctcctggggcgaagatgggctcagcgaacagggaaggaaggagtgtacactcccaggagagctgggtgggaaagatgcttcaaactggactagagaagcactgctgtgagggatgggctcggtagctccctgatgtagtttagtccgacccgggataatccaaggcgccgggaacagagagaaggctcctgggagcgcttggaggtaaggcggccgggtgagaaccggaaaggagaaaggggtggggagccaggcttacctgcccactggcctttccacgcgtgagctttggtagacttcatccatgggaaaggcagctggacgcggttgggctcc

SEQ ID NO: 24201 - DNA, 1754 bp, Artificial sequence
  DNA replication origin
gaaaaaaatagaccctgatcagcctggccatcatggcgaaaccctgtctctactaaaaatacaaaaattagccgggcgtggtggtgtaagcctgtaatcccagctactcaggaggctgaggtaggagaatccctgaaaaaaagaggaacccaggaacgacagaatgagaccctctcaaacaaaaacaaaaacaaaacaaaacaaaacacgctaatttaattttaaaagtgaattcgaatcatcccactgccagaaaggtttgaaacaaagtgaggagaatcagttttcatctcttcccatattatcagtatttattaagcatttcccacaaacataacccgagcacaaggcccagaccttgaaaagaagacagacctgggatgcacagacctgtttgtaaataactgttaggtaatttttaaaatgttaaataagataactggttttccaaaccctccaatcacatacgttttcataatttctaaagatgtgaaggtcatactggctcgtgaatagttgttggtttccaaggcgcaccaggccactgtgcttgtcttcagcacagcctctacctcggaacaggaattacgtccacatcctaaatagaaagttccgaatatctttggtttagtggtcacccaggggtccatctttctccctcacccccagatccaggcccgtccccccttgccttccctgccagcagtgtggaactggagcacagggactcttgcactgctcctaagccagccctgccgctgctcgccctgccttgcaagatgttctcttcctcagaagaaaggggtgcaagttataagatgtgcagtagtgaagtgtgcagctagagaagaggaagaggagggatgagaaggggaggtagaaggaggaggaggagaaagaaagaggtcaggaagaaagaggaggaggaagaggagggagaagaagaggaggaggaggaagaggacggggaagaaggggagcaagaggagggggaggaaaggagagcacgtggaagaggaggaagaggaagaggagggagaagaagaggaggagggagaggagggggaagaagaggaggagggagaggagggggaagaagaggaggaggaggagaaagaggagggggaggaaaggagagcaggaggaagaggaagaggagggaaaagaggagggggaggaaaggagagcaggaggaagaggaagaggagggaaaagaagaggaggaggaggaaggggagggggaagaggaggaggaggaagaggaggactcactgtattccactggcatcaatttcacgggatctttgaaaactcaaacatttcctttcaattatttctaaacttaaaggggtcgcccgagtaagaatggctttatggcagattaaggtactcggcccagcttccccgctgtgtgtgttagggagccttccaatgtgtatggtacagtttccattgtctttgaagagccggcttctctaaacaggtcccaaggtggagtgctgtaggagggcagggatgtgcgcaacagccacaaacaacgccaatccagtatcactaaaagagggccccaatactacaaaaaccaatggctctttttcttccggaaggcctgccggcatctacccgcggggccccaactggcacatgcgcctgagagagcgggttttccccttcggtctaaggtgggccccgcaattgccgccccattcaactgccagggcgggtggtccacgcccggggtcctcctaggccct

SEQ ID NO: 24202 - DNA, 1228 bp, Artificial sequence
  DNA replication origin
atgtccgcggttgtttttgtccttatacctgaagacgccaagcttttcaaaaggtgcgcgcaactacggcgcggaggtgcggggaacctgggccgcaagcgccgaagccactcggtgaagaaggcctggagcactggccttcgacccgtcgtcgaagacctgggctgagcgatggtggcaccaggcccaagggatttgattttcaaaaggcggaacgggagcgctggtgtgttcggcccgtcaaagctgcagccgcccgcggcctccggcgtctggcctgtctcgcctgcgcgaggcccccggcaggcggcgctgctgctccggctgagcgggcggaacggcctggaccccgcggcctctgttcccagctctgcggccgatctgagagctgggactccgggcggggagcgggaggctgagcaggggcagccggagccgccgcaggaggggctgaggggtgccccgcggcccctttcggccgcctcggtggctttccgggcctcctggccaagggcgctgggctgcgggtgggtctcggggggagtcgcctcgcatagcaggcgcgagctaatctactcctttccactctctcggtggcgctgtggctcttaaaacccccgctccttctcttcacagccatcagaaggcgcggcctgccacctggacaaacgcggtctcccccagagcccggttgcgccccgaagccgggttccgtcccatctccgacaaagacacttcctgatttgcccctcgccagactccagcaattttctgggtccccgggaagctgatttcgcctctgggcttccatgattagtggcagctggagcgctgctccccaacctgggcccactttagggtgtgtggggcagggaggagggtggggtcactcttaatctcgtgtcacagctaaataatttactcaaggtcttctcttcctgccagttcccttccctgttccactgcccttgacttcctgctttgtgaagccccggggaaaggccaactcttaataaaagttaatattaatagaggccccgtgcgccgggcttctccaacacctcatcttcccctctcacctccacccactccactcaagcccctttcctcggggaattctttcaaaactggagatgggacttgtactttggggtatattcaggaaacaaggacgcttgggccacattgtgtctaaaccacatcctcctccagtttccatcagcgcgga

SEQ ID NO: 24203 - DNA, 877 bp, Artificial sequence
  DNA replication origin
aatattctgagtctcaacaccgtgttcaggcgtcctctttccaagagctcctcattcgcaaccccgggacaccttcgggaagctccggggaatgtcggcgtgagcactgctggacgccggcagaatcgcgtcctccggcacttgctgcggcatgcattccttgcgtggctcctggccgccgaggagagagggaggctcgaaccttcttgggctaggtctaggccatttatctccgctctctctttccccatctgagccatctaagaagagaagtgacctgggggggtcggaggatggctaggctgtgtgtgggaccgggtttggccactcgggccaattcaaggtacagcgagcaggcagaccagggagagctgctgtcgctgggaagaaggtgctagccccagctgctaaggcgacgggggcgcgccccgtctctgaacctctgacctgtgaaggggtcatttcaagcaaaagctggaaggctaggggcaagaagcctaggggcaggcgtctgcggagagagcagggagacggggaggaaaccctggtgggaattaagccgccgctccaggtaggggtcatttctcccaaagcttcctttcaagggtgtcagggatgtctgtgagtgtgtgtgtgcaactgaaaaagatcctaggtttgccggactgtggggctcattgactctgggtctgccccttctggtgttcgagtgtgcctagaggtggcaaggaagtgcggtggggagagtcctagttgagtgccccttttaaagtctttccccagccctcagcgcttccgcttttcttgcttcgctccttgatgccccaattgggcaggcacgctggttatgggcactttgcagaagtttatagccaat

SEQ ID NO: 24204 - DNA, 837 bp, Artificial sequence
  DNA replication origin
cgccagagtggcgcacggagctagggtacatgctcacgtccttgtccaggaggtagctcacgtacatggtggcgagggtccgggagcagacctcaccatgctgcctggggaccgacgctggaggctgccggggggcacgaagggaaaggggcgaggggactcgaggagcggcgggtggctgcgccccagcccgcggtgctccgctggctcctcgcggctcttctgcctccgaggcggtccctccctctggcctgcctcctccctccctccctttcttccttctttcctcccacctccttcccactaggctgcagaggcggggaagacccgccacaggctggcgtgcggagccccaggccggcggccttccgtgattaacgagtgtttacaagactctattagtaatgacacagacaccaatggttggagacgtcgaggcgcagcgcgcactctacgcacaacccctcgaaacataatttgcattttaaaagataaaggggagggaggctcgtgagagggcagcgacctgacacagctaaatattcaaacctttattgttaagagcttcctccttccaacctggtgcactttaacctccaatcacaggttcaaagaatgaaatcaagagacttacaaaagagaggggaagagaaaaggctatcttggtaggaatctgagcttggagacaggagcagtggttgtttatgcatttgcagggaagagggcggtcaagaaactccttctgtcccaaagagaaaagaaaagagaaccattgctttgatgagaacgtttctgaccaacctggtaggtgacaagcagagagccctaagagatggg

SEQ ID NO: 24205 - DNA, 1390 bp, Artificial sequence
  DNA replication origin
gggcgcggcctacgcgccccctcgagtgcgcggtgcgggacgggcgcggttgacgcgctcccgccggtgtctgtgcttctccgcaggccaggagggcatcctgcgctgccacccggacctggcgggcagcgagctgcagcggggcacgctcacggccgagtcgcagcgggaacagagcggcgcaggcctgaggagcctgggcgcggacgagcggctgcggctggccgagctcaacgcgcagtaccgcgcgcgcttcggtttccccttcgtgctcgccgcgcgcttcagcgaccggacggcggtgccgcgcgagctggcgcgccggctgctctgcccgtccgcgcaggagctgcgcactgctctgggcgaggtgaagaagatcggcagcctgcgcctggccgacctcctccgcgcagaccccgccaagctgtagctgccgcgcgggccagggacccgggacgcacaaccggacgcgcgggggccacggcccggagctgtgcgtcctgggcgggaggcggactcgggcctggaacagcgtccacacacgtgcacaaaggaagtggagaattgaggcaatcatacgagtaatgagtccttttgtccgcccacccacacgcgcacgcgttgccaaaatatccatattgtttagtgctttgccccggatttatccagctcactgcttcaattcttcactccctttgcggcccccgacaccaccggcctttgtggattccaaagcgtttatccagttctccccaaccctctcctgctaagcccgaactgcaaagcaaaacggacggaaaaggaatcttttatgccacagcggtttgtctgtttttctcttttcccacttcatttgctgcgcccgacctttacatgtgagcggaagcggtgttctcgctcttgggcactaggggagcagactgggagccaggaaagtcaaacgctggcctcggtccggcctggggagccggggaagccgcaggaaggaggcggtgggccgggaagagccctgcgaagggaagagccaaccgaagggttgggaaggcgccccgtggggacggacggaatagttgcagccatcgctcctaaaaggcgggaggcgtccagctaaagatctctcccggaggtcggctttgggggggtggctcgactgccccgggaaacccatcagttattaaaatagtaacattgagcagcgctgggtatttggaccccagaatgaagcgagattgcagtgtcgattaaatggagggaagtgcccatagaaatctttgcttgtcagccctggagtttcagacccctattaggctgggcagcttcctgtaccagcagccagactgtccactgggggaaagtacattagcatcctgcggaggagcccaccaca

SEQ ID NO: 24206 - DNA, 1257 bp, Artificial sequence
  DNA replication origin
gcccgcgcggcagctacagcttggcggggtctgcgcggaggaggtcggccaggcgcaggctgccgatcttcttcacctcgcccagagcagtgcgcagctcctgcgcggacgggcagagcagccggcgcgccagctcgcgcggcaccgccgtccggtcgctgaagcgcgcggcgagcacgaaggggaaaccgaagcgcgcgcggtactgcgcgttgagctcggccagccgcagccgctcgtccgcgcccaggctcctcaggcctgcgccgctctgttcccgctgcgactcggccgtgagcgtgccccgctgcagctcgctgcccgccaggtccgggtggcagcgcaggatgccctcctggcctgcggagaagcacagacaccggcgggagcgcgtcaaccgcgcccgtcccgcaccgcgcactcgagggggcgcgtaggccgcgcccggcccccctgccccgccccgccccgcccggccccaaagaaggctgcgggagggtgaagtagagtacccaggcggtgatgtcctggcggaacaggggcgcccttggcgcgcccctctaacaagtcctggaccttgcgcttctcggtccccactacattcggtcgggaccaggatccaggggcggggcgggaagtgacacgtttgtcttttgagaccttgggtcaagaagagcggaggagagagagggcggccgctgaggctcggaatttacgactaggtcgggagggagcagagacgcgataaggatcctgagcttttcctatctttcaaagtcctttgctctcagggggggctttgatgtctaaaggggccggacgcaagggcctgaagacttcctgcaaaagctctggaatgggtttcgttctgctccaaaggagaacggacaggggcggggtgcatccatagggataacatccatggggctcggcaaataaatgccctggattttgtgaccctaagtgtgagttctgggtttctggaatcaggcatccaaagagccttgcagatgattaactgcaaagaaacccacctctagccagagttccacagccctttgaatgaaagtggctttcctctatttaggaaactgcacccacccatcccccaccggcccgggacttattccccttctccgactgtagatcccagaggccccagagaacagcgtttacttgaaggaaatctttgcataatctcctaggcctaaaattgaaaaactctggcgagttacctgtgattttcagtcccaggga

SEQ ID NO: 24207 - DNA, 957 bp, Artificial sequence
  DNA replication origin
agaggggaggggcgcgggaggcaatggaaggagcgagcgcggggaggagcgaggcggctgggccggaggaggcgcgcgcccgggtccacactgcggggtgggggctgagggaccgcgaggggctgcgagcgagcgagcggggccttaccgagcagcggcagctggccgccgtcgcgcgccaacgccggcatggcctccggagcccggggtccccaggccgcgccggcccagccctgcgatgccgcctggagcggcgcgcctcgcgctgcaggtggctctcttaaggatgcgcgtcaccgaccgcaaattccctcggactggtgcaaagtggaaggggggaggaaccctctccccagaggcagggaccgaggcgggagcggagaggttgggcagagccgagcagccggtgcctggcgcagcgctgcagccgagcccacgtgcccgccgcggtccgcagcctgtgctcggcggcccccggggctccccgactgcggcggggaagattgggcgcggtcccgccggagaagttgcactggctccgcggctctgccgccttgctgcccctgtgagtccccgaactctgtcgtttggatccggggcgtggggactgcagggagccacaaaccaccctcctagtgcgctgggatctttgaggccctgagaaaggcgctgaatccgctcggcacgctggcaactcccgccagcgcacaggcgagcattccattaagaaccattccattcttaattgtggactgatttcctttgtctctgcctccatctcctaggatgctcaggacccagtcagcggcgggatcaagaaaaacaggcagggtttcaatgtcaaccaaggcaattagggaggttaacaaacagccttcaaaacaaaacacacagaaaatacatcccagaggatgttgcgaatcatccgctcaatagttcttgttcttcatcgcataa

SEQ ID NO: 24208 - DNA, 1692 bp, Artificial sequence
  DNA replication origin
ggaccctgccgccggggctgccccgggcctcggcctccatagcaacagcgtccccctggctctggctggtgcacccgtggccggctttccgccgggagccgtcgcgggcgggggagctgggccgccccccgggcccaagaagccggacctgggggacccggggaccggagccgcagccggcggaggaggcagtagcgggggactcgatggaccgcggctggcaagtgagtgtttttcgggcggggcgggccgcggcggcggagggcaggcctgggccggatgaggccctgctgccgacgggagctgagcacggcccgcgggctccccccctcacctcccaaggcggtctgagaggcctaggccgggcctgagccctccttccttcttcctgcttcccctccccactgccttcggcaagtcggagagcgcggggaggttgggttcccgggaacgtgggtgggaggactggggtgatgtgaagggggggcggggaggaagggggatgggctgtggcgtgcggagtgtgagaaagggggtgtcgtttccggggggtgtggaaaggggctgggtttgcaggcacatgtgttttgcgtgtccttgtggagtggcgtctgcagagtgttgaggttccctagtggggaggggtgtgtttgtgtgtgtgtgtgtgtgtgtgtgtgtgtgtgtgtgtagggggcgggaggtgaggggcgggcttaaggcttcgtggagtaggttgaaagaacggaaaaagtttgtagaaggcttgcgggagaaaggttttgcaggcaggaaatgctttctaaggattaggagggagcggactgtcgcgttcaaagtgtgctcaggtttaatcgagagtttagagtagggatttcacaaagacgcatttcatctgagtttccctgaaagctagaataagtttgctggtgtcagctgggatcctgtcttctatagctttgtatcaagcaaactcagcattgtgtcttgaatgcatgtcatgtgcagcctgcgtttatgtgcgactgagcacttgggtggggacatcttaaggctgtttatatttctttttcatgtgttgttgttgttgttgttgttgttgttttggagagagtctcgccctgtcgctcaggctggagtgcagttgcgcgatctcagctcactgcaacctccgcctcccgagttcaagcgattctgttgcctctgcctacggagtagctgggactacaggcgcgcgccaccacggccagataattttttgtagttttagttgagatagtagtctcgttgtgttggccaggctggtctcaaactgctggcctcaagtgatctgtcctcctcagcctctcagtgtgttgttatctattgacctgaagcttgttagttgttagtggagtttacaattgaatgtgagcgtaatctgttagagaatgttgcctttacgaatagagccggtgccagatgtccctgttttgtttcttagtatattgagcgtttctaaaccaaataggagtcctactttcttgggaattctggagaactagatcttaaaataatctgataggcagttcaatttgtacatgagaacattttgtctttttcttaaacactgttaatgaacctgataggaagttttagcatttaattggtctatgaggattatttaatatcttccccggggttttgctttcttgc

SEQ ID NO: 24209 - DNA, 1020 bp, Artificial sequence
  DNA replication origin
ctgccgaggccctgggcactaggagcagcacgcaccgggacctgcctggcacccagagcccattcccagaggacctggggcaggtacgcagggtcccccggagccgggagcagaggctcctgaaagcctgccaggctgcccggggctgggctgaggccgggactttggtgatattgggcactggccgcgacctcgcgtcacgagagtgtaggaggggagccgatttggaggggactcgtgcctgcgggggagcaggaggatctcaggagagggccagcgccggcatcccatgacccgcttgagtccccaagccggactgtcccggggaacgctcggcgagcgcccgctcctccccgccgctctcggaccgcggggccccagtgcgctgcgctcagccacccgggtggggcctctgccgggagcaggcgtggtgcgcggtccagtccgtgtcgcggacatcagtgaccctgacccacaagggcagcccagggcccaaataccgttaacttactgacttacaagcctagcctttaaaatccgagcgaagagagggcgggcgattttgaccaaacgatgtggtttgaggaatcgatgaggtccgcccgccacctaagtcagccttcgctgggcgtttgggagacgggcggtggaacagtcaggggccgggggttttaccagcagttagaccgccgccattgaggggtcaaagccccgaggaacttgagggttcggactcgcagtctctgctcagtggggctgagtggcggagatttgtgcctcgttcccctgggcgcagagagccagatttcggagcgcctttcttttaagcatcgtggagaaaaggtaaaatatgaaataaaatatagtaatataaaataagtcattgcaatgattcccgggaagaaaagtcaataggatggagcgtagtacaacaacaacaacaacaaaaagcttgttaaacccaaaaagcagtaataattaaatattctttctcagtgggaagactaactagaccgtcag

SEQ ID NO: 24210 - DNA, 2016 bp, Artificial sequence
  DNA replication origin
gcaactaacaaagaagtcatagtcaataaattgctgactctaattaaaagcaacttttcaaaagagtagttgggaaatgtggaagcccacccttactgcagcatagttttaatataaatcttagattcgactgtgactctactaaccttaaataattgagcaacatgttaatatcattgattagcatcttagattataaagattgtttcagctgtccatcaaatacctgttctggctttacagacacaatgtagattcattgctggcagcaggtttggaaagtgttgtctctttatgagttaaaaatatcaaaatggcatttgaaaaaatgtattagcaaattaaacctttgtacatggtactatggaccactttcccccagagtcaaatgtgtgtctctcctgagaagccctccttgggttttccctgccaataaatgtgcctttacttctctgagctgatggaggactaaacacccctccagcactggaatgccggtcctgcagccacttcaagtgtccaccttcttatcacagtccaagccctttagaaggcaaagatgatggctctccatcagtgttttcagccctaacccaatgcctggcccctgttgaatgctgcagaaggacaatgctgacagcttctccttgaaagagggtgtgggagtgacaagcagctctcaggtgagaccaacagacactgtggctccgcacgtatgtcccaggctgtgttctgggctgggggaccagcaaggagaaggatcagctgtccgcttccagctgttctgagggatgatgctgtgggttttagaggaggcaggggtgcgggaggcagagaaaggcgccaggaagagtggtgaggagaactggaaaaacagaaagcgctggtgaagccagcaggcaagcaatgactccggcagtcttccttgcctctgaagcagaagggatccagggacagttagtggctcaggtcctgcggctccaggtgcccagacgtgcatttcctgtgtggagtggccggggcctctccttggtgtgcagcccagaaatgtggcaactttgggttacccaaccttcctaggcggggaggtagtccagtccttcaggaagagtctctggctccgttcaagagccatcacagtcccttgtattacatccctctgacgggttccaataggactatttttcaaatctgcggtatttacagagacaagactgggctgctccgtgcagccaggacgacttcagcctttgaggtaatggagacataattgaggaacaacgtggaattagtgtcatagcaaatgatctagggcctcaagttaatttcagccggttgtggtcagagtcactcatcttgagtagcaagctgccaccagaaagatttctttttcgagcatttagggaataaagttcaagtgccctgcgcttccaagttgcaggagcagtttcacgcctcagctttttaaaggtatcataatgttattccttgttttgcttctaggaagcagaagactgaggaaatgacttgggcgggtgcatcaatgcggccgaaaaagacacggacacgctcccctgggacctgagctggttcgcagtcttcccaaaggtgccaagcaagcgtcagttcccctcaggcgctccaggttcagtgccttgtgccgagggtctccggtgccttcctagacttctcgggacagtctgaaggggtcaggagcggcgggacagcgcgggaagagcaggcaaggggagacagccggactgcgcctcagtcctccgtgccaagaacaccgtcgcggaggcgcggccagcttcccttggatcggactttccgcccctagggccaggcggcggagcttcagccttgtcccttccccagtttcgggcggcccccagagctgagtaagccgggtggagggagtctgcaaggatttcctgagcgcgatgggcaggaggaggggcaagggcaagagggcgcggagcaaagaccctgaacctgccggggccgcgctcccgg

SEQ ID NO: 24211 - DNA, 1395 bp, Artificial sequence
  DNA replication origin
ccaataccaaaatagaagtacttagtggaataggagaatattaactagtagttttgtggggccaaatgttgttcagacttgtaaatgtgaggacgacctagacaagtcagcccattgcccaagcttggcatgctctgagcagacagctagcagctgcagaggtaggggtttctgggcagtcgggagccccttctgccaagttccccttcccaacagatcgagagctcggaggcttggcacggtcggtcccgatggccccagcgggagggtcacggttgagacagcagccccatctcattgtttaaggccggggcttcctcttttggcggagcgggagcgggagcgggagctgagcgggaaggggacggacgccgcgggagccttcgggatgtctattgctgccgctccctcccctcgccgggagcttgggtttcccggggtgtgtgcggattctcaataaaaagggaaaagcacgatccaagttaattttccagcgccgacaggaaatgctgtttcctgcatcgtacaacgctggtgccaacaagactgacacaggagcccattgtcccgcgaacaatgtggcgatggggaaggacgcctgagaaaacagaccccggccccgtgagcgcgtttgtttgatccttccccatagggttgtgtgaggtgtgtgtctgtgtgggtgggtgtatttgtgcatgtgtggtgtacgtctgtgtgtgagattgtgtgttgggggtgtgtgtatatgtgtggtgtgtgtgggagtgtgtctatgtgtgtctccgtagtatgtgtatctgtgtgggtaggtatgtgcatgtgtggtgtgtgtgtgtggagagtgtgtatgtgtgtgtgtctctgtggtgtgtgtgtctgtgtgtgtctgcatgtgtgtctctgtagtgtgtttgtgtctgtgtgagtaggtgtgtttgtgcatgagtggtgtgtgtgtggtgtgtgtgcgtgtgtgtatgagtgcgtgagtgtatgagtgcgtgagtgtgaaagtgtgtgtgtgtgtgtgtgaggctgaataggctggtaaaggcagggcactgtcccttcctgccctgcctctgctcccctggcgggctcccaaagtggcaaaagagacctagctgtctaaaacgttcaaaagaaaaaagagaaagaaaaagaaagggggaaacgggggaaaagaaaagcatggaacagaagaggaaattttttaaaagaaaggagaagggaaagggaaaagaaaataaaatctccccaaagtctccccagaggctcgtttcgaacccgcagctagccaagggcaaatgcatactcgaaagtgccacgcctctcgtccaccctgcgccgcgtccagtccacccccttcatcccgcgccccatgtccacccgccc

SEQ ID NO: 24212 - DNA, 1409 bp, Artificial sequence
  DNA replication origin
agtgcacccgcccagccccgagcgcccgcggagccgagtggagagcagcggccgcagcgcggcgccaggctcgggctgggctggccggcgcgaacccccgggggcgtctgggcggccaggccgggtggcggctgcgcacgtaggagtaccccctgagcccagccgctcggccggcctgacccgcgggtgaccggatacgagtaacgcgtgcgccccgatctgtgccctgcgcggggtcgggcggggaccggccgggggcgccgcgcgcccggtcgggttgactgtcgggggcgatttccgcggggcaaggcgggggcgcgggagcagcgcgcagctgcggggccattccacctgagcgccctgaggtcagggccggggcctgaggacacggcgctgggctccgggggacgcgggttcacgccggcgcccgagcgccacctccccgccctccgccggctcacgtagtcccggggttcggtacgtgaagtgccggcgcgaggctgctcaggccaccgcatgggccgggcgataaacaatcgcacaggatacacaacaccctggactgtcacaagcccctcgcaggaaaagataaataacatctgaggcgctgcggcgcggcttccccgggctgaacaaaaactaggaggtggggggcggtggggcgaagtaaacaacagaaccgaagaattgccgcacggagcctgggccggcggagaaaatcagatgcagtctccttccctttggtgactatccgtgggggtttctcccggtggaaatgagcgacacacacaccacaccacacactacgttcaaactttgtccttgaaagcgataggcagctgcctctctgggtaagaggcgcatttccccagcactgcaggaaaccttttggagaccaagtggcttttctggacgaggaggctgcagaattttccgaggatacaactttttcccaaaggtttgctccttgggattagagcaggcagcgacccaaaccacccttacacccgtggtttcatgtcaatttctaatataaaggaaatctctacccctgtttaaaaagaaggggaggagcaccaaaatccaaaccagagaactacagatactccatgggcacaataaaatgtctgttaacaatacatacgggctgtagtggttcacgcttgtaatcccatgctttagaaggcagaggcaagaggatcgcttgaggccaggagtttgagaccagcctgggcaacacagcaagaccccatctccacacaaaaaaattaaaaattagcggagcgtggtggcacatgcctgtagttcctgctagtctggaggctgaggtgggaggactgcttgagcccaggaattcgaggctgcagtgagctatggtcgtgccactgcactccagtctgggcaacaga

SEQ ID NO: 24213 - DNA, 1076 bp, Artificial sequence
  DNA replication origin
ccggcggccgcccagcccaaccttcgcagcgcgccacgcagccggcgcgcctcgcccgcgaggtgccgtccgcggtgacagtggccgggcggcgagcgggcccgagcggtaggcggcgcggggcagctgatgcgcgcaccccctcccggccgcccggagacgcactcgccgagacccaggcgcctcctcccggcccgcgctccgcgccccgcgccccgcgtcgcagctccgcagccgggagccgtagcgccctctgccgacggcccctgcgcccgctcctgcgcgcgcgcctgcccgccccagccccagccccagccccagccccagccccagccccagcccccgcccccgccccagctcccgcctcagccccagccccagctccagccccagacccagacccagacccagcctccgcaggcggtgggcgcggcgcgggccgctgcccgctgcgcggctggtcaccgtggtgccctagcatcggaccccaggagaaaggagtaagaatgagttggccgttccagggcaggcctccaggaatgggttccgctgttttccgctcagaacagaagagggagccgcttcgaattaggcgcagcaggaggcattggggttcagcatcgggaagaactttggaggacgctagggtgcctgattcataggagcccaaagccagtctctgaaaagatttgcgcaaaaggcaggcgtttctttctagaagcaagcttatttctatgtttaatgagcaccaaatgtgcctccccactgtccgaggggttccagcgagccttgactgctcttatggtaaggtaaatagattaattaatgatttctcaaagacctttttccagtcctacctgaaatgctcagactccctcacgcggtgcacctggaggtttgaaaaggcaagcgaaaccagaggacttctgcagactgattcaaacagcaatggaataaacatttaccattataaagatgaaacgatgttgctggtctttgcactatttaggttggcgttttttgtttttaggggatgtctttccaaaccactgtgttaaccaatactttatgacagt

SEQ ID NO: 24214 - DNA, 1166 bp, Artificial sequence
  DNA replication origin
cccggctgcggagctgcgacgcggggcgcggggcgcggagcgcgggccgggaggaggcgcctgggtctcggcgagtgcgtctccgggcggccgggagggggtgcgcgcatcagctgccccgcgccgcctaccgctcgggcccgctcgccgcccggccactgtcaccgcggacggcacctcgcgggcgaggcgcgccggctgcgtggcgcgctgcgaaggttgggctgggcggccgccggccccgcggcttctctttgtccaggcgaggcggctggaggagcagccgcggccgcggcggagccgggagcgcctgggcgtcgtgcgggcggctccggtccccggctgcgccccggccctcgagcgggggcggcggcctgggcggtgcctgcgccgaggtgagtgcgggggcgcggagcggagcgcagccgcggcgcgggcgtgggcgggcagaggtgatagcgagcgccggcggctccaggtgcgggggcgcccctcgcgctccacctgcgccgccgccgccggctctcagggcaagtttatctccccccttctgcggaaacccttgaccgcttagcggagtacagacctgtcggtaaatagaaaactcgagctggagaggaggaggaagcagcgtggcggaacccggcccgagatgagcgtctccgtgagggcagtggtggcctcttggacattacatctttcttggctctttttgacccaggtgagcgaatcctctgctgcgcggtccggtggggtcggctggctctgctgccgccctctggacccgccggagacaggtgagcggagttggggagcgcgcagccgggctcggggcagcgccgggctggttcggcttctcgtctccagagcgctgatgcttcctgcccacatcacctgctctggcttagggactgcagctcttttggcaccttcgcttgctgccaggttcaacacccactgctttagaggcgttggtaggttagttaaggcgagttctcccctacccacccccagctttggataatttggtctgagtcttcgtcttaatttagtatgagtgtgttatttccttcaagctttataatggtaaagcagtgaagcggcttgctacatccatttttttttttcattctgtgcctgtgcacagaaggaattacaggcacaca

SEQ ID NO: 24215 - DNA, 2056 bp, Artificial sequence
  DNA replication origin
agatgggcttcacccagctaataagactcttcccatcaggaggaaaacagaatccatttgcttaataactcttacatgacatctctttctgcctaacttgcaaattattgctggaatgacacttttcacggaacagaattgtttcaaaccctccaagaggaagcagtccaagtagttcttccttgcatctgagttgtcttaacaccgaatctttgctgaagcaaatcccagggacgtatagttctccgagtgcagccaagaggctaccaaggtgtccgtgtagacacagcactgagcctggctggtaagcccggctggcaggatggctgctcgcagctccgctgctttcctcagccccagatggctgcttcgcagtgggaaggaagagtgatcctgggaggggaagaaaataggatttaatgttaattacctagttattttgccatgagaacagtttagagaatcaatgaataacgtgaacaaaggatatgacttgggcaggatggtggtatagctgaatgtagaagtgtggatgtgtgtgtgtgtgtgtgtgtggtgtgggaggtatggggggatgcgggtttgtgtgtgtgtgtgtggtgggaggcatggggatgtgggagtgtgtgtgtggtatgtgtgcgggtgtttatagtgtgtgcagtgtgtgggtgtgcatgtgtgtgtatatgtgtggtgtgtttatggggagtgtgtggtgtgtggtgtgtgtatgtggtgtatggtgggggtgtgggtatgttatgtacaaaggtgtgggtgctgtaaggatgggggagggcatgtaagtgtgtccttgtgtaaatgtgtatggatttggaggtgtgcaggcgtggcaggttatgagggtgtgattagtgtgtgtgggtgtgttatgcgtgtgtggtaggtgtgtatatggtatatatgtgtgtggtgtgtgtagtatatatatgtgggggtgtggaggaatgtgtgtggtgtgtgtgtagtgggtgtgtggtgtaggtttgtatggtatgtatgtgggatgtgtgtagtgtgtgtatgtgggggtgtgggaggcatgatgtgtgtggtatgtgtgggggtgtgtgtgtggtatatgtatgtgggggagtgtgtgggggtgtgtgtgacaggtgtgtgtgtgtggcatatagtgtgtgtatgtgattagtaggtgtgtatgtgtgtgtggcatgtagtgtgtatgcgattgtgtgtggtgtgtgtggagtgtggtgtattcgtgtgatgtgtgtggtaggtgtgtgtggggcgtgtggggtgtgtgtgtgcgtgtggtatgtgtgtgatgtatgtatgtgctgttgtatgtagcgtatgtgatgtgtgtggggtaggtgtgtgtgtgtggtaggtgtgtgtgtgtggcatgtgccatgtatgtgatgtgtgtgtggtgggtgtgtatgtgtgcgtggcgtgtagtgtgtgtatgtgatgtgtgtgtggtaggtgtgtgtgtggcatgtagtgtgtgtgtatgtgatgtgtgtggtaggtgtgtgtggtgtatggtgtgtatgtgaatgtgtgtggtaggtgtgtgtgtagtgtgtgtgtatgtgatgtgtgtggtaggtgtgtatgtgtgccatgtgtatgtgaatgcgtggtaggtgtgtatgtgtgtggtgtgtgtgtgtatgtgatgtgtgtggtaggtgtgtatgtgtgtgtggtgtgtatgtgatgtgtgtggtaggtgtgtatgtgtgtgtggtgtgtatgtgatgtgtggtaggtgtgtatgtgtgtggcatgtgtgtatgtgattgtgtgtggtagatgtgtgtggcatgtggtgtgtatgtgatgtgtggtaggtgtgtatgtgtatgtgtggcatgtggtgtgtatgtgacgggtgtgtgatgtttgcgtgtgtgtgtagtgtgtggtctgtgtgtgttcatatgcgttctatctgcccccatcttctttttccctccctttccccagtcccttctttctttctctctcctgaatactaacctggtcatgacatacaatttcaaaccagtggagg

SEQ ID NO: 24216 - DNA, 1040 bp, Artificial sequence
  DNA replication origin
aaggtctgtctcaaaaggccactactttcatgggggaaaaaaggtggccttccatcaagaagtacagaggcacagagccatttgggcacttccatatatcgagctggaggccttggttacaaagacactttacactcttctaaaatccacaagctgcaggcaatgtgactgctcaagtctggcacaagggggcccaagggccagggtgatgactcaaccaggggtttcagtccttcaggcctccctgacttcacaatcagaaagcctgagagccctgcctccccgccacacgcttctgcctactgactcaacagggctgatggcagaagttcccagggacctctgaggtcccatagacaaagtttacagcccaccactctaagtcttacagcaaaagcaacattacatggagaggggtgcggaaggaggcagggatcagaggttccccaggaggagggagaagggtggggaggaggcagggatcagaggttccgcaggaggagggagaggggtggggaggaggcagggatcacaggttccgcaggaggaggaagaggggtggggaggaggcagggatcagaggttctacaggaggagggagggggtggagaggaggcaaggatcagaggttctgcaggaggacagagtgggggagaggcggggacatgcggggaggagaggacatgaggctctaccacaggtgccattccttgggctgagcagccaccaactgcagaacagcttccaggcacagtggggaagttgcccagccaagaacaactgccaacagaggccccagtgcaggcatggcaaagaccacagcatcgggcctcagccaggttaaagcaacatgggagcgccgggatcccacccactcacaccacgaagaggcccaaacaaataaacaaataacccacaggccgaaagtagacaatgctgtctcaggaaggaacccagtgcgatctttacagcgtgaatctgttgctgaaatggtttgcagtcagtaaaccgttttcaacttttaatgtcatgagaaaaca

SEQ ID NO: 24217 - DNA, 951 bp, Artificial sequence
  DNA replication origin
cgtgtctatatgtagaaaaaatattaactaggcgtgatgacacaagcctgtagttccatctgcttgggaggctgaggcaggaggatggcttgagcctgggaatttgaagttccagtgagctatgattgtaccgctgcattccagcctgggtgacagagtgagacccctgtctctaaaaaacaaacaaatgacaacagcaacaacaacagaacactttttctgaagctagcaccatgcagttatgtactttataaattgctagtctaattccaagggaatagttcagcagctgatatttgagaaggacctgtagaaaggattcaaagaccacggacaccgtccactgtttttctgttttcctataagatagaagaaggatggcattattaatttatgccctgtttacctatcccaagtcccagatcactggatctttaaagattatgattctcgcttggcttttggtacaaaaggagacaaggagggagcttaaaaggtgagcacggtgtgattcaggactgaagcttctgccacttcctggggggtaactgcaaaagtgagccgttctgactagccgtttgtgcatttgccactgccaagggggcacaggtagattcaagctttggggctcttctgacaactggcaaggataaggtattagcaagggcaaaggaatagtaataaaataatccaataacaaagacatgaagatttataataatttttaggccggtgcagtgtttcaggactgtaatcctagggcgctttgggaggcccaggcgggaggatcgcttgaggccaggatttcgaggttaaggtgaactgcgctccagcctgggcaatagagtaacaccctgtctctaaaatgaaaagaaaacagtttaaaccttttaagtgcataccaaatcttttattttggagaaggaaaactggtctcgagttccgtgtgag

SEQ ID NO: 24218 - DNA, 1232 bp, Artificial sequence
  DNA replication origin
aaagtgaaggaggaggaggagaaacaaagctctgagaggaaaccattcccgggctgaggagaaggaggacccggcctcttccggggaccagccgaagtcggcgtcgcccggagctcgcgaggccggggaggggaggggaagggaaggcggagaccggggaggcggcggcggggaaggcggaggcagaagaggagtggcgaggagccggagacgatgcgccccgaccccagctgctgtccggaggcgcccgcggcctgagcccagaggggctgtggagtgtcccggccggccccgagcacccccgcgctgtcggtcccccgctccggtctttcgctttggcttccaactagttaaatgcccttgagcgcgggtttccgcggcccggctcttcgcccccgcggcgcgagttgagccgtttccccgcgctgtccgcgcgggcgctccgacagcggctctgcagggtccgcggccagcgtccggccaccgctcggccgccactcaaggctcacgcgtcgatgtgtagctacatagttatctgtgtacatccacgctggggcatttttctcctgcttaatgaggacttgactcgggagcaagtgtgaatcattgccggggctgggaaaggaggaaggcgcatttaaccccctcccacccctctccatgtccgtgtgtcactcggctcggtccacctggcgcggccggtcctggggctgctgctgctgttgacgacgacgacgacgacgggggctgcctctgctgtcccgggagtttcctcctgctccggccacacagctcctggggattgttcctcttcgaaccagaacctcggcctgaccggcactttggctccaaaataactttatttttgggggagaaagcacatcacgaaccagtcaaaatcgtggtttatttctgtaacgtgaagacttctgctcttttttctttgtttgtttttttcgtaaacatctgggtgtatatcaaacggcaagatgtccagtaatgtcccggcggatatggtaagtgacggataagttatgacactgatttaattgtggtttccaatcttatttaatcggaaagacggcaggcgtggggcgaagatttgctggggactgtcgaaaagccactgtgctgagcgatttggagaagttggagcttctggtttcccccttttaggaagtactgcttttaatatgggttctctcatttggtcgtgttttctaaagcattga

SEQ ID NO: 24219 - DNA, 1263 bp, Artificial sequence
  DNA replication origin
ccaccaagccctctgatgggaaaatgcgtccactgttttctttagctgaaaactacccctaaactactgaaggggaaagcccagcgctggggaaccggtgtccgccagggggagccgtggtttctgtctggggacgcagcgctccgggccagcacctggctgcgacggctgcgcggggacgcagtgcgcgcgcctcacgcgccgcgagctgactcaggcttgcaggttgcagcggcgctcgcctgcctgggcgctgcggctcgcggggtgccggcctgcagccaggggcacggggcctggcgcagagccaggcgacgagcgacgggggcttgaaccagcttgggccccgcgacctgccccggccgggggtggacggcgcggcgccgggcagcgagcacctgggcggggacgcgctcggtgaacggggtcacagagtcactaatggctcccgccacccccgccgccgccgccgcctcccgcagccgcccgcgcggcggaggaaatggacctgccagaggattgatctccctgggaaatggctgcgtcggcgctgcggttccaaggagtctggcagcctcgctgcagtgtccttccagagccatcccctgcagccctcgtgcctctctgccctttttttcctcttacaaaaacaaaatgtttctaaatttccagccagggggccctatcctcaatagatctgtcattcactggggcccttgaaatcatgggtcattgcaagcaattttctaaacttcgtttttagctggggaaactccccagggtctgtggtcaagggagagcaggggtatttaaaagctgacccttgtaacccactgctctcccttctcctttgaagataaagggagggcggggttctgaacactgactcgaggaagtttgggaattctcgtgcccacgttcctgctaaggagtggctagtggagcgtgagagcagttactgtgagccagacccgtgctaagccccacattgaaggcatttcgtgctccaaggaatccgatcactctcattttacagaggacaaaatcagggctcagcgaggcctggtcatttgccaaagcttacacacctaggctctgccagaggcacccttgtcacttaactccccgactgagtccccttaacctccacccagagaggagaggttcccggagtggtttaagagataacaactcccctattgacgggggcgaggagtaggcaaagtgggatccccaagccattgccagagacttccgggttca

SEQ ID NO: 24220 - DNA, 1007 bp, Artificial sequence
  DNA replication origin
gaaagaggaacgaggacattccaggacctgaggctgagtggtgagggaccttgtggcacgatcagatttgtattctcaggtcatcatgtgggcagcgtggaggctgttttttttttttttttttttttttttttttttttaagacggagtctcgctctgttgcccaggctggagtgcagtggcgccatcttggctcactgcaagctccgcctcccgggttcacgccattctcctgcctcagcctcccgagtagctgggactacaggcggccgccaccacacctggcaaattttttgtatttttagtagagacagggtttcactgtgttagccaggatgatctcgatctcctgacctcgtgatccgcctgcctcggcctcccaaagtcctgggattacaggtgtgaaccaccacgcccggccgaggctgttttggaggaagcaagactgagagcttggagaccagatagcagattgttactgtaatccgtgtggaagcaagtaatagcctgtgctaaggaggtgacgtagaaggaggtgcgggaggaggatgcagctgtgggaggaggtggggtctacagggcttgggtggttgatgggatctggtgagcgggtgaagcgcaggagtcaggatgaggcctggagtttagacgaccagctggacagcgtagccattggcctggagaaggaagagagaggaagagcagattccggtattggggtgggtagcttacctgtgcatttgggatctgctgtgatgagggtgactggagggcgcccgggtaaatggatgtgtccaacagagagctcaggacatgcgcctgtgcattgggagaccgatgggaccaagacacagacttgggggttggcagcacacagtaggctgcatagagatgaaactgcctgaggaaagtgtgtggagggagaggaaggcacccccaggctgggtcctgggggtgtcaaggtttggagataaacactggaggtgacagataccctaaacaccccg

SEQ ID NO: 24221 - DNA, 772 bp, Artificial sequence
  DNA replication origin
aggtctggaggtgctcatgtgccctgcctgcagggggaggcggggtgagtggagcacaatgggcggggggagcctggtgagggctgacactggcgaggacctgcgggagctggtgtgggatctggaacaatccagcgtgaggcccagggtatggacttggggtccgactgcctaggtccaaatccgggctctatccctcactagtctgtgattgggccagagccttcacctccctggacctccgtttcctcactgtaaagtgggacggtgtgataatagacatcttaccttcagagttgtgtggggagaaggaatgaactgcggaaagcctctagcagacggcccactgaaccgtgagcgcggtcctgctgactgaggggctctgcgcagcctcacggcctcgctgcgctctcaaggccgctcgtggttgtgtggagatcacagcaatgggggcgagagtggacgccggagtgcaggtggggctggtgcagacctccaggtgcgggtaacggggactggcccggggtggtgacgggggagatgcagggaatgggcagacaggagagatacttggggcaagaacaaacaggacttgctgatggagtcggtatggggtgggggtgcaataagggacattgaccctcaggtgtgtgggcttggaaactaggagcgtgacgagattgtgcatctgagaagtttctctgacttgcccaaggtcacacaaggtgtaggtggcagagctggggttgttctgacaacgaggtgcggttct

SEQ ID NO: 24222 - DNA, 767 bp, Artificial sequence
  DNA replication origin
cgcccactcagaagtccttcttgagtcctttccctctcctccaccctcctaccagggctttagctcaggggcaccctcttttgccagcacacgcccctctccagattgactggcaggtgccccctccatggggcagaggtagatcaccaagctctcatttgggccacgggctggcctcccagcacctctgcatcgatgctcatccgttctgcccatcacgaggatactgacttcccctcctgtgtgctggtatcacgctttgccagcatacacgacggcagaggacacagacctggacatgacttcctgggtcatatagaccaactggggagaccagcagcagccagggagaaacacacctgtgctttctccctgtgctccatcctctagatcaggaggccggggtgtccttgaggaggagggaggctcagagggctgaaggggacaattcagccaggtggcgaggggaggggagatgccaaaggtctggaggtgctcatgtgccctgcctgcagggggaggcggggtgagtggagcacaatgggcggggggagcctggtgagggctgacactggcgaggacctgcgggagctggtgtgggatctggaacaatccagcgtgaggcccagggtatggacttggggtccgactgcctaggtccaaatccgggctctatccctcactagtctgtgattgggccagagccttcacctccctggacctccgtttcctcactgtaaagtgggacggtgtgataatagacatct

SEQ ID NO: 24223 - DNA, 1054 bp, Artificial sequence
  DNA replication origin
tccttctccccacacaactctgaaggtaagatgtctattatcacaccgtcccactttacagtgaggaaacggaggtccagggaggtgaaggctctggcccaatcacagactagtgagggatagagcccggatttggacctaggcagtcggaccccaagtccataccctgggcctcacgctggattgttccagatcccacaccagctcccgcaggtcctcgccagtgtcagccctcaccaggctccccccgcccattgtgctccactcaccccgcctccccctgcaggcagggcacatgagcacctccagacctttggcatctcccctcccctcgccacctggctgaattgtccccttcagccctctgagcctccctcctcctcaaggacaccccggcctcctgatctagaggatggagcacagggagaaagcacaggtgtgtttctccctggctgctgctggtctccccagttggtctatatgacccaggaagtcatgtccaggtctgtgtcctctgccgtcgtgtatgctggcaaagcgtgataccagcacacaggaggggaagtcagtatcctcgtgatgggcagaacggatgagcatcgatgcagaggtgctgggaggccagcccgtggcccaaatgagagcttggtgatctacctctgccccatggagggggcacctgccagtcaatctggagaggggcgtgtgctggcaaaagagggtgcccctgagctaaagccctggtaggagggtggaggagagggaaaggactcaagaaggacttctgagtgggcgatacactggaagtggggagtgaggagactgaagcatccaaggtggtgcccgggtggcaggctggtgtgctgggatggaaatgaagagaagacacggggctgccctcagaaggggtggtggctgggaagaggaaaagcagtcagccctaagtacttaaagtatctggcaatttatagcaagtgtcattaaaggggaaaaagttgtggggagaagaatgtttttggaatttgtgacctccacacgggctgaggcatttctc

SEQ ID NO: 24224 - DNA, 1259 bp, Artificial sequence
  DNA replication origin
ggtggggcggctggccgggcggggggctgaccccccacctccctcctggacggggtggctggccgggcgggggggctgaccccccaacctccctcccggacggggcggctggccgggcggggggctgaccccccacctccttcccggacgaggcggctggctgggcagagaggctcctcacttcccagtaggggcggccgggcagaggcgcccctcacctcccggacggggcggctggccgggcggggggctgaccccccccacctccctcccggatggggcggctggccgggcggggggctgacacccccacctccctcccggacggggcggctggccgggcagaggggctcctcacttcccagtaggggtggccgggcagaggtgcccctcacctcccggacggggcggctggccgggcagggggctgacccccccctcctggacggggtggctgccgggcggagacgctcctcacttcccagacggggtggctgccgggcggaggggctcctcacttctcagatggggcggctgccgggcggaggggctcctcacttctcagacggggcggttgccaggcggagggtctcctctcttctcagacggggcggccgggcagagacgctcctcacctcccagacggggtcgcggccgggtagaggcgctcctcacatcccagacgatgggcggccaggcagaggcgctcctcacttcctagatgggatggcggccgggcagagacgctcctcactttccagactgggcagccaggcagaggggctcctcacgtcccagacgatgggcagccaggcagagacgctcctcacttcctagacggggtggcggccgggcagagactgcaatctcggcactttgggtggccaaggcaggcggaggttgtagcgagccgagatcacgccactgcactccagcctgggcaccattgagcactgagtgaaccagactccgtctgcaatcccggcacctcgggaggccgaggctggtggatcactcgcggttaggagctggagaccagcccggccaacacagcgaaaccccgtctccaccaaaaaaatacgaaaaccagtcaggcgtggctgcgtgcgcctgcaatcgcaggcactcagcaggctgaggcaggagaatcaggcagggaggttgcagtgggccgagatggcagcagtacagtccagcttcggctcggcatcagagggagaccatggaaagagagggagagagagaccgtggggagaggg

SEQ ID NO: 24225 - DNA, 923 bp, Artificial sequence
  DNA replication origin
caggaggggggggtcagccccctgcccggccagccgccccgtccgggaggtgaggggcacctctgcccggccacccctactgggaagtgaggagcccctctgcccggccagccgccccgtccgggagggaggtgggggtgtcagccccccgcccggccagccgccccatccgggagggaggtggggggggtcagccccccgcccggccagccgccccgtccgggaggtgaggggcgcctctgcccggccgcccctactgggaagtgaggagcctctctgcccagccagccgcctcgtccgggaaggaggtggggggtcagccccccgcccggccagccgccccgtccgggagggaggttggggggtcagcccccccgcccggccagccaccccgtccaggagggaggtggggggtcagccccccgcccggccagccgccccacccgggaggtgaggggcgcctctgcccggcctcccctactgggaagtgaggagcccctctgcccggccaccaccccgtctgggaggtgtacccaacagctcattgagaacgggccatgatgacaatggcggttttgtggaatagaaagcggggaaaggtggggaaaagattgagaaatcggatggttgccgtgtctgtgtagaaagaggtagacatgggagacttttcattttgctctgtactaagaaaaattcttatcctgttgatctgtgaccttacccccaaccctgtgctctctgaaacatgtgctgtgtccactcagggttaaatggattaagggcggtgcaagatgtgctttgttaaacagatgcttgaaggcagcatgctccttaagagtcatcaccactccctaatctcaagtacccagggacacaaacactgcggaaggccgcagggtcctctgcctaggaaaaccagagac

SEQ ID NO: 24226 - DNA, 1115 bp, Artificial sequence
  DNA replication origin
cggggccgccgggctttgtagttcgccagtccgagctaccccaccaagaccgcgagcccgaggagtcgctgaactacaattcccatgatgcaccgcgagcctggcgctcccgcgcccctccccgtccccgcacgggagccagcgcccgaggaaccccgcagcccactgccctggcgtctccggcagtgggaggccgagaggggctgttggctagagccctccaccacctgctgtctcgccctcgcccctttctctcggattcattacccagaaggcgcaggtccgggcacattcagcgatgcggtccagatggggtgcgggtggggcgcaggccgccgccgccgccgccgccgagtccgttagctcgcgacgtgcgtgaaaaggcggcggcggcgtagtgttgccatggcagccgcggccgcgcggtgggcgcagcgcgggagggagcgcgggggctgtgagtccgctctggggcggagcttgggactcccgcccaggttgccggggggagggaggtgcagcggcgcggggtgggagagcagggagacagtgacattgaggaggacgtgtggccgactgagctctggtcgtgcttgatgagcctgcctccactgcgtccagcccccgtggcagggcaccttcgtgcctgctgctttcggaggtgatgccagtggcgtcgaaggagggggcacccggggcgtcgcagcgcctttcccgccgcctgtccaggcgtccgccgctgggtctgcccccaagggatgtgtggatcctacgccacctctgtgtttttctccagtcaaaccgaattgaagtctttcgcaccccctttctccattctctggggagggggatagaagggaatccttcgataagatggaatgcatatggcctttaggattattcaggaggttttagaatttgcaaatggcattgctttcgactgaatttggatttatgctgtttcttggcaatcgtttgtggactctaggataaacaggttaagagcgtgggcttctaaaacgaattcttagttcacgtcctgcccctgtgcttggtagctgatgaccagaggcgcctttctcacctcttaacgttttgatctgcaaaaatggaga

SEQ ID NO: 24227 - DNA, 1422 bp, Artificial sequence
  DNA replication origin
tctgcgggcccagcagctccgggaacggtcagcgtcgggggccagcctggcgggacatttggggtcccccatacgtggacctatgcctgttgtaagatgtttggaagagcgtcgaaagatgagatcatgttgtgtccttggaagctgaatgaagaaccggcttgcaaaggagaagcgcgtgcagtcccggcgcggcccgctctgctcagttctccagggcgggccttggcctggactgcgtgtcgggaggactcgcgggccccgcattgccgcatgccaccggcaggtgtctctttcctggcttgggaacctattgtgagttcaccaaatggaggcgcgaggaggagggggcgggcaggggaggggcgccgagagccggagcgggcaccgccccctgcctgcccgctccccgagcgcaccgcggcccagccacgaggctgccggtcctcacctttgaaacgccggcagctgcgcgcgctgcggcaggcgcggagaggagccacctcgtcacgtggggaggaaatgccttgccggcctccaaacctactggctcttgtttctggggttttatggccaggagagtgggctcagctctcaaacccaagatcaaaggacagtgcaggacccatcaccctgggaagttttctccctttcccgtctttctccttctcaccttctcagaaagcgtagcgaaaggggcctgccaccctactggcttttccttttagggaaattccatttcctaacgtgtcctgttttgaaagaggccaatttattgggtaatgacggcagcctgctaggcagaagtcaggccaggagcagtcgcttttattattttattcaacgaatgcctactgatcatctcccgggtgccaggcgctgtcgtgggggttcagtagtgaccaaggactcagaccctgccttggctacccacatcaccgaagaaatgagttatcaggcgacaaggtgactcctggggctcagtacttgaaaatccaagacacaagagcgggaaatcctctctcataccaagagtgcacactttgcctctggttagaacaggggtaatgccaggtttgcatttctttggaccttttcacttcatttaatagtaacacttgaaaactctttactgagcgcttactctgggactgggactctgctagatgcagggaataccgtggaggacaaaattccttcctgtccttaaggagcttgcagcccagcaagggtagtgagcctgtaaacacataaacaagcagaacctagtgttaggtgtcttgactccaccgattgtagggcacaaaaagaaccaggatacaggccctgcggatagcattggggtatgggatcagacccaaagccccatgatgcagagtcacataggaaagccactatctggtgctcctgccctgggaagaa

SEQ ID NO: 24228 - DNA, 1255 bp, Artificial sequence
  DNA replication origin
cccgacccacctctccctcctccccgccccacctctccctcctccccgccccacctctccctcctccccttcctcctcctcccccccgctcctctccttaccacctcctccgccctcccccacctcctccccggtcccttctccaccccctctttccccactccgctccccgggcggcgggcggctccctggctccggcgtgtacagatttgggcagaatgtggttccaaggctctcggtcaagaattcggaggaggaaagtttgctggcggcgccgcggctcacaccactccccgccctgggggcggtcctcgaggccgggccccgccgcccgtgcttcccttcccggagccttcgctcttccccgggaaggcccggccttacataagggcccgtgcgcccgccccagccctgtgggcagcgcgctcttgctctgctcagtttaacgaagattctgctcctgaaacttagtacagataaaaagggcagcggtccgtttcattttagacaggaaaatgagggcgcaaaaggggactgagggagagaggccagagaacaagacagcaggttcgtgctggtggcaggtggatgggtagaaggttccttgagagcggaatttcctatttggatgcctgtgcagagggaagtggctgtaaagatcaagtagctttgataacgccaaggtagcctggacaacagaagcccagggaaggaaagggggcgggacttatgctgccagaaaggatgatcactatccggatcttcagtaggacccgcgcctcagcgagggcgcgtgtagaggagatgtgggtatgggccatgtgcagggagcataatgcctgcgtctccagcgcaggcctggcatacaacaggcacaccataaacagctaacacgtgggcactgtgctaaaactttgccaacttggttgcatttaatccttagaacaattgagccctccttactcccattttacacacgggagactgagacctggatgggctaagtgacttggccatgaccacacagctctttgcagccgaccgaggactcaaaccttggactccaaaactcatgctatgggacaacttcgtatttgggaggcgtaatacaaaagggttcagctttggggcagagtgaaggggcaccgcgtttcgaagatgggcaggtaggcttgcagcaggtggatatgtatgttcccacagttctctcacactcacatttcaccatggacacagcagagctttacccctcagg

SEQ ID NO: 24229 - DNA, 858 bp, Artificial sequence
  DNA replication origin
cccttttgcgccctcattttcctgtctaaaatgaaacggaccgctgccctttttatctgtactaagtttcaggagcagaatcttcgttaaactgagcagagcaagagcgcgctgcccacagggctggggcgggcgcacgggcccttatgtaaggccgggccttcccggggaagagcgaaggctccgggaagggaagcacgggcggcggggcccggcctcgaggaccgcccccagggcggggagtggtgtgagccgcggcgccgccagcaaactttcctcctccgaattcttgaccgagagccttggaaccacattctgcccaaatctgtacacgccggagccagggagccgcccgccgcccggggagcggagtggggaaagagggggtggagaagggaccggggaggaggtgggggagggcggaggaggtggtaaggagaggagcgggggggaggaggaggaaggggaggagggagaggtggggcggggaggagggagaggtggggcggggaggagggagaggtgggtcgggaaggagggggaagtgggagaccggggatgtgggaggggagagaaggaggaggtgggagaggggaaagcggggaaaggggaaggtggggcgggcggaggtgggggtagaaagtggggaagagcggggatggcaagttccgcgggtggcgagcggccccagggagcggcgggggggcgaagcaagttccttagtttctcccaagccagcccgggagctgttggacgagtgggagcgcctggctacctgcaagtcttcgggtttcgcgagcgccgcagagcttttctgcagccgctaaataaataaataactacggacgcccgccccgc

SEQ ID NO: 24230 - DNA, 855 bp, Artificial sequence
  DNA replication origin
ggagagaaggaggaggtgggagaggggaaagcggggaaaggggaaggtggggcgggcggaggtgggggtagaaagtggggaagagcggggatggcaagttccgcgggtggcgagcggccccagggagcggcgggggggcgaagcaagttccttagtttctcccaagccagcccgggagctgttggacgagtgggagcgcctggctacctgcaagtcttcgggtttcgcgagcgccgcagagcttttctgcagccgctaaataaataaataactacggacgcccgccccgccccgccccgccccgcccctcccagcccagcccagcccagcccagcccagcccagccccgcccagcgcagctccctggccgcggcggcggtggtggcagcggtggtggcggctgcggcgcaggcagggctgggcgcttggggagctccgcgcgcggggcacttccccgtgaccggcggccgcgcagctcagggaactccgctccgtgaggcttccgggagagggaaagctgttctcctttgatgctctttggttttacagtggaaaactacaattaaaaaaacatagccgtgaaaataaatgagattagaacctgctggcttcacttcctggaggctttttgttgtgtcttgaaactaggatctttgcgggtcatccctgtaagtgcctttttaatccattcacaaggatgcttgtgagtctctgctgcgtttaacatcggtcagcgggtgacattgcattaatttgctctggtgatgatttctgctttgctaggttagcattgcctcgcttggtgacacgtaataaatgcacacacgttgcaaaaattaggacacagagggagag

SEQ ID NO: 24231 - DNA, 1011 bp, Artificial sequence
  DNA replication origin
ccctcgcggcggcggcggcgcaggcggagaagacgcgcagcggccattccgtgcgcgccggccccggcggccgcgggcggagccagcccccatttcgagcggggcttctccctgcgccgagcctgacaaaatgggggcggcggcggcgcgggcctgcagggcctgccgggcgcacgtggcggcctcgggcctgggagccgggccgcgtcctctctcctcggccgcgcggccaccggcgaagttctaggggcggggggctcgccccgcgcaggagtcaccccaactttcacggctccaaaaaatacttcccgagttgggggagggggccaccgagccacgagcaggagtggcttttgtccctcatccttgtttactcggagaaacttcagaccggacgtgtttagtcagaacagaaatacatctcagggccaaaccgataggaaacgaggctgcctcgcggtggcaccgccaccccccaaccgggttccgagcaccggagctggctgctgctccctctttggagcaaagttttatgcaaagagggtgttttttgaaactttcggtgcacggtgattttttttttttaaggtcccataattaggaagagtcgactcgcttaggcccttgtttattccctatctagtgcaaagccacgaattggcagcatgttttctgacctttggtttggttggtttaaaatggtgttctagattttaaaatcgtttaagtgaccagttagatactcattcagagcagactcgggcggatagatagggaatactgtatgggtatatctttgtgtctagactttttgagatcgccctgaaggactgtttttgttttgttttgtttgcttggcatagccccttcaaggaatttaatctctcggccatattcttgtctgattttacggaggttgatgtcgctactgtgttaaataaccagtactttggttttcattcccttactaagtactttaaggtcttatatgtcataattttattgctaaca

SEQ ID NO: 24232 - DNA, 967 bp, Artificial sequence
  DNA replication origin
ccggctggccgcgctccccgccagcgcccggctcgctgcggcggcggccaatgcagcccggggaagcgccgccgctgccctcccgccgccgccgccgagccgcgccggccccgccgccccggccgcgctccgcgcacgccgcccgcccgaacgcccggcccgagggcccaaaacacgttcaaaatttttttaattaaaaaaaaaatttttttttttgcgccagtcagcgcggacgccgccgggggtggaaactcgcggggcgcggggctcccggcgcctcaggctgcctgagggccggggcaccggcgcggggcagcgttcccggcgcccgggcagaggctcgctccgtgcgcagttccccccacggtcccccctcatttgcctttgtgtggatcctgacccgccggctcccggccgcggggatccggccgccgcgcgggctggggagctgccggaggcgctctccccgccgcggcgctgccccagactcaccctcagcgaggcacagagtcgcccagtgcccgtccggctctcacttgccccggtgctgtctctatggagctcaatgtactgcaatggctgtgagagcgggagccagacgcagcctcctcactctctccgctctgtaacattactctccagccagcgcggctcctattggctaccgccaactcacggggctcgctcattggcccgatacctcccattgtcctgaccagagcccgtttgctattggctgtctccggggacacgtcatcaaggattgaaacagcgcgcaaatctgaatgtgtgtgtatgccgggcaaagaggctgaggcgggagaggcagaggcagaggcagcagctgctacgggaaagcagagctctatggtgtatgtgtgcatgtgtctaacccaagccagccccacaccggagcggccgccggagcgaaaagggcctgacttttccacaagtgtctccaactcct

SEQ ID NO: 24233 - DNA, 921 bp, Artificial sequence
  DNA replication origin
cccgcctggccagccgccccatccgggaggtgaggggcgcctctgcccggacgcccctactgggaagtgaggagcccctctgcccggccagccgccccgtccgggagggaggtgggtgggtcagccccccgcccggccagccgccccgtcccggagggaggtgggggggtcagccccccgcccggccagccgccccgtccgggaggtgaggggcgcctttgcccggccgcccctactgggaagtgaggagcccctctgcccggccagccgccccgtctgggagggaggtggggggggtcagccccccgcccggccagccgccccgtccgggaaggaggttggggggtcagccccccgcccggccgggaaggaggttggggggtcagccccccgcccggccagccaccccgtccgggaggtgaggggcgcctctgcccggccgctcctactgggaagtgaggagcccctctgcccggccaccaccccgtctgggaggtgtacccaacagctcattgagaacgggccatgatgacaatggcggttttgtggactagaaaggtgggaaaggtggggaaaagattgagaaatcggatggttgccgtgtctgtgtagaaagaggtagacgtgggagacttttcattttgttctgtactaagaaaaattcttctgccttgggatcctgttgatctgtgaccttacccccaaccctgtgctctctgaaacatgtgctgtgtccactcagggttaaatggattaagggcggtgcaagatgtgctttgttaaacagacgcttgaaggcagcatgctcgttaagagtcatcaccactccctaatctcaagtacccagggacacaaacactgcggaaggccgtggggtcctctgcctaggaaaaccagagacctttgttcacttgtttatct

SEQ ID NO: 24234 - DNA, 1039 bp, Artificial sequence
  DNA replication origin
cccacccacctccctcccggacggggcggctggccgggcagaggggctcctcacttcccagtaggggcgtccgggcagaggcgcccctcacctcccggatggggcggctggccaggcggggggctgaccccccccacctccctcccggacggggcggctggccgggcagaggggctcctcacttcccagtaggggcggccaggcagaggcgcccctcacctccgggatggggcggctagccaggcggggggctgacccccccacctccctcccggacggggcggctggccgggcgggggactgacccccccacctcccggacagggcggctggccgggcggggggctgacccccccatctccctcccggacggggtggctgccgggcggagaccctcctcacttcccagacagggtggctgctgggcggaggggctcctcacttctcagacggggcggccagggagagacgctcctcacatcccggacggggcgacagggcagaggcgctccccacatctcagacgatgggtggccgggcagagaggctccgcacttcctagatgtgatggcggccgggaagaggcgctcctcacttcctagatgggatggcggctgggcagagacgctcctcactttccagactgggcagccaggcagaggggctcctcacatcccagatgatgggcggccaggcagagacgctcctcacttcccagacggggtggcggccgggcagaggctgcaatctcggcactttgggaggccaaggcaggctgctgggaggtggatgttgtagcgagccgagatcacgccactgcactccagcctgggcaccattgagagactccgtctgcaatcccggcacctcgggaggccgaggctggcagatcactcgcggttaggggctggagaccagcccggccaacacagcgaaaccccgtctccacccaaaaaatacgaaaaccagtcaggcgtggcggcgcgcgcctgcaatcgcaggcactcggcaggctgaggcaggagaatcaggcagggag

SEQ ID NO: 24235 - DNA, 1457 bp, Artificial sequence
  DNA replication origin
ggtggatgttgtagcgagccgagatcacgccactgcactccagcctgggcaccattgagagactccgtctgcaatcccggcacctcgggaggccgaggctggcagatcactcgcggttaggggctggagaccagcccggccaacacagcgaaaccccgtctccacccaaaaaatacgaaaaccagtcaggcgtggcggcgcgcgcctgcaatcgcaggcactcggcaggctgaggcaggagaatcaggcagggaggttgcagtgagcagagatggcagcagtacagtccagcttcggctcggcatcagagggagaccgtggagacggagagggagagggggagggggagggggagggggagggggagggggagggagagggagaggattacatttcaatgtgagattgggaggggacaaaccatatcagctgccacagggaacaaccctttcttcagagtgtacattcattcacttattcactcacttgttcattcattcaagaggagcttaagtgactgttaggtgcaggctctgtgcacaggattagtgaaagttccctggtaaacaaatcggacgtaattcctacccaggtggagtttacagtctggtaggttaggcaagtaatgaacacataaaaacagaataaatgtgtaattaacaaagtgtgataaggactgtggaggaacaatgaagaaggctatgagagaataacaggggggactggatttaggaacgtgtccgtcgcggtgtgtatctgcagttgtatgtgtggttgtgtgtgtgtgtgagattctgtaaggcagggtcagggaaggcttctttatggaaggatgaaaatttgaaggatgaaaaggcaggcagtgctagtcagaacaggtagtaacgaccaacccccaagtctcagtggcttaacataataaaattttacttttcattcacattcgtcagtagagaatctgggcagctcctcagggcagctgccttccagatgtggctcagtgttccaggaggctttgatcttccagcatctccatgttaacttgtcttccaacagcatcacagcaggcaacagagcatggagaaatgcactctgatgccgaaattcctctgctgctgacccatgtcctatccaccgacatctcactggccacagcataccccatgccatgcctaatttcaaggcgacagagcccgaaaggagagagagccagacatcttgggaagtgctagtaatgcctaccacatgggccaagtgtggggagaagggcattccaggctgtaaaggagttcaggaaatgggggagggggctcaggtggctggagtaagtgagcaaaggtaatgcagtcagagttgattttttttttgagacagagtctcactctgtcttgcccaggctggagtgcggtggcacgatctcgcctcactgcagccacgttcaagcgattctcctgtct

SEQ ID NO: 24236 - DNA, 1431 bp, Artificial sequence
  DNA replication origin
catctgggctggccagaggcagggaaagggcatccaggtcacggctgggctggagaccaaggttctgcagggtggagtccactcctccactgtagggtggagcaagccctgttcagaaatatagatggtttcaggcagaaatgtagaggcattttgctctgatggagcaaatattttcttctaaatagggactttcttctctcgtgtcaattttctttttaaaattttcctttattattgggctccattcctcagctccttctgtcactctagaagctcgtttcctcctgcctcttccctttgggtgatatgcacactcgaatgtccccagtcagaggcagacactttccaggctgattttaattctttaggagcctgaaaggttggaaagagcatggaatctgagcctagggccctggttggagctgctgccagttacaagctgtgaaactataagcaaatcatggcattccactgcggttgcctctggaatggagaggatgctactctgctccttcagtctgtgacgcatgctatgtgaggtcatctaagggaagccattagggaaacagtgacagcacaggggtgaggagctcacataactccttggcctacacgggattgagcttcaggggccactgtggggtcgacgtcaggggttctgtggggtggtcaggggctctgtcgggtggagtcaggaagtctgtgggtggaatcaggggctcttagggctggagtcagtgctgtggggtggagtcagggctgtgggtagagtcagggatctgttgggtggagtcaggaactctgtggggtggagtcagggctctgtggggtggagtcagggctctgtggggtgtactcagggctctctggggtgaagtcacggctctgttgggtggagtcagggctctgggtggagtcagagctttgtgggtggagtcggggctctgttgggtggagtcaggggttctgtttggtggagtcagggctctgtgaggtggagtcagggctctgttgggtggagtcaggcattctgtgggtggagacagggctctgtgggtggagtcagggattctgttgggtggagtcagggctctgttaagtggagtcagggctctgtgggatgtagtcagggatctctggggtgaagtcacggctctgtggagtggagtcagagctttgtgggtggagtcaggagttctgttggttggagtcagggctctgtgaggtggactcaggggcacggagcttcttatcggaggctgtctggagggagtctgtggttctggcacggcgatggttgtggggtagtgaagctgcactgggggctggtgcctgcttgctgactgatgagcattctggggactgacgtggggagcaaaagcctacctctctctctacctgtttaaggcccacgacatggctacagag

SEQ ID NO: 24237 - DNA, 1213 bp, Artificial sequence
  DNA replication origin
cccgggcctggccaccacgagctggtcgccgctcagctggaaggcaccgggctgcaggcgcagcagctgagccagcggcagcagggccagctcgcagtcgcaggtccacaggctgcgaagctccccagacgagatggaggtcaggctcggcctggccaccggctcgcaggccgcccccgccatgcccgcgtcgtcggtcctcacaccgcctgcttccgtccggtgcctacagcccccagccggcacctgatggtccccaggaggggccgggcgccctgcctgcgtcagccgcgcgcgaggtgaggagggggtcggtctgcccgcctggccgggacgcggtggccgctcaggtgccagtctgaccgcccgggcggcccctcccaagctgccactcgctgggagccctgcaggcaccgcgcggagaaagcggccccggcgcagcgcggccccttttatccgccctctggacgcccgcctcgcccctgccggcccacggccacgaccccagaggctcggggcagagttatcatcgtctcataacttggcatgctcgagtctgctcgcaggcaaggcttagtcatccccctggggtccactactcaacaccagcgctggcccccgccctgcctggcggacactgccggaggctggaggtggggagagtcctccccgggttcccaggccctgcctatggtgggcggcagggcgcacagcacccatccttgcctaagacaccacacccctggtgttgattggagaagaaggcaagggctctggccctacccattccacctgggacccagaggctgtcaaaggccagtgctggaactccgatccccacctcagtaccagacctctcactcagcctcagttttctgccattttaactccatccagatcgtaccctgcatttccctcctttcagcctttccttcagctggttgctggccctggatcccttccccctagaaatcccactgatcatcacatcgcttttccataaagccttcacgaatcccacgagggtttcatcgctttgcttctcctttctactgcacggtgaaccctagactgcaatgtgccgtgtagtggggatagcagggtcctagcatcctcccttctcccctgcctccccagtaggtggtgatctccttgagccccagaatatgttcatttcttcagtctataaatatgtgagtgctagctatgggct

SEQ ID NO: 24238 - DNA, 773 bp, Artificial sequence
  DNA replication origin
tctgagatcgagtggagagatttgctgtggatgcaacgtggaaaggccatctggtatagccaaccggagtccgtgatctgggtgctggtaggcacagcggggggtgggggtggggggtgggggagtggaagccagtggacgttcctgctggatggttttgatgttcccaatgaggtgggaaatgaggccaacagcttagaggaagatgaaagcaggattgttggggatttggtaagaaaggaggaaaagcggaactatagacttggcatgagcacactcaggagtggtaggtgactgcctgggggtctcaagggcccactgaagtttaaagcacctccgttgcaggcttgcatgtgtactccagctgtactcatgccctctctttacttctctaatctccactcctcactcggcctttgaactcggtgaggtctggtgcgcacagcatgctgaatgaatgttggctaagtggaactgaggtctacagcacttcaggaagggccaacaaaaaggcaaaggcagacagctgaggacatccccaggtaggccaaaggggaaggggtggggagtagtgtcgtttttgggatcctgtcctctctcctggcccttctctgctactgtggtgggtatggtgttggagagaggatgaggggtagaagaaaaaatggaaggaatcttaaagctcatctcacctaaactgaacacagctcaatggcctcatgggccacccagacctggagtgacctctggccccttggccctcagccctgcac

SEQ ID NO: 24239 - DNA, 3103 bp, Artificial sequence
  DNA replication origin
tgagctgcactcctcttccttcaaaatcgtggcaaggagacgcctattcccccggtgtactcatggaccagcgagagccactgacagatgcatcactggatcctaactaaacactttgttccatctccctgtgaccagagtattgtaccacaatcccagttgtttgcaataaatggcttgtcttgattttccagattatagctagaagattgcctcaaacgatgaattgtagaatggagcaggatgtctgtgtgtctgcgtcttcacccgggtttttcaggccagtgagtgtcgggtctgcgtcttggaggaaagggctttggtggggtctccattaagacttctgtacagggagggtttctgtagaggagcatgtctgactgggtggtggtaggagattcccaggtgaggggtggaggctactggtatgccaggctagcgtcaatgcctgtgtgtgcataggggtctgtgtgggtgactgtgtgtgtgtgcacagggggtctatgtatgtatgtgcacagggggtctatgtgtatgtgtgcacacgtggggtctgtgtgggtgattgtgtgtgtatgcacagggtgtgtgtgtgggtgactgtgtgtgtacatgggtgtgtgtgtgcacagggggtctgtgtgggtgactgtatgtgtgcacaggaaatctgtgtgggcaagtgtgtgtgtgcacgggggatctgtgtgggtgactgtgtgtgactgtgtgtgtgcacagggggtctgtgtgggtgtgtgtgcgcacagggggtctgtgtgtgtgtgtgcgcacaggggggtctgtgtggatgactgtgtatgcgcacagggggtctgtgtgtgtgtacacaatggttctgtgtgggtgactgtgtgtgtgcacagggggtctgtgtgggtgactatgtgtgtaggggggtctgtgtgtgtgtgtgcaccgtgggtctgtgtgggtgactgtgtgcacagggggtctgtgtgggtgactatgtgtgtaggggggtctgtgtgtgtgcacagggggtctgtgtgggtgactgtgtatgtgtgtaggggggtctgtgtgtgtgcttgcacagggggtctgtgtgggtaaccgtgtatgtgtgtaggggggtctgtgtgtgtgcatgcacaggggtctgtgtgggtgattatgtgcatgtgtgcacagtgggtcagtgtgggtgactgtgtgtgcgcgcacagggggtctgtgcgtgtgcacagggatttgtgtgggggactgtgtgtgtgcacagatctgtgtgggtgatgatgcgtgtgtgcacagggggtctctgtgtgtgtgcacaggggatctgtgtgtgtgtgtgcacggggctctgtgcgtgtttgtgcacacagggggtctctgtgtgtgtatgcacagggtgtgtatgtgggtgactgtgtgtgtacacgagtgtgtgtgcccaggtctgtgtgggtgactctgtgtgtgtgtgcacagagaatctctgtgggcaagtgtgtgtgcacagggggtctgagtaggtgactgtgtgtgtgtatgggggtctgtgtgtgtatgcatgtgcacagggggtctgtgtgtgtgatggtgtatgggggtctgtgcgtgtgcgtgcacagggggtctgtgtgagtgactatgtgcatgtgtgcacagtggatctgtgtgggtgattgtgtgtgtgcacaagggacctttatggatgactgcatgtgtgtgcacgggggtctatgtggatgattgtgtgtgtgtgcacaaggaaactgtgtgggtgactgtgtgtgtgtgtgcacaaggaacctttgtgggtgactgtgtgtctgcacaggggtctgtgtgggtgtctatgtgtgtgcatgggggtctgtgtgggtgactgtgtgtgtgcatgggggtctgtgtgtgtgcgtgcacaggggatctgtgtgggtgactgtgtatgtgtgtaggggggtctgtgtgtgtgtgcatgcacagggggtctgtgtgggtgactgtgtatgtgtgtaggggggtctgtgtgtgttgtgcacagggggtctgtgtgggtgactgtgtatgagtgtagggggtctgtgtgtgtgtgtgcatgggggtctgtgtgcgtgactgtgtgtagggggtctgtgtgtgtgtgtgcacagggggtctgtgtgggtgactttgtatgtgtgtatggggggtctgtgtgtgtgtgtgtacagggggtctgtgtgggtgactgtgtatgtgtgtggggggtctgtgtgtgtgcgtgcacgggggtctgtgtgggtgattatgtgcatgtgtgcacagtgggtcggtgtgggtgactgtgtgtgcgcacagggggtctgtgagtgtgtgtgcatgtgcacagtggatctatttggttggctgtgtgtatgtgcccaggggatctgtataggtgactccgtgtgtgcacatggggtctgagtttgtgtgcaggtgcatatttgtgtacctggcactgtgagggtatgtggggtgtggtggaggcgtgtgggttgctttggaggggtatctgttttgtggtgggttttgtggagtgacgtgaggagatgagctggggcaagtgacacaagaggatctgtggaggatgtgttgaggtgtctgccagggtgttaggtgtactttgagatattttggggtatgtttggggtacctgtgaaggtgtctgtgtgggtgtcagtggggatcttgtggatgtctgtggtggtgtgtgtggtttgtgagttgtgttggtgagggtgattgtggggcatctgttgggtgtctttgaagtgagtctagagtttctataaagtgggtgtgcagatattcatgggatgcctgtggggcatctgtgagggtctatgcatttgggtttggggattttttgtggggtgtttctggttgtctgtgggtctgccctgtggacaagtgcctgggaaggtggtctgtgtacctgggaaatgacttctgtggcttttctgtgtgctctgcctgtgggtagctgtgtctgtgaacttagctctatgaaagcaagaagcctatgagaattccgccaggggcaagcctggccttggcgcttcactgtcttagcgtgtgtctggccctc

SEQ ID NO: 24240 - DNA, 972 bp, Artificial sequence
  DNA replication origin
cccacctgggcgccgcgagagggcgctgctgacggcgcggcgcggcggggaccggacggcgggacgcgcgcgccggcggggcagggctgggccgccctgcgcctccctccccgcgccgaccggggcacgggcgactgtgcccgcgaaccccacgcctcgcccttgcgcgcctggccgcccgctacttacccagggagcaggtgaggagcgcgagcagcgccggcggcgcgagcagccaccagcaggcgggcggccgcatcctggcggcggaggctgagcgccctacctgggcgcggggaagggagacgcgcggggagcggagctgcgccgctgccgccgccgccctgccgccgcggctgacccttctctgccggctcccctcctccctccgtctccgccgcgccatcgccggccgcgccctctggcggccgggagcgggagcacccctgtgcgcgcttccagcgtctgccgggctggcggctgcggctggtgtccggcccgacgggctgctgcggtagaggtggccgcggctctgccctcacggcgccctccttcgaggcgtctgacctctgccccctccagccaccagcctccacccctcctcttcctttctcctctgcgtccctcctgacctaggccgcgtcccctgccttcatgccctcccaccttaccgcgtcacccccatcagtagttctacctgtgaagtggaagcgagcagtaatcacttttcctccctgctaatgtattatctgctgtggaaaaaaaaatgtaatcaatagttcaactcttaatattgttggcaccaatgctctactttgatgaaggtgtttttaatcagctcaactaatttacttaatatcccctttaaatggaatttggccaatagcctaggtctgggatttggcttttaaacaagtttgtgtaaatgtaattttctataaatgtaattttaagtgttcaccataatggaag

SEQ ID NO: 24241 - DNA, 1032 bp, Artificial sequence
  DNA replication origin
ccccgcgccgggcgggaggctggacgggagccggcgaggcggccctcgaggccccgcggctcctgttcgacccccgggggcgaggactgcggtcccggtgtccgcgcgcccctccgcagggccttcgggacgtgccctggcccctgaggataagcggccagctcggcgccagcccttcccggattccgacccggaggaggacaggggcgcccgctgggcctccgcgggagctggcgcggcggggaggcttgctcctgtctcgggtctccgctggggacatcaggggacacgtctgcgagcagagcagtgcttgcccggtctcctgctgctgtaatgcccattcttttttatttcttttctcctcgcaagggcatttcccccctttatcttaaaacgatgtgataaaagttaaaaaaaaaaaaaaagcagccttgtaattgactttcatgatcagatttgttcaactttgaaagcttgagcgaaaaattatttttttttcagactgctacagagtttttgtcctctaacccagacttgctggtgtgaaaaggcaatgatttcagattttttagtaatggcagaatggtgcagtttaggaaaagacgtagcgttattgcgcactgctcttgttagcccaccggaaccttgacagcctgtttttatttgtatttaagctctctgaataaggattaatttgctgcatttgtgtacttctggcatttctataggcgctcagtaagtgtgggaaaagagcaagattagttggtaattgtttacatgcatgattaattaggcagcagtgtaattaaaaatattagggcacctccggcagagaaggctgtagttggtcttggggagcgactgaatttggctggaatcggcttcagtggaagaagggcattgctgggtggcagccctgggagaaagggaggttggaggtttgggaaagcgactgggtgactcctggctgcatcagttggcttgttgcctggatgttttgcaactaaccaaatgggtgggtggtagctgaaa

SEQ ID NO: 24242 - DNA, 1368 bp, Artificial sequence
  DNA replication origin
gcctctccgtggagctttccaggattaattccaggtcctccagggggccttaagctccaggatgcatggcgcatagccaacttacttgtttccaagtacccactttgaagataatccatggtagcagagggacagaaacaaacacccctgcagcccagcgacagaggtaaagtctgccttttctccaccctactgggacaaatccactgtcccctgtccccacagtagcagacaagctgggtagcagctccatctaccatgggacagcacctccaaccatgggatggaaggccctgtcactccgtacgttttttaaggggcatcggattttattctctccctcttgggttttatacagggcaggccaatggcagggtcaacacacttggtggcagaaatacctcagaagagggagtgacccaggcagggtcccttgaggggagggggtgacccggccgggcagggacccctctgaggagggggtgacccgggcaggaacccctgtggggacgggtggctggggctagaaatgaggctgaaggtaccaggggccatatcatgggagggggtggtattggggagtcaggtttttcctgagccaggaacagctgtttgaggttttaaggagggaatgccctgttgagatgtgtgcccaagacagctttctggaggcagtgtgtgggacggctgtgggaggacaagaaaggacacaaacatgccagtgggaaggccactggagtcaagcaaagagcgctaagggcctcaatgaaggtggcagtgagcggggggggggggccactaaagaagcagaagctgcaggctctgagacagagcacccgggtggggggtgagacgggaagggagggcctggggcttcctagaataaaggagggtagcacgtgtgagggaaggcaacttggtgcccagcgtcctgaggatacgcaagtgcagacaggcaggagagccgggtgcaggggtgagcccagcacaggggtgtgcgtgcaatagcggctgcagcactagagtctccacagcgcaccagaacggaagccaaggctcgtgaggccaaggacggctcaggggaactgcaacatttaaggacaaaactgcaaaggagacaaaaggaatggccagatggggaggagaagcaggagagaaggcagctgtttaatgaatcctttcaaagaactctctccttaaagctgcactgtacaacagaaagatgtggcagtagaggagacccgggccggggccctgcctgagaagtcatacagcataaggtcaaagtacagagtactttgtactgtgtacagagtacaaagtacaaagacaaagtatactcaaacctcctaggttcaaatccgagcg

SEQ ID NO: 24243 - DNA, 1210 bp, Artificial sequence
  DNA replication origin
gcccctggagaagccgccagtctctgggccgccagcagcgcgcgcccccggcgtgggaggagcgcggcgagcaggggcggggccagtgactcccgcagccaatcggggtggcggcgcgtccttggagggtccgcagctcgcccggcgcgcacggggcggggctccgcttgaccgtggcggtcgccgggcagcagagcccgggcgcagcgagcgcagcgcagcgcagggagcgcaggcggtggcggcaccaggttcccggggctccagcgctcggcgcagcgaagtagcctccggcggtggcaactacggcggcggcgccggggcgatgctgtgggtctcgttgggcgccggtgtcctggcctcttcctcaggtacccagccccgcttgcccctcgccccggggaaccgcagcgcccgggaggtagctttgtgaggctgtgggctcgctgccggggagtgggtgggtggggccgggcggggctgtgcggtctgggccgccttccctcggaggaagagggtggggaccgagggaagcgggcgggggtgggagcgctgtctccgggccgccgctgatggcatcccagggctccgtcctcctcctgcctccatgtgggttgaaagaggttttgttccaggagaaagtttgatgcctagacttgaggagccaaattcgggggtccctgaggtccgcgcctttaaagaggcagcccgccctgccgtgtgagcccgtgccctgcgtgtgggcacgtgggaacccgtacctgagcagcattcctgacacgggaccttccttgagaaaattcccctgtggaagaatcccccttggggagggggctttgtggagatggcacccagagcccgcccagtgtgggttttgcttgaaaacagtgcagcaggtagtcaatgcccccttgttatcttcccgtagaatggactcgaccaagatctatgatctaagagcttcaaaaattaaatctaccttgccatctaattaaacatccccaaacactagtgtgttcaaggtgccaataattactctgtcgattctttaatattttcttattgcccatactttcagttggcttttgcagttttggaaagggtgctgtggagcataccaaagtgggtagaagttatggctcacctctcagggtgatagcccagtgcaaaaaaatacagaacacatgcctgtccactcgaagataggaga

SEQ ID NO: 24244 - DNA, 1710 bp, Artificial sequence
  DNA replication origin
gggcagaggctgcaatctcggcactttgggaggccgaggcaggcggctgggaggtggaggttgtagcgagccgagatcacgccactgcactccagcctgggcaccattgagcactgagtgaaccagactccgtctgcaatcccagcacctcgggaggccgaggctggcggatcacttgtggttaggagctggagaccagcccggccaacacagcgaaaccccatctccaccaaaaaaatacgaaaaccagtcaggcgtggcggcacgcgcctgtaatcgcaggcactcagcaggctgaggcaggagaatcaggcagggaggttgcagtgagccgagatggcagcagtacagtccagcttcggctcggcatcagagggagactggggagagggagactggagagggagagggagacgggagagggggagggggaggaggagggggagggggagggggagagggagagggagagggactttctcttgataagaaatgatgcagtaggcagaaattataaagctgctccccaaacatgtcctgctctaatccctggaatatgatgaaatatcatcccaggatcattttagacagcagaaatgatcttaaaatacggagagtgtccaggtgggtgtcatctaatcacataagcccttaaaggtagagagctttctctggttggtggcagaagaaggaaacagagggacctgaagcattagggtcactgctggcttaaaggtggaggggccacatggaagaaaggcaggcagccccaggagctgtcctatgactgaatatttgtgtccctcctctcctaatttatatgttgaaaccctaacctccaatgtgatgatattgtcagatggagcctttgggaggcaattagggtaggatgaggtcatgagtttgggatactggtttggtgggattagttcccttagaagagataccagacagctctcttgctcccccaacccctccaatgtgaggacacagccagaaggcatctataagccagaagagcatcctcatgataatgtgaccatgcaggcaccttgatcatagacttccagtctccagaactgtgaaaaaataaatgcctgttgtttaaaccagcctgtggtattttgttatggcacttgagcacactaagacaagctgacagccaacaaagaaagagggacctcagtcccacaactgtaaggatatggattcctccaacaccctgaaagagtctggaaatggattcttccccgtagcctccaggtaaaagcccatctggatcaaaaccttcattttggccttgtgggaccttgagcagaggatcaagttttaacccatgcctgggttcctgatccaaagaaaactgagataacaagtggatgttgttttaagtggctaaattagtggtgatttgtcaccaataatagaaaacgaaagccccagaatcaggactccatcctttcaaacacacgcgcatacgcgcacgcacacacacacaggcacacaccccatcctatcctggtactaaagggctactctgagctagttatcacatttccctcctttctggttattccagtggccactcacctacttcctgctctcattatctttatctgcattcttatctggcttccctccttcagtctccccacccttttctctaatcctaggcaatgctgccagattccatttcttaacatagttcca

SEQ ID NO: 24245 - DNA, 969 bp, Artificial sequence
  DNA replication origin
cggggcggctggccgggcgggaggctgacccccccacctccctcccggaccgggcggctggccgggcggggggctgacccccccacctccctcccggaccgggcggctggccgggcggggggctgacccccccacctccctcccggacggggtggctgctgggcggagacgctcctcacttcccagacggggtggctgccgggcggagaggctcctcacttcccagtaggggcggccgggcagaggcgcccctcgcctcccggatggggcggctggccgggcggggggctgacccccccacctccctcccgaacggggtggctgccgggcggaggggctcctcacttctcagacggggcggttgccaggcagagggtctcctcacttctcagacggggcggccgggcagagacgctcttcacctcccagatggggtcgaggccgggcagaggcgctcctcacatcccagacggggcggcggggcagaggcgctccccacatctcagacgatgatgggcggccgggcagagacgctcctcacttcctagatgtgatggcggccgggaagaggcgctcctcacttcctagatgggatggcggccgtgcagagatgctcctcacttcccagacggggtggcggctgggcagaggctgcaatctcggcactttgggaggccgaggcaggcggctgggaggtggaggttgtagcgagccgagatcacgccactgcactccagcctgggcaccattgagcactgagtgaaccagactccgtctgcaatcccagcacctcgggaggccgaggctggcggatcacttgtggttaggagctggagaccagcccggccaacacagcgaaaccccatctccaccaaaaaaatacgaaaaccagtcaggcgtggcggcacgcgcctgtaatcgcaggcactcagcaggctgaggcaggagaatcaggcagggaggttgcag

SEQ ID NO: 24246 - DNA, 922 bp, Artificial sequence
  DNA replication origin
gtctgagaagtgaggagaccctctgcctggcaaccgccccgtctgagaagtgaggagcccctccgcccggcagccaccccgttcgggagggaggtgggggggtcagccccccgcccggccagccgccccatccgggaggcgaggggcgcctctgcccggccgcccctactgggaagtgaggagcctctccgcccggcagccaccccgtctgggaagtgaggagcgtctccgcccagcagccaccccgtccgggagggaggtgggggggtcagccccccgcccggccagccgcccggtccgggagggaggtgggggggtcagccccccgcccggccagccgcccggtccgggagggaggtgggggggtcagcctcccgcccggccagccgccccgtccgggaggtgaggggcgcctctgcccggccaccccttctgggaagtgaggagcccctctgcccggccaccaccccgtctgggaggtgtacccaacagctcattgagaacgggccaggatggcaatggcggttttgtggaatagaaaggggggaaaggtggggaaaagattgagaaatcggatggttgccctgtctgtgtagaaagaagtagacatgggaaacttttcgttttgttctgtactaagaaaaattcttctgccttgggatcctgttgatctgtggccttacccccaaccctgtgctctctgaaacatgtgctgtgtccactcagggttaaacggattaagggcggtgcaagatgtgctttgttaaacagatgcttgaaggcagcatgctcgttaagagtcatcaccactccctaatctcaagtacccagggacacaaacactgcggaaggccgcagggtcctctgcctaggaaaaccagagacctttgttcacttgttaatctgctgaccttccctccac

SEQ ID NO: 24247 - DNA, 1379 bp, Artificial sequence
  DNA replication origin
tcgacccctgaggccgttgccacccctggcgcctgagggcgcgggcacggagaggagggagctcgtcctgtttgtttcccgccgcgctgtcccgggggggacggattcccgtactgcgcctcgcgcaagccccagcggccccggccccttccccgccgccgtgccccgcctggggccagccgggccgaagcagccttcaccgcccccagcctccccagccccaggtcgggagggactcttcttcgggaaaacccggtggcgactgcagagaaaaccgccgggccccgctggcgcgcaggcggccgctacagtgcgtcaacaggcgctgtaatccgagcgcataaacgaggggtccgggggtgggggcccggggcggccgtggcagtggcccggggctggcagcccgctttgaaaatctggcgaagtcggggagcctgcgtttgctttggcagctgcgaaggcgcacaggtgcacgggggcggggggctggctggcggcgccaccaccgaccgtcactgacagagcctcgccatgggcgcccaaattcgttcacttgcgaattgcgtaagcggccctccggtacccaacctctgggaattacgcgggcttgtgcctgtggccaccttgctaggccccaccgctccagcctgaactcccaccgctccctgccttgcgcttgatgttccagcaacttcgaactgtttttatctcctgtaaaccaagccgcttctctccttgacgctggccttcctgcctggcttgccctcccgccttcttttgccttttaagaccgggcagctatcccaccccgccagtatatgcccctcttctgggctccttggcttcctgtttatacctacgtgactgtgcttacttttttgcacatggtttttcttatccttctgtaagtttcttgaaggtaggagccatgtcttaccctgccaagcacattgtctggcacgtagtagctgttcagtagaggaagtggtccctttccctcaaagggcttcccgtctcactggagagataaggctagccatggtaccaaggaactgccgaagaatcaaggtgatggacagtcacgtgcggatttcgatggtgccgagatagtgaccttaggaggagggacagcctggggaggtgctcctggttgactcgcggagtagaagcttttggccagaatattgctacattttcacaaattgcagggacatgtgacttctggaggaccgtgggcaccctttcctaaaccagggacacatttcaatagaccctctctggctcgctggggaggggaggtggaggacagaggcagagtcggggagcctccttggaactcagcagttggttattttgtgatacagtcatggtgggtaaat

SEQ ID NO: 24248 - DNA, 1358 bp, Artificial sequence
  DNA replication origin
cccggacggggcagctggccgggcgggggactgacccccccacctccctcccggacggggtggctggccgggcaaaagggctcctcacttcccagtaggggcggccaggcaaaggcacccctcacctcccggacggggcggctggccgggcggggggctgaccccccaacctccctcccagacagggcggctggccgggcagggggctgacccccccacctccctcccggacggggcggctggccgggcagaggggcccctcacttcccagtaggggcggctgggcaaaagcgcccctcacctcccaaacggggcagctggccgggcggggggctgaccccccccacctccctcccaaacggggcggctggccgggcggggggctgacccccccacctccctcccggatggggcggctggcctggcgggggctgacccccacctccctcccagatggggtggctgccgggtggagacactcctcacttcccagacggggtggctgctgggcggaggcgctcctcacttctcagacggggcggctgccgggcggaggggctcctcacttctcagatggggcggttgccaggcagagggtctcctcacttctcaaacggggtggctgggcagagacactcctcacctcccagacggggtcgcagccgggcaggggcgctcctcacatcccagatggggcggcagggcagaggcgctccccacatctcagaggatgggaggccaggcagagacactcctcacttcctagatgggatggcggccgggaagaggcgctcctcacttcctagatgggatggcacgccgggcagagacgctcctcactatccagactgggcagccaggcagaggggctcctcacgtcccagacgatgggcggccaggcagagacgctcctcacttcccagacggggtggtggccgggcagaggctgcaactctcggcactttgggaggccaaggcaggcggctgggaggtggaggttgtagcgagccaagatcacgccactgcattccagcctgggcaccattgagcactgagtgaaccagactctgtctgcaatcccggcacctcgggaggccgaggctggcggatcactcgcggttaggagctggagaccagcccggccaacacagcaaaaccccgtctccaccaaaaaaatacgaaaaccagtcaggcgtggcggcgcgcacctgcaatcgcaggcactcggcaggctgaggcaggagaatcaggcagggaggttgcagtgagccgagatggcagcagtacagtccagctttggctcagcatcagagggagaccgtggaaagagagggagagggagaccgtggggagaggga

SEQ ID NO: 24249 - DNA, 889 bp, Artificial sequence
  DNA replication origin
ggccagctgccccgtttgggaggtgaggggcgcttttgcccagccgcccctactgggaagtgaggggcccctctgcccggccagccgccccgtccgggagggaggtgggggggtcagccccctgcccggccagccgccctgtctgggagggaggttggggggtcagccccccgcccggccagccgccccgtccgggaggtgaggggtgcctttgcctggccgcccctactgggaagtgaggagcccttttgcccggccagccaccccgtccgggagggaggtgggggggtcagtcccccgcccggccagctgccccgtccgggagggaggtgggggggtcagccccccgcccggccagccgcctcgtccgggagggaggtgggggggtcagccccccgcccggccagccgccccgtccgggaggtgaggggcgcctctgcccggccgcccctactgggaagtgaggagcccctctgccaggccaccaccccatctgggaggtgtacccaacagctcattgagaacgggccatgatgacaatggcggttttgtggaatagaaaggggggaaaggtggggaaaagattgagaaatcggatggttgccgtgtctgtgtagaaagaagtagacatgggagacttttcattttgttctgtactaagaaaaattcttctgccttgggatcctgttgatctgtgaccttacccccaaccctgtgctctctgaaacatgtgctgtgtccactcagggttacatggattaagggcggtgcaagatgtgctttgttaaacagatgcttgaaggcagcatgctcgttaagagtcatcaccactccctaatctcaagtacccagggacacaaacactgcggaaggccgcagggtcctctgc

SEQ ID NO: 24250 - DNA, 1098 bp, Artificial sequence
  DNA replication origin
ggggctcctcacttcccagacgtggcagccgggcagaggcgacccccacctcccagacggggtggctgccgggcgggggcgccccccacctcccagacggggtggctgccgggcgggggaaccccccacctcccagacggggcggctgccgggcgagggctccccccacctcccagacggggtggctgccgggcgggggtgcccctcacttcccagacggagcggctgccgggcggaggggctcctcacttctcagatggggcggccgggcagaggtgctcctcagtttccagacggggtcgtggccgggcagaggcgctcctcacttcccagacggggtggcggccgggcagaggtgctcctcacctcccagatggggtggcggccgggtagagacgctcctcacctcccagacggggcagccgggcagaggtgctcctcacatcccagacggggcggccgggcagaggcgctccccacgtcccagatagtgggcggccaggcagagacgctcctcaattcttagacaggatgacggccgggaagaggcgctcctcacttcccagactgggtggcctggcagaggggctcctcacatcccagacaatgggcagccaggcagagacactcctcacttcctagacgggatgacggctgggaagaggcgctcctcacttcccagactgggtggccgggcagaggggctcctcacatcccagacaatgggcagccaggcagagatgctcctcacctcccagacggggtggcggccgggcagaggctgcaatctcagcactttgggaggccaaggcaggcggctgggaggtggaggttgtagcgagccgagatcacgccactgcactccagcctgggcaacattgagcactgagtgagcaagactccgtctgcaatcccggcaccttgggaggccgaggcgggcagatcacttgaggtcaggagctggagaccagcccagccaacacggcgaaaccccgtctccaccaaaaaatacaaaaaccagtcaggcgtggcggcgcacgcctgcaatcccaggcactgggcaggctgaggcaggagaatcaggcagggaggttgcag

SEQ ID NO: 24251 - DNA, 1662 bp, Artificial sequence
  DNA replication origin
gatggacgcacccttgccgtgctgctgccagccgccctcggtctggtaggcggcgctgcccacggcccagaggaagccgtcggggaaggtgccctggaagaggcccgcggcctcgggggcaggaggccgcgagaaacgggcccaggtctgcgcgccgtcgcccggctccgcacgcaggcggcggccgcccaggcccagcagcaccagcagcagcgacagcgacggcggcggcggccgcgggcggcgcggcggggcgctggcgggcatgctgcgcgggagccaggctccggggccccgcgccgcgcccctttatgcccgcgccccgccgcgcccgcccgcccaccgccggcgcgcccacccccgctccccggcgggctccgctggcaataattacctgcgagccgggactgcctccgccctggcactgggggcgggggcaggggcgccgagggcgaggggtgcccgggaggggcgcggcagcgggcaaggtgcggcaggcgtcgcccgcggacgtcggagaaaggcacctgtttctcccagctcccgggagccgtgcaggacgtttcgtggacgctcaggttcattctctttgcctgccgcgcgtcctctgagagcagccctggagcggcttcgtcggggagaaaaggcgccgaccaactttccccgacttgggggcgggatcctgccgggccctagcggagcgcgccgctggggaagcacctgctctcacttttctcccactcggaggcccaaagaagctccggctggacattgctggagccaattagggactggccgaaatcctagagggactgccaggtgggacagccgagggggaacttcgccgtgcgctgaaagggattcccccttaggtgagatgctcgcggggagacgcgcccacccgcgcccctctttcgaggaagacaaagtagatttatgggttgcgttgggactggggttttgctctcccttttactgttaccttttaataatttcaaaccagcactctatctttgattagatctctcagaataccctggtgaacttcaaatcacagtcgttgattgttctcctgaaaaaccaaacaccaagtttccaattttgagtaaatctcattcacctttattatcctttggcatctgtgttacctttcggctctgacttagcaggtaatctgtgcaaagttgtgcgcacaggtctgctggagcgggaggtccctgggtcgcacatttgccatctgagctgtggagggaaaggggagggagaatttagccggaacacccattcccatcctctacaatacaatggagccatgacgtttttcctgttgccaaagagcccttttgacagaagttgcagagccacagtgtccatttggatgtgggtagataggattgtggctaaccgaaatacagttggtggagactgagaaggtctaggctccacctttgtgatttggggcaggaaacctctgtaagcctaagtttcctcctctataaaataaggatgtcctgtctgccctgccgcctcagaggcttgtgaagtccagtgaaaaactgcgcaaaggtgactcaaagacagaaagcccagacaagtgaaggatcttgctaatatccctacctccctacccagtaagtcgtgccttagtttcctcacccgtac

SEQ ID NO: 24252 - DNA, 1120 bp, Artificial sequence
  DNA replication origin
cagtctgccgttgggcgccccgtcgccgctgcagcccgccaccggggacgtagccagcgacagctacaacaacgtcttccgcgacacggaggcgctgcgcgagctcggggtcactcactaccgcttctccatctcgtgggcgcgagtgctccccaatggcagcgcgggcgtccccaaccgcgaggggctgcgctactaccggcgcctgctggagcggctgcgggagctgggcgtgcagcccgtggtcaccctgtaccactgggacctgccccagcgcctgcaggacgcctacggcggctgggccaaccgcgccctggccgaccacttcagggattacgcggagctctgcttccgccacttcggcggtcaggtcaagtactggatcaccatcgacaacccctacgtggtggcctggcacggctacgccaccgggcgcctggcccccggcatccggggcagcccgcggctcgggtacctggtggcgcacaacctcctcctggtgagtgcgaggggccaggcggagggccacgcaggggagacagagggcctccacaggggccagggggaagtgtgggaactgagtctcccccagacgaggcttcacttggacacgtgtatgtggtcaccgggggaaactgagcagttctgacttcccttggaaggcgtggaattaggagagaaatcccttagtgggcacacgagtgagtgccccttggagtccatctgtggaaaggaagcggtgataggtttccgcagtgaggaaagaaactcctttctctgggtgtagaggaattcctagaggtgagggcggggaggatttgctaggagtaactgcaggaagagaatgagcagggtggatgaaagaaacacgtttgttcttaagccgcacagatagcattactctctggagctgtcacgagttcagtgttaatccaataagatctgtcttgcttgtggcacaagttcacactgttgtgaaagtgtcaaaacacaactcccggagagtcagatttaaactgtgtttggaggtcccttctgcggcagggcagggaactgcatccaccaatcttattcaccggggtgtgaagaccgctttatacaatctcaaacaaagctagtc

SEQ ID NO: 24253 - DNA, 1127 bp, Artificial sequence
  DNA replication origin
gccgcgtccgtcctttccagtcgccgggagtctgagtcgcgggccacgcgggagtggcggtggagagcccgccggtcgttatgaggacggatctaaaatgaccagcaaacggaaaccttgccaaacgcagctcaggagatccatcagtgagcagttgcgggactccacggccagagcctgggatctgctgtggaagaacgtccgggagaggcggctggcaggtcagtgccccggagacgccgcgacccacgggggcgggggaggcgccggccccgtagcccgcccgggcccgccgccctcctctgctctgggctccagggcatgagtttcagagcccaaggccggggcgagcgggctgcgggcaccaccctccctgggccgggccccgagcgccctcccgccgcgcctcccggtgggtgtgggctccgtgccggacgcgcgcgctgacagccaggcctggtgctccatgctggcgggccgcgggacgggttacctggaggggctgcccccgggcggccttttagcctaggctgtcccctgctccgctgccatcccattccaccccagtgaataagtgcccagaccaagtggcccttcgcgagggctgccccttcccaacttcgccttctccacgtgggacacatccactgaatgcgcgggagggagagtgaatgcaaggcaaggagcacgtccgaagcgccgcagaccagccactcgggggtagagggggggatgtgacgggagacaggtggacggtagttggtgcaggtagctggctggctgtccgcaggccctgccagctgtgaaagcaggctttcctccctttgaggttgcaaggaaaggcctccctttgggactccattgtccacgaaccacagcaagagaggaagtgattgttttgagccaggaggtccttaagaatccttgcgtggatcagaaggccgccccctccttagtacctctcccagtgtcacactgccccttgctgcttctgtgcatgctccatggagccctctttctgtagggccaaggatgcagtgggcggtccagccatctcagagccttcactgggagctttaggacactttagtcactgcctcatgcctgccccaataagggaacgtggc

SEQ ID NO: 24254 - DNA, 1299 bp, Artificial sequence
  DNA replication origin
gggctgacccccccacctccctcccggacagggcggctggccaggcggggggctgacccccccacctccctcccggatggggcggctggccaggcggggggctgacccccccacctccctcccggacggggcggctggccgggtgggggggctgacccccccacctccctcccggaccgggtggctggccgggcagaggggctcctcacttcccagtaggggcggccgggcagaggcgcccctcacctcccagacggggcggctggccgggcggagggctgaccccccccacctccctcccggacagggcggctggctgggcggggggctgacccccccacctccctcccggatggcacggctggccgggcgggggggctgactccccacctccctcccggatggggcggctggccgggcggggggctgaccccccccacctccctcccggacggggtggctgccgggcggagacgctcctcacttcccagatggggtggctgccgggcggagaggctccacacttctcagacggggcggctgccgggcggaggggctcctcacttctcagacggggtggttgccaggcagagggtctcctcacttctcagacggggcggccgggcagagacgctcctcacctcccagacggggtctcggccgggcagaggcgctcctcacatcccagatggggcggcggggcagaggcgctccccacatctcagacgatgggcggccgggcagagacgctcctcacttcctagatgtgatggcggctgggaagaggcgctcctcacttcctagatgggatggcggccgggcggagacgctcctcactttccagactgggcagccaggcagaggggctcctcacatcccagacatgggcggccaggcagagacactcctcacttcccagacggggtggcggccgggcagaggctgcaatctcggcactttgggaggccaaggcaggcggctgggaggtgtaggttgtagtgagccgagatcacgccactgcactccagcctgggcaccattgagcactgagtgaacgagactccgtctgcaatcccggcacctcgggaggccgaggctggcggatcactcgcggttaggggctggagaccggcccggccaacacagtgaaaccccgtctccaccaaaaccagtcaggcgtggcggcgcgtgcctgcaatcgcaggcactcggcaggctgaggcaggagaatcaggcagggaggttgcagtgagccgagatggcagcagtacagtccagcttcggctccacatgagaggg

SEQ ID NO: 24255 - DNA, 768 bp, Artificial sequence
  DNA replication origin
ccggccagccacccggtccgggagggaggtgggggggtcagcccccccacccggccagccgccccgtccgggagggaggtgggggggtcagccccccgcctggccagccgccccatccgggagggaggtgggggggtcagccccccgcctggccagccgccctgtccgggagggaggtgggggggtcagccctccgcccggccagccgccccgtctgggacgtgaggggcgcctctgcccggccgcccctactgggaagtgaggagcccctctgcccggccagccgcccggtccgggagggaggtggggggggtcagccccccgcccggccagccgccccgtccgggagggaggtggggggggtcagccccccctgcccggccagccgccccgtccgggaggtgaggggcgcctctgcccggccgcccctactgggaagtgaggagcccctctgcccggccaccaccccgtctgggaggtgtgcccaacagctcattgagaacgggccaggatgacaatggcggctttgtggaatggaaaggtggggaaaagattgagaaatcggatggttgccgtgtctgtgtagaaagaagtagacatgggagacttttcattttgttctgcactaagaaaaattcttctgccttgggatcctgttgatctgtgaccttacccccaaccctgtgctctctgaaacatgtgctgtgtccactcatggttaaatggaaaaaaaaaaaaaaaaagaaagatttggtttctgcacaagag

SEQ ID NO: 24256 - DNA, 943 bp, Artificial sequence
  DNA replication origin
gtagaaaaggaagattagaaagactcagcgacgcttggggttgggactgaggggacaggcgggagggaaagaaggaagatttgggacgagttgcactgggcacagagactaggaagggactgatgtgtaaaagaatgcctggacgtcaggcacctcagaccatttgcccattttacgacaataattatttagatcttgtaggatggaaaaattgaaagtgccgttttccggctatttggaactactgtcgaatttgtattggggtcaagcagcattgtagaagaaaataaggcatttaggttttaggtcaggtgttagttgaagaggttttaggtttttgagaacacaggctaagggagaagagggaggaatggaaggtggaagcttacccatagtgaaggaggcaagcccagagaaaagagtagagacacggagaaggggtggggggttcttgccctccagaaaagcagagaaggggttggggcacggaaataagaggtcagggtgcggaaataagggattggggcgcagagataagaggttggggtgcagaaataagtgattggggggttcttgccccctaggaaagcgggacttgctgctgagggtgaaggagaaggggttgaggggtacttgcccctgccccaggaaagcaggacttgccgctgagggtgaaggagaaggggttgaggggtacttgcccctgtcccaggaaagcgggacttgccgctgagggtgaaggagaaggggttgagggatagtgagggaggttggagaagagagtaaaaagaggccgcttaccggatttgaaattggtgagatgtttcctgggctggttggtctgaggacctgaggtcgtaggtggatctttctcatggagcaaagagcaggaggacgggggatagatctcccaagggaggtcccccgatccgagtcacggcac

SEQ ID NO: 24257 - DNA, 1634 bp, Artificial sequence
  DNA replication origin
gtatctacgtgcctaaattatcccagttgtgtgacaagaacttgtattttcctacaacagtttgttgtctttgagctatttggcatgggtttataaactgtagataactgatagacatgtaggttccatcgtttccagcacacttccctgctccttgtaaaaaaaaaagaaaaagtttcgttcccattaaaattcgattcctttttatttatgtttttttttcaatttttctttttttttttttgtgagcaataaagctgtttatttcacctgggtgcaggtgggctgagtccgaaaagagagtcagcgaagggagataggggtggggccgttttataggatttgggaaggtaatggaaagttacagtcaaaggggcaggggtggatctcacaaagtacattctcaagggtggggagaattacaaagaaccttcttaagggtgggggagactacaaagtaccttcttaagggtgggggagattacaaagtacattgatcagttagggtggggaaggaacaaatcacaatggtggaatgtcatcagttaaggctgtttttacttcttttgtggatcttcagttacttcaggctatctggatgtatacgtgcaagtcacaggggatgcgatggccttgcctgggctcagaggcctgacattcctgccttcttatattaataagacaaaacaaaatagtgttgaagtgttggagtggcgaaaatttttggggggtggtatggagagagaatgggcgatgtttctcagagctgcttcaagtgggattaggggcggcgtgggaacctagagtgggagagattaagctgaagggaggtcttgtggtaaggggtgatattgtggggatgttagaagaaacatttgtcgtataaaatgattggtgatgacctggatacggttttggatgaattgagaagctaaacggaagatacaaggtccgaataaaaggaggagaaaaatgggtattaaaggactaagaattgggagggcccaggacatccagttagagagtgcccaagggggttcagcgtaattactttcttggttggcaagtttttgggctctatccttgagtttttttatgttgtcatacaccaggccagactgatttaggtaaaaacaacactcctcatttaagaatatgcagagtcctcctttttcagcagtaagtcaaggcctcggcggttttggaggacaactgcagctaaagagtcaacttgggcctggaggactgataaagtttgtgattttgagggcctctaaaagtattaaagcagcagtagccgctgcacgcagacatgagggctaggctaaaacagtaaggtcaagttgtttggacagaaaggctacaggatgtggtcctggctcttgtgtaagaattccgaccacgctaaccatgcctaagaaggagaggagttgttgttttgtagaaggtgctggggtttgagagatcagtcggacactattggcagggagagcacgtgtgtttttatgagaattatgccgagataggtaacagatgaggaagaaatttgggcttgattgaagtaatgggggctgtctgtgaagctttgcggcagtacagccttggtaatttgctgagcctaatggatgtcaggg

SEQ ID NO: 24258 - DNA, 1211 bp, Artificial sequence
  DNA replication origin
agcggctgcagcatctccgcggggggcgggccgggccggacagaccgggagagggagagagcagaggcagcggcggcggcagcggcagcggcagcggcacacctgctgggcgggcacagccgcttgcccggcagcggttagcggtaccgccaccgccgagaataagcctgcggatcccccgccgcctccgcgggggagagcgccggagcgggccgggctgaggcgcaggcggggagcgggcccggcgccgcggcgctggtggatgctggggctccgaggcgacggccggggggcgggggccgaggcaggtataacggtaccggcggcggcagcgccgctgctcttcccttctcctcaggaggggggccaatggctagcgagaagccgggcccgggcccggggctcgagcctcagcccgtggggctcattgccgtcggggccgctggcggaggcggcgggggcagcggtggtggcggcaccgggggcagcgggatgggggagctaaggggggcgtccggctccggctcggtgatgctccccgcggggatgattaacccttcggtgccgatccgcaacatccggatgaaattcgcagtgttgattggactcatacaggtcggagaggtcagcaacagggacatcgtggagacggtgctcaacctggtaaggaaaaggcgtgctctcaatctgcttccccagtccccacatacaccgtccccagcgcctttccctcccacccttcacccccagggtcacacgcgccgcgcgtccctgggagcgcagagcgttcagccggtattgcccagcgggtgacctgcctgcgcgctgctagagccacgccacctccctcctctcctctttctggtcctctcctgccacctgagcgcagtgcccaacttaacaccgcttcttctcactttttaggaccgcgagtaacccagtacccgcggtgaaggttttgggtcgactttagagtttagttaggaggtgaggaggcctcctgttctctggggttctttttctcacacttaattgtccttggtgtcgctctccgaggatgacagccttgcccctggagcctaaattcccccgtgctgctgaaatgtgagaagcgcattagcttccaacttgagcagctggggtgtgatgttttcgaaggagacagaaaatgatgcagttttgcatctgtctttaaatattccaaggccatg

SEQ ID NO: 24259 - DNA, 1008 bp, Artificial sequence
  DNA replication origin
gttgttttcatcatgaaatagtgaagatgtggtgttttgggggctacctttacctgccaaaaaagactgtgcatgaccaaattggtttaggtcaatctgcgacaaggcagtaggcgagtggtgcaggcagagaggggccgcctggcaggaggagccttagggactcaggtgcaagagagttctcaggaacttggaaaaaggctggtttactaggggtgctggctgctgggggtggttcctgaaggacttcgcttcactgagcttagaatttatccctccaatcagtgttgttgaaaatgtgcccaagaagtgcttggggtgggaggggggagcggtgggactctagatcctgcttttaaaaataagctccccaggtgattttcaacccaccagagtttaagaataccattttaagccattggtattggtttttcaaagtgctggggggttctggggggcgctggggggcactaggggggcgcggggcggcagggagggagatgactggatgggtgccttcgcagcagggcggagcatggatgggaggggacaggtcagaggtcaggaggttttcggacagtccagatgacagtgctggaaagggcaggggcagtttcaaaagacactttaggtagtgatcagtcagttggctggagtgcctggcaggagggctgggtgagggagccagcagggcagatgactgacagatttctggtttggggataggatggaaagtaagagcgcaaaccttccttaggctactgttgggtctgtccctttagtctcgggaatgcggatggaagcacggcctgcagttctgtcattctctgggcctgtctgggccgctgccccaaccacccatgccaatctgtgtgaccgaatccccctcagcccactcgtggctgcccttgctaccacccatgccaatctgtgtgaccgaatccccctcagcccactcgtggctgcccttgctagcagctgctcagcctctccaggtcctcggtccct

SEQ ID NO: 24260 - DNA, 1191 bp, Artificial sequence
  DNA replication origin
cccaggagtgggaggggtgggggcgttgggaatgggggatggggtgggtttgcaggcgccagcccgggaggggccagagagggaaccagaagacttcggggaactaaagcctaaaacaggagtggagaagggcgtgggtacatagggcgtggagagagaagaagcggagaggcatgggggagattcagagccattaggaggggtgggtgggggactggtgggctgagtgtgagcagacaaagggctgctgcagctctcagctctcaccaactgtgtgcagccatcgggccccacagcttctctgagcacctatggactggacgccccggagctgattctcatcaggttgccaggagatggaccctgggaagagggaccgttcgtttcctggaactgccataagaacgtaccacagactgcggggggggggggggggggggcggcagaactacagaaatgtattgtctcatgattctggaggctgaaagttcaaggtcaacgtggggtcagggttggtttcttccaggccttctcccagcctctgggggtttccccacgagctttgcgtccctctgcctctgcatcacccactctctgccttcatctgcatatggccttcatctgcacctgtctctgtgtccacatttcccctttataagcacaccggtcacagtggactaggcccattctgatgacttcacctaaactcgatcacctctctaaagaccttatctgcaaataaggtcctattctcaggtcctgggggttaggactctagcatagcttttggagtgggaggggctggggacacagttctacccgtagcagggacgtggcaggggtaagctgagggaagtcttttacgatcacccagaagttcatgaattactacagtctccagatggcttttacaacgtgtcccgggccgttaaggaggcagaaatgaagcgattccgctggtgtcagaggaagaagccaccctattctcccagtgtcagtgacagcaaaaacgtggcccatctttccctggagccataggtagggttgtcttcagtagtgtatcaggtggctcaggctgccataacccacaagccaaataccacaaactcggtggcaggcgtgacagaaacatatctcctcacagttctggaggccagaagtccaaggtgaaggtgtctgcagggtcagtgt

SEQ ID NO: 24261 - DNA, 910 bp, Artificial sequence
  DNA replication origin
tggtcaacagagccaagaagagcggcaagagtccccaagatagaggctgacatgggccaggacctaggtggggcggggaagttagggggcgggaggcctatttcagagactgaaatgggatgatggagaggtggagtaggtggaagggaaacttattccctgaggtaacttgaatgccgacaggacagagacctggggataccttggtggaagcagaggatcaactgattaattctttaaagggcatggagggtctcgagtatgttcacacaacagaaaagactgggccaggccgggcatggtggctcaagcctgtaatcccagcattttgggaggccgaggcaggcagatcacctgaggtcaggagttcaagaccagcctggccaacgtggcaaaaccccgtctctactaaaaatataaaaattagccgggtgtggtggtgtgtgcctgtaatcccagccacttgggaggctgaggcaggagaatcacttaaactcaggaagcgtggaggttgcagtgaggcaagatcatgccattgctctccggcctgggcgacaagagcaagactctgtctcaaaaaaaaaaaaataaaataaaataaaagaaaaaagacaagacaagactgtgccagtagaaaagaagtgtcctggtaatggatggaatcatgatcagcaggaggctaaagacacaggaggagaaagggttcagggcctggatggcagggacattggacagggagggacccaccttcctgtgaaactcgaggggaagggcagggtgagctaggtgcagaaggggttgaagggggaggggcaggggcgggaagccagggccacctcctttgaagtcctccatgtttccatgtgaggaggaggggaagtcacctgcagggagcgggagtggcaggcca

SEQ ID NO: 24262 - DNA, 1196 bp, Artificial sequence
  DNA replication origin
tggaggttgcagtgaggcaagatcatgccattgctctccggcctgggcgacaagagcaagactctgtctcaaaaaaaaaaaaataaaataaaataaaagaaaaaagacaagacaagactgtgccagtagaaaagaagtgtcctggtaatggatggaatcatgatcagcaggaggctaaagacacaggaggagaaagggttcagggcctggatggcagggacattggacagggagggacccaccttcctgtgaaactcgaggggaagggcagggtgagctaggtgcagaaggggttgaagggggaggggcaggggcgggaagccagggccacctcctttgaagtcctccatgtttccatgtgaggaggaggggaagtcacctgcagggagcgggagtggcaggccacagccttggatcccttcattgctgaatggcttccagagacatcaccgatgcctgaccccacagctcccagcaggctgcaggagagagaagaggggtgggtggggtgggaggaagagctagagggaaggaagttcgagtaagagagcagctgaagggctgacttgtggtctagggagggacccgggaagcaaacccaggggagccagggagggagctggaataacggggctctggccagcaagtgggaggatggagcgggttggggggaaggtgtaggaggagcagcgggtgatgacaagatctgggtgtggctgtgggtgtgagtggctgggtttgccagagcctgcgggggtttaggaagtgaagggggcattccaggacacccgatgggggggcccacattcgaggcctcagctaaggccagccaaaacagtgtccagtgtgtccaaagacagatagtgcccccaccctggggcatgggagcaaaggaagaggacgggagagtgatgcgtgggaaggggtgggcccacagaggaagggaggagaaagagaggaagggccaggggacaggcacaaggggtggggacggacctatgttgcctcagtggggaccctgcttcagagaggcaacactgctgcctggcctgcggtgtcttggagcctcgcctcccaaatgtgaactctgcaggcacctcttctaaaggcaaaggattctctgggagtcccagtttttttgtttgtttgttttgttttgttttgtttttgagacggagtctcactcgctcacccag

SEQ ID NO: 24263 - DNA, 904 bp, Artificial sequence
  DNA replication origin
gagagaggctggagtgaggctgtgcgaagcgccgcatttcaatgaggacgggccgaggcacatccctgcactagtggccgcaaccgaggcgccgcgctccagcagctgctgccgcccagcccggccccgccgccgccccccagccctgcagccccgcagccccggccgcgcccagcccggcgaggacagcaccaggaggcggcccccagcgcggccacaaagacccccggcggcgtctctccgcggaccggtgcgtggtttgccttccctggggacgggagctgcggggagggcggccgggggactccgcagagcccgctccgcccgcagccgcggggcgccgagggcagggcgggcgctcagcttggccccgccgccccgcccgcagttcctcgaaaggcggccgccctgccctggccagcctggcccgacccgggggcgttgcgtgcgggcggccccggggctgctggcacctgcctcttttgtttggtgccatggggctttaaacctggagtcaggcgagcgggccctcccaggcttttcgcgttgttagtggagatggagagccagggcggaggagctgggagaggtgcttgtcattgtcagaactggctgcggagcgggaaccaaggaaggagtggccgggcccggcctcttattgtgtgtgtgcttttccgtgtgcccgggccagtgatgtgtgcttgtggatggggtcgattcgtgcgtggtggtggctgcagcgtgggtgttgcaagtacgtttgcagggtctcaagttccttcagggacagcgaggctgcctcatgttcaaattagtacctgcagtgctaaaagcttgcggagaggaaatggcattttttcctcctagtgggagcgcacgcacagccccgcaatgccccacaaaa

SEQ ID NO: 24264 - DNA, 1199 bp, Artificial sequence
  DNA replication origin
acttggaaagtatttcagaatagaactttttaataataagtagtcaaacacataactgggatcaatgggcaagagaaaaataaaattttaatgttccattgaaaggtgtaggctcaggaagagagaaaaatacttatgtgtattttgtatactcatgtgtatttgggacaaacacaggttgtggacgacaggattgaaagtcagattaactggatcaaaattcaggctgcgtactgagccagtctaagatttcaccgaaatctgggagctgctcccactccctggacttttgtgcaaagactggaggaagctgtgaacagcctgggctaggagaacattccccctctgggaggagaggctcgcatgagctcatggggctttccaccgcagacccagccttggcagccacaaagtgtccagcagtgaaacctggcccttcagttctcaagggccctttggaacatatttgactctaagcagaggtcactattccaagagtgactcatgtcttggggttaagtggagatgatgggtgggatccatgaacagatccagctcttcccaatgtggggggcaccagagtgcatagcttgggagggttggtcatccgaagaggcactgcgtgggtgcatcccgggcaaaaaggatgagaaggtgatccactggcttccataccctgggaaaggtgtcagaccgtgaggtcacatcaaaaggtatgagtgtgggtacctccttccctcccccgacggtgggggcctcatctctcggccatatcacctctgtgccttgcacacttcctggctcagactcagccctgtccacgttctcttccaccatctgatctgcccccatctcccaaagactacttgtggggactagggaggtttaggggtgtagtcaagccagatgcaccgaggttgctgcggtgggaagagggcgctgggagggaggaggacctggggcgcagccgtggtgggtgcgccctgccaagaagggcgggggcgacggggcgcgcacgcggaggaggaggaggaggagggagacgggagggcgtgtgagcgagtgagacaagaaaagggagcgcgcccgccgccgccgccgccgccgccctcctctggagagagaggctggagtgaggctgtgcgaagcgccgcatttcaatgaggacgggccgaggcacatccctgcactagtggccg

SEQ ID NO: 24265 - DNA, 1160 bp, Artificial sequence
  DNA replication origin
aatgagcattaaccttgactatggctttagctccagccacctttttaagagtaaattgctgggcaggagggggagggctagtcacagaactaaactgtaagccagaccaggtgtgaggaggggaggtgataaaaagattatagggtggagtagcagaggctgaggaagaattgggacctagctcggcctggcagggagtagcctggggaggaagggagaggtcagatgggtctgtagaaaaggaagattagaaagactcagcgacgcttggtgttgggactgaggggacaggcgggagggaaagaaggaagatttgggacgagttgcactgggcacagactaggaagggactgatgtgtaaaagaatgcctggacgtcaggcacctcagaccatttgcctattttacaacaagaattatttagatcttgtaggatggaaaaattcaaagtgccattttctggctatttggaactactgtagagtttgtattggggtcaagtggcattgcagaagaaaataagacatttaggttttaggtaaggtgtgagttgaagaggttttaagtttttgagaacacaggccaagggagtagaaggaggaatggagggtggaaggttgcctatagtgaaggaagcaagcctagagaaaagagagagcagagaaacggagggaaggggttcggggttcttaccttccagaaaaggggttggggcgcagagataagaggtcagggcgtggaaataagggatggggtgcagaaataaggggtcagggcatggaaataaggggtggggcacggaaataaggggtcggggcacggaaataaaggattggggcgcagagttaagttagggcacagaaataagggattggggcacagagatataagaggttggggcacggaaataagggattggggcacagagatacgaggttggggtacttgcccctcctctagaaaagcaggacttgctgctaagagtgaaggagaaggggttgaggggtacttgcccctcccccagaaaagcagagaaggggtagagacaaggagaggaggggttggggtacttgccccttccccagaaaagcgggacttgccgctaagggtgaaggaccaaggcaggcatccctgcgtggtctaacacctttgaaacgtggg

SEQ ID NO: 24266 - DNA, 967 bp, Artificial sequence
  DNA replication origin
cttgggtccgaaggggacggacgtcctcccacgtaccatttagaaggtcagagtgggcagaacctagtctgagcaggccggtgatgaatccgctggcaagacgcgcgcgtgggtactcacgtgacctaggctgcggcggcggcgtgctgcgggctctgtggcgggagcgaggccgacgggcggggccgcgcggccgcgtgacgcgaagcgttcgagagcgcgcgtcgtggaacgtcttggttgccacggcaagcgcgcgcgcgaggccttgggaacctcgggaccggcccccggcgagcgcagcggcgcccagtgtaagggagtgggagctggtccgtgccgcggcggccgcgcagggagctctcgaggcaacgccggggcgcccgaggtctggaaggcgcaggtggggcgcgggggagttcacccctgcgcggtcccttgggtgggcggggtgggcgccccaggccccgcggactcggctgggaggctgagcgggcgacggtcacgggacaagggtggagggggtggggacctcatccgagtctcagagatggaattttcgaggaagggagcgatttcgagagagaatagtttgagaagttgttctcagtcccttctctcgcgggagtgtggtatttagggaagcttcggcctcttaacccatggactgttaggatggagggaatccttcccgctcgattcctatcgcggagtcctttcggagcatcgctattgatcattctcgccgccccaaccccgttgtttactttggcttcgcagatctctgtggtcttttgccctcccgcagcgcccatggccccgtcaaggttgggcagcctttctctgcaagaaggcccacgaacaactgcggttatattgggatggattgcgcgtgattttactctttacaatacattctttcatgcttcctagggattgagctgcgcggcggatccctccgacttaa

SEQ ID NO: 24267 - DNA, 1313 bp, Artificial sequence
  DNA replication origin
aaacagtcccttccaaagccggggccatcgtggggtgggcgagtccgccctcccaggccgggggcgcggaccagaggggacgtgtgcagacggccgcggtcagccccacctcgcccgggcggagacgcacagctggagctggagggccgtcgcccgttgggccctcaggggcctgaacgcccaggggtcgcggcgagtccacccggagcgagtcaggtgagcaggtcgccatggcgatgcggccccggagagcgcacgcctgccgcggtcggcatggaaacgctcccgctaggtccgggggcgccgctgattggccgattcaacagacgcgggtgggcagctcagccgcatcgctaagcccggccgcctcccaggctggaatccctcgacacttggtccttcccgccccgcccttccgtgccctgcccttccctgcccttccccgccctgccccgcccggcccggcccggccctgcccaaccctgccccgccctgccccgcccagccggccacctcttaaccgcgatcctccagtgcacttgccagttgttccggacacatagaaagataacgacgggaagagcggggcccgctttggggtccaggcaggttttggggcctcctgtctggtgggaggaggccgcagcgcagcaccctgctcgtcacttgggatggagaccggctttcccgcaatcatgtaccctggatcttttattgggggctggggagaagagtatctcagctgggaaggaccggggctcccagatttcgtcttccaggtaacgtgggtttagtatcccgacttggaggcttgtcagaatgtttctctccttccagcccaacacgaagtcttgggataaaaagcctccctcagggattcaaataactgttttgattcagagcaactttgatcgcctgtgcggtcgcacctgccctttcagccccaataattactgggaagatcagcaattggtgttagtcccattgcttggtgctctccctcctagaggttcgctgtgtccttggagcccggggtggacggaatcgactaaacagcttgtctgtttctctttccctggtagcagcagcccgtggagtctgaagcaatgcactgcagcaaccccaagagtggagttgtgctggctacagtggcccgaggtcccgatgcttgtcagatactcaccagagccccgctgggccaggatcccccgcagaggacagtgctagggctgctaactgcaaatgggcagtacaggaggacctgtggccaggtaatgactcagacgcattgagaatgatgcttgtggagaaca

SEQ ID NO: 24268 - DNA, 1166 bp, Artificial sequence
  DNA replication origin
cctcagctgggaggatccacccagccaggaggaatggatctgggtcctgtttaaaggagcaatctggccatgctgtgctggggacaaaacagccgagctgtgctggggaaccacctctgccccactcggcttggactctccaaagcctgcaggctggagtggctgatttgcccaaactgcaaagatggcggtctgcacctctctatgggcactatgtcagagggagaaatcaaaactctgtccatagaataggggcaggggtagccggaggtcccggctgggaagacctgccccatcaggaggagtggattggggtcctgtttaaagaagcagtctggccacttctggcaaagcaactgtgctgtgcagggagtggggtggggggtgggaggtagagggaagggggcggagggaggatggggggtggggttggggatgagggatgttggggaggggtggggggttcttccttgtccggaccgtttgaattctctaaagtctgcaggctggaatgtctgagtcaaccaaatgatagagttggtggcttgcccctcccccttgggggctccgtcctgtttcagggtggctccaccctgttgctggtggctggctggaattccaagccagtgggtattttcttgtgaggtgctgtggaagtgggatttgcaaactgatgctgctcagtcccctggattcagcccccttgctaggggtatgtacggacctcctgccttgcctgagttgcagttccctttgtcagagatcccagctggagtctgtaagctcctgggttacagctggaatctgtaagctcctgggtctgtgtgcatgcctgagcagctgctccgcctaccctccacatagctctgtgtgtcagacccaaagctgtggtggcatgggctcacaaggggatctcctgatctaagggttgaaaatacccgtgggagaagcatggtttcccagggtcacacattcactcaccgcttcccttggctggaggtgggggttgcttggctccatgctgttcctggatgggccgtcagcccaccctgcttttcttccttctccatgggttcaagttgtttccctgatcagttccagtgctagtacctgattattttggttgaaggtgctgtattcactcaccccttttattcctctgtgag

SEQ ID NO: 24269 - DNA, 890 bp, Artificial sequence
  DNA replication origin
tataggcgccttttaccccagcgtgtcctgagtctttggttcgcgaagtgccgttaggccaagcaggtgctaaaagcccggggtcgtggaccccggccaggtcttagcagcatggaggcgcagggtgtagcggagggcgcggggccgggcgccgccagcggcgtgccccaccccgcggccctagccccggctgcggctcccaccttggcgccagcctcggtggcggccgcggcctctcaattcaccctgctagtgatgcaaccctgtgctgggcaggacgaggctgcggcccccgggggcagcgttggggcgggcaagcccgttaggtacctgtgcgaaggggccggggatggcgaagaggaggctggggaggacgaggcggacctgttagacacttcggaccctccggggggaggcgagagcgcggctagtttggaggatctagaggacgaggagactcactcggggggcgagggcagcagcgggggcgcccggaggcggggcagcggtgggggcagcatgagcaagacctgcacctacgaaggctgcagcgagaccacgagccaggtggccaagcagcgcaaaccgtggatgtgcaagaaacaccgcaacaagatgtacaaggacaagtataaaaagaagaagagcgaccaggccctgaactgcggtgggactgcctcgactggcagcgcgggaaacgtcaaactcgaggtatcagacttagctgaggcctggggatgggaggtggaagaagaaacccgatcttaacgcaaaccgcatctgcagggcctgcctccccacttccaaatgggccggtttgcagtgactgggttagtggttgagaattagagtgtttgccctaaattaaagtttataccaacatgtgcaaa

SEQ ID NO: 24270 - DNA, 1506 bp, Artificial sequence
  DNA replication origin
gtccccgccgccgccgccgggccctgcaggcgctgggcgcgcgcagccaggcagtgagtgcgcggcgctcggagcgggcggccgggggaccacggcgggggcggggttgggggcgccggacctgggtgggggagggatgagtggcacggcggggacaggtaagacgtgccctcctcggccgcgcgctgcttgtgtgcgtgcgtgtgagcgcattgagtggagggcgaagttgttcgtcctcggggcagcctgggaggctcctcggcgtgaggcttggcttttggcggtcgttgttcccgggttttttggtggagcctgtctggggtggagtggggtggggtggggtgggcgcggggccggaggggactgctctggggagttggccgcggcgcagctcgccttcctcgcgcctgcatccgcccgcgccgcgggccccgggacctgtcaggggatgttcgacccgcggcgggggcggcggtcgggtcggggctggggcccggggcgtgggcagggaccaggataggcgcctgaggggtcgcttgctgtagctggagataggggacagcggacagagggggcggcgggggtcgtcattgtgactctttgggggccacttttaaactcgccagcgccgaattggcctcacttgccttctgtttcgtaggctttttgctttgtttacctttgaggcatgcgaactgagaaaaaaagttaggaatgttgttgaagtgtctccgggctcgcgcttggactgtgtcggagccggggtgtttgtcttttccttggcccgcccctcggtgccagctctccgcagaggggagggggcgaggtgggaagcagatacaggagactgcctgacgccagctttgtgatcggaaggaggagcgctgggagaacatttttatggatggctaatcgctgacaagttttcccgttactattccttcctcctcctgcccttgaccgtggacatttgaagtgatagtttggaaatactacgttgacttatttctgggctggagtgggtactcctgagaactaacctacaaaggatacaaatcgagtttggagataaaattgtatgtaaattctttacccagtagtttacagtgagaaacacacccacagggcactgtggagtgctttggatggatccagtttactagtaccatttcggtggcttgccagatttctcggatgatcttttggaaatgtaggttagcaagaagcatggaggctgaccgttaagtcgtgaggcatttaataatgctgcctcctaagcagtaactgagcggaacgtttgtggcacccgtctgggaaagtgaaatgtgactactacaagcatgtctcctgccttagcattcctccaagtgtgagggaatgcctttggatgtttacattttaaaaatagtgatctatatttaagaaggcatttaaaataaaagccaaagacattctcaactccaaatagacaaagattcaatataagagtttccctgtgcttgt

SEQ ID NO: 24271 - DNA, 698 bp, Artificial sequence
  DNA replication origin
gcctggggtcgcgcagggggaccgagagggcagcgcggggctgggggtggggaagaggcgggaaccgagccgcaggccgctgcgaggagtactaccccgccacccccgcgccgcgagtttccgcgcacgtggccgtggggccggtctcgctcccgccccccgccgggcccgcgcagccccctcctctgcggctcccggagcggccagagcgcgcggcggcgggcgggggcgggccgcaagcagggctccctggccgctttccaggtcggcgcactaatacgggcgatgaggcttcgcggctccagtctgactgacgccggctggggccgccgccgccgccgccgccgccgccgctgctgcagccgctgtctcggtccccgccgccgccgccgggccctgcaggcgctgggcgcgcgcagccaggcagtgagtgcgcggcgctcggagcgggcggccgggggaccacggcgggggcggggttgggggcgccggacctgggtgggggagggatgagtggcacggcggggacaggtaagacgtgccctcctcggccgcgcgctgcttgtgtgcgtgcgtgtgagcgcattgagtggagggcgaagttgttcgtcctcggggcagcctgggaggctcctcggcgtgaggcttggcttttggcggtcgttgttcccgggttttttggtggagcctgtctgggg

SEQ ID NO: 24272 - DNA, 1072 bp, Artificial sequence
  DNA replication origin
caaccccgcccccgccgtggtcccccggccgcccgctccgagcgccgcgcactcactgcctggctgcgcgcgcccagcgcctgcagggcccggcggcggcggcggggaccgagacagcggctgcagcagcggcggcggcggcggcggcggcggcggccccagccggcgtcagtcagactggagccgcgaagcctcatcgcccgtattagtgcgccgacctggaaagcggccagggagccctgcttgcggcccgcccccgcccgccgccgcgcgctctggccgctccgggagccgcagaggagggggctgcgcgggcccggcggggggcgggagcgagaccggccccacggccacgtgcgcggaaactcgcggcgcgggggtggcggggtagtactcctcgcagcggcctgcggctcggttcccgcctcttccccacccccagccccgcgctgccctctcggtccccctgcgcgaccccaggctcggcccctgcccggcctgccggggtggcccgggggtggggtgggagccctttgtctgcgtgggtcgcctcgcgtctctctctcccaccccacctctgagatttcttgccagcacctggagcccgaaaccagaagagttgtcagcccaacaagaatataggatcaccggcccatcagtctggagacccttctgagctgctgttcctcacatgtttctgggccctgatagtgactctcacttgccctgtttgttcctgatttgcttttcggagtaaggggatcctgtccccatggacagtgacagagcaactgggccgcaatggcataggcagaagaaaatctaatcactctgggggtgagtggtggttaaaacgactcatgtaattatgtggattgtaatttccttacacatatttatttgcttaacaacccagcatgtgagatatattatctaatctaataaaagatacaaacttatgggcacacagcaatgttactgtacaactttctcgtctcacggcctggctgtcccccaggtagcctgcctcttaaagtcactgtggactcctggaacccactcagaaacgcca

SEQ ID NO: 24273 - DNA, 1253 bp, Artificial sequence
  DNA replication origin
ccctgtgccccacgtcccggaagcaacctcctgtgctgcccccaaactcatgcagccaggtgggacccgaccctaggcccggagctttcatcactcgggactctggccccacactgctgctctcacccacgcactgctgctgtggggagggcgtggggaggaggcggagctgggcccggggctgtgccacgcttcacgcttcacggaaccagcgggagccaaggacaagcaggagccgccccgcagccccttgggggccgccgctatgaggccaggccaagtcgcccagcccagagggggagtgatggagccacgcgattgggcacagaggagtgggcagagaggcacccagcaaggacctggagcccccgccccaggctgtgaggaggcatggcccgggctgcctgcacattccacagagcaggcaggagccccaccttcccaggtgcaggacccaggccgtctgtgggatctgtacccttgaggtcaggaaggcccccctgtccccacaggctcggggaagcctgctcctgcctggcctctccctgttccctgcactgctttgatcttggagctgggttggggccaagctcagggcagtgctgacacgccagccccctgctgcctagaccccctccggactttgggcactgaggagtacaggggaagccgaggggtggctgagagcagcttggtgctggcctacaggtgccccttgactcgagcattctgggctccatggacagctgcaggaggcagacaggctgttaagagggtagaagggggcaggtccctggttaggccagggaaggcctgaaggcttggggctgactgcccatccagttgataggagtgggaggtggtggcttttctggccacccgccatggcctctcatagaccaatcagcgggcacttctgaggccataaaagcccaggactcagccagagctgaacagatgacgggatgaccagctgcagagaggagctaccctctctgctggtagctggaccatgggaggaacagctgcagagaggagccactctccctgccaagagtgaacacttgttgggacgacttgcctgcagagaggagctaccagctctcagttaggagctgaacacttgacgggacatcctggctgaggaaaggagctgccccttgtgggagactgagctgttctatcgctcaataaagctcttcatcatcttgctcacccttcacttgcatgcgtacctcattcttcctggtcac

SEQ ID NO: 24274 - DNA, 1320 bp, Artificial sequence
  DNA replication origin
caaagccgccattgtcatcctggcccgttctcaatgagctattgggcacacctcccagacggggtggtggccgggcagaggggctcctcacttcccagtaggggcggccgggcagaggcgcccctcacctccaggatgaggcggctggccgggcggggggctgaccccccccacctccctcccggacggggcggctggccgggcggggggctgaccccccacctccctcccggacggggcggctggccgggtggggggctgacccccccacctccctcccggacggagcggctggccgggcagaggggctcctcacttcccagtaggggcggctgggcagaggcgcccctcacctcccggacggggcagctggccgggcggagggctacccccccacctccctcccggatcgggcggctggccgggtggggggctgacccccccacctccctcccggacgggtggctggcctggcgggggggctgacccccccacctccctcccagacggggcagctgccgggcggaggggctcctcacttctcagacggggtggttgccgggcggagggtctcctcccttctcagatggggtggctgggcagagacgctcctcacctcccagatggggtcgtggccgggcagaggcgctcctcacatcccagacggggcggcggggcaaaggcgctccccacatctcagacgatgggcggccgggcagagaagctcctcacttcctagatgggatggcggccgggcagagatgctcctcactttgcagactgggcagccaggcagaggggctcctcacatcccagacaatgggcggccaggcagagatgctcctcacttcccagacggggtggcggccgggcagaggctgcactctgggcactttgggaggccaaggcaggcggctgggaggtggaggttgtagcgagccaagatcacaccactgcactccagcctgggcaccattgagcactgagtgaaccagacaccgtctgcaatcccggcacctccggaggccgaggctggcggatcactcgcggttaggggctggagaccagcccggccaacacagcgaaaccccgtctccaccaaaaaaatacgaaaaccagtcaggcgtggcggcgcacgcctgcaatcgcaggcactcggcaggctgaggcaggagaatcaggcagggaggttgcagtgagccgagatggcagcagtacagtccagcttcggctcggcatcagggggagaccgtggaaagagagggagagggagaccgtggggagagggagaccgtggggagggggagagggagaccgtgg

SEQ ID NO: 24275 - DNA, 947 bp, Artificial sequence
  DNA replication origin
tccgcccggcagctgccccgtctgggagggaggtgggggggtcagcccccccgccaggccagccacccgtccgggagggaggtgggggggtcagccccccacccggccagccgcccgatccgggagggaggtgggggggtagccctccgcccggccagctgccccgtccgggaggtgaggggcgcctctgcccagccgcccctactgggaagtgaggagcccctctgcccggccagccgctccgtccgggagggaggtgggggggtcagccccccacccggccagccgccccgtccgggagggaggtggggggtcagccccccgcccggccagccgccccgtccgggagggaggtggggggggtcagccccccgcccggccagccgcctcatcctggaggtgaggggcgcctctgcccggccgcccctactgggaagtgaggagcccctctgcccggccaccaccccgtctgggaggtgtgcccaatagctcattgagaacgggccaggatgacaatggcggctttgtggaatagaaagcggggaaaggtggggaaaagattgagaaatcagatggttgccgtgtctgcgtggaaagaagtagacatgggagacttttcattttgttctgtactaagaaaaattcttctgccttgggatcctgttgatctgtgaccttaccccccaaccctgtgctctctgaaacatgtgctgtgtccactcagggttaaatggattaagggcagtgcaagatgtgctttgttaaacagatgcttgaaggcagcatgctcgttaagagtcatcaccactccctaatctcaagtacccagggacacaaacactgtggaaggcctcagggtcctctgcctaggaaaaccagagacctttgtgcaattgtttatctgctgaccttccctccactattgtcctatgaccctgccaaatccc

SEQ ID NO: 24276 - DNA, 1411 bp, Artificial sequence
  DNA replication origin
attgcaactcagaaatatgttgctacttggctgcctctactctactattgtacaccttgaaggcgaggttaattaagttctgttgtggggtttgagggccagaatttaatttttggagttctatttaatgtcgggagcacatagggtaataaaatgtatattgagaataagacggccttttgaccttttagggtctaggggtgtaaagcatctcagggttgctgccaaacgagccatgaactgggctgaatttttatgtttgatgaaaaagagcctaaacgctatctgatttgggataaagaaaaaggagcattaaccttgactatgccttttgctccagccacctttttaagaataaattgctgggcaggtgggggagggctagtcacggaacgaaactgtaagctggactgggtgtgaggaggggaggtgataaaaggattatagggtggaggagcagaggctgaggaagaattgggacctagctcagcccggcgaggtggggagaggtcagatgggtctgtagaaaaggaagattagaaagactcagcgacacttggggttgggactgaggggacaggtgggagggaaagaaggaagatttgggacgagttgcattgggaacagagactaagcagggactgatgtgtaaaagaatgcctagacgtcaggcacctcagaccatttgcccattttacgagaagaattatttagatcttgtaggatggaaaaattgaaagtgccattttccggctatttggaactactgtcaagtttgtattggggtcaagcggcattgcagaagaaaataaggtgcttagattttagggaaggtgagagttgaagaggttttaagttcttaagaacacaggccaagggagaaggaggaatggaaggtggaagcttgtccatagtgaagaaggcaagcccagagaaaagagagtagagacacagagaagggttggggggttcttgccctccagaaaagcagagaaggggttggggcatggaaatacggggttggggtgcagagataaggggttggggcatggaaataagggatcagggcacagagataagtggtcggggtgtggaaataagggatcggggtgcagaaataagaggtcagggttcctgcccctcccccagaaagcgggacttgccactaagggtgaaggagaaggggttgaggggttcttgcccctctcccagaaaagcgggacttgccgctaagggtgaaggagaaggggttgaggggttcttgcccctccctcagaaaagcggagaaggggtagacatatggagagaaggggttggggttcttgcccctcccccagaaaagcaggacttgccgctaagggtgaaggacaaaggcaggtgtccctgtgtgggctgacacctctgaaacctg

SEQ ID NO: 24277 - DNA, 1499 bp, Artificial sequence
  DNA replication origin
gactgcttcggctgccccttccctcccggacctccgcggggggagggcgggttctctccggccgcgccgcggagctgtttccgccgggcgcggcgggggagggcgcggcgaggggccccggagcctcgctgccccgggaccgggctgcaggtggaggggacaggcagggcgcgaccggccggggacggtgcagggcctgccgggcagtttctggaggcggtgcgcattttgctttgttttggttttctccggagtggcctcgagtgccgggggcccggcgtcccgagcccgaggtggtgcctccgacacgtgcgaaggggcggccaccgcctgcggagcgccggcgcctggccgcgcggggcgagctaaagttcaagtgtgaccctcggcgggggcgggcgcgggcggtggcggtggcggtggcggtggcgtgggaggggccccgggcgcaggaagcccgcgcctttaaagggccagcgcgtcggggccgggcgccgtggggccagcgtttctccatgcggggaagcgcccgaacttggtcttgcccctggtaggaggcttttagttagaaacacagaggctgccctgaggggccgggggctgggatgtgtgagtcttttcctgccttgccaccctattcttgagcatggaggaccaggcgggggggctttgcgaccaatgttttgagggagtcggagtggcggtgcgcgtcgagggagcggtgccttgaaggaggatttttgccatttttgcctttcagagcgtggccaggagagacttagcgtgggggcaggcacttcccgactccgaggagaaggcccgggggccctcggctccggggaggcttcccgggggcggggtccagtcgtggcgcggcctccccaagctgacagtttctcactgtcaccggtggcggaattgctgtaaaggctgtctagttgagctaaacacctccctcccctcctccgagacggagtctcgctctgtcgccaggctggagtaccgtggcgcgatctcggctcactgcaacctccgactctctggttcaagcgattctcctgtctcagcctcccgagtagctgggattacaggcacgagccaccacgtcgagctaatttttgtgtttttagtagagaccgggtttcaccatgttggccaggatgttctggatctcctgacctcgtgatcggcccgcctcggcctcccaaagtgctgggattacaggcgtgagccaccgttcccggccgagctaaacacctttttaaaacatacctttcttcgcctctcatattggactccacggcataataaagattggtctttgctgcgcagttgttaacaccaaggttattttacacacagtgtcatccctgtggttaatgcgtgtcaaaagggttaagttactcacaccttattgaagttcctttagaaggaattcaagattcattttattttttccaaagtgtgttttagagtaaaggtatcacttatcgcttcat

SEQ ID NO: 24278 - DNA, 918 bp, Artificial sequence
  DNA replication origin
gtgattctctcgccttctcagtgttttgattgctaggaagcaaaccagcgtggaggcgccggcgacactttgtttactacggagcagcagagccgagtactcgggaagcccgggtgggaggaggcgctcgctgctccctgacctccgctgcgggccgagcccggcgggctggcagggcagggggccgagggccgggggcgcggggtgggcgggcggaggcggccgcgaggaattctactcaatcgctccctcctggctccacccacgatgtctttgctgaacgacgtggggaatcggtgggttttgttttggtttaatgttttctttcgctgcgatctgtcaagtcctccggccccctcgcgagcggcacacgccccccacccccggcgccgcggctcctgcagtcgagtccgcgccgagggacccttctccgtgcccaccggtccgcacccccgggctcagcctgtgccattcggtctagccagaggcgcgtcacccagccggcagcccccagccggattcactgtattcttgaccttttttaaaatgctagaaatgaggaacaggggctccggcgcggggaggagattatctggcctccctgaacacacgaatccaaaggcacccgcgaccgcatgccctccgtgggaacctcttcccctgggcgggaatctcccgctccgtccactaagtccagggccggcagcgaagggctcaggagcgcagttagagagaaccaggtcattttattacttatccctaattaaatttagctgtttgttacttcttttttatttgcaacggaagtgatcgggtgttaagtaaaaacgcaaggggggcgggagataggaccaaagccttggggcgcagcctgccccacccccaaattccttgaggctacttgctgtgtgtgtcagt

SEQ ID NO: 24279 - DNA, 1289 bp, Artificial sequence
  DNA replication origin
cccccacttccctcccggacggggcggctggccgggcagaggggctcctcacttcccagtaggggcggccgggcagaggcgcccctcacctcccggatggggcggctggcccggcggggggctgacgccccccctccctcccggatggggcggctggccgggcggggggctgaccccccccacctccctcctggacggggtggctggccaggcagaggggctcctcacttcccagtaggggcggccaggcagaggcgcccctcacctcccggatggggtggctggcccggcggggggctgacccccccacctccctcccggatggggcagctggccgggcagaggggctcctcacttcccagtagggatggccgggcagaggcgcccctcacctcccggacggggcggctggccgggcggggggctgacccccccacctccctcccggacggggcggctggccgggcagaggggctcctcacttcccagacggggtggctgccgggcagaggggctcctcacttctcagacagggcggctgctgggcggaggggctcctcacttctcagacagggcggttgccaggcagagggtctcctcacttctcagacggggcggccgggcagagacgctcctcacatcccggacggggcgacagggcagaggcgctccccacatctcagacgatgggtggccgggcagagacgctcctcacttcctagatgggatggcggccgggaagaggcgctcctcacttcctagatgggatggcggctgggcagagacgctcctcactttccagactgggcagccaggcagaggggctcctcacatcccagacgatgggcggccaggcagagacgctcctcacttcccagacggggtggcggctgggcagaggctgcagtctcggcactttgggaggccaaggcaggctgctgggaggtggatgttgtagcgagccaagatcacgccactgcactccagcctgggcaccattgagcactgagtgaaggagactctgtctgcaatcccggcacctcgggaggccgaggctggcggatcactcgcggttaggagctggagaccagccccgccaacacagcgaaaccccgtctcctcccaaaaaatacgaaaaccagtcaggcgtggcggcgcgcgcctgcaatcgcaggcactcggcaggttgaggcaggagaatcaggcagggaggttgcagtgagccgagatggcagcagtacagtccagcttcggctcggcatcagagggagaccgtggaaagaggggag

SEQ ID NO: 24280 - DNA, 1031 bp, Artificial sequence
  DNA replication origin
ctgggaagtgaggagcccctctgcctggccagccaccccgtccaggagggaggtggggggggtcagccccccgcccggccagccgccccatccgggagggagggggggcgtcagccccccgccgggccagccgccccatccgggaggtgaggggcgcctctgcccggccgcccctactgggaagtgaggagcccctctgcccggccagccgccccgtccgggagggaagtgggggggtcagccccccgcccggccagccgccccgtccgggagggaggtgggggggtcaccccccgcccggccagccgccccgtccgggagggaggtgggggggtcagccccccgcccggccagccaccccgtccgggaggtggggagcgcctctgcccggccgcccctactgggaagtgaggagccactctgcccggccaaccgccccgtccaggagggaggtgggggggtcagccccccgcccggccagtcgccccgtcggggaggtgaggaaccctctgcctggccgcccctactgggaagtgaggagcccctctgcacggccaccaccccgtctgggaggtgtacccaacagctcatttagaacgggccatgatgacaatggcagttttgtggaatagaaaggggggaaaggtggggaaaagattgagaaatcggatggttgccgtgtctgtgtagaaagaggtagacatgggagacttttcattttgttctgtactaagaaaaattcttctgccttgggatcctgttgatctgtgaccttgcccccaaccctgtgctctctgaaacatgtgctgtgtccactcagggttaaatggattaagggcggtgcaagatgtgctttgttaaacagaggcttgaaggcagcatgctctttaagagtcatcaccactccctaatctcaagtacccagggacacaaacactgcggaaggccacagggtcctctgcctaggaaaaccagagacctttgttcacttgtttatctgctgaccttccctccactattgtcctgtgacc

SEQ ID NO: 24281 - DNA, 1536 bp, Artificial sequence
  DNA replication origin
ctccctcccggatggggcggctggccaggccgggggctgactcccccacctccctcccggacggggcggctggccgggcagaggggctcctctcttcccagtaggggcggccaggcagaggtgcccctcacctcccggacggggcggctggccgggtggggggctgacccccccacctacttcccggacggggcggctggccgggcagagggactcctcacttcccagtaggggcggccgggcagaggcgcccctcacctcccggacggggcggctggccgggcggggggctgacccccccacctccttcccggatgggcagctggccgggcagggggatgacccccccatctccctcccggatggggcggctggccgggtggggggctaacccccccacctcccttccggacggggcggctggccgggcggggggctgacccccacctccctcccagacggggtggctgccaggcggagatgctcctcacttcccagacggagtggctgccgggcggaggggctcctcacttctcagagggtgtggctgccgggcggaggggctcctcacttctcagacgcggcggttgccaggcagagggtctcctcacttctcagacggggcagccgggcagagacgctcctcacatcccagacagggcggcagggcagaggcgctccccacatctcagacgatgggcagcctggcagagacgctcctcacttcctagatgggatggcggccgggcagagacgctcctcactttccagactgggcagccaggcagagaggctcctcacatcccagacgatgggccgccaggcagagacgctcctcacttcccagacggggtggcggccgggcagaggctgcaatctcggcactttgcggggccaaggcaggcagctgggaagtggaggttgtagcgagccgagatcacgccactgcactccagcctgggcaccattgagcactgagtgaacgcgactccgtctgccatcccggcacctcgggaggccgaggctggcggatcactcgcggttaggagctggagaccagcccggccaacacagcaaaaccccgcctccaccaaaaaaatacgaaaaccagtcaggcgtggcggcgcgcgcctgcaatcgcaggcactcggcaggctgaggcaggagaatcaggcagggaggttgcagtgagccgagatggcagcagtacagtccagctttggctcggcatcagggggagaccgtggaaagagagggagagggagaccgtggggagagggagaccgtggggagagggagagctacacactttcaaaccactagatctcatgagaactcattcactgtcacaagaacagtaaggggaaaatccatctccacgatccggtcacctcccaccaggcccctcctccaacattggggtttacaattcaacatgagatttggagcggggacaaatccaagccatatcactcccttttttttaacaaagcattttttgcatgtattcacattttttgttcagagcaaaccaat

SEQ ID NO: 24282 - DNA, 1331 bp, Artificial sequence
  DNA replication origin
ccgccccgtccgggaggtgaggggcacctctgcctggccgcccctactgggaagagaggagcccctctgcccggccagccgccccgtccgggagggaggtgggggagtcagcccccggcctggccagccgccccatccgggagggaggcggggaggtcagccccccgcccggccagccgccccgtccgggagggaggcgggggggtcagccccccgcccggccagccgccccgtccgggaggtgaggggcgcctctgcccggccacccctactgggaagagaggagcccctccgcccggccagccaccccatccaggagggaggcggggaggtcagccccccgcccggccagccgccccgtccgggagggaggcgggggggtcagccccccgcccggccagccgccccgtccaggaggtgaggggcgcctctgcctggccgcccctactgggaagtgaggagcccctctgcccggccaccaccccgtctgggaggtgtactcaacagctcattgagaacgggccatgatgacaatggcggttttgtggaatagaaaggggggaaaggtggggaaaagactgagaaatcggatggttgccgtgtctgtgtagaaagaggtagacgtgggagacttttcattttgttctgtactaagaaaaattcttctgccttgggatcctgttgatctgtgaccttacccccaaccctgtgctctctgaaacatgtgctgtgtccactcagggttgaatggattaagggtggtgcaagatggctttgttaaacagatatttgaaggcagcatgctcgttaagagtcatcaccactccctaatctcaagtacccagggacacaaacactgtggaaggccgcagggtcctctgcctaggaaaaccaaagacctttgttcacttatctgcacttatctgctgaccttccctccactattgtcctgtgaccctgccaaatccccctctgcgagaaacacccaagaatgatcaaaaaaaaaaaaaaaaaaaaaaagaaagttggaaaggcttcaggattgtcagttaaatataattgtttttgcctgggtctactgacaggtttacatcgtctctattacttttttttttttaatttgttttttgtttttgagctggagttttgctctcattgcccaggctggagtgcagtggtgagatctcagctcaccacaacttccgtctcccaggttcaagtgattctcctgcctcagccttccgaatagctaaactacacgtgtatgccaccatacttggctaatttttgtatttgtagtagaaacaggatttcaccatgttggccaggct

SEQ ID NO: 24283 - DNA, 1251 bp, Artificial sequence
  DNA replication origin
cattcgcttctccagcaggcacggcgtggcactcgaggctccaaaagccgcagcccagctcctggcgccactaactacagtaatgcttattttctacaaactcacccagacggggacaagaaaggagccagaacacaagatttaaaaagtcagccctccaaaccgatagttgcaaaaaaaaagaaaaataaggaagcgttcccataccgggagtcgaacccgggccacctgggtgaaaaccaggaatcctaaccgctagaccatatgggaagtgctatgagaaactgccgtgacccacctgacaagcataagtgcctctgcctccttcgccgcacctctcgccaccgccgcctctgcgctactgaagctgctgctgccgccgccgccgccgccgccgccgccgccgctgctgctgcccacacgctcccgagctagggaacaagccccatccgagcgcgtgggcgtcgtaggggagaggaggggcggggccgctccgctgcaacagcaaagtttgaggcgaagcctagcgactcgcagcgccggtcccgcagtttcacctcttttttttttaactccgccagaggaccccgacccacaggtcccggttgctccgctggtcaaagtgcgtgcggagtagttggcaaagttgagagcggagacgtctctgggaacagctgtttgcgttccgggcggaggcggcgcgctgagctccttggccttgagccagcgagcctagaaggaggatggaggttttgggccccaggggaggacacagagacggcgggatggcgcagggacttgaggcttgagatcccgtccttcagctcaggtcccgtcgcgcttttaccccttcccggtgacctcaacccctttataccgaccccacctctttggagccgggagtaccgcccctgtagggggaggggagaggaggcgatttcgaacgcggattggatcgtctgggcacccgtagttgggaacagcggaacgctggtcccggggactgagtaaggtgtctggatcggagggaggttcgggtgggcatcgggcggctggaagagctcgactcgtcccgctgggaaagcgcgagtctgagtggaaccctggacgacttgcagagcggctggcgcagtcatgtgagttgggtctcaggccctgaacaacgaggtgttgtttctctgggccgccctttctcgcccgggtcttcccctcctctcctcccgcccttcggccgggggcgtgacagacgcg

SEQ ID NO: 24284 - DNA, 1904 bp, Artificial sequence
  DNA replication origin
cccgccggggaggatggaagggtggggggtgtgaagggacgacacggggcccctcctttctcacccgccatctgcagagccgagactttaaggggaccccggaccccgcactcacctgcggccgcggcggccgcggggctgccctgcgccgcgggcggcttcatgaggcggctcagctgggcccggcgcgcgtggccttgggtcctgcgaggtggcagccggggctattcgggggcttgctgtcccgcacacttcagccctgccagtcccttcggcgctgcgctccagccgcgccgctcccagcacggtccgcgcccgccctaccaccggctcgggttcctagatcttatagccttcggcggccggagcggaggcggggccggggcggggctgcggagccggggcgacgggtctgtccccgccgccctccgaggaggcccctgcccccaggcaccgccctcgccacgcgcccgccctggaaccgcggtgacgaggagtcgccgaagccccggttacagccccaaatatttacccgcctctcgcccccgcgccctgacaacccggcccacgcggtgtcctcggcgtcaccagagctgactgctgggcgcgagctctgctgcttcccgccgcgtgccaggcacctccgcgagccgcagcttcctcggctgtgaagtggacgtgggcatgcagagcctccctggctggcggtgagggacgaaggagcccgcggccgtgtcccagtcgggtgtcggggacgcggaggtcccctacgcattgtcccaaggggacttccgagatggtgggcgggcggagtggagagggtcggggcgagaggggcaggagttgggggagtcctgaactgttcccaccgcggagcgcgggggcctgaactacggtccagggcgctcccgccagcctgactttatctagaaggggtttattatgggaagaaactactgcgtcgacgcagcgcgaacagggcgccttgcagtgtccacggagtaacgagccaccctgccccgcggcctgcgggggcgaacgccctggactgtgcgctgagctaggcgctagcctctcgcctctcaccacagacggctaattaaatgtagagcaattaacatgtaacggagtgaaacattcagcctccactcccagctagtttttgtatttttagcagagacggggtttgtccatgttggccaggctggtctcgaactcccgacctcaggtgatctgcccacctcagcctcccaaagtgctgggattacaggcgtgagccaccgcacccagccaggatttgttttcagaatatagaaagacccatctacaaagtaatcacaaatagacaacctggtaaaaattaaaaatgagcaaaacattgaaacatacacctcacaaaggagtatatgttaatgaccactaatcatatgaatagtcctcctctcttgtctactctgggtggcctagggatatgcttgtcttgtggaggcacaagcactgtgggctcaagagtggggagcctctttccctgttaaggggaggacaccactgggatctctggtgccatctcctgcaatggatcctctgatgtggggtcgaacagaacttcaggagttgatttccctgggtgagtggagcgggatccttccttagctatctgtccctttgctactagtattgctgctgcatgccctcagccactgtgggggttctagcaccagctgtcaccaagtgtctatgtatgggaactggtctaggtatctttaccagttaccttgtgccacgccttagaaacaagggacctgtccaggcttccttctgatggccaacccacttctaatggtgcgcaatctatttcccacaaggttctaagttcccctggtggtctagtgcttaggattcgg

SEQ ID NO: 24285 - DNA, 1331 bp, Artificial sequence
  DNA replication origin
ccggtcttcccgcgcgggcggctgcagcctcctttccggcccgggctggcccccatgtcccaccttccctccaccaccagctccgcgcgcgcccggggttggggggagcggcggggacaggtaaccggcagcgcctggggaggaatctggccgcgccaagtcgctgggtgaccctgggcctggcgaaggctcagttttcttgtctgtaaaacggacttggtaatagaacgcacttcgggggtggtggagaagattacaaggtaacagcgactgcgtggctgtcacttggcagaggcgccaagtgtcagttatcttcgggaaccgtggcggcccctcctggccctgggaggtggtcccgctgcccccctgacttccgtgcactgagcccctggccctgcccgcagccccggccctggactcggcggccgcggaggacctgtcggacgcgctgtgcgagtttgacgcggtgctggccgacttcgcgtcgcccttccacgagcgccacttccactacgaggagcacctggagcgcatgaagcggcgcagcagcgccagtgtcagcgacagcagcggcttcagcgactcggagagtaagtgcggcccccgctaggatggcgccgggatctcccagctcccaggacctgccccgcgaaggctgcggcctcagttttcttatcagtaaactgaggaatggtttcctgaagctcaacgcagtaggccgagtggtggcggggcccctgacgataatcacgggaaaggtcgctggagggcaggttggttcacttgccgcccacgggtgtgtcaccaggcaggcgagtttaagcagcttgtcccgactcagccagacaggactccctggacctgcaccaggcctttccgcagtttccctcctcttctcctttccgtgcctctcccctctcagctgtaactttgcagatgtggaacaagtgccagtggaatgagggggcacagtggggacatgggagggcgcagaacggaaatattcatgaaaccaggaaaggtttcataagcccaaactgctgttcttgggatttatgaaataactgcttgcattgtcttctggcccttagctctcagacttgttgctccattgcatgcagttatgaaaatctttggcactgctgagttcaagtatttttcagccaggtcctccaccaggctggagggggagccagagagcacatgggcatgaaggtggttcctggtgatctttctcacaatggagactaccccagggtctctttgtcctgaacaactttgtcaacaacagcaacaacaacaaaaacaacaaaagagacagctttttccag

SEQ ID NO: 24286 - DNA, 1044 bp, Artificial sequence
  DNA replication origin
tgtctacttctttctacaccaacacagtaacaatctgatctcttttccccacatttcccccttttctattcgacaaagccgccatcgtcatcatggcccattctcaatgagctgttgggtacacctcccagacggggtggcagcctggcagaggggctcctcacttcccagacggggcagccgggcagaggcgccccccacctccctcccagacggggcggctggcggggcgggggctgaccccccacctccctcccggacggggcggctgccaggcggaggggctcctcacttcgcagacgggcagctgccgggcggaggggctcctcactgctcagacggggcagccgatcagagacactcctcacctcccagatggggtggtggtcgggcagagacactcctcaattcccagacggggtcgccaccgggcagaggcattcctcacatcccagactgggcggccggtcagaggggctcctcacatctcagacgatgggcggccgggcagagacactcctcacttcctagacaggatggcggccgggaagaggcgcccctcacttcccagactgggcggccagtcggaggggctcctcacatcccagacgatgggcggccaggcagagacgctcctcacttcccagacggggtggcggccgggtagaggctgcaatctcggcactttgggaggccaaggcaggcggctgggaggtggaggttgcagcgagccgagatcacgccactgcactccagcctgggcaatgttgagcactgagtgagcgagactccgtctgcaatcccggcacctcgggaggcggaggcaggtagatcactcgcagtcaggagctggagaccagcccggccaacacggcgaaaccccgtctccaccaaaaaatgcaaaaaccagtcaggtgtggcggcgggcacctgcaatcccaggcactctgcaggctgaggcaggagaatcaggcagggaggttgcagtgagccgagatggcggcagtacagtccagcctcggctttgacaactttggtggcatc

SEQ ID NO: 24287 - DNA, 883 bp, Artificial sequence
  DNA replication origin
cccatcgtctgggatgtgaggagcccctccgactggccgcccagtctgggaagtgaggggcgcctcttcccggccgccatcctgtctaggaagtgaggagtgtctctgcccggccgcccatcgtctgagatgtgaggagcccctctgaccggccgcccagtctgggatgtgaggaatgcctctgcccggtggcgaccccgtctgggaattgaggagtgtctctgcccgaccaccaccccatctgggaggtgaggagtgtctctgatcggctgccccgtctgagcagtgaggagcccctccgcccggcagctgcccgtctgcgaagtgaggagcccctccgcctggcagccgccccgtccgggagggaggtggggggtcagcccccgccccgccagccgccccgtctgggagggaggtggggggcgcctctgcccggctgccccgtctgggaagtgaggagcccctctgccaggctgccaccccgtctgggaggtgtacccaacagctcattgagaatgggccatgatgacgatggcggctttgtcgaatagaaaagggggaaatgtggggaaaagagatcagattgttactgtgttggtgtagaaagaagtagacatgggagactccattttgttctgtattaagaaaaattcttctgccttgggatgctgttaatctataaccttacccccaaccccatgatctctgaaacatgtgctgtgtccacccagggttaaatggattaagggcggtgcaagatgtgctttgttaaacagatgcttgaaggcagcatgctccttaagagtcatcaccactccctaatctcaagtacccagggacacaaacactgaggaaggccgcagggtcctctgtctaggaaaac

SEQ ID NO: 24288 - DNA, 727 bp, Artificial sequence
  DNA replication origin
cccggccgccccgtctgagaagtgaggagaccctccgcctggcaaccgcccgtctgagaagtgaggagcccctccgcccggaagccgccccatctgagaagtgaggagcccctccgtcccggcagtcaccctgtctgggaagtgaggagcgtctccgcccagcagccaccccgtccgggagggaggtgggggtcagcccccgccaggccagccgccccgtccgggagggaggtgggggggtcagccccccgcccggccagccgccccgtccgggaggtgaggggcacctctgcccggccgcccctactgggaagtgaggagctcctctgcccagccagtcgccccgtccaggagggaggtgggggggtcagcccccagcccggccagccgccccgtccgggaggtgaggggcgcctctgcccggccgcccctactgggaagtgaggagccctctgcccagccgcccctactgggaagtgaggagcccctctgcctggccaccaccccgtctgggaggtgtacccaacagctcattgagaacgggccatgatgacaatggcggttttgtggaacagaaggggggaaaggtggggaaaagattgagaaatcggatggttgccgtgtctgtgtagaaagaggtagacatgggagacttttcattttgttctgtactaagaaaaattcttatcctgttgatctgtgaccttaccccccccccccccccccc

SEQ ID NO: 24289 - DNA, 1199 bp, Artificial sequence
  DNA replication origin
ccaggcagaggggctcctcacttcccagtaggggcggctgggcagagggctcctcacttcccagtaggggcggccgggcagaggcgcccctcacctcccggacggggcggctggccgggctgggggctgacccccccacctccctcctggacggggcgactggctgggcagaggagctcctcacttcccagtaggggcggccgggcagaggtgcccctcacctcccggacggggcggctggccgggcggggggctgacccccccacctccctcccggacggggcggctggcctggcgggggctgacccccacctccctcccggacggggtggctgctgggcggagacgctcctcacttcccagacagggtgactgccgggacggaggggctcctcacttctcagatggggcggcttccgggcggaggggctcctcacttctcagacgggcggttgccaggcggagggtctcctcacttctcagacggggcggccgggcagagacgctcctcacctcccagacggggtcgcggccgggtggaggtgctcctcacatcccagacggggcggcagggcagaggctctccccacatctcagacgatgggcggccgggcagagacgctcctcacttcctagatgggatggcgaccgggaagaggcgctcgtcacttcctagatgggatggcggccgggcagagacgctcctcactttccagactgggcagccaggcagaggggctcctcacgtcccagacgacgggcggccaggcagagacgctcctcacttcccagacggggtggcggccaggcagaggctgcaatctcggcactttgggaggccaaggcaggcagctgggaggtggaggttgtagcgagccgagatcacaccactgcactccagcctgggcaccattgagcactgagtgaaccagactccgtctgcaatcccagcaccccgggaggccaaggctggcggatcactcgcggttaggagctggagaccagcccggccaacacagcgaaaccccgtctccaccaaaaaaatacgaaaaccagtcaggcgtggcgtcgcgcgcctgcaatcgcaggcactcggcaggctgaggcaggagaatcaggcagggaggttgcagtgagccgagatggcagcagtacagtccagcttcggctgggcatcagagggagaccgtggaaagaga

SEQ ID NO: 24290 - DNA, 1053 bp, Artificial sequence
  DNA replication origin
ttctccacggtcccgctcccctgcgcggctccgagcggtccgctccccgccaccgccgcagcctcccacgggcgcagaatccgcccctcgctccttcctccgcccccggcgccctccccttttcctccccgctacccgcccctcccccccgccgcccctcctcccggcgggtggcccgggacacacgtgacccccctgtcaggccttataaggcgcggaaccgaaagcggccgccgggtggtcacgggcaccgggcggccgcgcggaaaggagcggcctcccccggggccgggcgcgcggagagcggcgaggaaagcccgggctgggctgggctaggctggccaccgcgctggcgacgggagcagacgcgggtcccgggagacgcctcccagcgcccctgtctctcgctctcgccgtctcccggtgcagcccgcacccgcctccctccaaacgctggcggcccgcgctgcaggcgcctcccctcctgggggtgctgaggcttgagcgaaatcccactggacagtaaccggcttcagcggagcgaaaactcagccgcactccagctacgctccagggcaagctgcgccgggcaccgtttcttccttgtgacgttcaaaagaatgcagatgggttaccaactacaggagaggttaaacttgagggcgtgctttttaaattcattatcaacgttttcatggaaagaaccggctaaggagtcgatctgtcttccagttttatccctagactcaaattaggacatgggctggctctcagtgagcactcagtaaacagcaagtctcctcctgccctttgaaaaagcgtttcggatcatcttggcattgtaagcgattttcatctagttccagtccaagtgtgactggctttacacaggttactccccctcctggactttcaggttcgttctttcagcatcttttcagggccctcaatcatgccatcatgtcaaatgcattcacaaattttaaaaacaaatcgtcaagtcaaaaacacataattgatctagcccgtccccagccctctaattcttcagga

SEQ ID NO: 24291 - DNA, 1487 bp, Artificial sequence
  DNA replication origin
aggaggcggcggaggaggaagggaccggcgcgggggcgggagagcgcggcggaagccggagacggcgggtgggccggtggctggccccgggcggggagccggggcggcggcggcggcggccgagagggaccgcggcgagggaagcgcatccaggagccccggcgcagcggcggcggcggggacccgggtctgcgcgcccgggcggccggcgggcgcgggctggcgcgatggagcctcagcacgtgcgccccgcgcccggcgcccgcagcccagcgtgggaggaaccggtgggtaccgcgcccgcgcccaccccctcccgcttctcctttgctccccccgcccgggccgggttccgttcaggaaatggcccgggatgaggtccccagctgcttcccagccgggttagcgcttcctccgccgcccgggctcctcctcgcgcgccgcctggagcgcctttgtccggctgatcgaggctctccccgaggaaccgctggcaaaccgctggcgacggccctgcgaggaccgtttcccggcttcaccgactcctcaacttttcacttgctttgagaccgtggaatgtaggcgggggagaggagaagccaggctgcgcggtcagcgtggggagtctgaggagcccggttttccctgtcgagaccgcgccctggtcgtcacctgggcgcgcaggttcccggggacacgcgcctggagaggctgagcgcggcgcggagcccagaaccacgcctccgactcctgccagccgctaaagcttgggcgtctggagggtgcaacgggttttgccggggacgaagcagaaagctgacttcgctttcgcctgggatttcgctgcacacgcaacgcggaggttgagtaattttaggaaccaagagtagtgtgtgtgcgtgtcttaagtgtgcgaggataaggaggaagagaccagggggctttggatttgttccctcaaactccctcaacttccttctctcttccgattcaaacagaaccgtctcacatccctccagggattccaccccggaatccccctctcactcagagctctggaagcctgtgtgggctgccttttccctggcgtcgaattttgactctccacgccctgcctcgatatttgctactccttcttggttgacattgtgagccagtctgaaaagccccgtccgaaatttctggcctcacccatgttccggtcaacgtgttcggatgctgttttcccagggactctccgagtctgctcaggccggccctctgcctgttgagagccgctaggtcaggtgccagggttggctgtcctttttcttttctagtatatacgctctcagctcctttgcccagagtacctcctttgcccagagtacgtttctcggcctgattcctgacctttcagaagcgtccttcgactctgatccctctgcatctgcagctgtctttgctttcgtgaatttgaacatgtcgtcaggttgcccatctgctct

SEQ ID NO: 24292 - DNA, 1370 bp, Artificial sequence
  DNA replication origin
ccggcgcgttccagcgcccccgcgccctctccacctcccgctttccacgcggccctcaggcccgcctcctccgccctaccttggtccggatctgccccgaggtagacactttgcggatcagtttctggggtccctcttgctccgcttcgctgtcagacgaatcctctcccggccccgccgaggcagcggcggaggtgaccgcggcgccggctccggcggccgctcctccagcggcgcccggagggtggtgctggcctccggcccctgccatcctctccgactcctgcggggacacagcaccgcccggcgggggcggcggcgttggtcagcgggtgggctctgcccgagcggagcccggaaccccgtgcccggccgccgccgccatcttccgtttccctagctacccccgcgaggtaagggtcgcccggggcaggcgccctccaggcaggggtccacccggctcctccgctcggttcccgccggagcggcggccacggtgggacgcagaggtaacggacccccgcccgcctcggacccctgcgcacccagcctcggataggaccagcgcgggtagagaggatggggtgacagggtttggagcaacatctcttccactcccttacggtctgggtccctaggatggacaggagggtgggggaggcaggaaacctctgcagcccaccccgtagtggcgatgcccgcacaccccctctcacttctggacagcaggggcaacgccgatccctggggaagaatgggaacctggagcttcctcccagcacccttgggtgcacccgccacctcctgaaccccgaatctctccagagacacttgggcctcgccgcgcggttccagctgaataaaagtcccctctgccaccaagacagtcgggggctgcccctcgtcggtttccccacccccagccccactccgaggaccgtacctctcccgcctccgccagggccgtcgggtcccctcagctctcctgacggcggcgttcagtttctggcccacccccacccccatccggcgcacacggaagagaagagcattttccgggaggttcagctccgctctgagaacttttcgttcagaaagagcgatccccttcggctaacaggaaactgggaagggcgtggagaaagcgcagaaacaagagactacacgcagcccaagacgacagaacgcacaagaagtgtctaagctgaagcgctaaccgagattgcctggaagaaaacaatacactcgagccatgcgaacaccagtacccgagacaaaaagccttggaagtcctggcagagccactccctagcccggactagagcaggaggaagtgggatcaacaggctgtagccaccgcgcacaactcc

SEQ ID NO: 24293 - DNA, 1027 bp, Artificial sequence
  DNA replication origin
ccagcaccaccctccgggcgccgctggaggagcggccgccggagccggcgccgcggtcacctccgccgctgcctcggcggggccgggagaggattcgtctgacagcgaagcggagcaagagggaccccagaaactgatccgcaaagtgtctacctcggggcagatccggaccaaggtagggcggaggaggcgggcctgagggccgcgtggaaagcgggaggtggagagggcgcgggggcgctggaacgcgccgggcgatcccgggaaggcggggaaggcggggaaggcggggaaggcggggaaggcggggaaggcggggaaggcggggaaggcggggaaggcggggatggtgagacggtgaggcggggcggggcctggggcgcgggcggggcggggaggggtggggcggggcccgggggcgctggaccgcggtgctgcgggacggattcccggcggctgcgcgggaggctgcgagcctgggctcccagggagttcgactggcagaggcgggtgcagggaacccgcggctcggcgggagcgtgggaaaaagctgacgcgcagtcgcgagttcctacttagggaacttaaaaggagagtttcaatttttcttccctgccgttcgggggagcgtgcgcatgtgctggccaaccagcctgcgctgcagtgagccctgctgctttcccacttaggcccactcagagggtgggtggaaggtgacaccggtcagcctttcctgcccctctgcctcctgctgcggtctggaaggcagaagccccgaggcaggcaagtgggacatggtgttcgcggcttaaccgcaccctgcatggctccaagggctggccaggctttcgtgtcgcaggttcccgccaagtgcaggcagggttcagaaccatgcgtccatggttctttttaataatgagaagttacctctgtgctgtgtggacattaggatggtgtgttactcttgttaatgaagcttgtgctgtcgacctgtgaggtctcaaagttaatttttaatttgatcatg

SEQ ID NO: 24294 - DNA, 1036 bp, Artificial sequence
  DNA replication origin
gaaggctttttttcctgttccttctttccctttttaaacgcccacccacttttgcgcgggctcggccgcggaatttttctcgcgagaggcgcgctgccctctcgcgagagagagtgggaggcgtggagagtaggcggtgttgcgggccggagctgcggcggcggcggcggcggcggaagccgaggggtgggcagggcgggggcgggccgcggggctgggagggggagggctgggggtcagcgcgggagggggccagcttgcttgcccggctcgctcacgggtcgttgaggccggtgacatgtctgtgagctgcggaggctgcggcccccaggtgagccgggcgccgacgtgctcgccgcggaggctgcgtttagatggggtggcggcgggtgtgcggccggcatggatggagcggcccggctccggcgctccagcccctccgcctgccgctggtcccccttctggcttcggggccgcccgagagctgcgccttcgcatggcggagggaggagggcgggaggagcgcggccgaaggaggaaactcaccgcaccgggcccagagtagagggaggtgctgggtctcgagacgcgtcttcctggggtcccaagtgtggcggtggagctgccgccccttttaatgacaggctgtttccatccccggggtggtcttcagagacggccccccgggtgcgtggtgcgcgtgcttagtgtgtgttcgtggtgtgcgcacaggaacatttgcagcggttgggaggacgttgcactttgttcccgaacagcatccttcactgtcagacccccggagccttggaagcaggcgctgctcagatcttgtaaacggaaggcgtcaaggggctcctcagagtattgatatttggatttgctgtcaaatactctcctaggctgttaatggcttaaggctggccataaagtaccccgaatggattgagtatactgctgttaatccaggcatctaagctgctttataaaaaatatgtagatgtaaccgaagtattaaaaagtgacaatgacagta

SEQ ID NO: 24295 - DNA, 1276 bp, Artificial sequence
  DNA replication origin
atgggcgctctcagccgcgatcccctgggaaggtggccactcacctgcgctctgaaatagaagaacagggcgacgctgcagacaacctggcccagccccagccccaggagggccacgaacatggagcgggaggcggcagggggctggtgcggcgcaggcggcggcggggcgtgcagggggccctcgtgcggggctccggggccgccgcccatctcctccgagccacgcaggtacttggtgtagtctctgctggcgcggcgcatggcgctcggccctctcgcttcggagctctcctccctctcccgctccctccccttcttgtctgcggccaactccggaggctgcggcggagcctcgacgtggggcgccgacttggagcccggctttgggtcctggggcgcgcgggcgagcgggcagggcgcccggcagccccaactcttataaaccgcttggagagccctggcctcgggagccaatcagccccaggcgaggctgcctcttccactcccacctctggctccccttccttcctttcgccctccctctctctcaatctctgtcactgaagggcctccttcatgggggccctccaaggaggaggctgggggctactccagtggttccagactccccttgccatcctcagctgtctttctggaggtccaagagatgggttaaagaagacgcagaggacacctttgctaaaggataaggattgcacctcagacattcctcctgcatccattctagtttggtagagaagggacttcacatcctggagtctcggtttcctccttaggatttagaaagttaaatttgatgatctctgaagacccttcctgtccaacctctccccccaaagtgcttccaaatatagtttctcaaagtattttggaagacttcgaaaatttcacaatccccttcccaaatccctatttctgcatcttgaaggtgacattgagcgaggcaggtcttgaatgtggcagtagagagcctatagacaccaactctgactttataaagatgaaaacagtgcagagaaaagggtaaaggggcgtgtagccagaagcaagcatccgaggagggctcacccaacagtcaggaaagagatgtaacacgaagctgatgatacagttaaatgttagtttcattgctaaagaaaccttgctagggctttttaaaaacctctattcagaactgtggctcttagtgagaaaacaaaaatattaacattgctcacaaattctgatacttcttcagaaggaagttgctgacc

SEQ ID NO: 24296 - DNA, 1252 bp, Artificial sequence
  DNA replication origin
ttaacaaagcacatcttgcaccgcccttaatccatttaaccctgagtggacacagcacatgtttcagggagcacagggttgggggtaaggtcacagatcaacaggattcccaaggcagaggaatttttcttagtgcagaacaaaatgaaaagtctcccatgtctacttctttctacacagacacggcaaccatccgatttctcaatcttttccccacctttcccgcctttctattccacaaagccgccattgtcatcctggcccgttctcaatgagctgttgggcacacctcccagacggggtggtggccgggcggaggcgcccctcacctcccggacggggcggctggccgggcggggggctgacccccccacctccctcccggccggggtggctgccgggcggagacgctccttacttcccagatggggtggctgccgggcggagaggctcctcacttctcagacggggcagctgccgggcggaggggctcctcacttctcagacggggcggttgccaggcagagggtctcctcacttctcagacggggcggccgggcagagacgctcctcacctcccagacggggtctcggccgggcagaggcgctcctcacatcccagatggggcggcggggcagaggcgctccccacatttcagacgatgggcggccgggcagagacgctcctcacttcctaaatgtgatggcggctgggaagaggcgctcctcacttcctagatgggatggcggccgggcggagatgctcctcactttccagactgggcagccaggcagaggggctcctcacatcccagacgatgggcggccaggcagagacactcctcacttcccagacggggtggcggccgggcagaggctgcaatctcggcactttgggaggccaaggcaggcggctgggaggcgtaggttgtagcgagccgagatcacgccactgcactccagcctgggcaccattgagcactgagtgaacgagactccgtctgcaatcccggcacctcgggaggccgaggttggcggatcactcgcggttaggggctggagaccggcccggccaacacagcgaaaccccgtctccaccaaaaccagtcaggcgtggcggcgcgtgcctgcaattgcaggcattcggcagactgaggcaggagaatcaggcagggaggttgcagtgagccgagatggcagcagtacagtccagcttcggctccgcatgagagggagaccgtggggagaggga

SEQ ID NO: 24297 - DNA, 960 bp, Artificial sequence
  DNA replication origin
gcatctccgcccggccgccatcccatctaggaagtgaggagcgcctcttcccagccgccatcacatttaggaagtgaggagcgtctctgcccggccgcccatcgtctgaaatgtggggagcgcctctgccccgccgccccatctgggatgtgaggagcgcctctgcccggccgagaccccgtctgggaggtgaggagcgtctctgcccggccgccccgtctgagaagtgaggagaccctctgcctggcaaccgccccgtctgagaagtgaggagcccctccgcccggcagctgccccgtctgagaagtgaggagcctctccgcccggcagccaccccatctgggaagtaaggagcgtctccgcccggcagccaccccggccgggagggaggtgggggggtcagccccccgcccggccagccgccccgtccgggaggtgaggggcgcctccgcccggccaccaccccgtctgggaggtgtgcccaacagctcattgagaacgggccaggatgacaatggcggctttgtggaatagaaaggcgggaaaggtggggaaaagattgagaaatcggatggttgccgtgtctgtgtagaaagaagtagacatgggagacttttcattttgttctgcactaagaaaaattcctctgccttgggaatcctgttgatctgtgaccttacccccaaccctgtgctccctgaaacatgtgctgtgtccactcagggttaaatggattaagggcggtgcaagatgtgctttgttaaacagatgcttgaaggcagcatgctcgttaagagtcatcaccaatccctaatctcaagtaatcagggacacaaacactgcggaaggccgcagggtcctctgcctaggaaaaccagagacctttgttcacttgtttatctgctgaccttccctccactattgtcccatgaccctgccaaatccccctctgtgagaaac

SEQ ID NO: 24298 - DNA, 1343 bp, Artificial sequence
  DNA replication origin
attagtaaggtgcaggcctggtccactgtcttgacaactttcagcaagggaagatcaggaaaaaaaaaatgggaaaagtaggatgattatgatcaaaagcattttagaaattaagtgacaagcatttttttctttatactcaaagtagaacatatgtgtgattttctgtgtatgcattgttaaaatctcacccacttagactaattttatggaagatgaagaaatataacattactactttcctaaaatacaaagtaaccccagttagttttgtcagatgttgggtaagagtcagactttggaatatctgctaaggaataaatgaaagtatttttgaaattaaacatagtgattacatctgaccccttgggtaagttcagcatgtcttctgcaatcttgtttaaactatttagttgcttagtaagtacgttttttttagagaaagagaaaagcttgcactcaattcctccccaaaactcacatgtaattaagtctgatgttatatgtcaaaatcaagatcataataatgttaggggtggtggtgatggtggctctggagatgaagggactgtggaggtgatggttgccatggtggtaaaggtgactgcagtagtgatattggctctggaggtgagggtgattgtggtgaggatggtagctgtggttgttttggtgactatggtgggggtggtgatgaaggtagctgtggtggagaaggtaactgtgcttgtgaaggtaactatggtggtgaagatggccgtggtgggggtgctggctgtggtggccttattagctatggtggtaaaggtagctgtggtgactgtggtagtgacggtgactgtagtgagaggatggtgactaatggtaatgtcaactgtagtgatgaaggcatctgtgaggggggtggtaacctcagttgtgttgctggctgtggtgagaatggtggctatggtagtgaaaatggctgtagtggctgtggtaatgaaggcagccatggtgaggatggtggctgtggttgtgttggtggctgtgatggtgaaggtggctgtggtggggatggtgactctgatgctaatgttggttgtggtgatggaggcagctgtggcaaggatggtgactttggtggagaaggtggccatgttggggctagtggctgtggttgtggtgatggccatggtgaggatggtgttaaaggtggctgtgatgaagatggtgactggggtagaaatggtgactgtgatggtaatgttggctgtggtgatgaagggtagttatggtgaggatgatgactatggtggtgaaggggccatagtggcaacggtggctatggctgtgttggtggc

SEQ ID NO: 24299 - DNA, 1449 bp, Artificial sequence
  DNA replication origin
ccccgtggcggctggaagcctgtgtgagtagcggcgcccgggagagcggggatctgctgaggggcgctggagactccgcggctggaggcgcgcgggcgtgcgcacgcgcgcctgcgagtgtgagtgtatgggtgcgcgcgcgcccacggggtgggggagtcgcgaggggagggggagagaggccgagagatgctcgtagggaccgaggcaaaattctacgaccccggaaatccgtaaacgcggggaaggaggatcgaacgcgtgtctcgcttggagaagctgcccacggggcggcagcagaggaggaggggaagtcagcgaggcgcgctagggctccggatcccagcccggcagagccgagcggagcgcgcagccaccgatgcagcagaggcggcgcccgcagcccacggtcgcgctgccccctctcgggaggggccgaggccgctcgctcccgccaccgccgccgcggtcgggactgctctactgggagcgggggaaccgagagagggaccgcacggttgctacggcgaccttggaggggccgggcccgctgaagggccaagagaagaacccgggcgcacgtggccgactccaggctggagcgggcgtgttacaggattgtgggcttggggtagacggtggaattgggccgcgtggcctgggcagatgatgcggggtgtgcggcccagagtggctcggccggggtgcggtcagcattcaggttggtaagggtgaggggatcctaaccccaggtgacatgttgcctttttttcctccttggaggctactttttctcaaagttacccacttcccaggtaagaatgccggcctcctctttgttaggattcaacttagctgtgcaggcatctaagcagtgcctccttagagtcaggctcgtccaagaaccgctcccaccacctccccacacacacccacatcccccgatcctccatcccaactacattgtaatacttcagaaataaatgtttaaagcacatttacattctctgcctcttaacagatatattgtcttagtagtatacttttccttgcttattttaaattctgagtgggattttattcacacaagcatttcttcaagggtcgtaaggtctgggtaatacttgaaataccctttctggcaggaatcctcaatgcagggattgtgttttgcacacttttgcatgccttccagtgcttagcatagtactctgtactttgtgagttccctgtaaatgttgaatgaatgacattgttttctagcttcacgtaacctgaaggcaaagacttggatgctgggaaagtcattaccaccccactaggcttgcctgattttaacttatgccatttccttgtgtgtggctatttttccccctggcggtcagaaccccaatgcaaagaaagaaaataatacttatccattgtgcacccttaacaaaggatgcatgt

SEQ ID NO: 24300 - DNA, 1118 bp, Artificial sequence
  DNA replication origin
gagagccctcgcgcggctctggttcctgttcctctaacgccgccggggctgcgggatgccgactccgcggaccgcccagacccggaactgctgaggcagcagcgggctcgcggcgcttggctcatcccgggattccccagctctcgcgctgggcccgccgcgttcgcaccaagcacgccaggcggccctggcctacctccctcccgcctcccggcagctggcacgagggaacctggccgtcaggtttcccctgggatcctgggacggtatcaggcggggaatctgtgcggccgcggcgaggtaggtgaggtgaggcggggcgaggtgggcgaggggggcgaggtgaggcggggcgaggcggggcgaggcgaggcggggcgaggtgggcgaggtgggcgaggtgaggcggggcgggtgtcgtcgcgctgggccgagcttacgactccagctgacccgctcgcggctgcccaatttcgttgaggctcaggacgagggacggggcggcaaattgtcacagaggtcgccgtagaccggtgtgcaaccgaaggtgaagagcgggaaggcgaggaccgaatcgcctctggtgtgcgttgtccgacaggaagtcccgaatgggctgtgagccgccggtggaggtgcccgggcaggtgcagagccacagcctgcgccccgtgagccgaggcgggtaggaggaacagggacctggcggcgacacacgttgggcggaaattcacaatgaacagggaaggggggacggtcacccactcaaaactggctaaatgaacctcagagggagccccgagagatggggagcaaaggttaggggaagcggcaggagaaaaccttcttggggcaaagggcgtcaccaaagggggtcaccggagccccgcaggttggggtgggagggctgggctggaggtgagcaaagctgcacggggagaatgaattaagaaagttgagaggaagcctgtctcatccaaatcactatagcttttgtggtcattgctaagtgtggagtactgcgcaaatcctgaagggaactctattagccatctcagcttttatcatcttaaaacgcgaatttcgcgtgcagctccatttagcttcgtaaacttaag

SEQ ID NO: 24301 - DNA, 2075 bp, Artificial sequence
  DNA replication origin
ggtatgcggcattatttgagggctctgttctgttccattgatctatatctctgttttggtaccagtatcatgctgttttggttactgtagccttgtagtatagtttgaagtcaggtagtgtgatgcctccagctttgttcttttggcttaggattgacttggcgatgcgggctcttttttggttccatatgaactttaaagtagtttttccagatggaggtggcgggcggcacggagcgggcgtgctgagccccggccgccggcccggcatgggcgtctcccgcgggccctccgctggccggggctagggccggatggagccgcgggacggtagcccggaggcccggagcagcgactgcgagtcggcttccgcctcgtccagcggctccgagcgcgacgccggtcccgagccggacaaggcgccgcggcgactcaacaagcggcgcttcccggggctgcggctcttcgggcacaggaaagccatcaccaagtctggcctccagcacctggccccccctccgcccacccctggggcccggtgcagcgagtcagagcggcagatccggagtacagtggactggagcgagtcggcgacatatggggagcacatctggttcgagaccaacgtgtccggggacttctgctacgttggggagcagtactgtgtagccaggatgctgcagaagtcagtgtctcgaagaaagtgcgcagcctgcaagattgtggtgcacacgccctgcatcgagcagctggagaagataaatttccgctgtaagccatccttccgtgaatcaggctccaggaatgtcctcgagccaacctttgtatggcaccactgggtacacagacgacgccaggacggcaagtgtcggcactgtgggaagggattccagcagaagttcaccttccacagcaaggagattgtggccatcagctgctcgtggtgcaagcaggcataccacagcaaggtgtcctgcttcgtgctgcagcagatcgaggagccgtgctcgctgggggtccacgcagccgtggtcatcccgcccacctggatcctccgcgcccggaggccccagaatactctgaaagcaagcaagaagaagaagagggcatccttcaagaggaagtccagcaagaaagggcctgaggagggccgctggagacccttcatcatcaggcccaccccctcccccctcatgaagcccctgctggtgtttgtgaaccccaagagtgggggcaaccagggtgcaaagatcatccagtctttcctctggtatctcaatccccgacaagtcttcgacctgagccagggagggcccaaggaggcgctggagatgtaccgcaaagtgcacaacctgcggatcctggcgtgcgggggcgacggcacggtgggctggatcctctccaccctggaccagctacgcctgaagccgccaccccctgttgccatcctgcccctgggtactggcaacgacttggcccgaaccctcaactggggtgggggctacacagatgagcctgtgtccaagatcctctcccacgtggaggaggggaacgtggtacagctggaccgctgggacctccacgctgagcccaaccccgaggcagggcctgaggaccgagatgaaggcgccaccgaccggttgcccctggatgtcttcaacaactacttcagcctgggctttgacgcccacgtcaccctggagttccacgagtctcgagaggccaacccagagaaattcaacagccgctttcggaataagatgttctacgccgggacagctttctctgacttcctgatgggcagctccaaggacctggccaagcacatccgagtggtgtgtgatggaatggacttgactcccaagatccaggacctgaaaccccagtgtgttgttttcctgaacatccccaggtactgtgcgggcaccatgccctgcggccaccctggggagcaccacgactttgagccccagcggcatgacgacggctacctcgaggtcattggcttcaccatgacgtcattggccgcgctgcaggtgggcggacacggcgagcggctgacgcagtgtcgcgag

SEQ ID NO: 24302 - DNA, 1444 bp, Artificial sequence
  DNA replication origin
aggtaatttacagattcaatgccatccccatcaagctaccaatgactttcttcacagaattggaatgacagaggagcggggagggtcgccggagcgggtgccaagcaaggcagggcaggcaagtgcagcaggcactgagtttccgggaggaagcccgggggaggtggggtggggcaggagcgggggctggggacccggccgaagaccagggggcccaggaagcctcttcccgaaggccttcccctctccagcccctccactcctgggagggcatctgctgcggccagggagcgccctgccccagaaccccggcaaaggcatatccaacccagccgtgtcttgttccctgtgagcctccgggtccggcggggtcctcaggggaacaggtgaggccccccagctcctgagtccagccctaggtctgtgcggctccttagggggcggcatggggctctttccctggggcctaggtccccccgtggccgtcccactggaatgtggcagtgaggtgggcaaggaaggcgctcatcccctggccgcattgtccctcctgctgcccgtgggcggcccgctacacagccgtctcctggtcctcccgctggatcatctggtagtgctgccggttctccaggtaggccgccagctcggtgtcctgagccttctcagcctgctgccggggagtgtcgccctgctggtctggccccggcctccacgatgtagtggcagatggtgcgctggcccagggccgctgcttggtgcaaacaggtctccccgttttcctccaccgcatcaaggatctctgggggagcgtggtccagcaggtagcggaccacatccttgctgccagtgctgactgcgtggtgcaggagcgtgcgactctgcttgtctcggtgcatgatgtcgcccccagctcggtgcagctcctggagcttacagaagtcgttcctcttggcagcctcaatcagctcttcaccttgagggggtgcagcatccccttgcagtgaccggggcgtgggtgagcagggtgaggtggggagaggggaagtgggggttgggaggtcaggccgggccgatgcccccagcagctcagggtccaggatataaatctcatcctgtgcgatctcagtcacatagttgaggtgctcctgggctcggttgatcctgtagaagcggctggcagtggtggcgtccaggaagcaccacttgggggacagtttctggcatgtcggggacttggctccagcaccatcgggctcctgctggagtctctcaatgtgggcacggcagagctctaggtcactgtctcctgggaccaccacagtgcccagcggcacggaggcctccttgagctgctccttgtcgtagtgcagggcctcatagtcgtgcatgctgacgcgtctcacctggatgcgcaactgctctggcaccggctgctggtcgctgt

SEQ ID NO: 24303 - DNA, 1097 bp, Artificial sequence
  DNA replication origin
tgtatggtatgtgaattataatgctgaacaaaggaaggaagaaagaaaggaaaagacggagggaaaggaagaaagagagatggaagggaaggaaagaaggggaagggaaagagggagggaaaggaagaaagagagaaggaagggaagggaagaaggggtagggaaggggaaggaaaaggaagggaagaggaggagaggcgagaggagggaaaggggagggaggggaagggagggtaacggaagggaaggggagaggaggggaaagggaggggaagggaagggaggggaagggatggaaagggaggaaagggaggaaaggggaaggaagtgaaggggagaggaggggaaagggaggggaagggaagggaggggaagggaagggaggggaagggaggggaagggagggaaggggaggaaaggggaaggaagtgaaggggagggaaggggagggaagtgaaggggagggaagggaaagggaagggagggaagaggaaagaaggggagaggaggggaggggaggggaaaggaaatggggaagcaaagcaccatagcccaaagatagaaggagtggtatacagttgtgtctgcatggcctgaagtctctgagcctcttcaggatcttcagcctccttccctctagtgtgagattccaccaccctccccctcccataacatacacatacacgcaccaaaacctttgttccaggcatctcaaacaatttgtatttccacccaaactctatgcagttccattcctctgagcttttacacaaactcttctctctaccttgaatgcctaccctaccccatttcctaccaagagaattctcactcaactttcaagacccagtttaaatgtcacacccttcaggatgtctatccctacctcctcagatagttagggggctcctcctcgtcacctgcagaaggctttactgtacagtatgtcaccatatgagaaggtagaacatctgtcacaatgcacttaggcctatttagatgcatatcatccccaacaataccacaggctcatgaaggacaaatgctgtattttattcatcttggtgttgaaaaaacttggaactgtggctgtcgta

SEQ ID NO: 24304 - DNA, 1494 bp, Artificial sequence
  DNA replication origin
agagaggccgcagcccggacggaagtaatctctcatctcaggaaaccctttccgacttcctcgccatccttccggtccccgcagccacctaccccgcgcggccaccgaggcaggcgcgaccgcacgtcctcccgcgccgagcggccggagcgcagcgcgcagagccggggccctgcagtgtcgcggtcctgtagccgaatgctgcggggccgaaggttcgggcgaccacggcgtttgtgagcgcgtcggggacggggacgcggcccctcctgtgtttgtcggccggtgacccaccccagccccggggaagggatgagggcggccgcgcttcaggccgggccgcgcggtctcccctgcaccgccgccccctggacgagggctggacccaaggcggtggtcagggacctcagaacacaagtagaaccagtccaggcccgggcccgcgctgcccgggtatggtccaccaaacgagccttctctttaagggtctcgagaagggccccacgctgggggaccccactgcagaacttttcgtgagggctgcaaggagggccgcgttgtaaaataaagaggagacacgaagcggcatcccctgagggttggggatcgggccgtgaggatggagttgggacaggcctttttgctttggtagttgtaggggttgcattggaagatgggccagcggcagagcggagcatgcaggaaagaggaagaggccttggacctgcagcccaggtcggatttggtggttactgtctaaatctgaagctttggcctgccttgactccccacccacccagggcagcttggacctctctctagccacccttgtcccgaggggtctgagtgtctcccagactaaactgggcattttctgcagtggaaggataaaaatggaagcgtttacgcgcctcccagacactggtattagggctcaagagctctacagattgcctggggaggtaggggtggaaggggttcagttcctcacttggagttagctcttagaagctcagaagagtggaggcgaagaggggacattcagcctgggagatctggggcagcgggaagtggggataccgggtcggggtgaaggcaagcagcagcacccccagcatggggaagaaggcctgaggctgtctctggccactgcatctctaggccttctcttggagcgggaggtggctgggtttccagggaattttgtgtgagtaaaattttcccatgtcattggagagttaggaagagctcctcttttggggcctttttccaagcgggtccccctcaccccgctacaggcttcttgtcactcaggcttcaataaaggccattctgggggctgcttgctgtaacctagaagacagaattgcctaggatcattagtagagtcattttttttttttcctactctacaggccaattaatttgaaacaagcttctatggtcttttaactgttagcatcaccactgttgtaacaggaccataaacccagt

SEQ ID NO: 24305 - DNA, 1250 bp, Artificial sequence
  DNA replication origin
gaccggaaggatggcgaggaagtcggaaagggtttcctgagatgagagattacttccgtccgggctgcggcctctctctggagtcggctagccggggctcggggagcggggtgcgcagggctcggggccacgccttgccacctgcagcgcccgggtgggccgcgggggcctcggcgggacgcgctcggccctgtcgcaggagctaacgcagggggaatccttgcaggtgggagcatttcagagcgcacaagccatggtggccaaacagcggatccggatggctaacgagaagcacagcaaaaacatcacccagagggggaacgtagccaaaaccctggtaaggcggggtcggcgccggccaggcagagccctgcagcccggcggggtggggcggaaggtgggggcggggccgggcgggtagcggcgcagggtccggcctcccggctcccggcccgccccttctgcggggtcctgcagagtgggggctgagagctgggttcagggcggcgcggtctgcttggcgtcctcgtgggcggagagggccctggttggtcgtggcccctctgggagtggctacctgggctaccagggaggcgcagaggagccctcctccccgacccgcaccccctgtccccctgcccgggagacagctgggccttgtcccggagaaagacggaaagcctcatccttaggggccagttaagtcaactgcatgacacagagcctggaacctagtatgttctagaacgttgcatgacacagagcctggaacctagtatgttctagaacgtttgttgaatgaatgaatgaatcaatggctaaatggaggccacttgtcatctcctcccggactccacctgtcttccctccccaacagacttgcaccaggatcaagttttctttccagcccctttgtgacggtttcactggaggtgtggaaagagctcaaaatggggagtgagatttggacccacattccctccagcctcttttttctcttttacctctcttccagcgagacctccctcagcccctaggctaaagtctaagggcagcattcctattctttccacttggtgaattcagactcattctcatggtataactttagagaccagtttattgtcaggcattcggtgtccctagaactgtaaattcaagctttgcaactggacttttaagtaaaacctgtgccttacactcaggagtttcttttagcaaagcagattatcatcaacagaaaatgcgag

SEQ ID NO: 24306 - DNA, 1952 bp, Artificial sequence
  DNA replication origin
tatatttttagtagagatagggtttcaccgtgttggccaggctggtctcaaactcctggcctcaagtgatccaccctcctcagcctcccaaagtgctgagattacaggtgtgagccactgcggccggccaataattctttttaaaccacctgaaatgctgacctatgtcattaaacttagcatgtcttccctacatctgaaaactacacatctccaatcctttgaatccaatgtaattcagcaagcagtatggtgtgaagattctggaatcgttactgtggaagatgtctgaaaaggacatgttctactgttttgaagcagctctctccagtgtggcagagtaacagtgagggggagagagagacagagagagagagagagagagagagagagagagagggaggggggagggaagggaaggggagggaaggggggagagagagagagggaggggggaggggagggagggagagagagaggaaataaaaatctttggagcactgtctagttgtgaaatgctgtgtggagtggttgctatgacttttcaaggttctggcgatattttaccttgaggtttaccatatataccatcctcccagctcaacatgtctgaaaagcttttaccatgtgaacttctgatttcctgttacctgtctacactgtggataattcatgactagttactggcccttcacctttgtgatctttgccttaaaatgtgtcccctgactctatgggtttgtactgtcctcggctttcttttctggggctgaccttttgtttacttccaaaaacctcactaacttttacagatgtaccttacaggcggtggtcatagaaagcaggcttcctaatgcgtcctttgcaagttttgtgtaaactaccttaaaactcactgtttcccccttctcctttccctccctgctttcagtaaactcccacttcaggtctcatcatctcaaattgtttctccaccagcctccttcggtcctcttagatcaccatttttgcaatctgagcagacaggccctgggccaagcggtgtgtccacaacgtcacgtggctctctgtttctgaagatgcggggggatcctgacacggagatctcaggatggggaaaactgtgtactctcagcagatccgctcactctactgacatttcccgaacacctactcggtgttaagcaccctgagagggatggggtggtgactagacagaagacaggcccacatttacaggcaggcaaggggagcgcgcgaggaagcctccggcgactgacccagggcggagaagagtcacagaggaaggggttggtgagcagagctgggaatgaagaatgagacagcacacagctggccccagaaagggagaaatttggtttctccgtgctgtggaactgaagagctggcaagaggagaggagggtgtgagacagaggaaggggctgggattttatctaagagccacaggaagctgttgaaaaattcaaagccagaagcaatgccatcagactgatcatctttccttctttctttgatagcttggaatcaggaactgaatttgcagcccactgcttgcaactcttgggggccaccattctgctgtttgaagattcattcaccctgccttcatgttcttataacttgaccactctgtcctcatttattaactctcctggtactgaatgcatctccacaagccccgccaaatgcgaataaaccacgttagcacatttactctcataacagcccttgagttaaacattttatatctcatcttacagggaaggaaattgaagcccagagaaattcagtgactcacccatggccttagaattttttcattcatttctggaacttgttcactatctcgcttcctcaactgactggaaacacaacaagggcagcgactgtgtttgcagtggtcatggtgagaggtgacagcgtgctggc

SEQ ID NO: 24307 - DNA, 1643 bp, Artificial sequence
  DNA replication origin
aagggctcagaactagaatctaacttcacaactctgaacctcgaagtgttaactgttggttgttgctgctgacttgaaaccgatcccccagtcatccctgcagctgcattaggaacactgctaacagcagcagaggaagaaatagtaccattgcccatgccactcaagatattcacattaacaccactggtaactccaggcccaacactcacaccagcagcactaggaatattgcttgtacttatattaacattaccaagcatgctgcttgtcacattaggattaaaactacccacagcagtaatgttaacattatttactgtactagtgccagtaacagaatttatacctattccacctgtagtacttggagcacgcatattagtcattacagatgcaggtgaaccactggatgatacagcagaagttggtgcaactggtgtgatactgtcagagcttccagttgtagagagttttctagatactgggcttgagggtggcccaccagtaatggatgcactggccacagcaacatgagatggatggtggtgaccatgttggaggtggtgcccatgatgaatctgatggtggtgatggaggtggtgtggatgagcattcccattgatcacaacattctgttgtggaaggtgaggcaaatgaggctgaggaaggtggggctggttgggagagactgccccaggtgtctcggcttcctggaagttatttagggtctcttctgaggagctgcgttcgggctcccctaagtcagtagccctggaaagtgacacatcaaggatctccgaagaagagagatcttccgtgtgagattcatccagatcatcatagctctcagtgtcctctgctatactgttgttagagctgatactagcggagatctgagcaggagtaacgctagttatctggaagccacttttctttttcatttgagttccgcctggcgcaagaggctgtgcctgcagctgagcctgcgaaaggaggttcaggctttgtggaggcggaggctgtggtcccgacgtagaagatgctgcagggggcggcggctgaagcagcgacggaggcggaaaatcctcggaagatgtggcattactaccgacgccggtacctgctgcattgagagcagaggcgctgccactaccgctgccccttcgagggaacattgccgggtgcgccatcttcctagcgctaatgtctgcagcggcggcggccgcggcggtggactcaggcggctggtgcattgtgttgggtaccgggggcgcggaggagacgagtgcaatttccttctgcaccgtaatctttgtattggagacgccggagaggaaaacgggacctgacgctccgcctggcgcgattcctccttctcctcctcctcagccaaaggcgccggtcgctcctgccttcgagagcgagcttcggaaaggaggatgaacgagggtgaacagggcggccggggacccgaaggggggatcccttcagtccttcgccattcactttcccctctagcctcacacccccctttatattctgcttcacgtggggtgcggggcaggagggagggggagagcgcaggaaggggaggaaaagcgagaaatgcccaccttctccggccaactccgaagccgcct

SEQ ID NO: 24308 - DNA, 1051 bp, Artificial sequence
  DNA replication origin
ccctcccggccccgctcggccctccccccgcgccccgcagaccctttcaaaccccctgggctcgcggcggctgctcggtgaggaaacgctggccgcggctggggccggggcgacgcggctgcgagcggggcggcggcgaggcgcccggtacggtgagcccagcaacgaggcgcgggcgggcgcgcagagacgccgggtcctcgcggagcacggccggggcgcggcggcggcggtggcagcgggagcccagggaccgctccatcactggcagccatggagcccgagcattttcctccctcagggcaggcgcctcgactcggcacacgtcctcggggaggaaggggccggcacccgagcctctccggagggcggcgggacgtgcgctagggcggagggtgcgaccctctcttatcctcttcctccgcagccggctcttcctcaccccgctgctcccgcgaccgggcgggagagggccgcaggcggcggcggctcctttctccgcggcgttggtggccagacgggctggtgcagcgactgcagccgacgccgttcaaaggaacgaggtggggttggtcggtgtcggcaaacggggcgggggagtgagtgggtgccgagggagggtgtcgggcggggagggggctgtggtggttgttactagtgctcttcttcggctcccccggctccaccgtatcccccagtctctcgcggcatcgggaggggagggaccagcgcggagcgcaggaggaggaggggcgaccgccggcgagaggaggcggtggtggctggggggagggggcaggcggaggaggaggagggaagatggcgtctgcgcatgcgcctcggcgccgcagacataaagccgggtctggcggggcaggaggcggcgggtcttcgggcctaggcgagcgccaggtctcccgacggaaattaccgaaggctggcagaggcgccgaagccgggagtggtggagccggaggggatagtgggggtggggaattccggccgaaggagcgaatccgggtcggactgcgtgattcggcccggtgggggc

SEQ ID NO: 24309 - DNA, 1347 bp, Artificial sequence
  DNA replication origin
cttcttcggctcccccggctccaccgtatcccccagtctctcgcggcatcgggaggggagggaccagcgcggagcgcaggaggaggaggggcgaccgccggcgagaggaggcggtggtggctggggggagggggcaggcggaggaggaggagggaagatggcgtctgcgcatgcgcctcggcgccgcagacataaagccgggtctggcggggcaggaggcggcgggtcttcgggcctaggcgagcgccaggtctcccgacggaaattaccgaaggctggcagaggcgccgaagccgggagtggtggagccggaggggatagtgggggtggggaattccggccgaaggagcgaatccgggtcggactgcgtgattcggcccggtgggggcgggcagggtgcgcgcctgccgcgcgcccaggttaggtgtgtccgctcttttcacactcgcggccggcgcgcgcgggcacgcggcagaggagggggcgcggcgcggaagggccggcggaggcggcgggagcgccggcgcttggtgtgcgcgccttgggtggtgtcccccgcctgcggaatgggtaatgaggcttttctccgcagcaacagcatcacgagtttcagttcccaggagcccgccgccgcggctgctgccgctgccacgacatgagtcaggctttcttccctggcgcgtggcggaaacctcctccccctcgccgcacctgggctcgcccccggcccttgcctcctcgggggatgccctagggccgggagctgtggggtctatggaaggccggtggctcccggtgataggtgttgtcttttgtgcagtgcagttgctgccatgcggtcccctcgcccttccacgggcaggggcgaggcggccgggcagatgttgcagctgtttccagttaactgcctgagctcctctgggctaggctcttctctaacgaggagtggttgcaatccatccttaactggaggacagaagcaggccggccctgtaatcgactgacctcaacaggtgtctccaagcagcgacgcctttttcgttcatcgtcctggctatatcccccattggtttgactcaggaggcaaggtggtccggacatgtgagcaacacaaatgataagaatgccttttagggctagaaaagaaaaagccatccgaaattccagttttaaaatacacacacacacacacgttacatttcatgggtccaaatgtagttctacagaagcaatgttaggtttgattgggggcaatttactggcggttactttcttggtatttcatgtcaaaacctagttctaagcgtttcttaccaataatcgagaatgtaagtctttcccaggaat

SEQ ID NO: 24310 - DNA, 900 bp, Artificial sequence
  DNA replication origin
ccggtctgggatgtgaggagcgcctctgcctggccgcgaccccgtctgggaggtgaggagcgtctctgcccggccgccccatctgagaagtgaggagcccctccaccccgaagccgccccatctgagaagtgagaagcccctccgcccggcagccaccccgtctgggaagtgaggagcgtctccgcccgacagccgccctgtccgggagggaggtgggggggtcagccccccgcccggccagccgccccgtccgggaggtgaggggcgcctctgcccggccgcccctactgggaagtgaggagctcctctgcccggccagccgccccgtccgggagggaggtgagggggtggtcagccccccgcccggccagctgccccgtccgggaggtgaggggcgcctctgcccgggcgcctctgcccggccgcccctactgggaagtgaggagcccctctgcccggccaccaccccgtctgggaggtgtgcccagcggctcattgagaacgggccatgatgacagtggcagttttgtggaatagaaaggggggaaaggtggggaaaagactgagaaatcggatggttgccgtgtctgtgtagaaagaagtagacatggaagacttttcattttgttctgtactaagaaaaattcttctgccttgggatcctgttgatctgtgaccttacccccaaccctgtgctctctgaaacatgtgctgtgtccactcagggttaaatggattaagggcggtgcaagatgtgctttgttaaacagatgcttgaaggcagcatgctcgttaagagtcatcaccactccctaatctcaagtacccagggacacaaacactgcagaaggcctcagggtcctctgcctaggaaaaccagagacctttgttcacttgtt

SEQ ID NO: 24311 - DNA, 1343 bp, Artificial sequence
  DNA replication origin
gttgggggtaaggtcacagatcaacaggatcccaaggcagaagaatttttcttagtacagaacaaaatgaaaagtcttccatgtctacttctttctacacagacacggcaaccatccgatttctcagtcttttccccacctttcccccctttctattccacaaaactgccactgtcatcatggcccgttctcaatgagccgctgggcacacctcccagacggggtggtggccgggcagaggggctcctcacttcccagtaggggcggccgggcagaggcgcccgggcagaggcgcccctcacctcccggacggggcagctggccgggcggggggctgaccaccccctcacctccctcccggacggggcggctggccgggcagaggagctcctcacttcccagtaggggcggccgggcagaggcgcccctcacctcccggacggggcggctggccgggcggggggctgacccccccacctccctcccggacagggcggctgtcgggcggagacgctcctcacttcccagacggggtggctgccgggcggaggggcttctcacttctcagatggggcggcttcggggtggaggggctcctcacttctcagatggggcggccgggcagagacgctcctcacctcccagacggggtcgcggccaggcagaggcgctcctcacatcccagaccgggtggcggggcagaggcgctccccacatctcagacgatgggcggccgggcagagacgctcctcacttcctagatgggatggcggccgggaagaggcgctcctcacttcctagatgggatggcggccgggcagagacgctcctcaatttccagactgggcagccaggcagaggggctcctcacatcccagacgatgggcggccaggcagagacgctcctcacttcccagacggggtggcggccgggcagaggctgcaatctcagcactttgggaggccaaggcaggcggctgggaggtagaggttgtagcgagccgagatcacgccactgcactccagcctgggcaccattggccaccgagtgaacgagactccgtctgcaatcccggcacctcgggaggccgaggctggcggatcactcgcggttaggagctggagaccagcccggccaacacagcaaaaccccgtctccaccaaaaaaatacgaaaaccagtcaggcgtggtggcgcgcgcctgcaatcgcaggcactcggcaggctgaggcaggagaatcaggcagggagattgcagtgagccgagatggcggcagtacagtccagcttcggctcggcatcagagggagaccgtggaaagagagggagaccgtggggtgagg

SEQ ID NO: 24312 - DNA, 943 bp, Artificial sequence
  DNA replication origin
gagttcgaaaccaacctggccaacatggagaaatcccagcctgggcaacggggtgaaaccaaggaaggagggaaggagggaaagagggaaggagggaggaaggagggaaggaggtaaggagggaaagagggaaagaaggaaggagggaaggagggagggagggaaggaaggaggagggagggagggagggagggagggaaggagggagagaagcaaggagggaaggaaagagggagggaaggaaagagggagggaaggaaggaaggaaggaaggaaggaaggaaggaaggaaggaaggaagccagccaggtgtggtggcacacacttgcagctccagctactcaggaggctgaggtggggaaatcactagagccccagaggtagggggtgccatgaaccgagatcggggcactgcactacagcctgggtgacagagtgaaaacctgtctcaaaaaaataaataaataaagttcaggtagtttatttgtcagaaaacactgagggttggaaaaatgaggaagaagaaatgagcctataaaatgattagtgtagaaaaccagtaccagctggatactactaaggacaactgttgcttaatatgtgccttagtcaccctacctgaggattaaaggagctgggtgtttatcaactaacaactcctggcagatattggctgaacgccactcccaaagtgagtgttaaaatcctggcatttctggcctgccctccaggcaggcagagtagttggcagcaagagaagctctcaggcagacaaaggtgccgagatgtaaaagttggctagtgtgcacagtaacggcaaggccttgagaggctatgggcgaacactgacagcacctggggcatctatgccacagcccctaatctataggagtctgtcccaaacttgtgaatgtaaagacacatcagccttcacctagaagca

SEQ ID NO: 24313 - DNA, 1353 bp, Artificial sequence
  DNA replication origin
tcacctccccgactcgcccccgctgtggccccgcccccgcgcggctcttcgtgccacgtcaccgcctgcgtcgcttccggaggcgcagcgggcgatgacgtagagggacgtgccctctatatgaggttggggagcggctgagtcggccttttccgcccgctcccccctccccccgagcgccgctccggctgcaccgcgctcgctccgagtttcaggctcgtgctaagctagcgccgtcgtcgtctcccttcagtcgccatcatgattatctaccgggacctcatcagccgtgagtcctcactgcactatccttactgccgcacacgggggtctggggtgcgggtgggggcggggaaggcgcagccgtcgcgggcctaggggacgccggcggtcttagccgagcgcggaggggtcggtgcccggggctcgcgcccagctctggtgtgctacggaggggcagatcccgcgtgcggccgccggcgcgggaaatgcgggaaatggcggcgccaggcgcacggtgatgggcggctctgtgtatccggcagacgatgagatgttctccgacatctacaagatccgggagatcgcggacgggttgtgcctggaggtggaggggaaggtgagtcggtcgggcctgcgcgtgggggagtccgggccgagcgggctcgggtttcctccgctcccccgcctgaggttgtgcaatcctccccgccgcctcctggcggaggagacgctctttccgggcttgggtttttctagaaaactggaggcggagctgatcctggaaataggcccgccgcctcggcgcccatcctcctcccggggttgtccgggacatgatgcttccggcttaggagcctggagtcctttcgtgtttgtcctgtccccacttaccaaccggaggcatcacatgcccgcaactggaaacaactttttaatgaccccattttttgttccggccaacagacaactcttttaagttaggtcgttttgagaaatccacgggtcacaactttattcccaaaatggtgctttttttattttcagcaagaactaagaatacttcttatccgtgaactattggcgtggaaggtgctttggatgcgtttgtgtcttttgcaattatactgctttttcttaatgcagatggtcagtaggacagaaggtaacattgatgactcgctcattggtggaaatgcctccgctgaaggccccgagggcgaaggtaccgaaagcacagtaatcactggtgtcgatattgtcatgaaccatcacctgcaggaaacaagtttcacaaaagaagcctacaagaagtacatcaaagattacatgaaatcgtaagtgatactggca

SEQ ID NO: 24314 - DNA, 1512 bp, Artificial sequence
  DNA replication origin
ccgggcaccgacccctccgcgctcggctaagaccgccggcgtcccctaggcccgcgacggctgcgccttccccgcccccacccgcaccccagacccccgtgtgcggcagtaaggatagtgcagtgaggactcacggctgatgaggtcccggtagataatcatgatggcgactgaagggagacgacgacggcgctagcttagcacgagcctgaaactcggagcgagcgcggtgcagccggagcggcgctcggggggaggggggagcgggcggaaaaggccgactcagccgctccccaacctcatatagagggcacgtccctctacgtcatcgcccgctgcgcctccggaagcgacgcaggcggtgacgtggcacgaagagccgcgcgggggcggggccacagcgggggcgagtcggggaggtgagcatccggggacttgaggcggagacacaaggctccgttccactgggcacgccagcgggtaggggtgggggcggggaggtgcgcgcgcagcgtgggaggaggccaactctcggggcgctccctagccctgggtgggtggagcgggggaagcggagtacgttggacccggctccgccctaccccacggggccgcctggagaggtgctgggagctgggtggagcttagaggaattaaactttggccctgcgcctcgtccagcctaggttccacccttttctgggaacgtgagtatcaaccaaggtaggagaacgtcgcatttagggagggtcaggccctctggcctggggtagatctcgggactgcccgagggcctctgacaacttttcagcatctgccccagggctgccccagctggagtttttgggacgcttttgtgggggcaccgctgagtccggatagtgggacccaagtcgtcctgctcggcccctggggaataatcgtgtggggcgcaaggtctgtgggaagggacttggagaggagggaagatgtcacgggagtctgcacagggtttccatgtgttccaattttgtcccataattgaaagcttgtggcattctgtggcggacggctacggagctagctcttccctttactatttcgcacttggtcttggaaaagtatgttgtcgctttaagatgaagttgaaattttatccctggtgctagagggtcacacaaagggagtttcccacctgccccacctgttttttgaaggactttacacccaattactaagtattaaaacaaaacaggtcctgcatggtagctcatgcctgtaatcccagaactttgggaggcaactactgaaaccctgtctctacacacacacacacacacacaaattaaaaattaattgggtgcggtggtgcctgcctgtaatcccagctattagggaggctgagctgggaggatcgcttgagcccgggagttggaggttacactgagctatgattgcaccactgcgctccagcctgaatgacagagcaagaccttggctcaatagcaaaacaaaacttccgtatttagtcac

SEQ ID NO: 24315 - DNA, 979 bp, Artificial sequence
  DNA replication origin
agaccccgtctgggaggtgaggagcgtctctgcccggccgccccgtctgagaagtgaggagaccctctgcctggcaaccaccccgtctgagaagtgaggagcccctccgcccggcagctgccccgtctgagaagtgaggagcctctccgcccagcagccaccccatctgggaagtgaggagcgtctccgcccggcagccaccccgtccgggagggaggtggggggggtcagcccccccgcccggccagccgccccgtccgggaggtgaggggcgcctctgcccggccgcccctactgggaagtgaggagcccctctgcccagccagctgccctgtccgggagggaggtggggggttcagccccccgcccggccagccgccccatccgggagggaggtggggggggtcagcccccctgcccggccagccgccccgtccgggaggtgaggggcgcctctgcccggccgcccctactgggaagtgaggagcccctctgcccggccaccgccccgtctgggaggtgtgcccagtagctcattgagaacgggccaggatgacaatggcagctttgtggaatagaaaggcgggaaaggtggggaaaagattgagagatcggatggttgccgtgtctgtgtggaaggaagtagacatgggagacttttcattttgttctgcactaagaaaaattcctctgccttgggatcctgttgatctgtgaccttacccccaaccctgtgctctctgaaacatgtgctgtgtccactcagggttaaatggattaagggcggtgcaagatgtgctttgttaaacagatgcttgaaggcagcatgctcgttaagagtcatcaccaatccctaatctcaagtaaccagggacacaaacactgcggaaggccgcagggtcctctgcctaggaaaaccagagacctttgttcacttgtttatctgctgaccttccctccactattgtcccatgaccct

SEQ ID NO: 24316 - DNA, 1348 bp, Artificial sequence
  DNA replication origin
tacttccttccacacagacacggcaaccatccgatctctcaatcttttccccacctttcccgcctttctattccacaaagctgccattgtcatcctggcccgttctcaatgagctactgggcacacctcccagacggggcggtggccgggcagaggggctcctcacttcccagtaggggcggccgggcagaggcgcccctcacctcccggacggggcggctggccgggcaggggggctgaccccccccacctccctcccggatggggcggctggccgggcggggggctgaaccccccacctccctcccggacagggcagctggctgggcagaggggctcctcacttcccagtaggggcggccgggcagaggcgcccctcacctcccggacggggcggctggccgggcgggggggctgaccccccccacctccctcccggacggggtggctgccgggcggagacgctcctcacttcccagatggggtggctgctgggcggagaggctcctcacttctcagacggggcagctgccgggcggaggggctcctcacttctcagacggggtggttgccaggcagagggtctcctcacttctcagacggggcggccgggcagagacgctcctcacctcccagacggggtctcggccgggcagaggcgctcctcacatcccagatggggcggcggggcagaggcgctccccacatctcagacgatgggcggccgggcagagacgctcctcacttcctagatgtgatggcggctgggaagaggcgctcctcacttcctagatgggatggcggccgggcggagacgctcctcactttccagactgggcagccaggcagaggggctcctcacatcccagatgatgggcggccaggcagagacactcctcacttcccagacggggtggcggccgggcagaggctgcaatctcggcactttgggaggccaaggcaggcggctgggaggtgtaggttgtagtgagccgagatcacgccactgcactccagcctgggcaccattgagcactgagtgaacgagactccgtctgcaatcccggcacctcgggaggccgaggttggcggatcactcgcggttaggggctggagaccggcccggccaacacagcgaaaccccgtctccaccaaaaccaatcaggcgtggcggtgcgtgcctgcaatcgcaggcattcggcagactgaggcaggagaatcaggcagggaggttgcagtgagccgagatggcagcagtacagtccagcttcggctcggcatgagagggagaccatcgggagacgggagacgggagacgggagacgggagacgggagacgggagacggg

SEQ ID NO: 24317 - DNA, 1083 bp, Artificial sequence
  DNA replication origin
aggttgtagtgagccgagatcacgccactgcactccagcctgggcaccattgagcactgagtgaacgagactccgtctgcaatcccggcacctcgggaggccgaggttggcggatcactcgcggttaggggctggagaccggcccggccaacacagcgaaaccccgtctccaccaaaaccaatcaggcgtggcggtgcgtgcctgcaatcgcaggcattcggcagactgaggcaggagaatcaggcagggaggttgcagtgagccgagatggcagcagtacagtccagcttcggctcggcatgagagggagaccatcgggagacgggagacgggagacgggagacgggagacgggagacgggagacgggagagggagagggagagggagagggagactctccctaagctttgattggtatgcaggccaagcagtagccataggaaatggttgctgttgggttttctgaattatttgtttgctaattatcttccttccttatcctcccccatgtttctttaggatccttcatctgtacctaatgcagacaatgccttcacattattttatgtgaaatttcgagctgctgcccccaaagtcagagtaagtctattgacataactaggacattgctatgaaatttgttcatctgcccttttgaagtactgttgtatgttaggctctttgtttataccgaggaagtgaacttgaatgaaaggttgacattgtccttccacattatagcagtgtatcttagtgttgtgtctaggttctttaagtccacagagcaggaagcatctagcttttcctgtgatgctcagggatggtttctagatgaaggtgatagacgggttttaaaagcttggctggtggtcttgaagggaccaataaggtgttttgataaagagagaacagcacatatagggaagtttgtaggagacataaaagacatacattttgggagagatctttatactacaaagactctctcacgagggatgttacatgtcgtgctaatttaggaaaagtagagaaccaatgaagtggtatcttaaacagaggagttatttggtcagatttgcca

SEQ ID NO: 24318 - DNA, 1567 bp, Artificial sequence
  DNA replication origin
gggaagtcatttctgccaggtctttgacccctgaaagcgtcgttgcgtctcgcgccgcgggtaggcagggcgggatttctaggaggaccggcagaggcgcgcataggtgcgtggtgctgggcccgggcgccgcggcaccggtgtaggagcgcgcatctccagagtttcttccatctgggcgacgtctcggtgcctgcggcgggaacggcgctttgcttccctgaggagcttctagagagctacggtggcccccgtgtgggaggcggggggcgtggcggcgtcggggcgtcgctgtcccctcctcggtagctctcctccctcccctttctgctgttaccgggagcgcggtggccacggaacgctgcccggagccgcgcgagggaggacccgacgcgcggcgtttacccagcgcagcgttccaccgctcgggtttggctgggtgaggctggcggggccgggggcgagatgggagcggcgcggggtggagagggtggttggagaaagggaagggagggccgcgggagaggttggatggtggaagtggcgccagagaggtttgtgcccagcagagacacccaggtatcttagggtcgctcagagcagtgtcggggaccccttggagacagtaggaaggggctcctcgcggggtggcggatttctatccggttgactttgtagagtgaggttgaccctgtgttcggcttgggccgggaagggcgcagaagcgggacctcaggacacttttacgcagggcgattctcagagactacaaagcctgcgccctgcgtcctcccaggcgcagtgttctgggatcagtgtcttttctctgttttcgtcctcaacacagccaaagtcgtggatatgtggtgacagaaaaacatttggctacataactgagctaggctggagtgtgaaatcgcggcgtgttatttggtccgggcgccctacatagcaacccccactcttctcgcccccaaccccccgccacgccggacacggtcaggcgggcgttcccccaacccgccccttgtgaagtccacctgctgagactgatacagatcccctgcgaacttgatgctgtccgcttggaaaacgtggagaactttcagaggaggggttatttcgccttgagtgaaaattaagactcaaaggaaaaggtatactcaagagctgcccttactgggttatttctgtggaatttggaaggatctttgaattgaagatgtggtgggagcgcgcagagaacagagaatccgtaagcttgagtttcttagacccagtttcttaaagccaaagtagcggggagatcttggcaagtcaagaaaccttcttgaacttcagttcccttgcctcagggggagaatactccagccataccccactgtgtggtttagaaggttaatggcctggagggagggaagtgttttgaagcctataaagtatcctgtgaaggtatcaccacattgctgcccactgaaacactgccggccgccgacagaactttgtttggagccgagttaagacagcatctttatggcagtgctggggttttcgtgattaccggtcc

SEQ ID NO: 24319 - DNA, 960 bp, Artificial sequence
  DNA replication origin
cgccacttccaccatccaacctctcccgcggccctcccttccctttctccaaccaccctctccaccccgcgccgctcccatctcgcccccggccccgccagcctcacccagccaaacccgagcggtggaacgctgcgctgggtaaacgccgcgcgtcgggtcctccctcgcgcggctccgggcagcgttccgtggccaccgcgctcccggtaacagcagaaaggggagggaggagagctaccgaggaggggacagcgacgccccgacgccgccacgccccccgcctcccacacgggggccaccgtagctctctagaagctcctcagggaagcaaagcgccgttcccgccgcaggcaccgagacgtcgcccagatggaagaaactctggagatgcgcgctcctacaccggtgccgcggcgcccgggcccagcaccacgcacctatgcgcgcctctgccggtcctcctagaaatcccgccctgcctacccgcggcgcgagacgcaacgacgctttcaggggtcaaagacctggcagaaatgacttcccaaccccagatgcccccagcagcagtatttagcagtcatacaattgcctgaaatgaagaatgagtaatctggatgagtcggccctgaaatcgacctgcaacttacccggaacgtgagctgtctctctctgacctctgctggctgcttcacctggagtctgagtccgactcatgtagcacttcactgtccgcgttagtttagccttcactgtcagcaactcgtcaccttgtcctcttgcagcgaaggtttggaatcccatcacgggtgtgcagtggttagtcctgagatcatggtggtgctaggagaacctgccaaccaatacagaaagttgtcacgaatagaaacctaagctctggccgggtgcggtggttcaagcctgtgatcccagcacctactttgggaggccaagtcggat

SEQ ID NO: 24320 - DNA, 889 bp, Artificial sequence
  DNA replication origin
ggtgacagtgaagcagggagtgaaagaatgagcaggactgtgggagttggcatgggaagggaaagagtcaaggggaacagagcgagaaaagcacgggtttaaggcaagtgtgtggcttggctcacgtctgtaatcctagcactttgggaggttgaggcgggtggattgctcgagcccaggagtttgagaccagcctcggcaacatgatgaaaccctgtctctgctaaaaaaattattaaaaagaggggcgcctctgcccggccgcccctactgggaagtgaggagcccctctgcccggccagctgccccgtccgggagggcggtgggggggtcggccccccgcccggccagccgcccggtccgggagggaggtgggggggccagccgccccgtccgggaggtgaggggcgcctctgcccggccgcccctactgggaagtgaggagcccctctgccccgccaccaccccgtctgggaggtgtgcccaacagctcattgagaacgggccaggatgacaatggcggctttgtggaatagaaaggcgggaaaggtggggaaaagattgagaaatcggatggttgccgtgtctgtgtagaaagaagtagacatgggagacttttcattttgttctgcactaagaaaaattcctctgccttgggatcctgttgatctgtgaccttacccccaaccctgtgctctctgaaacatgtgctgtgtccactcagggttaaatggattaagggcggtgcaagatgtgctttttaaacagatgcttgaaggcagcatgctcgttaagagtcatcaccaatccctaatctcaagtaatcagggacacaaacactgcggaaggccgcagggtcctctgcctaggaaaaccagagacctttgtt

SEQ ID NO: 24321 - DNA, 734 bp, Artificial sequence
  DNA replication origin
ttttgccgcccaggaggctttaggggactggaggttgcggggataggggggtggtctgagaacacggataaaacggcgggaggcaatgaatgggatttacagtacagtgaggtttggggcaggagagggttctctcaattctgcgatttattctggccgtttaacccagagatccccaagaggcagttttcattcactatggggtcatccctgcagatgccccctggcatttgggcgcttacaatgaaccagacgcttgtttagggagtctacgtaagttacctcattaatccagggaccccaggagtgccaaagttgttcccctgagtctacagaggaagttaataaatgtatctaaggtcacccctgcagttagaggggcgctagattcgagctagggccctcagaatctagggttgccctccttcacagtgtacccctgggccagacgccagcgccaagggacgaatacgagtgggacagagtgtttgctgagcggcagaagaaagctacagacataggaaagaaaaactcaaaatgagggcagtgtttatgggggacagaagacattgtcgtaggagaaagatgagctggctgctccccgaaattgggtggtgccaggagaggctagaaagccagtgaccccaaacagcaaatcagtcacagctcgagtctgagctgaaagaaccatcgaagtctccttgtgcccttcttcttcccgctttggggcatgg

SEQ ID NO: 24322 - DNA, 800 bp, Artificial sequence
  DNA replication origin
gttggggttcgcttcccggcgtcgccatcttctcccgggcccccccaccccgccccgccgctcctgcgggggggtcacagcgttccccgcgaggggaaaacggcagctcgggctgagtgccgcagtgctccaccgaaaggcgctggaaggaggggaggagggtgtgggcaggcgcgtagaatggggggcgggcggggaggcggccgtggcagctcggtcttgaaggtttcctgtccccgggaagctaaggactgcggcggcggcggcggcggcggcagcgcgcatgtgtctcctcccgcccctgcgccctccccccggctgctctgccctcctccgccgtctgctctctcctcctccttcccccacgcagtctgccccgcctgagccttcctccgcgcctattctgccggccgccgccgccttgccgcgatccgccccgcaatcgggtacacggcggggctggacgtctgctccggggcaactgaggcgccgaacctctctctgggcgtccttttgccgcccaggaggctttaggggactggaggttgcggggataggggggtggtctgagaacacggataaaacggcgggaggcaatgaatgggatttacagtacagtgaggtttggggcaggagagggttctctcaattctgcgatttattctggccgtttaacccagagatccccaagaggcagttttcattcactatggggtcatccctgcagatgccccctggcatttgggcgcttacaatgaaccagacgcttgtttagggagtctacgtaagttacctcatta

SEQ ID NO: 24323 - DNA, 1721 bp, Artificial sequence
  DNA replication origin
ccagggaagtaaccgcggggctgggacttgcaggcgcgccgcgtgcgcgcagtgtaagtgggaggtttcaggcggctgtgtcggcttcctgggccccgcgcagggctgggaactccagcgcggacagcggcgtcggcgcctccaaccagttcaagccgtctttgcatcgaggcgtagcccatcctggtggggaaacccagacaaaggtggcacgccctcggccgagccaggggcatcggcgcagtgccgcgagccccctcggcgacatcgccgagcgatcgggcaactcggtgccgcctgtgaggtgcccaagtttcctctccctgcgcttgtgcgggaaaagagccgccgggcttgtagtgaatcccagtcggctgccgcttcggaagcgatcggccctcttccttccgtgccttttgctcaccgcccacacagtttgggtcctaccaccgaggctacctggttctcagttacccaaccgttgcgggggccccaggaaaggacggcgtggcatattaaaggcaaagtaattaacgtgagcctgttttcctgtgtgagcccggcaagttgtaactcgcgccaataagcagcataactttttcaagttacgtcatgtgttacatacttctaaaacgtctgctttctctttggtagttggagttccaggagcgggatctataaacaggaaggagggtggtggaataggattggggccttagggtctatacagaactgacttggtttccggccatccggttccgctccctgggggagggtttgtgtcatagcaagcgcccaacatttcccagggcagtgggtgctccgttttggagccgctgcccagacctcttggctgtcatcgcctcatggcccagggtcagaccccctgggtcttggatgggttgactctcatcacaggagcacccagtttaatcttgtagtgggcaagggagcaggcagtgggtttttggaggctaggtttccagtgtcttttcccccttttaattcaataaacatttatctagagccttaatgaatatttagatacagttctgagttcactggaggcaaagatggctctccagggtcattaaactttgtaatttggatttagggatagtcaggaatcggcaaaaaagagggaatttccaaagttgagctgtcaacagctggggagtgtctttcaataagacctcttagttacatcttctcaagtggaacttattccaagaattgcctgaatcactgacttaaaaaactacattaaattttacttcccttctgctatagagtgtaccgtgagctagctatgctatggttggctatatctgcagaaaatagagctggcatgactaataataataggtttgtgtagttcagtaagggggcttcatagttgttctacttcagttatgctaaggattatttacaaagttaggtgaacttgatgtgtctgctgtgttggcatttctttgagaagaccagtgcttttagggatcacatcttttagctaagacctcgccatgtgaagtggatgctgaaagtgttcttgttggcttgtttatggcaagcttaagttgtgagttttgcaggtttttatttatgagctcacttgcacatgttttatgctcaggaaaatctaactggttaaaattcagaggctttatgttaattcctcatccaaaaatacagtattatttgggggaagaggagtggaggga

SEQ ID NO: 24324 - DNA, 1420 bp, Artificial sequence
  DNA replication origin
ggtgtggctgggttttgtctcaaagcagaggcaagtaattgtaactcagaaatgtattgccgtctggctgcttcctctctattattgtacaccttgaaggcgaggttgattaattcctgttgtggggtttgagggtcagattctaatttttgaagttttttcctaatgtcaggagtggattgggtgataaaatgcatattgagaataagacggccttttgaccttttagggtctagggctgtaaagcgtctcggggttgctgccaaatgagccatgaactgggctgggtttttataaagagcctaaacgctatctgatttgggataaagaaaaaggagcattaaacttgtctatacctttagctccagccacctttttaagaggaaattgctgggcaggtgggggagggctagtcacagaaggaaactgtaagctggaccgggtgtgaggaggggaggtgataaaaaggattatagggtggaggagcagaggctgaggaagaactgggacctagctcggcctggcaaggaggggagaggtcagatgggtctgtagaaaaggaagattagaaagactcagcgatgcttggggttgggactgaggggacaggcaggagggaaagaaggaagatttgggacgagttgcattgggaacagagaccagggagggaccgatgtgtaaaagaatgcctggacgtcaggcacctcggaccatttgcccattttacgacaagaattatttagatcttgtaggatggaaaaattgaaagtgccattttctggctatttggaaccactgttgagtttgtattggggtcaagggcattgcagaagaaaataagccatttaggttttaggtcaggtgtgaattgaagaggttttaggtttttaagaacacaggctaagggagaagaagagggaatggagggcgggagcttgcccatagtgaaggaggcaagcccagagaaaagagagagtagagacatggagaaaaggggtggggggttcttgccccccagaaaagcagtgaaggggtagagacacggagagaaggggtcgggggggttcttgtcccccagaaaagcagagaaggggtcggggcatggaaataaggggttgggacgcagagataagaggttggggcttggaaaataaggggttagggcacagagataagaggttggggcacggaaataagggatcgatgtgcagaaataagaggtcggggcatggaaataagggattggggcgcagagataaggggtcggggcgtggaaataagggatagagagaaggggtagagacagggagacaaggggtcagggttcttgtccctcccccagaaaagtgggacttgccgctaagggtgaaggaccaaggcaggcgtccctgcgtggtcagacacctctgaaacgtgggtg

SEQ ID NO: 24325 - DNA, 1058 bp, Artificial sequence
  DNA replication origin
gagcagtctccgccctcgcgcgggagctgggaggctgcgagatccctaccgcagtagccgcctctgccgccgcggagcttcccgaacctcttcagccgcccggagccgctcccggagcccggccgtagaggctgcaatcgcagccgggagcccgcagcccgcgccccgagcccgccgccgcccttcgagggcgccccaggccgcgccatggtgaaggtgacgttcaactccgctctggcccagaaggaggccaagaaggacgagcccaagagcggcgaggaggcgctcatcatcccccccgacgccgtcgcggtggactgcaaggtccgagcccggggaggtcgaggaagcgggtgctgggcccggccggggagggctgcgcggactgcagcggcagtgcgccccgaggtggcgggcgcggggctcgcgccgcggggacaagtccccgagagagcccggcgctcccgtttcctgtgggtccgcagctcctttgtaaggaagtgcgtgtgctggaagcggtgcctgacgcggggtcgggggcttgggaggcctggagagggaacgattggctaattgtgccgaattcccggtcgtttgtgcagtccggggagcgtgcgtgcagccaggacttggcttgttcgatctggggaccggcagcgacaggcacaacaacaacaaccgagtttggcacttccttcccagtataaataatgtacctaaaatggctgacatcattacaagcctaaacctctgttgtttcccactttcgtttctaggcttgaacagcacttggactaagtccagcaactgtaagcgtcttaattttaaaagcgtttctttacctcctttttccacggcccttcggtagtggcaggtgaacttcacctggagaggggacgaagggacagtccgcccgaagtaggtttgggctgtctcttaccattactagtaaaggccagtaatgactatgtggatgttagtgaaaaaccaattgttggcatttaaattgtatcagcgtctttgtgaggactcctgctgcgtgaaactaaacatgagaa

SEQ ID NO: 24326 - DNA, 960 bp, Artificial sequence
  DNA replication origin
tttcccgcggttggacgcggcgctcagttgccgggcgggggagggcgcgtccggtttttctcaggggacgttgaaattatttttgtaacgggagtcgggagaggacggggcgtgccccgacgtgcgcgcgcgtcgtcctccccggcgctcctccacagctcgctggctcccgccgcggaaaggcgtcatgccgcccaaaaccccccgaaaaacggccgccaccgccgccgctgccgccgcggaacccccggcaccgccgccgccgccccctcctgaggaggacccagagcaggacagcggcccggaggacctgcctctcgtcaggtgagcgagcagagccgccgtcgcctcacgcgggaagggcgccccgggtgtgcgtagggcgggcgccaaggcggctcggcggggatccgtcctcgccaggggccgggtcccggcgggaggaggcgccctccctgccccccgccacggcggagcgtctgcagaatggtgacaggattctgggttcttgggcgaggggtctcggcttcaacttgacaggtgtcgggcgggtggggctagggtcctgagcgaagtgacaggtgcagttccctcttgtgaggctcggaggcagagggtcgttgcgagcgtccatcagacgcaaaaaatgaaaaataaaaatacaaaaatggtgtctgtgggagagtttttcaccggagaattggagtactccggtggtcgtctgactttctgttttggttcacgcgatgcaacagttgggaagtattttcttccgggcgtgcactgcatctgaagtccatttgtgggagaggccgaccagaaagccttggacaagaagcgcagggtcctgagtgtccattgcccacaggatactcggctcaggagctttgcggcgtttccttagaacaataatgcatcgaggccttggggactcaaagccatctgtagtgattgatggag

SEQ ID NO: 24327 - DNA, 1248 bp, Artificial sequence
  DNA replication origin
gagtcagctattaagcaccggcgggcttctgtctttccagtctctcgggagcccgcccagctgctccaggaagtgcatctgggcagtgctgaacctgaccttcctgcacgcagccctgggttccctgcacctcttcttgagctttcgcttggaccttaagtccttgatggccgtgtccaggtcctcgtcactgtccagggagctgctcttgtcttcggagctctccttctcgtccaggtgcctcacctcgtctgtcttaccctggccctgcgtcatgcgagtgtcgccgggccccttggctgcgccctcccctcccgggacctcgctggctttgccctggacgggcaggtcccgcccctcatggccgggcacggctcacgcctggctgtggtcggcatcctggccaccatctttcaccacctcccgcgttttcttgggcgtggacggcctcatggcatggccgccgcctctacgtttccttttgcagctcagcagcgggtccggtgttttagagaggggggccttggggccactggtctggctgttggggccaggcggtgaaagtgggccctgggcagcctgcgagcagctctcacctctggccagcaaactccccgactatgccttgagggtcaaaacgtctggatttcctgatcgatgctgtcgtcgctgtccacggagctactgtcgccgtcagagcgggaaggcacgttcagggagtagaagcgtgggcttgcagaaagggacctgttgctgccttacatgggggccggcagggtagtcttggaaatgcccaagattgcttccgcgcgcgtcagttcagcggacgtgtctgcctggcacgaggaccgttctacaaactcgttcctggaagccgggctcgctggaggcggagctttggtttccttcgggagcttgtggggaatggtcagcgtctaggcaccccgggcaagggtctgtggccttggtggccactggcttcctctagctgggtgttttcctgtgggtctcgcgcaaggcacttttttgtggcgctgcttgtgctgtgtgcggggtcaggcgtcctctctcctcccggcgctgggccctctggggcaggtccccgttggcctccttgcgtgtttgccgcagctagtacacctggatggcctcctcagtgccgtcgttgctgctggagtctgacgcctcgggcgcctgcgccgcacttgtgacttgctttccccttctcagggcgccagcgctcctctt

SEQ ID NO: 24328 - DNA, 1101 bp, Artificial sequence
  DNA replication origin
gggctggggagcaggtaggagtcccaccctccccagtgcagctgcagctacccaaaccgtggctgtggacccaggcatctctgtatacttgggggccggggaaggcaccccccaactgccaccgccctcgcaggctcagaagtgcctgctcccactgcctggtttctccctgctgccagcgcccactccaatctcggagcaaagtcagggctgagcctgggtgctgctgcagcccagccagatgtgcgcacgctcaaggcagcgctgacacgccagccccctgccgcctcagccctctccagactttgggcgctgacgagcacgggggggaagccgaggcgggggctgagggcagcttggcactggcctacaggtgccccttgacgcatggatggcggcaggaggcagatgggctcctgagcagtagaggatgagtccctgttgaggccccaccttcaggccagggagcgcctgaaggctgggggtgggcgctgccagtcccacggacaggagtgaggacttgtggtaccttttctgggcccactagtggccgcccatgtaccaatcggtgcacactttcttcccgctgaggcccacagaagcccgagtctcagccagagcagagcagaggatggagagacaactagctgcagagaggaactaccctctctactgatagctgaacacttgtcaggacgagcagctgcagagaggagctaccctttctgctgagaactgaacacttgttgggacgacctgcctgcagagaggagctaccttctctgctaggagctgaacactcatcgggactttgtggttacagagaggagctgcccactatgggtcttctctaagctgttctattgctcaataaatctcctcttcatcttgctcaccctccacttgtctgtgtacctcattcttcctggctgcaggacaagaactcaggacccaccaaatggcgaggctgaaagggctgtaacacaaacagggctgaaacatgccccttgctcgccatgttgtgggtaaagaagagagaagagctgcggcccttcggggagcccagaattgggagctccttgagccagggctgtgactccc

SEQ ID NO: 24329 - DNA, 956 bp, Artificial sequence
  DNA replication origin
gcggaaaccgttaggctgggactgagggccggggcactctccagggctcggccccgtcgaggggcgcggaccacccccttctgtgggcgcgctgtgggcagaggtgcagaggggcagtggggccggggacaggaccggtctactagtcgggcacctgccggggccgagcctagccaggacacgcttgcgggggcgcggccgggggcgccatccagcccaagaggaggcggcatctagcccgagggaggtggcgctggtgcgcgggcggcccttctctctgtcccccgcctcctccccgcggcgagccgcgtagctccggagggctcgggggcgggggcgggggcgggggctggggcggaatcctcctgagaggatcgcccagcacccgcggcgccttcggctttggccgcccggcagccgccgaacttgaacgcttttctgaagagagttttccccgctcatcttggggttaaaacctcgaaaacccgccctctgtttgatcctgcgtggctgcttccagtacctggcagttcctctccccgggcgagttaaccacctgttcagtcgggaggtggactcgaggctgcagtcctcgcccggttttaacaacctggatcttcgaacttttgacacggctttggaaacgacgtcatgtgttaggtaaaggaaaatgaacagataatttcgctgtcagattgcgagcagaagagggactgttttaatggatgtggtcgttaattgttcttttattcaactgttagcgttacaagccttgggatattttagagggtggaatgcgatgatttgctgggggtgctagagattgtgaattcgagattttcttttgtgagattttacgtaagttcctttggacacctttgtgtctgaccatctattaaataagagtcgcaggctgatgagattttttttttctttttgcggtataatcattatgt

SEQ ID NO: 24330 - DNA, 1051 bp, Artificial sequence
  DNA replication origin
atgatgtctgagagaagggaacactgcccagaggggctgcttaactgatccgcctggatcatgccttacctaggctagagcattcatttctcttgttgagagcacaggggaaaatcaaatcaactataaatgaagaaattacattttctctgcctagggggaggagacagggaggaagaaaaagtggaaactgtgagtacagaaactattttgaggagttttgcatgaaaatgatccaggagagaaaaactgatgacaagagagagagaaagagaattgacgcagtgatgtctggaggaggagaaaggagcacttaaggggcagagctgacttcagctgcaagtaccaccaactgtcccaggggagcacgagcagaggtgggggtgtggtagttatcttcagagaaacagggtgcaaggaaacctcccaaaggaaggggtggtgggtgttgggtctaaggagagaggagggggtataaaccagcagcctggtggtgggagagtgaatgaggtcaggtgagagttgggaaggccgggggaacgaagcaccccgctagaggttgtgctttcaagtgaaacaacgccatgtgagagcaggcaaggagtaggcagggaattcggcttcaccagggttgtggtgctcttggtggatggacgaggctgacaatggagaaaagagcaagggagtcgagggcgtctgtgtgggagtgatggcgactgcccgtggaatttacgttgggtaaaggaagaaagtgaagacctggggcaggcaagggaccgggaaaaggaaggaggagccagcgatggaggtcgcagtgggttgaaggattaccggaactgaggtgctaggggaagagagctaaaaagagagcgggcggaggtcagaaagagggctgactgaagtggaggtggaggaaggctggcaggcaaccgtgaggtgtaagttccgtcgacaggcgcggctgagatcgggtggagagcaaggtcataggtggaaaggaggtcaacaaactagaggccaaggcattccaagactcggcatgggtgtgaac

SEQ ID NO: 24331 - DNA, 898 bp, Artificial sequence
  DNA replication origin
gtagcgcccgatcagcatcacggtcaccacgttgccgctcaccccgacgacgaacaggcacaggcacacagcggtcaccggcaccagcgcccccaggggaaagggcgagcagcggcgctcgtcgcaaggcggcagcgcgggccacggcggctcccgcgccccctcggggccgtcgctgccgttccaggggctgcccatgggtgctccgcgcggccgccgcgtcccgggtcgggctgggagcctggcgcgtggtccctctcggtgagcgcctcctttcccagcccgcacgctgcgggcgcggcaggtcagacggcggagcgctgcgctgcgctgcggggcgcgagaagcggctctgcggggtgggctccgaggcgctcccgagctagctgcgcgcagtctccgcccacggccgcggcccgccccggcccggccctgctccgctcccgcgccctctcccgggcccatgcagttccagggcgcttccctctccactaactggaatacccggcgcccttagcgcacgagccctacccggtccggtgagcgatgtctgcaccctagacagctttggttacaggactgagcactgtacgggcgcttttgtcagtctggtactccgggcaccttcgaagggatctggtctggtggctggtagctgccgcttgacggtggaggagggctcatggtaatcctcaggaagccataatgctaaataataggaggggagtctagaccagaatctagagcctctcctgtctaatcctggctctacaaccgagtaacttgtgtaatcttgggctagtcctggtctcgcccagcccagttctcctcttctgtaaattcgcgagtggtggagggagctgaccatataattgaccaaataatttcttttttttct

SEQ ID NO: 24332 - DNA, 814 bp, Artificial sequence
  DNA replication origin
gacggtctgccggtggcctctctcccgccccgaggcggccgggcctcgcagcggccgccggctgctccacagctcccgcccgatgagcccgtagaggatgctgaggcacagaaagggcaggaagaagtaggcggtggtgacccacagcatgacacgcagcgcgcccagctgcgcggggctcggccggcattcgcggctgaacagcgccgcggcctccgcggtctcgggccccgacggcggggacggcggtggcgcccgcgagagccagagaggcggcgacgaggcgagaggcgaggaggcgatccgcgcggtgccattgaggcccgggactacggagatgccggggtcctgctcgacgcccaccaggaacaagaagggaccggcagagagcagcgccacggcccagagcacagcgatgagcgcgcggacgcggcgccgggtgaccaagacgcgggcgcggagcgggcggcagatggccaggtagcgctcgacgctgagcgcggtcatgtgcagcagcgtggcgtaggtgcagccctcgcccacgtagagggacaggcggcagagcagcggcccgaacacccagggccgcgagcgccagaggcggtacaggtcgaacggcagcccgagcaggatgagtaggtcggacacggccatgctgcccaggtacaagttggtggtggtccgcatgtcccggtagcgcccgatcagcatcacggtcaccacgttgccgctcaccccgacgacgaacaggcacaggcacacagcggtcaccggcaccagcgcccccaggggaaagggcgagcagcggcgctcg

SEQ ID NO: 24333 - DNA, 1291 bp, Artificial sequence
  DNA replication origin
cccggacggggcggctggctgggcagaggggctcctcacttcccagtaggggcggccaggcagaggcgcccctcacctcccggacggggcggctggccgggcggagggctgacccccccacctccctcccggacggggcggctggccgggtgggggggctgacccccccatctccctcccggacggggtggctggccgggctgaggggctcctcacttcccagtaggggtggccgggcagaggcacccctcacctcccgacggggcggctggccgggcggggggctgacccccccacctccctcccggacggcacggctggccaggtggggggctgacccccccacctccctcccggatggcacggctggccggtcgggggggctgaccccccacctccctcccagatggggcggctggccgggcggggggttgacccccccccacctccctccctgacggggtggctgccggtcggagatgctcctcacttcccagatggggtggctgccgggcggagaggctcctcacttctcagacggggcggctgccgggcggaggggctcctcacttctcagacggggtggttgccaggcagagggtctcctcacttctcagacggggcggccgggcagagacgctcctcacctcccagacggggtctcggccgggcagaggcactcctcacatcccagatggggcggcggggcagaagcgctccccacatctcagacgatgggcggccgggcagagacgctcctcacttcctagatgtgatggcggctgggaagaggcgctcctcacttcctagatgggatggcggccgggcggagacgctcctcactttccagactgggcagccaggcagaggggctcctcacatcccagacggggtggcggccgggcagaggctgcaatctcggcactttgggaggccaaggcaggcggctgggaggtgtaggttgtagtgagccgagatcacgccactgcactccagcctgggcaccattgagcactgagtgaacgagactccgtctgcaatcccggcacctcgggaggctgaggttggcgggatcactcgcggttaggggctggagacctgcccggccaacacagcgaaaccccgtctccaccaaaaccagtcaggcgtggcggcgcgtgcctgcaatggcaggcactgggcaggctgaggcaggagaatcaggcagggaggttgcagtgagccgagatggcagcagtacagtccagcttcggctccgcatgagagggagaccgtggggagagggagacag

SEQ ID NO: 24334 - DNA, 936 bp, Artificial sequence
  DNA replication origin
gtgggggtgtcggccccccgcccggccagccgccccgtccgggagggaggtggggggggtcagcccccccgcccggccagccgccccgtccgggaggtgaggggcgcctctgcccggccgcccctactgggaagtgaggagcccctctgcccggccagccgccccgtccgggagggaggtggggggggtcagcccccccgcccggccagccgccccgtccgggaggtgaggggcgcctctgcccggccgcccctactgggaagtgaggagcccctctgcccggccagccgccccgtccgggagggaggtgggggtgtcagccccccgcccggccagctgccccgtccgagagggaggtggggggggtcagcccccccgcccggccagccgccccgtccgggaggtgaggggcgcctctgcccggccgcccctactgggaagtgaggagcccctctgcccggccaccaccccgtctgggaggtgtgcccaacagctcattgagaacgggccaggatgacaatggcggctttgtggaatagaaaggcaggaaaggtggggaaaagattgagaaatcggatggttgccgtgtctgtgtagaaagaagtagacatgggagacttttcattttgttctgcactaagaaaaattcctctgccttgggatcctgttgatctgtgaccttacccccaaccctgtgctctctgaaacatgtgctgtgtccactcagggttaaatggattaagggcggtgcaagatgtgctttgttaaacagatgcttgaaggcagcgtgctcgttaagagtcatcaccaatccctaatctcaagtaatcagggacacaaacactgcggaaggccgcagggtcctctgcctaggaaaaccagagacctttgttcacttgtttatctgctgaccttccctccactattgtcccatga

SEQ ID NO: 24335 - DNA, 1191 bp, Artificial sequence
  DNA replication origin
tatccctagttggcagtcttcctctttacaacctgctgaaagtggaagacctccagttttcctttaattcctcagcaaaccaccaactattatatgtcttttttccagaacaacttattttttaactataattatatgcatttatgttagattcactgaaaacctcatcttgtatggtgctctgtaccctatgggtgctaaataaaggcttgctactggcaactggatttaggatcggctaattctgcgtccttttaagatatgcttatttaagccaaactcggtatgataatttttttttttttttttttttttttgagagggagtctggctctgtcgcctaggcaggagtgcagtggcgcgatcttggctcactgcaacccccgcctcccgggttcaagcgattctcctgcctcagactcccgagtagctgggattacaggcgcccgccaccaagcccggctaatttttgtatttttagtagagacggggtttcaccatgttgaccaggctggtctcgaactcctgacctcgtgattcgcccacctcggcctcccaaagtcctggaactacaggcgtgagccaccgcgcccacccggccagtatgatagtttttaggaggaaccctcaggagagtgattgtttctcccgctgtgttgtggggggtggagtagggaagcctggcgtttggggtttttttgtttgtttgttttttgtgtgtgtttgtttgtttgtttgttttgagacggagtcccgctctgtagcccaggctggagtgtagtggcgcgatctcggctcactgcaagccccgcctcccgattcaagcgattctcatgcctcagtgtctggagtagctgggattacaggcacccgccaccatgcccagctaatttttgtatttttagtagagacggggtttcaccatgttggttaggctggtgttgaactcctgacctcgtgatccgccctcctcggcctcccaaagtgctgggattacaggcgtgagccactgctcccggcgtttgggttttttaagctattcaaattaagactagactggaatctggagcagtgtgtgtgacaacccctctctgcacacccaactttccccgggccggctagtgactcaaagcgacagcccagatttaagaaaacgaaacctagtgcagctggggcacttccgggatctcg

SEQ ID NO: 24336 - DNA, 2205 bp, Artificial sequence
  DNA replication origin
aggttacagtcagaatgatctatctgaaatgtactaggttactgtcagaatgatctactggaaatgtactaggttactgtcagaatgatctaccggaaatgtactaggttactgtcagaatgatttaccagaaatgtgctaggttactgtcagaatgatctaccggaaatgtactatgttactgtcagaatgatctacctgaaatggacatctgctcatatttccccatcacctacagaagtcaagctccgtagtgttatatacaagtacattcattccttcaacaaatatttaatgaggacttactattatttaatatttaatgagtacctactatgtcctactactactactaggccaaccagtctaggcactaaggatagaagagagtaagacgaatttacatgccagtggccagtggtagagacaggcattaaacaagttttgttttgttttccaggtagtgataagtactatagagaaagaatagagcagaaggaggtagagagtgacaggagcaggggcaaggggtgctcttttagacaggatgggcaggcaaggttgagggaagatgtatatgagcagacacctgaatatgatggggaactgaaaatgggataatgtggcaatgagttttccttgcagagaatagcaaatggaaagatcctgaggcagggacagctttggtggcttagaggacctacaaggtagcagggtagcagagtcattaagatgggcaggagtcaaatcagataaggacatggggtaaactgcaggccaggctcatagattgttctgagagtcatgggagactattggtgggttttgagtaggagaatcacatttgctttttgtttttcaaaaagcattttggccgctctgcaggcctgcctgtattaaaggctagaatagaagccaggaaagcaatagtccagacagaagatcatgatggcgtaggcttgggtggcagtaatggaagtggtgagaagcagtcaggctccagatacagtcaggctgaacacagaactggctggcccgactgatgcattagaaggggtgtccggaggaaagagaggccctgaggagccactaaggtttttgcaaggagcacctgggcgaatggaatgggctggtggttgagcaggtttggagtacctgaatacagtggaggaaacaagaattctctttgggacatactcagtttgagatcatttcagaaatggaagaagttggttataccagtctggagtttgaggaagaggtcaggatggaagcgcatctcccgtgacttaccttacagtccatatgtataccaatgaatgaaatatccaactgattggcttgtggttgccacgtatgatgtttacgtgtgacgttttgtggtttggtgcctttgtgtcatcctctctgctgggaacaccccttcaacttttccacctttggctgagtcttgccctttaaaggtaagcccatgaaacatggagaaaccctctctactaaaaatacaaaattagctgggcgtggtggcacatgcctgtaatcccatccactcgggaggctgaggcaggagaatcgcttgaacccgggaggcagaggttgcagtgggccgagatagcgcctttgcactccagcctgggcaacaagagtgaaactcctctcaaaaaaaaaaaaaaaaaaaaagggtaagcccagccatcctctcctcaaaaagctttccctgaagactgggagtcaggagtctctcatctgtacctctgtggttctgacctcctcattaaagttgcctagtagagtctctagggcagggtctgcctaactcatctttgtatgctcaggaccttgccctgagcctggcacaccgtttggagctatacacacacgcaagggcaggaacccatcagaagacccacccactcaagtagagggccggggaggactggaacgactggagaaggggagacgggttccagtcacgtcctccgtgaacgtgagacccagctcttccctcagggccgccccctgcctcaccgcatcagggcgcccctccactgtcctggtttaccggtgagcggaggggcgctaggagagttgacatcggttgtggtggaagcactgggctgtcacccgcgggggaggtaaaccgaagcgtgcccaccactcgcgcgaaaccatgggcagtcagagccacctgtggaactggcctgg

SEQ ID NO: 24337 - DNA, 1101 bp, Artificial sequence
  DNA replication origin
ggtcagcagataaacaagtgaacaaaggtctctggttttcctaggcagaggaccctgcggcctactgcagtgtttgtgtccctgggtacttgagattagggagtggtgatgactcttaacgagcatgctgccttcaagcatctgtttaacaaagcacatcttgcaccgcccttaatccatttaaccctgagtggacacagcacgtttcagagagcaccaggttgggggtaaggtcatagatcaacagcatcccaaggcagaagaatttttcttagtacagaacaaaatggagtctcctatgtctacttctttctacacagacacagcaacaatctgatttctctatcttttccccacatttcccccttttctattcgacgaaaccgccatcgtcatcatggcctgttctcaatgagctgttgggtacacctcccagacggggtggcggccgggcagaggggctcctcacttctcagacggggtggctgccgggtggaggggctcctcacttctcagacggggcggccgggcagagacgctcctcacctcccagacggggtcggggctgggcagaggcgctcctcacatcccagacgatgggcggccgggcagagacgctcctcacttcctagatggggtggcggccgggaagaggcgctcctcacttcccagactgggcagccgggcagaggggctcctcacatcccagaccatgggcggccaggcagagacgctcctcacttcccagacggggtggcggccgggcagaggctgcaatctcggcactttgggaggccaaggcaggcagctgggaggtggaggtcgtagctagccgagatcacaccactgcactccagcctgggcaacattgagcactgagtgaacgagactccgtctgcaatctcggcacctcgggaggccgaggctggcagatcactcgcggttaggagctggagaccaacccggccaacacagcgaaaccccgtctccaccaaaaaaatacgaaaaccagtcaggtgtggcggcgcgcccctgcaatcgcaggcactcggcaggctgaggcaggagaatcaggcagggaggttgcagtgagccgagatg

SEQ ID NO: 24338 - DNA, 1289 bp, Artificial sequence
  DNA replication origin
ccgggccggggaccccatccctcgccccggacgcagcgcccgcagggactgcccgggagcccgagcgagggaggcgggaggtacaggagtaacggggcactcccggcccggcctgcggggaagggaagcaggggcagggccgagggggaagaggcctccgcgagctcgaccccgcgcccacacgctacctgcgaggtcagctgctgccgcgccgtcccgcgggaccgcagggatctccgaagctccaatgggcgcagaagtgcgagcgagcggcggtgcccaccggcagcgaagaggaggagcgccagggcgccgggcccgccgggtcacgtggccccggccgcctcacgtgacccggtgcagcgcgcgcccgggacgctacccagccgagcatcccgcaccgccccggccccggccccggccgaaaccctgctcttcgggccctacaacccgacttctttagaagccgattggccgtctcaggcccgccccgaggccctgccactggagtgtccccatgaaatccggtggctgctgccgggacttagaggcttttgtgtctgaggaaccaggaacgcgcgaggcacgggctcctgctctgctccccgagatggcttggctgtggggagggtcggcctaccaccccagagacctaggacggaaaagcgaccgagaaacttggctccctgcccactctagagcgcgtctggccccggggcaccacccaggtggtgctgcctgggaggaaaggcggcggagctgggactagtttgtttttactggagacgcgcctccctccctccccgcccctcacttcctgattgaaagtacctgaggcaggccagggactagggaaggtggcagctggacaaaggtatgaaggaaggacgagatgaggcacaggtcctggtattggaaagaggcagaggtacctcggaagcatgccatagaggttagacgggacctaagagggcatctggtccaaccggattcgtgttaccagcgagtaaactgaggccaggagagggactgctacgagctgctccagcctatcacctataaagactacagtccctttgtaaaataccatacagctctcggagaactcccagttggcgctgcaggataaaatccaaacttgttggcatagcattccagccacttgttcacttacctttcccatttgagctcctaggaataaacagaaaaacatttcattttctaaatatcaccagataacttcacttttggtaacttgaattattaaaaaagtcctaccgtccctcatc

SEQ ID NO: 24339 - DNA, 1106 bp, Artificial sequence
  DNA replication origin
ggctgacccccccatctccctcccggacggggtggctggccgggctgaggggctcctcacttcccagtaggggcggccgggcagaggcgcccctcacctcccggacggggcggctggccgggcggggggctgacccccccacctccctcccggacggcacggctggccgggcgggggggctgaccccccacctccctcccagatggggcggctggccgggcggggggctgaccccccccacctcccttccggacggggtggctgccgggcggagacgctcctcacttcccagatggggtggctgccgggcggagaggctcctcacttctcagacggggcagctgccgggcggaggggctcctcacttctcagacggggtggttgccaggcagagggtctcctcacttctcagacggggcggccgggcagagacgctcctcacctcccagacggggtctcggccgggcagaggcgctcctcacatcccagatggggcggcggggcagaggcgctccccacatctcagacgatgggcggccgggcagagacgctcctcacttcctagatgtgatggcggctgggaagaggcgctcctcacttcctagatgggatggcggccgggcggagacgctcctcactttccagactgggcagccaggcagaggggctcctcacagcccagacgatgggcggccaggcagagacactcctcacttcccagacagggtggcggccgggcagaggctgcaatctcggcactttgggaggccaaggcaggcggctgggaggtgtaggttgtagtgagccgagatcacgccactgcactccagcctgggcaccattgagcactgagtgaacgagactccgtctgcaatcccggcacctcgggaggccgaggttggcggatcactcgcggttaggggctggagaccggcccggccaacacagcgaaaccccgtctccaccaaaaccagtcaggcgtggcggcgcgtgcctgcaatcgcaggcattcggcagactgaggcaggagaatcaggcagggaggttgcagtgagccgagatggcagcagtacagtccagctccggctccgcatgagagggagacc

SEQ ID NO: 24340 - DNA, 927 bp, Artificial sequence
  DNA replication origin
gagcccctcagcccggccagccaccccgtccgggagggagatgggggggtcagcccccccacccggccagccgccccgtccgggagggaggtgggggggtcagccccccgcctggccagccgccccatccaggagggaggtgggggggtcagccctccgcccggccagccgccccgtctgggaggtgaggggcgcctctgcccggccgcccctactgggaagtgaggagcccctctgcccggccagccgccccgtccgggagggaggtgggggggtcggccccccgaccggccagccgccccatccgggagggaggtgggggtgtcagccccccgcccggccagccgccccatccgggagggaggtgggggggtcagccctccgcccggccagccgccccgtctgggaggtgaggggcgcctctgcccggccgcccctactgggaagtgaggagcccctctgcccggccaccaccccgtctgggaggtgtgcccagcagctcattgagaacgggccaggatgacaatggcggctttgtggaatggaaaggcaggagaggtggggagaggattgagaaatcggatggttgccgtgtctgtgtagatagaagtagacatgggagacttttcattttgttctgcactaagaaaaattcctctgccttgggatcctgttgatctgtgaccttacccccaaccctgtgctctctgaaacatgtgctgtgtccactcagggttaaatggattaagggcggtgcaagatgtgctttgttaaacagatgcttgaaggcagcatgctcgttaagagtcatcaccaatccctaatctcaagtaatcagggacacaaacattgcggaaggccgcagggtcctctgcctaggaaaaccagagacctttgttcacttgtttatctgctgaccttccctcc

SEQ ID NO: 24341 - DNA, 1121 bp, Artificial sequence
  DNA replication origin
atggcccgttctcgatgagctgttgggtacacttcccagacggagtggtggccgggcagaggggctcctcacttcccagcaggggcggctgggcagaggcaccccccacctcccggacggggcgatggccgggcggaggcgccccccctcctccctccgcgacggggcggctggccgggcgggggctgccctccacctccctcccggacgaggcggctggccgggcgggggctgccccccacctccctcccggacggggaggctggccgggcgggggctgccccccacctccctcccggatggggcgtctgccgggcggagatgctcctgacttcccagacggggcggctgccgggcggaggggctcctcacttcacagacggggcggctgctgggcggaggggctcctcacttctcagatggggcggctgccgggtggaggggctcctcacttctcagacggggtggctgggcagagacgctcctcacctcacagacggagtcgtggctgggcagaggcgctcctcacatcccagacggggcgtctgggcagaggcgctccccacatctcagacgatgggcggccgggcagagatgctcctcgcttcctagacgggatggcagccgggaagaggcgctcctcacttcccagactgggcagccgggcagaggggctcctcacatcccagacgatgggcggccaggcagagacgctcctcacttcccagacggggtggcggctgggcagaggctgcaatctcggcactttgggaggccaaggcaggcggctgggaggtggaggttgtagctagccgagatcatgccactgcactccagcctgggcaacattgagcactgagtgaacgagactccgtctgcaatcctggcacctcgggaggccgaggctggcagatcactcgcggttaggagctggagaccagcccggccaacacagcgaaaccccgtctccaccaaaaaaatacgaaaaccagtcaggcgtggcggtgtgcgcctgcaatcgcaggcactcggcaggctgaggcgggagaatcaggcagggaggttgcagtgagccgagatggcagcagtacagtccagcttcggctcgccattagagggag

SEQ ID NO: 24342 - DNA, 921 bp, Artificial sequence
  DNA replication origin
gtgaggagcgcctctgcccagccacgactccgtctgtgaggtgaggagcgtctctgcccagccaccccgtctgagaagtgaggagcccctccacccggcagccgccccatctgagaagtgaggagcccctccgcccagcagccgccccgtctgtgaagtgaggagcccctccgcccggcagccgccccgtctgggaagtcaggagcatctccgcccggcagacgccccatccgggagggaggtggggggcagcccccgcccggccagcctccccgtccgggagggaggtggggggcagcccccgcccggccagccgcctcgtccgggagggaggtggagggcagcccccgcccggccagccgccccgtcgcggagggaggagggggggcgcctccgcccggccatcgccccgtccgggaggtggggggtgcctctgcccagccgcccctgctgggaagtgaggagcccctctgcccggccaccactccgtctgggaagtgtacccaacagctcatcgagaacgggccatgatgatgatggcggttttgtggaatagaaaagggggaaatgtggggaaaagatagagaaatcagattgttgctgtgtctgtgtagaaagaagtagacataggagactccatttttgttctgtactaagaaagattcttctgccttgggatgctgttgatctatgaccttgcccccaaccctgtgctctctgaaacatgtgctgtgtccactcagggttaaatggattaagggcggtgcaagatgtgctttgttaaacagatgcttgaaggctgcatgctcgttaagagtcatcaccactccctaatctcaagtacccagggacacaaacactgcggtaggccgcagggtcctctgcctaggaaaaccagagacctttgttcacttgtttatc

SEQ ID NO: 24343 - DNA, 1197 bp, Artificial sequence
  DNA replication origin
ctggccgcgccggcccggcgacgcggggaggggcggggggccggcgccgggctggttctcgtcggcttgtggtcggccggagttggccgccgcctcccgtcaccgcggccccgggctgggcggagcgggcggcgagacgccggccgggctgcagtcaccccccggagctgccggcgcggcgaccgggaaatgccggcgttttcggccccgtcacgcgggcgcggcctggtgtcggcgaggaggggatgtggagctgaggcggggtccgcgggccagggccgcccggatgaacggggatgctgccgcccgggccctccgaccgcacagccgagggggcggccgctgcttgcgcccgccaccggtgcaaccttccgtccggtgcagccccctctgcgcctcccgcgcggctcacatggagcctcggctctgccggtccgggctcctaccttctgcgagccgggcccaggcgggcggtggcggcccgcagaggggggtggggaccagccgggtaactgacttgtttgagggtgatcgatgggggagggtaggatgcgccaggaccattttcttatattccagtgctcgtctttggactagtcgtgccgagctgttgcagctcatactcctgcaactgctggcatttggagcgagctgaaggtggacaatagtttgccatctattgtgttcaggcttcggaaaagaggttgctccgacctccgctcataggacttgttttcttagcctttcttggagtggggtgtgcatagggtgataatttctttgacacgttttactaaaataaattggatacacaggttcataattctcttacatacctcttgctccaagctagtagaatttccaagtggttgcaaaactaaacattcatcgcggtcactcagttagttgctactcagcatgttgccattgtctcattaaggtgacattagcaggtactatttgcaaactcggcttattgaggcagcgctagaggtctctctgcagctactgaaaacagtaagtataatgcacaaacttcactgggaccgtgacctttggatttgttagggggaaaatggttttaaggccgcagccttctttgctaatactaggcgacatgatttgcagttttgtaatttttgataagctagtgtgattaagaggtgtgttttatcctgtcttaaggaaggttgtggg

SEQ ID NO: 24344 - DNA, 943 bp, Artificial sequence
  DNA replication origin
gcgtggggaccctctgaccctgaaggtccccctgcccgccgcgcccggcccccgtgagccgttgggtctggggaagggagggcccttacccatgtgctgcgtgtccagctgcacggccggcatctccttcagagggatgtggccagtccccccgtctctgcagcaccgcaggcagcacaacaccgaggtggccatcgcgcagggaccaccgactccgccgccgtccctagaccgaggcgacactgccccccgccgctcagctccgtctcctgcccccgcccgaggtccggacttgtctatgtggagctcggaggccggtacagcgacaccctaggccgggagggcgcaatgcaggctgagcttaggctggcctgcgaggaagacgcggagaatcaaggggccggggagagaccggacagggcgagcggccgggctgggccggggagacgggtggggctagtggcgcgcggaggcgtggcagggggcgtggcgttgcgggcctgcggatgtgggacggcgtgcgcctgcgcaccagctggttttttctccttgggcggtttcgcgcacgcccccagggctgacaggtgagtggggctgtctgtccctcagtacttccaggggttttcctatgcagaatttttaaaacgcagcaccccttggtcccggcctcgacattatttctagggatggattgacagaagcgaatcagtttgggggaaggggagctaatggaaatgacttccgagttttccctccgcgggcccaggttgagcaggctttgccaccacggagagccccagtctccctgccgtggctggtttccctcacatgctaaatagactcacgtgggccccaggagtaatgcctgttagtgactgcactgtggatgttcaccggggctcacgcgggccctaatgcattttcggtgcagagacgcgcccta

SEQ ID NO: 24345 - DNA, 1256 bp, Artificial sequence
  DNA replication origin
agcccaccgtctgggcaaacggcgtccacttcccggagccgctgcccagcctctgcgggggggctttgggcgggcgcaggactctggaagggagaaaagcccgcagcccggccctccccgtcccaggcggcccgcgcgggtggacggcgggagcaggcggcggttggagacgccggaaggaacgcggtctcaccacccggctccctccgccaaggcgaggcgcggccggggaggcgggacacaggcgaagcgggacggggaggcggggccggaggtgcaggcggaggcgggcgacggggaagggagggggagggggaggggaaagggagggggagggggaggggaaagggagggggaggggggaagggacgggaggggagggggaagggacgggaggggagggggaagggacgggaggggaaggggaagcgggagagggaagggggcggagctagccggagccgcgagtccattttggggctgtgcttggcgcgtaccgtgcggtccctgtagttggaggacgggcggtcgcgcggcctttcccactagccggaggtcggagataagtacccgccgcccggctcctctcgggaaagcggggtggtcctcgaaccttcagcgagggtggggagttgcccaggtcagcagggatctgcgtgggttgggggggctggcgaaggccgtctgagctccagtccggcagcgcggcagaaaccagcggggcactgtcatgggcctggggaggagcggcctgcggagggcgccggggcagtgtgtctgtggtccagaaaacctgctccgtccggagccttcctggccccgctaccagcgtctccacatcccctagaaaagaaaagacgggtgtgggccttaggttacagcgcgccgccagcgtttggttgcatggcgccgggggagggcgccctaaccgagaagctgcttaatacaaagagctccaggctcctggcggttcaccaggtctaaacagccgggctttatttgtgggggcgattgaaaaaattgagggtcaagattggggtgctgtgcaaataaatgcgttaatactgttctttttcttctttctttgcagtagcctctagttcgttagtcaaaacgtgaaaaaaaagacctgctttgccctgggaaatagtaaccctgccaaatacatcagcttgtaggagacagaggtaaactacaataattttcctgtgttatcttttttttttaaacacccaatttcaataggccctagaacc

SEQ ID NO: 24346 - DNA, 1285 bp, Artificial sequence
  DNA replication origin
ggggccgggtcatgtgatgtacagacacccccgctacaggctggctgcaggggtgacgtcaccacccttgactgcagggggtggcacttccgctccctccccagctgctccccagcccctggcaccgccggctggagccctttcgcagtttgagtgggcagagggagagaggggttttccttctggccccagcccgactgcttctcccgccgcccggagtccccgccctgggaccggaatgggagccgcggccgccccctcccgacgcgtcccattgtgtgagcgggcggcgcagggcggaggctggtgccggccccccgcaactctgcgctcccgagggggcgggggcggaccccgcgcagtcaaggccaggtccagccgcccgccggctcctccttccccagagcgccgtccgcgcgcgggaagtccgacgctgtcgactcggtccggacaccgcggcctcgcccgcgtccctggggcgccgggtggtgagagacccgctgggccgtgtgggcccgcagtccagcccagcgggtgtgtggttggagtctgtcacagagccccgagggacgcgatcccagcagtcgttacgcgctatttggggaaactcggggttttggtgactcagcgcggtgagcgctatttataggtagatgcgttaggagaagggaaataagcttcgctcgaatccgtccattcgtccgcccgaggactgcaaagagctccgtttggaggcaacaactgaaagacttctgaaaaagatttggcagttagagcctgtggtataagacatagcaggcctcgccaggagactagttacaacagttcgtctcaaaaagttagaacgttttctggagtagatggaggattttagggacacgtcatgacccgtagagtgtctttttgggtgttagtgtgtgaaccacgagcaataattcaggtgaaaaccgagcagtcctcccagtagatcgcagtctatcaagaactgcgttgttagttgcaggatttgtaaaatacataacatcatatgtggataggtattaaaaaactgaatgatgttgaaagttgctatgcaatattctgtaacaggaaggtgtgtgtggcatttatctagaataaaaaatgtggagattgtaaattacatgtttacaatccaatttctccctcccgaaaagcactatgaaaaaaaggcctttgattcttcaacagtgtataaatgctacacaaacagttttggcttcactttatgattttgattcttttttcccacctccaccccagtttg

SEQ ID NO: 24347 - DNA, 1401 bp, Artificial sequence
  DNA replication origin
gtgcatcctggttagaattgggagaaaaaattctaagcccgcccggagctgctcagaaaagatgggtctcggtccagcgcccccttaaagtcctcagtgcgcgaaagtcttggattactgtgctttgcgcaaattggacgccacgcctgaagggcccgcggaatcaatcgcttgccttctgtggggtcctggcatcagcgtgaccaggacatgctattattattggaaaccgagtcttgaagtggacccccagcctccacccaagccctgcggccagggaataattctaagggctctcccctttggatgtctagggtcggggcggtctcggctccctggatcctctggtgtcccggcaccgaggggcgctcggcagcggggcagaggggacggcctcgcgaccccgccaggggcacgaaggaacggcggccgagggaagtccacgcgggctctggcgcagcagcgaagctggaggcgtttgctccgctctgcccggagcaaggggcgcgcaggggaaaccgcttctagagcttcgcggggaagggatcaggggcggagggaattctgtattctagttgtggatctttcgggtctctgtcagttaacagaagcctttggggtgtgggtccgggacgccgctcggagccgtaaaaccttgcctgacccggcgctcccagccactgcggtgcagccgccttcgccttctgggtgcgggacacaatctggcccaaggtcgttcaaatcggggccggcctacccctcagagagagcctccgcccatggtccagtggcagggaagcctcaggctacggcctagatggagcattcacaagggcgtttccaggccccagtggcctctgagcaggggttaactgaggttcaggtttcttctgaaaacctgaactgaggttcaggttcacaaaaagaattacacaagtttcccaactctacaatctgttaactcaaggccgattaccttctcagaatcctctaagtatttttgcctgtaaagtgaatttggactttcttcttctcttcctcacacagctggtcacagacaaaaggtgggttacaggcctggaaaagattcatcccctgctcacacatgtgcctctttcttgggacgttgtgtgttctccacactcctgggccggtcaggaggggtcttgtgctctgctagggaggtgggcttccctgtaggaagagtgtggagggaaaggcctagctggcccacttggtagggagggtcccacgtggcctgcagaaaggcatgaaaatgaccaggagacaggacctgggccgatatgtgtgaagggtggggatctggaggcattgggaaaactctctcccagtgaaaaagaggcccaagaagttctgctgcctgttctaagaagacaggat

SEQ ID NO: 24348 - DNA, 1260 bp, Artificial sequence
  DNA replication origin
gggggccagactcaccttcaggtgaatgggaaaggaccgctcctgctggaggggccccagcagcgtctgctccacgctgaccagctccgaagtcgagtccaccacgcgggccagcgcgctgcgcatcgccatctgggccagggtgcagggcccgcggtcccgggggaagggcagcaactcggcgcccccctcagcgcctcgcactacctcctcctctggggagttcgcccgcgccgcggtccgccgactcctggtccccacgcccccgccccgctcctcgcgcccgggccccggccgggcccgcggcgggcctgagcgacgggctggagcggtggacacgtggtctgggtcccgcgggttcccgggggcgactggaccgtccccccagccccactcctgctgcagcagctgcaaggtctgcagagccaccatttggtggctgatggaggccactaagggcgcagggctggccatcgcctccgctggcggcccggcgcgctccgcgtgcaggtggagcagcagcgagggaggcgggggcgttggggtcgccaaggtcacattttctaacccgcggctcctcggcctctgggtctcacagcgtgtgtggtcggccccgcccccggctctgaatcggtgacccgtgctggcctctgccttcgcctgaagtccgaatcaggcgtgttctgacccaaagctgcctgaagcgctgctcggtgtgcacttgaaaatcagcgaaatgctgagcgttgcttcttccctctctccagggctttgatgagaaaacgtgctgctttgtgcgggcgcatccatcggcggggataccccgcccccacctccttcgaaggatgcctgccaatgaccactgaggtctgggaggtgggggtgcaaaagacccactctagggcaaaagtacgaagggctctagaaaaacttgcaaaaggaagactgtgcctttcccaacccgaggggaattttcagaaacttgttgaagcagccttcaaggccttgcatcccccaaacaaaagaaggaggagttgtgtatctggaagttctgctcttctctgctttgctgggtgccacttgagcaccgagagcctggtggctgaactagcatcagcaagcctcaaggcccaggcctggcactgcccagaaaagcctaaatgtttttttgtgacactcccaaaagacttaggcagcaaggttgaagttaatccttttatgagccatgaacttagggacagctgtacaaatagttgctgt

SEQ ID NO: 24349 - DNA, 1315 bp, Artificial sequence
  DNA replication origin
atttctcaatcttttccccacctttcccccctttctattccataaaactgccactgtcatcatggcccgttctcaatgagccgctgggcacacctcccagacagggtggtggccgggcagaggggctcctcacttcccagtaggggcggccgggcagaggcgcccctcacctcccggacggggcggctggccgggcgggggctgacccccccacctccctcctggatggggcggctggctgggcggggggctgaccccccacctccctcccggacagggcggctggccaggcggggggctgacccccccacctccctcccggacggggcggctggccaggtagaggggctcctcacttcccagtaggggcggccgggcagaggtgcccctcacctcccggacggggcggctggccgggcagggggctgaccccccacctccctcccggatggggcggctggcctggcgggggctgacccccacctccctcccggacggggtggctgctgggcggagacgctcctcacttcccagatggggtggctgctgggcggaggggctcctcacttctcagatggggcggttgccaggcagagggtctcctcacttctcagacggggcggctgggcagagacactcctcacctcccagacggggtcccggccgggcagaggcgctcctcacatcccagacggggcggtggggcagaggcgctccccacatctcagacgatgggcggccgggcagagacactcctcacttcctagatgggatggcggccaggaagatgcgctcctcacttcctagatgggatggcggccgggcagagacgctcctcattttccagactgggcagccaggcagaggggctcctcacatcccagacgatgggcggccaggcagagacgctcctcacttcccagacggggtggcggccgggcaaaggctgcaatctcagcactttgggaggccaaagcaggcggctgggaggtggaggttgtagcgagccgagatcacaccactgcactccagcctgggtgccattgagcactgagtgaacgagactccgtctgcaatcccggcacctcgggaagctgaggctggcggatcactcgcggttaggagctggagaccagcccggccaacacagcgaaaccccgtctccaccaaaaaaatacaaaaaccagtcaggcgtggtggcgcgcacctgcaatcgcaggcactcggcaggctgaggcaggagaatcaggcagggaggttgcagtgagccgagatggcagcagtacagtccagcttcggctcggcatcagaggga

SEQ ID NO: 24350 - DNA, 873 bp, Artificial sequence
  DNA replication origin
atctgggaagtgaggagcgtctccgcccagcagccaccccgtccgggagggaggtgggggtcagcccccgccaggccagccgccccatccgggagggaggtggggggtcagccccctgcccggccagccgccccgtccgggaggtgaggggcacctctgcccggccgcccctactgggaagtgaggagcccctctacctggccagccgccccgtccgggagggaggtgggggggtcagccccccgcctggccagccgccctgtccgggagggaggtggggggtcagccccccgcccagccagccgccccatccaggagggaggtgggggggtcagcccccgcccggccagccgccccgtccgggaggtgaggggcgcctctgcccggccgcccctactgggaagtgaggagcccctctgcccggccaccaccctgtctgggaggtgtgcccagcggctcattgagaacgggccatgatgacagtggcagttttatggaatagaaaggggggaaaggtggggaaaagattgagaaatcggatggttgccgtgtctgtgtagaaagaagtagacatgggagacttttcattttcttctgtactaagaaaaattcttctgccttgggatcctgttgatctgtgaccttacccccaaccctgcactctctgaaagtgctgtgtccactcagggttaaatggattaagggcggtgcaagatgtgctttgttaaacagatgcttgaaggcagcatgctcgttaagagtcatcaccactccctaatctcaagtacccagggacacaaacactgcggaaggcctcagggtcctctgcctaggaaaaccagagacctttgttcacttgtttatctgctgacc

SEQ ID NO: 24351 - DNA, 980 bp, Artificial sequence
  DNA replication origin
cgccctgcccagggcagcgcggcccgcccaggagagagcgggggatccggcaggaggagaagccccgcgccccggtcccgtcgcacggatcaggagggtccccgtccggggaggagccgccgcgcaactcggagagcgccccccgcccgcggcccggcccggcgcggctcaccctccggtctcggcgcccgagtccacgcagtcgtcctcctcgccgccgccgcccgcctttgggtccatggtgcacgtcccggccgcgctcggcttgcgggcgccgtcgtgacccggggcgccctccctcccggccgcccagtccgagccggccgggctccctccgagcgtctggcggcccgggagccggcaaacaactcaagcgccagccgcgaaccccgcgccgcgccctctcccgaccgcgcccggctgggcacccgcgcctgcgcccgcgcccgccccgcccctcgccgtccggcgggacccgcgtgtgcgcgcggcggtgcgcggggagtgcgcgtgcgagcgcgtgtgcgagcgcgtggggggcgtgtgagcgtgagtggccgaggtgtgtggtctcacacccgtgcgtctgtgcatgcggtgtgatgtgggtgcggtgtgcactcctggttgcacgcgactgtggctgtgctgagcgcgtgtgcccgtctgtggtgcgtgaccgcgtgtgtgttgtgggggcggggtaagtgtgcacacgagagccgcctctctcccccaggcccacagtccgggaatcccgagccccagggcttgccacgaggttccccacctcctgatctgggaggagcactgagaaaaccaacctcagcgcatcgtgaaagctgggaaggatttgtttcccttttgggaccaattcgaacacctgggtgttttcttatagtttctgaagaattgctgacgccaaattcattatcacctttctcagtacacgtctgagcggcatcccaccccctcaactt

SEQ ID NO: 24352 - DNA, 1456 bp, Artificial sequence
  DNA replication origin
cgcgcacacgcgggtcccgccggacggcgaggggcggggcgggcgcgggcgcaggcgcgggtgcccagccgggcgcggtcgggagagggcgcggcgcggggttcgcggctggcgcttgagttgtttgccggctcccgggccgccagacgctcggagggagcccggccggctcggactgggcggccgggagggagggcgccccgggtcacgacggcgcccgcaagccgagcgcggccgggacgtgcaccatggacccaaaggcgggcggcggcggcgaggaggacgactgcgtggactcgggcgccgagaccggagggtgagccgcgccgggccgggccgcgggcggggggcgctctccgagttgcgcggcggctcctccccggacggggaccctcctgatccgtgcgacgggaccggggcgcggggcttctcctcctgccggatcccccgctctctcctgggcgggccgcgctgccctgggcagggcgggcaccacccggggggaggaaagtggaaggactcaaggttcagtgcaagcccacccatcctgtgaggcgatgcagagcgccaggcggatgcaaagaccccttgtctgcatcgctagagacaggagatgctcttgcacttgtttcctccttcctcggggactttcctcctgtagctccggagccccctggagtccggccctggagatcgggagaggaagaaaagcagggtgggacacccgcacctaaaagtctttccgaagtcggctaggaggatggcatttctcgttatatggcttcatcgtgggactttaatctgtgctgccgagtccccctccccgactcctccagtcccgccgaacttcctcacctctaagtgcacctgtcccagctggaccctttggcctgttgtaccggcgggatggagatggtgttgggattaggatctagccctgcctttttttttttttaatattctcttcgcttcagcggactcaaacaatgggctcaaacctttggagactaattagttagtctccaaacactgttttcctgagcggaagaaaagacaaaatgccttttaggagatgaatgtcgttataaaggcttccaggcagcctctgtctctaaaggactttcctgtgcagagtcagcaccacatccaggccgcgggtactgacccaggaggaaagggtgttttttcctatctggagtaatcctgggggagggcgggagctgcctagactacagaaagcctcattcctggaaggtcggagaggttttagactaatctcaggatttggcaaccctgtgagggcaggtagagaatccaggcccacgatcgacccagagttctaacccaaccccggcaaagctccccacagggcccctcctgccccaccactcctagcccaaatgcgggactttactccctagggcattcacccagcaatgggctttctctgttatcc

SEQ ID NO: 24353 - DNA, 822 bp, Artificial sequence
  DNA replication origin
acttcactgacaaatttactacctaatctaatacccaaaatttgggtatgtgaaggtactagtggaagcagatgggagccggacttaggaagttaacctgcagctgtcccaccggccctcttaggacgaatctgacaagaccaatcctggcagccccgcatctggcttccgggccggccgggccgattcccctttaatgcaaaccggggctgtgcgcggccgggcccggctgtcactccggctaacttgaataaatatcccccacagttcattgctgccgctcacgccgcggaggggaaatgtcggccatgttgatagcagcgccgccgccgccgccgccgccgccgctgccgggccgggccgggaggggacggcggtggccccgcgactccgcgccgcgctaggacgctgccgagcgggggagggggtgggagcccgcagggaagagacctcagcggctgggagcgcagcgggtgggggaggggagcataatgaagggtgaatgggggggcggggagggcgagcgaggaaggaacagggaagggaagggaggaaagggggagggcgagggctgttaccttgatagcatagggcggctcttcgaaagtgaccagcatatacctgtctcctctgctggcagggtcccgggcacggagctgcgggacgggaggaggaacagggcgggcgacagggaagcacagaggcgaggttacgaggcggagaaggggcgcccagcggccccgccgcccccacagtaccgcacacgcagcggccacccctccacgccgtcccccacacacagatcgctccccacacaccgcc

SEQ ID NO: 24354 - DNA, 866 bp, Artificial sequence
  DNA replication origin
cctgccgcccgcgggccgccgggccggggtcgccgcccgggctcggtcagtcggtaccttcatgaaggtctctaccgcgcctttggccgtgtccaggtaggtggtgcccagatggctgcgctggttcatagaggcagacgtgtctatcaggaacagtaagatgggcatagtgctggccggggacaccggggcccgaggtggtggagaaagaggagatggtagaggtggaggcgccggtggcggcgaccgccgctacgcggggcgggggagcacggcccccgggaggaaaacactgtctgggtctttcctccggctgcggggagtttctcccccgatagttgagaggaaactccccagacccagtgctccccgtcgtacccccgcctccgcctcctcctgcctgcctgcccgctggggcgggcgcccagccgtctgtctgtcggttcgtcccccccgcctcgggggtcccgtccccgctcccggcccctgtgtgtgtcccagcgggagacgggcctggctccccaccccacccccggtacaggagtggggacctgggagctggcgaagaggggagtgggctgagggaagattggccctggggctgttgggagaagtttcagggactccctccgcaccccggcggtgtcaccactttctcagcccctctcgctactgaagcgcttttctctctcacactccggttttaactcgggcaggggctgcggaggctccgcccctgacacgtccccgagccacgtgatacaccgcctcgccgttctactggtcaggccctatcctttcattagcatatttaaacagctcaggggcgggggaagcttgtaggccggctccggggacagttattg

SEQ ID NO: 24355 - DNA, 1125 bp, Artificial sequence
  DNA replication origin
ttagcatatttaaacagctcaggggcgggggaagcttgtaggccggctccggggacagttattgagcacgcgcagaggcggggcgtcgggtgcgcgcgagcgggcgggcgggccgacccggaggcgggcttcgggaaggggcggggccggactgcggaaggaccgcgaggtgggggcgggggccgcgtccgcgcgcgcggggcggccgcggcggtgagcctgcgcgtcagggccgccggcctctccttggctgttggaggtgataggggtcgaggggagggaaaaaggggctggcgtcagccgcccctgtgaggtggccgtagcgtggacgagtaagaagggttgagtaaagtggacaaacacctggttaggagaagagggcaggcccgcagccgccctccggaggaggactcggggcctcgcgggcgccggaggaggttcctgggcctcggagggccgccccggcgcgccgccccggcgcgagcgggcgcgggcgggggaggggaagtgagaggttgtttatgaccggggactaatctcctccgcgagtcccagcgctccctctggggagtgcggttgaggggctgtcctcgcacggagcctcgctcggcctcgggggagccacgagaggtgggagttggacccgcagcgggccaggagccctgtcattggaggacccgccaaaaaggaagcaaaccctctttttctttatccaaccccaaatagctagggcctagggggaagactcacatatcgataaatggtttgttgcccgttttattctctgggaaatacaactgatcttaccaaagaaataacctgtctcttgccgtgtttacttagagccatagaatacctgtttcagagctgaaggggacctgagcccatgataatccattacctcgtgagaaagcggaaaaactgacttcagcttgcccagatggcgcagagaatgggtttcccgtaaccccgcctgtgtctttccttcagcctcgtcccaaatgccgtgggagggaaggcactctctgtcaagctgctgtcaccttacctgaagtaaggagtccacgcctgcatgtccgaggaaaacagttttctcaaacacattagttgaaaaactgaagacgc

SEQ ID NO: 24356 - DNA, 1631 bp, Artificial sequence
  DNA replication origin
ttaattttaaaggagcagacagctgcactggtgaacaccatttggtacttcttttgtacagtaacaaaaacatagtgagcctggggggctcacacactaatctcacacattatataaagatgatttcaaagattacattacctggagaagacagcaggacagagtcccagaggaaatgagctcttagaagacattcaaggcactggcttcctatggggtattcttggtttgggctcagagagtggttagcgtgagtcaggcctatcccctttgcccccaacctcaactcatccccgccaccttatccagttccacgcactgaacaagtatttatcaagggcccactgagtgccagacccagtgctaagtactcaggatacagactgagggcgccctgccctctgccaggcattcccaggcattacacatgttactacgtgactaacctacactcacggtcgaggtaagtgctagagtgctatgggcacatgggggtgggacggcgggggaggtgtcaggctctgcatgaactgtgaagggacatttcagctaagacctggagaagaggagggaacaggcaggtagagggctggggatgggaagaagggctgcaggtatggagcacagcctgtgcaaagaggccctgaggctggagagtgcaaccaaggcagctgcaaccgagtgagcatggtagagggtagggcaatgtgaggctgcagcctccaagggcaacgccagagacacgcacctcatatgaaaccaaggggtgactttaagcagaaggaaacagatttgcatgcataaggaccactctgtcagccttatggaggaagcctctgttcgggaggtgggtacaggagggcacctagggccccatattactccactacatcacagtgactgcagtggcttgggcagagtggtcgcagtggagctgaagagcaggagacagactggggacacgttgtgcagagagtccaaaggcacgatcactgcttggatatgagaagtgagggggtgtcaaggacaagcggtgacggagatgatgctggccactggggtggggcccattacaggagcagaccggtgagggactaaggcttcagttttggacatgctgagtctgaggtgtttgagatctggacctggaactcagaagagagatctgggctggaagggggcccttgggagccaggcacatgatggcattggggcaaggatgagatcccaacagagagtgtgggaggagaaaggagggcacaggattggtctgggagggatgccaacatttaaagtccccgcagacacgctgcagctggctaaggaggttgagaaggagccaacctccgagggtggaatcacaggtggcttggaggccatcgcgctatgggagcacggacagctgtgcccagtgctgcccatggatgtggtagaggtgcgctctccagaaccaggaatatcagggtcataggtgacctcagcatgagagtggccaaaggtcagggagataagccgactggagtgagctgcaggatgcccgggactcggggaccatgagaggctggtggaggaagtgctgtgcaggcttttctccagggcctagccaggtgactgatgtcaccccctgctgt

SEQ ID NO: 24357 - DNA, 1096 bp, Artificial sequence
  DNA replication origin
ttagtcggcccagcgagagggcgaaggagccgcgggcgcgtccccgccaaccctgctcgcccgcgccgaggcgggccacgtgacagcccggggccccgcgccccgccgcgccgccttacttggtgtactcgcgcagccccttggcgaaccacacgacgctgcggtacagggacatgccgggagcgccccacgcctagccccaccgcgctcccggcgcggcctccgccctggtcccgccccccgggagtcgcccgccctgacatcatcccggttatgtaagagccgcggcttccggttccttgctccaccggtaaggcaaggggtctcggggccggccggtcgactccgccccagcctcagagggtggagtgagggcggaccggccctggtgggggccgcagtcgaggtccgcagtctcctcggggtcgaaatcgggcatcagcgccgtttagagaacaccgtcctgctgggcatggccgggatgcgaagatggccctgcaacgcacctcctagaatttggttacctagaaaaccatgtggaataaaacgacgaggcttatgatatttaaaagacttctgcatcgaattggtgttatcataagggttattttaataactggcattctctaagtttctacacgtgttgggggatgcagtgccgtgccacatttcccgtctccagcaagcgcagtcagattggcgacatcgcaggcaagaggcagggctggggctcccacccgagaagtaattgtctccaaagttggacttttgccactggttctgcgacttcatgcaatgccagggagagccccttgatttcccccaaatcctcatcagcctctttccacccaagcccagatgaacagtgtgagtaaaaaagagtgtggttgctgcgtgaacccagatctcagactagtcatccagccccattatgtaggactcagacacccctgtccacatctaacctccagccctaacgccacattagaaatgggggtcttactgctgctgtcactcctagtcaccctgttaaattctataccggtttacccaagtcgcccagagactgggccccacttacataagctgaagagac

SEQ ID NO: 24358 - DNA, 1265 bp, Artificial sequence
  DNA replication origin
ccctcctggatggggcggctggccaggcagaggggctcctcacttcccagtaggggcggccgggcagaggcgcccctcacctcccggacggggcggctggctgggcggggggctgacccccccacctccctcccggacggggcggctggccgggcggggggctgacccccccacctccctcccggacagggcggctggccaggcagaggggctcctgacttcccagtaggggcggccgggcagaggcacccctcacctcccggatggggtggctggccgggcggggggctgacccccccacctccctcccggatggggcagctggccgggcggggggctgacccccccccccacctccctcccggacggggtggctggctgggcggggggctgacccccccacctccctcccggacggggcggctggcctggcaggggctgacccccacctccttcccggatggggaggctgccgggcggagacgctcctcacttcccagacagggtggctgccgggcgaaggggctcctcacttctcagatggggcggttgccaggcggagggtctcctcacttctcagatggggtggccgggcagagacgctcctcacctcccagacggggtcgcggccgggcagaggcgcttctcacatcccagacggggcggcagggcagaggtgctccccacatctcagacgatgggtggccgggcagagatgctcctcacttcctagatgggatggcggctgggcagagacgctcctcactttccagactgggcagccaggcagaggggctcctcacgtcccagacgatgggcggccgggcagagacgctcctcacttcccagacggggtggcggccgggcagaggctgcaatctcagcactttgggaggccaaggcaggcggctgggaggtggaggttgtagcgagccgcgatcacgccactgcactccagcctgggcaccattgagcactgagtgaaccagactccgtctgcaaacccggcacctcgggaggccgaggctggcagatcactcgcggttaggagctggagaccagcccggccaacacagcgaaaccccgtctccaccaaaaaagtacgaaaaccagtcaggcgtggcgacgcgtgtctgtaatcacgggcactcggcaggctgaggcaggagaatcaggcagggaggttgcagtgagccgagatggcaacagtacagtccagcttcagctcggcatcagagggagaccgtggaaagagagggagaggg

SEQ ID NO: 24359 - DNA, 898 bp, Artificial sequence
  DNA replication origin
tgcccggccgcccctactgggaagtcaggagcccctctgcctggccagccgccctgtccgggagggaggtgggggggtcagccccccgcccggccagccgccccgtccgggagggaggtgggggggtcagccccccgcccagccagccgccccgtccgggaggtgaggggcgcctctgcccggccgcccctactgggaagtgaggagcccctctgcctggccagccgccccatccaggagggaggtgggggggtcagcccccccgcccggccagccgccccgtccgggaggtgggggagccagccccccgcccggccagccaccccgtccgggagggaggtggggggggtcagccccccgcccggccagccgccccgtctgggagggaggtgggggggtcagccccccgcctggccagccgccccgtccgggaggtgaggggcacctctgcccggccgcccctactgggatgtgaggagcccctctgcccggccaccaccctgtctgggaggtgtacccaacagctcattgagaacgggccgggatgacaatggcggttttgtggaatagaaagggcggaaaggtggggaaaagattgagaaatcggatggttgccgtgtctgtgtagaaagaagtagacatgggagacttttcattttgttccgtactaagaaaaattcttctgccttgggatcctgctaatcggtgaccttacccccaaccctgtgctctctgaaacatgtgctgtgtccactcagagatgaatggattaagggcagtgcaagatgtgctttgttaaacagatgcttgaaggcagcatgctcgttaagaatcatcaccactccctaatctcaagtacccagggacacaaacactgcggaaggccacagggtcctct

SEQ ID NO: 24360 - DNA, 1256 bp, Artificial sequence
  DNA replication origin
acaggatcacaaggcagaagaatttttcttactatagaacaaaatgaaaagtctcccatgtctacctctttctacacagacacggcaaccatccgatttctcaatcttttccccgcctttcccctctttctattccacaaaaccgccattgtcatcatggcccgttctcaatgagctgttgggtacacctcccagacggggtggtggccgggcagaggggcttctcacttcccagtaggggcggccgggcagaggcgcccctcacctcccggacgaggcggctggccgggcggggggctgacccccccccacctccctcccggatggggcggctggccgggcggggggctgacccccccccacctccctcccggacggggcggctggcctggcgggggctgacccccacctccctcctggacggggtggctgccgggcggagacgctcctcacctcccagacggggtggctgccgggcggataggctcctcacttctcagaccgggcggctgccgggcggaggggctcctcacttcttagacggggcggttgccaggcggagggtctcctcgcttctcagatggggcggccgggcagagacgctcctcacctcccagacagggtcgcggccgggtagaggcgctcctcacatcccagacggggcggcggggcaaaggcgctccccacatctcagacgatgggcggccgggcagagacgctcctcacttcctagatgggatggcggcggggcagagacgctcctcactttccagactgggcagccaggcagaggggctcctcacgtcccagacgatgggcggccgggcagagacgctcctcacttcccagacggggtggcggccgggcagaggctgcaatctcggcactttgggaggccaaggcaggcgggtgggaggtggaggttgtagccagccgagatcacgccactgcgctccagcctgggcaccattgagcactgagtgaaccagactccgtctgcaatcccggcacctcgggaggctgaggctggcggatcactcgctgttaggagctggagaccagcccggccaacacagcgaaaccccgtctccaccaaaaaaatacgaaaaccagtcaggcgtggcggtgcgcccctgcaatcgcaggcactcggcaggctgaggcaggagaatcaggcagggaagttgcagtgagccgagatggcagcagtacagtccagcttcggctcggcatcagagggagaccgtggaaagagg

SEQ ID NO: 24361 - DNA, 934 bp, Artificial sequence
  DNA replication origin
agcgcctttgccccgccgccccgtctgggatgtgaggagcgcctctacccggccgcgaccctgtctgggaggtgaggagcgtctctgcccggccgccccatctgagaagcgaggagaccctccgcctggcaaccgccccgtctaagaagtgaggagcccctccgcccggcagccgcccggtctgagaagtgaggagcctatccgcccggcagccaccccgtctgggaggtgaggagcgtctccgcccggcagccaccccgtccaggagggaggtgggggtcagcccccgccaggccagccgccccgtccgggagggaggtgggggggggtcagccccccgcccggccagccgccccatccgggagggaggtgggggggggtcagccccccgcccggccagccgcctcgtccgggaggtgaggggcgcctctgcccggccgcccctactgggaagtgagaagcccctctgcccggccaccaccccgtctgggaggtgtacccaacagctcattgagaacgggccatgatgacaatggcggttttgtggaatagaaagaggggaaaggcggggaaaagattgagaaatcggatggttgccgtgtctgtgtagaaagaggtagacatgggagacttttcattttgttctatagtaagaaaaattcttctgccttgtgatcctgttgatctgtgaccttacccccaaccctgtgccctctgaaacatgtgctgtgtccactcagggttaaatggattaagggcggtgcaagatgtgctttgttaaacagatgcttgaaggcagcatgctcgttaagagtcatcaccactccctaatctcaagtacccagggacacaaacactgcggaaggccgcagggtcctctgcctaggaaaaccagagacctttgttcacttgtttgtctgctgaccttccctcc

SEQ ID NO: 24362 - DNA, 1292 bp, Artificial sequence
  DNA replication origin
aaattacataagtgaatgttctcattgaaaccaaaagggagagagagagttgcaagagctatataacagtagccaatgctgcagaacgaactcctttgaatttgactattgggaggtcattcataaccttggtgggaactgtttaattggaatcttggggataggttgcaggagacaggtgatgtaggagcagtaagcaaatgcagacccctcttttcagtaagcatggctgggaagacaaggagcaagataggtctgagagcgtgagagggctggagaagggtccttttaaagtgcaaagagattgagtatgtttatgtgctgaggaaaaggagctaatagaggagcagctggagataattgctgcagaggaatgatgcccctggacaaaggagtcctagaaagcatttgcttgtggcctcaccttttataggaggacagttctcccactgattatgtggaaaaaaggtaaatagaggtgtggatgctaataagtttatggggcagaggaggattgcagaagaagctgggcatgtacttgcctgatggcttctattttgtgtgtgtgtgacctattagagtgctaaggaagtggattggatagggggcttaagaaagtggtgaaattggaagcaggtgttttaggggacccatggaaggatttgtgggcagctgaggttgggtgctgtgactgcgcaggggcactgacctgcatggttgttcattttctccaccagtgcagcagctaggaattcacgtgtctgaggttcacatgtctagggtcagacttctgctgcagagcaggggaaggggtatagctcagtattagaggtcaagagaattgaggttgttggaaggaaaatggtttcagtaatggatcatggttgtaaattggttagggggagaagtgaggttgggaagtgtctggcagatgggagaaaatggagggctggagaatcagaagtcttaatgtagtaatagtgagtgagtgagagtagtgaacacagctagagagtgggttgagcggtttaagattttagaagaggagcagagagtgggaaggtactatatgttggatggacctgaagccacctggatggtcctagctctggcatagtgagggaggctgggacccaggtgctagagtgactgatggctagcaggaggttgggagatgatggtgttgagggaggagtagaacggtggttggcaaggatggcatgggcatcaaaggaatggaagttttttatggaggtgaaagagcacaggttggaaagagcaataggaatgag

SEQ ID NO: 24363 - DNA, 1101 bp, Artificial sequence
  DNA replication origin
gtctcggggagcccagaggtaggaaagcacccggagacgcaggcctccgccttctccagggtctgcaggcagcgctgcgcggggtcgccgactgggctgggctgggctgggctgggcgcgccgcggcctggcgcccacttccgctcctcggcagctgcggagcgccccgggcggagggagaggggcgcggggcgggcctcggcgcccaggcggcgtgaccttcccgggcgtccagggaagcggcgagagctgccacgcacgtgccgcgggacccgcgcgccgcccagggatggcccgccggggtcgctggagaatctcagggtcatcggcctccttcccccagtgcctacctggtgggaactgttgtcctcctttgcccccaagtcgtgtcatttggccgcgggcttccgcgccgccagggcgccatcgctgggcagcacggagccgcttctgaatggagacttgcaggctgccagacagtgggcggctgggcaggggcggcgagcgttcagggccgggcagagaaagtgggaaatgtctccttaacctgttccttgcgaggccggggaggaggcgcgcctgtccgggttccttggcggcaaaactggtttgcatccgggcgccctaaagcccgggctctggggactagatggcgagctggccggcagctcctaccgccccagctttagccagaagctgggatcttcccgcagcagttagtgttccctggtggaaaatgcggcctcatctgactctaccgtccaaaaaagttttttccccaaggatcgagaaggacgggtggtcagcgctgttgttttctcaatcgaaccctggtgtagtgtgagagggatcaaaggcgctgaagagtttttctattccaagtgctacagcaagctcataaatcagttctaattcatgctgaacagtcttgcctcctccaagccctgtttcttctcccagctagagctacacataacctgaattaacccgttaactacccactcctgagtgaatctgttagtacccaccattgttttctatcttaataattccagaagtggttatttgtagaatttaatgtgtttaagtttggctcaccta

SEQ ID NO: 24364 - DNA, 1131 bp, Artificial sequence
  DNA replication origin
ctgcaccctctaccggccacgggacgtccctccgcacccgcctgtggatgccgtgacccctgcacactcatacgcgtggggcgacatcccacccacacatttgggacccaaatttatccccccgccaacacacccattcggtggcacgcacccctgagtccgaactgtggaacctgatactcacacaacccaggccctgcgtgtggaatccctggcggtactcaccggggggctgcagaattccacgtcatcaggtcccaccagggcaatgggaactttgtcggagttctctgtcatgtttgcggcgggaggagtgaggcacttggagactccctgggcaccctgggatctgtcccgctgccccgacgtgcagggcatttcaacgccgcgcgcacacacggtgcacggtcccgcctgggccagcccagcggtccccaccccttccagcgcctcacctctctcctcccttctctctcccgccgcgggaagctcgtcctgcactcccggatgccccctttcctcctcactctatcctgtctactggccccccaaacagcatcccggtgactctgaatgtgtgggggtggttgcatccctcagagcgggatgctgaatcctgggacccaaagaaatactcaagtgccagagcaattagccatgcaccggaggatgtcttagaatgtcagcgggctctgctgtgacaactggctggaggccatttcctgcagggtctttgtaggtgtgtgttggggtgggggtggggggaagatggctcatggaaggtgaaggagaagacaacagagtggtgcaggtggacaggggacactggcctaagagtgtaagggttaggccaccttctcactggcctggcattgctggatggcccctgggactggaaaacagagcagggtcttagggatggctccttgccaccagtttttctagggtctgggtacaactgcagcaaaagtgagagctaagcagagcagggctggagggaaggagttggggagaccagaataaaagtgcatgctggttggttgaataaattaaataagtgcaaacaaaagcaacaatggcaaagcacacacacacacacacacacacacacagagtactgatgtatccaaa

SEQ ID NO: 24365 - DNA, 1496 bp, Artificial sequence
  DNA replication origin
gtgatcctcccaccttgacctctcaaagtgctaggaatacacacgagagccactgcacctggccaaacaagtgtttgttttttgtttgtttgagatggagtctcgctgtgtctccgggctggagcacagtggcgcgatcttggctcactgcaacctctacctcccgggttcaagtgattctcctgcctcagcctcccaaatagctgggactacaggcacacgccaccatgcccagctaatttttttatttttagtagagacggggtttcaccatgttggccaggatggtctcgatctcctcacctcgtgttccaccccactcggcctccaaagtgctaggattacaagtgttttttaaagcaccttccaggctgtgaggggaaccaaaaggaaatatgggtgtattacctatccctaaagagctcacagtggggaggggaggggaggcagggggaggggaggggaggggaggcagggggagggaaaagttggcatacgagaaacaagaaacaaaagaaaatgaaaccacagactggccctggccctgcggcatgtagtgcagcggggaggaagctgaggcaggggcagggggaaaagggagatgggcctggaaatccagaagcatttggatatgtggaggggcgagaagggttgggggtgcaggcagggctggaagagggccttcctttttggggaaggggctatgacccagggagggagctggctttgcagggagtgatggaaatgggagtgttcagagagaaagacagggataaaaggtaaagaacataaaaataaaaaacaatggtgaaggtggagacaaggaatggtagggaaggaaagagaggaaaatggaagatggggtggcaacccttggcaaaggcacagggggacacgggggagctcatagttaggagtcagcgcactcaggcttctggtaggaaggaaaaagaaggcccttgagaacctccgccctagtcttttgaaaagagctcagggcaagtgggaggaaaggtgtctgggactagtactgccgtggcctggatgatggatttctcagcagccgctttctaggagtgggggccgcgtgccctaccagttacctttcaggctgtggggtggtggccagtgggggtctgtctgctggggggtcccctgggcaaggccaatgcagcaaggccagcactctggtgactcaggagagctaatgtggctcccggaaaggcctgaagacactgagatggtgggcactccttggccggtgcagagagcagaggagttggagtcagggttgaactccatggatccctcctctcctggcagtggctcggcagaagaactaaggggaaaatcctgaaagtctcaaactccacgctcctgtgctccctggaaaattgcagacacagaaggggagctccaaacatgactgtgtggagggacagactctgctgacataacggaaataatggcctgggacatggatgggagggatgaga

SEQ ID NO: 24366 - DNA, 931 bp, Artificial sequence
  DNA replication origin
gccttcaacaaatatttattgaccaccttctgggcactcttttaggtacttgagctacatcagtgaatagaacaaagatatctgtcctcatggagcttatattccagtaggggagacagacaaggagggttaaacataataaatttttttttttttttgagttggagtctcgctctctcacccaggctggagtgcagtggtgcgatctcagctcactgcaagctccgcctccccggttcacgccattctcctgcctcagcctcccgagtagctgggactacaggtgcccaccactgcgcccagctaattttttgtatttttagtagagatggggtttcactgtggtctcggtctcctgacctcatgatccgcctgtctcggcctcccaaagtgctgggattacaggcatgagccaccgcgcctggccaataaattcttacgtaatatcttagaaggcaatttgtgcaagaccagtcgggggtgtttgtgaggcagctggcagtagggtgaaaaggcgagcttaagcagggattggggaggagaggaaggcagccatgaggatggctggagcatccatggaggagagggctcatgcagaggccctcggtgggagagtgtcaggcatgttcaaggagcagtaaggatgatgggaggtgacagaggtcacaggagccctatcctggtgggatctgggaggctttgctttgaggatgcttgagatggggagttgtcagatgattggagcagaggaatcacaggatctgacttacatggcacacagctccaactgcggtgctgagaagagatgagggtaggacaggcacatggagacccactgggaggtgtgtaataaaccaggtgagaggtgctggtggctggcaccagggtggtaggagcagaagtggtaagaagtgattagattctggatgca

SEQ ID NO: 24367 - DNA, 1059 bp, Artificial sequence
  DNA replication origin
agcccggagcgttcccgcccgcctggctctcggctcggggtgtccgggtcggtgctgcaatgggacacgccgctgatcgtcatcatcgtgctggccgggagctgcacgctgctgctggccgccatcatcgccatcgccaccacctgcaaccgccgcaagaaggaggtgcgcaaagggggggccctccgggaagagcggcccggggcggcgggcggcggagcctcggctcccggctccccggaggaggccgcccggggagccgggcccaggcccaacatgttcgacgtgctcaccttccctggcaccggcaaagcgccctttggcagccccgcggcggacgcgcctccgcctgcggtcgccgcggccgaagtgccgggctcagagggcggcagcgccactggggaaagcgcctgtcacttcgaggggcagcagcggctccgcggcgcgcacgccgaggtgaggccttccttcggctgggcgcccccctccgagctccgcggacaggctgggggaagggagactggaggggtagggtgggtgcattcaggtagacaacctgtcgcacttgttttttgtttgtttcttatccaaccctccccccactcccattcccctattccctgctgcagccctacggtgcctccccgggttttggaaaggagccggcgccccctgtggcggtgtggaaaggacactccttcaacaccatttctggcagagaagcagagaagttcagcggcaaagacagcggtaaaggggacagtgatttcaacgacagcgattccgacatcagcggggacgctctgaaaaaggatctcatcaaccacatgcagagtggtgaggactcttctttcccgccaaattcggcattcctcccttccctccccttcaccactgtttgcctcctctcaatctcggttcccagcccccttccctcttccccactttttctcactcctacagctgcggatacgggcctgcctcacacggtgaatttcaaaatgccaagtcgaggcaactccagctcttgaataaaacacaccctcatcctgttaggca

SEQ ID NO: 24368 - DNA, 959 bp, Artificial sequence
  DNA replication origin
aatcaattttcccttatccttcaggcttcttaatcgagaggctattccaggcaccgtagctaggagagaaggaaagcagagcctcattcagcagagcaagtctgtgggtagggggctgcaagggtttggaagcgtcagaggtgcaaaatgcagagtgtgtgtgttggcaggggctgggggaaggcggaatcaggagccactggggtgaaaccccagcgtgttcgcacttagttctagccgcggcacggagggaggcaggcgacaattaacaaaaccatccgctccttttactcctggagccctgtgccaactcctctacatgcagggtgctgacaagaaaagggggaaaaagcaaaaggagttaaacaaaagaaagattccctaattttcctttcttgttttcccctctaagcctttccacattaaagggattgtcagaggcaggcggaggggcgacgcgagggggaggcggccattggctacccggctcgggtgattagcatatcggcggctataaaggcaaaggcggcgcgaggcggcgcagcttctgtaagagacggagaggcgcagagtgagggcgggtccgcgcgtcctcagagcccgctggaggctcggagctgctacccgcagacttctcccgcacagggctcgcaaagagcgtgattccgagagcctgagactgacgcccgacctggaaaccagagaagacttccttagcctttcggatcgcacttgaggctggaggcatgagtcctgtgaggcgttggggcagcccctgccttttccccttgcagctcttcagcctctgctgggtgctctcagtggcccagagcaaaacagtccgatacagcaccttcgaggaggatgcccccggcacggtcatcgggaccctggccgaggacctgcatatgaaagtatcgggtgacacaagcttccgcctgatgaagcaattcaacagc

SEQ ID NO: 24369 - DNA, 863 bp, Artificial sequence
  DNA replication origin
gaccgtgccgggggcatcctcctcgaaggtgctgtatcggactgttttgctctgggccactgagagcacccagcagaggctgaagagctgcaaggggaaaaggcaggggctgccccaacgcctcacaggactcatgcctccagcctcaagtgcgatccgaaaggctaaggaagtcttctctggtttccaggtcgggcgtcagtctcaggctctcggaatcacgctctttgcgagccctgtgcgggagaagtctgcgggtagcagctccgagcctccagcgggctctgaggacgcgcggacccgccctcactctgcgcctctccgtctcttacagaagctgcgccgcctcgcgccgcctttgcctttatagccgccgatatgctaatcacccgagccgggtagccaatggccgcctccccctcgcgtcgcccctccgcctgcctctgacaatccctttaatgtggaaaggcttagaggggaaaacaagaaaggaaaattagggaatctttcttttgtttaactccttttgctttttcccccttttcttgtcagcaccctgcatgtagaggagttggcacagggctccaggagtaaaaggagcggatggttttgttaattgtcgcctgcctccctccgtgccgcggctagaactaagtgcgaacacgctggggtttcaccccagtggctcctgattccgccttcccccagcccctgccaacacacacactctgcattttgcacctctgacgcttccaaacccttgcagccccctacccacagacttgctctgctgaatgaggctctgctttccttctctcctagctacggtgcctggaatagcctctcgattaagaagcctgaag

SEQ ID NO: 24370 - DNA, 1315 bp, Artificial sequence
  DNA replication origin
catcattaacatgtgagactgtttagcattttgaacacttcacacataaaaagaacttaacacaggactatttattgggctttagacagatggtttaatgtttttttagccttcagcctatcagaccacccgtggtttccttcagccaagggcttttaaaaaataattggtctacagcaattttctaacaagactgactgcaatatatttctctaaatctttttcttacccttaagtatcccttacagtggtttgtggttgacagacttctctgtctgatactggttcctcacatataagtaattactgacataaaaggagatgaaggggctgaaatttcatcattaatggtttctttgctgtagaaaaaaactatttagaaatgattattttggaaaacagttcttccctaattagacattgcctgacactctagaagatgtttcccaaaaatctttcaatataggaaatgacaacccaacatagatgggtaactgtaggtggcagaggatgcattgcactaagcatgtatacgtttatcttaaaatggtaaagagggtcaaatgtgcctctgtgtggggaatatgtgagtctgcttaggaaggagtaaagtggctgtggattcctgctcttattgtcgaagcgaggccagtacaatggaaaagcaagcaggatgtgtttttatagtgcagagatcttaataaccacctgcaccaccctggccactggtcagctcttcaggcccttctgtgggtcctttagtgaaacagcatggcccagaggcccagagactgtggactggcccaaatggatgattatttgcatattcttctgtatgtagctcccccagtagggttctgaagaggcatgcttaggcttggggcagagaaaagcaagtatatagcagagaggacttagtgatgggatgttctaaggggaaaagtgttttctgactgagcactcggcactcgggagggcttgagaagcctgaaagtcttagtgcagagcttgcgattggcttttctctttgaggaataaatgtctcgctggaggctcagatttcctgctgacacttcatgcagggttggattggagtccttgctgattctgtggctgctgctagtgtcaggattttgtaccgatactgtcaatttcctcacctgtgaggaagacacccctggcaccagcgtcggtgttttgtctgatcacgtccagtttaattcgcagcgcgaggtgccaagtcagtttcagctgatgaaacaattcaacagctctctgctccgggtgcgcgagggctacgggcagctgaccgtcg

SEQ ID NO: 24371 - DNA, 947 bp, Artificial sequence
  DNA replication origin
cggtggacccaaccaccaggagctgcgcgctcgacggctctttgactgcgaggagctggcggagatgcagctgcggttggaggcgctagacggctgctctcagccgctatggggcctggccatagtgtggctgcaggtggaggaccagaactaccacgcgccccgcctggtggccccactgctctcccacggctcagcccagctgcctctgccctgggatgcgccactgggctacctgctgacccgtctgcaggcaaaagacgaggactagggcgccgacgtcgagccgacttacttagtcctcgacagcgacggcggccccggggtgctggcgctgcacccggcttcgggtgagctgtctctgcagcgccgcctgtccccgaagcccgccggcccgctgacggcggtcatcgcggtgcgggactgaggccggcccactctgagtgcacagccacactgcttctcgtgcccgcgggccgggcgccacctggcgcagaagtggtgctgatgccgccgccgcacgagagaggagagccacgcatcaggcagcgaatgggagggcagcttgaaccctccctgttctggtgggtgttttggccagcggctgcatccttctgctagtggccatcatcactgtgacttgttcttgccaaggcaaggctaggacgctggtgaagaagatccgtgagcactccccaagcagatttcaggcaacgagtgaccatgctggtccacgtgtcagagccataggggctgactctgggggcttctgctccaggttctttatagacacacggacagtttccatttccacaggggcccaggcgttcgagtctgtggaggattcctagtctgaggtcagtgaggtgtctcggagctcctcttgtcgggagaggagcaggactgcatgggcccaggtagggcacccctgccgttcttagtgtcct

SEQ ID NO: 24372 - DNA, 1774 bp, Artificial sequence
  DNA replication origin
cactcattgtgaaggtctgtggcttcactcctgaagtcagcgaacccgccagaaggaagaaactctggccacatctgaacatctgaaggaacaaattccggacacaccatctttaagagctgtaacattcactgtgaaggtctgcagcttcattcttgaagtcagcaagaccaagaacccactggaaggaaccaattctggacacagtactattttgttattttcatacatctataattttagggtcctggctagggctgctgctgtaagtgattgtaaaggggtgtgtggtttaggctgggaggctttgaggttctttttttcccagtgtaagaggaagcattttgtgtccactaaaatctatctgggagtgttgttgaatgttgggataaagagacccgttgcaggtggtgggtgcaggggatggtgcatggagaggggagccaaaggaagaggcataaacagggaaagtgtcggcctttgcagtgctctaaatttttattaaggaggtggcaggtgtcaagggccaggggggcagctagagaagccaagcctgtttttattgttggcagctttgagactagtatgtttggtggaaggtttgagttgtagggtatagttgccaaggggaatgccagagggtagatgtcgttggacgcacagtggggctggataggataagattgtgtgagttgttatggctcctgatatgggtttatcagggctgctgtagggggataggatgcgtaagtagggatgtaaggttgtaacagctggaccgaactagctacctaatgggggtgggaggagatttctgttaatgcctgtatgtcgagtttgagggggttgttaatgaggatttcaggatggtagtttacttgggtggaagtccagttataggctgaggcagggattgtattgtatgttgtggagaggagggatacacagagccagcagtcttatgccagggaggaattggagttttttaataagaaatgtgtgagactgagtgttttgtataggtgttcaggggttgtaggtgttggttgggctgaaagaagggttggggtattgattatgaggtgagttagaaaggcagagagtgagcagaaaagtaaatagttcggttttacctggagtgaagccacagagagagccccggaagaaaaggtcggttatccacttgaaaaaggcttctagggtgtagttccgtgggcggaaccaggaaatatcttgtgtgaggacgtgaagtaagagagtgaagtggcaggatagacaaaagtagggcatctagggggatatgggaatgtttgttagtgattgtgatttctgctataagggtaacgattaggcagaaggctaaaatgagggagactttttggctagtattccgattggaaggagttacattatataatttcactgtaaacaatagggtgagtagtataataaatggggaatggagggctccttgaaaggaggtaacagagcatatacgacagtttgaagttatgtttcttagtaaggttaataggtgaagggagaagaaatatgggcggcagaggagatacaggggatgtgcatcactatggaaggattggtggagagatgttaggattttgttggattggccctggggaaggactaacttctggtccttaactatctattccccctggaggaaggctccttgttgttgtaataaggtcttttcagtggggggagcattggggttgcattgcaggggtaatgagggggagggaggagcggaaga

SEQ ID NO: 24373 - DNA, 903 bp, Artificial sequence
  DNA replication origin
tggcgacggggctggagatgcgtgtgagacccacaccgctggcttttattgctgtgggtgcactcacgggtggaggaagacagcgggaaacacagcaggacgctggaggggatcccacagtgggttatttggttggtttgcatccttgtgtcttttacagagacgggttctcgctctgtagcccaggctggagtgcagcggtgccatctcggctcgctgcggctacttggggtggggcggggggggggggggggctgagataggagaatcagttcaagtgattctcctgtctcggcctccggagtagctggactacaggtgagcgccaccacatcgggataattttcggatttttttggagagacgaggtttcgctatgtgcccaggcttgtttggaaggcctgagctcaagccgtccgtcccgctcaacctcccgagtcgctgggaccccaggcgcaagccaccatgcccggccaattatttttttgggttgtatttcctgttgaagtgaggttttgctatgctttcacctcacataccttttctgtcccaagaccccatccagggtaccaccttacaactcgtcacggttccccttggctgcgacggtttctcacacttgccttgtttttgatgaccctgacactttgaatactgatcagatatattgtgggatgtcctctcctgaagttcgtgtgatgtattccttgtgatctgactggaattatatgtttttgtcaggaagattgcagcgggaaagcgccattcccatcccatcctgtctagagtacacaccatcaagccggcttatcactgctgctattagtcctggtcaccgggctggggcagtgttgattaggtttctccaccataaagtgattttcccacctctttctctactgt

SEQ ID NO: 24374 - DNA, 1085 bp, Artificial sequence
  DNA replication origin
agacagaggtgacaaggcagggggatggccgtggcctttctaggggaatgaggattctgtccccaactgcacccacccgagatccgtccacgcctccgggacccccagacacacacctgatcttcccacagctggctccggagatctgaaaattaggagactcttcgacgaagagaggcccgaggagtcggaggtgtccacaggttcaccgctgtagctctgaggtagtccacccgcagccagggagtctggagggagcacgcagcaggttctggctccgagcccagcagaaagccgactgctggaggccgagcgccgtccctcttatatggcagcaaggcagtcgcgtaagggacaggcgtcgtcagaggggggccggctggggcgggcctggctgggcttgcgaggcgcattgggccagtcccctgccagtcaaatgggggcccttctgagatgccgccatttctagacgtccgtggttgattgattaatctaatcatcgaggaaaaaaaattgcataatgacctctgagtgtcagcacaatgaggtgtggtgccctgaaagcggctgacaggaagatgcgattagcttagatctgagcatggtcaaggaaagcatccaaagcggggatatctgggctgaaatctggaacataacgtttgaaattagtcatcctgaaccgggttgggagaggcagggagggaggaaggggagtgaagagagtgtgctgaggcccggactggaagggagcccggcacattctgggaatggacgggaggccaagtccaggcccggaggtggtgcgaggtggaggcagggtccgcgcaggagctggtcttgttccaaggcagcggaaaaccgtggaacggtgtccggcagcgggttaacatttcagaaacgaccagcctggctgtgaaggagcgccaacccagggtccgcagaataagtcaggagaggcaagaaggctattgcagccctcggggttgggcgcagggtgctgttagactgagactcagggaggtagaggaggagaaagttccctggtgggagagaaatttccaagagaaagcgagacccagtgtgga

SEQ ID NO: 24375 - DNA, 917 bp, Artificial sequence
  DNA replication origin
gcgacggggctggagatgcgtgtgagacccacaccgctggcttttattgctgtgggtgcactcacgggtggaggaagacagcgggaaacacagcaggacgctggaggggatcccacagtgggttatttggttggtttgcatccttgtgtcttttacagagacgggttctcgctctgtagcccaggctggagtgcagcggtgccatctcggctcgctgcggctacttggggggggggggggggggggcggggcgggctgagataggagaatcagttcaagtgattctcctgtctcggcctccggagtagctggactacaggtgagcgccaccacatcgggataattttcggatttttttggagagacgaggtttcgctatgtgcccaggcttgtttggaaggcctgagctcaagccgtccgtcccgctcaacctcccgagtcgctgggaccccaggcgcaagccaccatgccgggccaattatttttttgggttgtatttcctgttgaagtgaggttttgctatgctttcacctcacataccttttctgtcccaagaccccatccagggtaccaccttacaactcgtcacggttccccttggctgcgacggtttctcacacttgccttgtttttgatgaccctgacactttgaatactgatcagatatattgtgggatgtcctctcctgaagttcgtgtgatgtattccttgtgatctgactggaattatatgtttttgtcaggaagattgcagcgggaaagcgccattcccatcccatcctgtctagagtacacaccatcaagccggcttatcactgctgctattagtcctggtcaccgggctggggcagtgttgattaggtttctccaccataaagtgattttcccacctctttctctactgtgctttctggaagt

SEQ ID NO: 24376 - DNA, 1103 bp, Artificial sequence
  DNA replication origin
ttaggaagacagaggtgacaaggcagggggatggccgtggcctttctaggggaatgaggattctgtccccaactgcacccacccgagatccgtccacgcctccgggacccccagacacacacctgatcttcccacagctggctccggagatctgaaaattaggagactcttcgacgaagagaggcccgaggagtcggaggtgtccacaggttcaccgctgtagctctgaggtagtccacccgcagccagggagtctggagggagcacgcagcaggttctggctccgagcccagcagaaagccgactgctggaggccgagcgccgtccctcttatatggcagcaaggcagtcgcgtaagggacaggcgtcgtcagaggggggccggctggggcgggcctggctgggcttgcgaggcgcattgggccagtcccctgccagtcaaatgggggcccttctgagatgccgccatttctagacgtccgtggttgattgattaatctaatcatcgaggaaaaaaaattgcataatgacctctgagtgtcagcacaatgaggtgtggtgccctgaaagcggctgacaggaagatgcgattagcttagatctgagcatggtcaaggaaagcatccaaagcggggatatctgggctgaaatctggaacataacgtttgaaattagtcatcctgaaccgggttgggagaggcagggagggaggaaggggagtgaagagagtgtgctgaggcccggactggaagggagcccggcacattctgggaatggacgggaggccaagtccaggcccggaggtggtgcgaggtggaggcagggtccgcgcaggagctggtcttgttccaaggcagcggaaaaccgtggaacggtgtccggcagcgggttaacatttcagaaacgaccagcctggctgtgaaggagcgccaacccagggtccgcagaataagtcaggagaggcaagaaggctattgcagccctcggggttgggcgcagggtgctgttagactgagactcagggaggtagaggaggagaaagttccctggtgggagagaaatttccaagagaaagcgagacccagtgtggacagcccttgagg

SEQ ID NO: 24377 - DNA, 909 bp, Artificial sequence
  DNA replication origin
cgatggcgacggggctggagatgcgtgtgagacccacaccgctggcttttattgctgtgggtgcactcacgggtggaggaagacagcgggaaacacagcaggacgctggaggggatcccacagtgggttatttggttggtttgcatccttgtgtcttttacagagacgggttctcgctctgtagcccaggctggagtgcagcggtgccatctcggctcgctgcggctacttgggggggggggggggggggggggggggctgagataggagaatcagttcaagtgattctcctgtctcggcctccggagtagctggactacaggtgagcgccaccacatcgggataattttcggatttttttggagagacgaggtttcgctatgtgcccaggcttgtttggaaggcctgagctcaagccgtccgtcccgctcaacctcccgagtcgctgggaccccaggcgcaagccaccatgccgggccaattatttttttgggttgtatttcctgttgaagtgaggttttgctatgctttcacctcacataccttttctgtcccaagaccccatccagggtaccaccttacaactcgtcacggttccccttggctgcgacggtttctcacacttgccttgtttttgatgaccctgacactttgaatactgatcagatatattgtgggatgtcctctcctgaagttcgtgtgatgtattccttgtgatctgactggaattatatgtttttgtcaggaagattgcagcgggaaagcgccattcccatcccatcctgtctagagtacacaccatcaagccggcttatcactgctgctattagtcctggtcaccgggctggggcagtgttgattaggtttctccaccataaagtgattttcccacctctttctctactgtgc

SEQ ID NO: 24378 - DNA, 917 bp, Artificial sequence
  DNA replication origin
aaggcagggggatggccgtggcctttctaggggaatgaggattctgtccccaactgcacccacccgagatccgtccacgcctccgggacccccagacacacacctgatcttcccacagctggctccggagatctgaaaattaggagactcttcgacgaagagaggcccgaggagtcggaggtgtccacaggttcaccgctgtagctctgaggtagtccacccgcagccagggagtctggagggagcacgcagcaggttctggctccgagcccagcagaaagccgactgctggaggccgagcgccgtccctcttatatggcagcaaggcagtcgcgtaagggacaggcgtcgtcagaggggggccggctggggcgggcctggctgggcttgcgaggcgcattgggccagtcccctgccagtcaaatgggggcccttctgagatgccgccatttctagacgtccgtggttgattgattaatctaatcatcgaggaaaaaaaattgcataatgacctctgagtgtcagcacaatgaggtgtggtgccctgaaagcggctgacaggaagatgcgattagcttagatctgagcatggtcaaggaaagcatccaaagcggggatatctgggctgaaatctggaacataacgtttgaaattagtcatcctgaaccgggttgggagaggcagggagggaggaaggggagtgaagagagtgtgctgaggcccggactggaagggagcccggcacattctgggaatggacgggaggccaagtccaggcccggaggtggtgcgaggtggaggcagggtccgcgcaggagctggtcttgttccaaggcagcggaaaaccgtggaacggtgtccggcagcgggttaacatttcagaaacgaccagcctggctgtgaaggagcgccaaccc

SEQ ID NO: 24379 - DNA, 918 bp, Artificial sequence
  DNA replication origin
aaaagagtcgagctcagcgcgatggcgacggggctggagatgcgtgtgagacccacaccgctggcttttattgctgtgggtgcactcacgggtggaggaagacagcgggaaacacagcaggacgctggaggggatcccacagtgggttatttggttggtttgcatccttgtgtcttttacagagacgggttctcgctctgtagcccaggctggagtgcagcggtgccatctcggctcgctgcggctacttgggggggggggggggggggggctgagataggagaatcagttcaagtgattctcctgtctcggcctccggagtagctggactacaggtgagcgccaccacatcgggataattttcggatttttttggagagacgaggtttcgctatgtgcccaggcttgtttggaaggcctgagctcaagccgtccgtcccgctcaacctcccgagtcgctgggaccccaggcgcaagccaccatgccgggccaattatttttttgggttgtatttcctgttgaagtgaggttttgctatgctttcacctcacataccttttctgtcccaagaccccatccagggtaccaccttacaactcgtcacggttccccttggctgcgacggtttctcacacttgccttgtttttgatgaccctgacactttgaatactgatcagatatattgtgggatgtcctctcctgaagttcgtgtgatgtattccttgtgatctgactggaattatatgtttttgtcaggaagattgcagcgggaaagcgccattcccatcccatcctgtctagagtacacaccatcaagccggcttatcactgctgctattagtcctggtcaccgggctggggcagtgttgattaggtttctccaccataaagtgattttcccacctctttctctact

SEQ ID NO: 24380 - DNA, 1042 bp, Artificial sequence
  DNA replication origin
gaacggatttaggaagacagaggtgacaaggcagggggatggccgtggcctttctaggggaatgaggattctgtccccaactgcacccacccgagatccgtccacgcctccgggacccccagacacacacctgatcttcccacagctggctccggagatctgaaaattaggagactcttcgacgaagagaggcccgaggagtcggaggtgtccacaggttcaccgctgtagctctgaggtagtccacccgcagccagggagtctggagggagcacgcagcaggttctggctccgagcccagcagaaagccgactgctggaggccgagcgccgtccctcttatatggcagcaaggcagtcgcgtaagggacaggcgtcgtcagaggggggccggctggggcgggcctggctgggcttgcgaggcgcattgggccagtcccctgccagtcaaatgggggcccttctgagatgccgccatttctagacgtccgtggttgattgattaatctaatcatcgaggaaaaaaaattgcataatgacctctgagtgtcagcacaatgaggtgtggtgccctgaaagcggctgacaggaagatgcgattagcttagatctgagcatggtcaaggaaagcatccaaagcggggatatctgggctgaaatctggaacataacgtttgaaattagtcatcctgaaccgggttgggagaggcagggagggaggaaggggagtgaagagagtgtgctgaggcccggactggaagggagcccggcacattctgggaatggacgggaggccaagtccaggcccggaggtggtgcgaggtggaggcagggtccgcgcaggagctggtcttgttccaaggcagcggaaaaccgtggaacggtgtccggcagcgggttaacatttcagaaacgaccagcctggctgtgaaggagcgccaacccagggtccgcagaataagtcaggagaggcaagaaggctattgcagccctcggggttgggcgcagggtgctgttagactgagactcagggaggtagagga

SEQ ID NO: 24381 - DNA, 1049 bp, Artificial sequence
  DNA replication origin
gggcggagccggcccgaagggcccggggagaggccgggggcggacgacagcctccgcctaccccgacacgcaccccgccgcccccaacccaacctccctggggccccggcccgcacccgcggcccggcagccggcgggactcgccacttaccaacccgcctgggacaacgccgcgccggccacctgggccatggtagctgcttaggccgggggtggtggggggctggggtgggggtgatggggaggcctcctacttgagacccccccccttaaaaaaaaaaaaagaaaagaaaagaaaaaactcctctggtcggctctgcaactgggcatgctcagtgcggccggcgcttccgcgtgcgggttccgctcgccgcgttttctgagcggccgtaggggccggcctggtgtggggctcccaggctgcggagctccgggacctgatccaccaaacaccggctggtggctggagtcaggacggttcagggactttgcctcttccccgaaggcttttacttgttttggggggcgcttttctgagttgcacaccttggaaagtcgcgaggaggttcttcgtagagcaaaagtgtggcgtttgcagcgcccacaggcggccacctcagagagggcaggataaggcctgaggagactgacgggttggctgcgagggaacgcgtccaggaccgcgctaaaaaggtcacgttgcgggcagcaaaactcagaggtgtccccagcccattctgcacaaaagtttactttcttataaacactcgttcccttcacctcgccttttggtccgcccggacgcaaagaaaaaatgcagctcaagcttttttgagtccccgcgggcagatcgagttgccccagtcggacaccacagtgaaaatgccctggtcagcccaagaaaacctgcttttaggggacatggggaaatggggcagttgtgtcagtgcttgtttttcctgttgccctccccctgggaccatccgtgtcctagcgcggccctgccaccttggctctgtactgccagatctggcaaccacagccgcttc

SEQ ID NO: 24382 - DNA, 1342 bp, Artificial sequence
  DNA replication origin
agggggggggtctcaagtaggaggcctccccatcacccccaccccagccccccaccacccccggcctaagcagctaccatggcccaggtggccggcgcggcgttgtcccaggcgggttggtaagtggcgagtcccgccggctgccgggccgcgggtgcgggccggggccccagggaggttgggttgggggcggcggggtgcgtgtcggggtaggcggaggctgtcgtccgcccccggcctctccccgggcccttcgggccggctccgcccccggcgccacgcggagccctgcgagttcccctaggtcccctggaggcggcggcggcggcggcctgggccccgggcggcgggcctgggccccgggcggcgggcggcgggcctggggagaggccgggggccgcgagccgggcgggtggcggcccagaccccggccgaccggagcgccggggaggacctgcagcgccgtccgcgcggcttctccggggagggggtgtttctgcagcgggatcgggaggcgagggctgggaacgaagtgcggcggagagggacgaacgcggccggagcccgcgggcccataggaagttgagggcagagcagagcacagcccgcgctgcggccggagccgcctcttcttaccccttatttcaaagtacagtgtggaccagtgtgaatctgccttccgcggcacacacacaacttctggagctaagaatgaccgcaatgtcaactcgtgggggtgctcggtagaacttttcttgaaaggatggtgttctgattttaagaggcctttcgtgtcaagattttcaggatttgaaaacaatacaaaattatgcgaaattaggcagtttctggaattgcggccattacggttgtaatcatcccgtttaattcagtaacgcttttcccaggcttgcacaggcacattctgggatgaagggtaggaacggggatgaaaaagatttgcaacggctctctgcaattactgctttaggagaaagagtgaggcattaaaagaccaaacaaaaccagggggaatagtgataaaccgtacgtacagaggaacagatgagtgcactgtggaatgggagggagagttactttcctaaagtggacttggaaagatggtaaggaaaaggctttctagcacagagctgctggagatgacacagggaagcgcttattgttttgcagaacctacacaagatctatatggttcgtgaaagatgtggatttgattttgtgaataaagtttttgatcagtagagggatataatcacaactgtgctttgaagaagcccctcctgattttaaaggcacttgtgttattatacaccccatttta

SEQ ID NO: 24383 - DNA, 1147 bp, Artificial sequence
  DNA replication origin
gtacaccttgaaggtgaggttaattaagtcctgttgtggggtttgagggctggaatttaattttgggggttttatttaatgtcagcagcaggttgcgtaataaaatgtatattgagaataagacggccttttgaccttttagggtctaggaccgtaaagcatctcagggttgctgccaaacgagccatgaactgggctgggtttttcatatttgctgaaagagcctaaattctaactgatttgggagaggtcggataaagaaaaaggagcgttaaccttgactatgcctttagcttcagccacctttttaagaggaaattgctggtgggggagggttagtcacggaatgaaactgcaaaccagactgggtgtgaggagtgtaggtgataaaaagattatagggtggaggagcggaggctgaggaagaattgggacctagctcagcctggcgaggagcagcctggggaggaggggagagatcagatgtgtctgtagaaaaggaagattagaaagactcagtgacgcttggggtgggactgaggggacaggcgggagggaaagaaggaagatttgggacgagctgcattgggcacagagactagggagggaccgatgtgtaaaagaatgcctggacgtcaggcaccagagaccgtttgcccattttacgacaagaattatttagatcttgcaggatggaaaaattgaaagtgccgttttctggttatttggaaccactgtcgagttcgtatgggggcattgcagaagaaaataaggcatttaggttttaggtcaggtgtgagttgaagaggttttaagttcttgagagcacaggctaagggagacagaggaatggagggtggaaagttgcccatagtgaaggaggcaagcccagagaaaagagagtagagacacggagggaaggggttcgggggttcttcccctccagaaaagcgggaaaggggtcggggtgcagaaacaaggggttggggcacagagataagaggtcggggcatggaaataaggaatcggggcacagagataagaggtcggggcgtggaaataagggatcagggtgcagagatcagaggttgggttgcggaaataaggcattgggggttctttccccctagaaaagtgggacttgccg

SEQ ID NO: 24384 - DNA, 1139 bp, Artificial sequence
  DNA replication origin
cggaatttaatttttggagttttatttaatgtcgggagcagattgggtaataaaatgtattttgagaataagacagccttttgatcttttagggtctagggctgtaaagtgtctcagggttgctgccaaacgagccatgaactgggctggatttttatatttgatgaaaaagagcctaaacactatctgatttgggataaagaaaaaggagcgttaactttgactgtggctttagctccagccacctttttaagagtaaattgctgggcaggtgggggagggctagtcatggaatgaaactgtaagccagaccaggtgtgaggaggggaggtgataaaaggattatagggtggaggagctgaggctgaggaagaattgggacctaggtcggcctggcgaggagcagcctggggaggaggggagaggtcagatgggtctgtagaaaaggaagagtagaaagactcagcaacgcttggggttgggaccgaggggacaggtgggagggaaagaaggaatatttgggacgagttgcactgggcacagagactagggagggaccaatgtgtaaaagaatgcctggacatcaggcacctcagaccgtttgccaattttacgacaagaattatttagatcttgcaggatggaaaaattgaaatgccattttctggctatttggaactactgttgagtttgtattggggtcaagcaacattgcagaagaaaataagatgcttagattttaggtcaggtgagagttgaagaggttttaagttcttaagaacacaggctaagggagaagaaggaggaatggagggtgtacggttgcccatagtgaaggaggcaagcccagagaaaagagagagtagagacacggagggaaggggttcgggggttcttaccctccagaaaagcgggaagggggtcggggcacagagatacgaggtcggggtgcagaaataagggattggagtgcagagatataagaggctggggcacagaaataagggatcggggtgcagagatataagaggttggggagcggaaataagggatcggggcacagagatataagggtttggggtactttcccctcccccagaaaagcgggacttgccgctaagggtgaaggagaaggggtt

SEQ ID NO: 24385 - DNA, 1380 bp, Artificial sequence
  DNA replication origin
tctgaagaggtatatctaactgcttcatgctgacagggggcctggttttggggaaaatgacagatctctctcagagtcctatgcataggttcccagtaaaagggaagtcatggagtcatggaggagagagaatctacaaccatgttttcacagacagagagaaagaagccagaggttcaactggtaagaattctttttttttgagccgcagtctcactgcacccaggctggagtgcagtggcgcgatctcggctcactgtaacctccgcctcctgggttcaagcgattctcttgcctcagcctcccgagtagctggcattacaggcccgtgccaccatgcccagctaatttttgtatttttagtagagactgggtttcactatgttggctaagctggtctcgaactactgacctcaggtgatccgcccgcctcggcctctcaaagtgctgggattacaggcataagccaccgtgccaggccaaaaattaaacttttatgcctcagaggggagtgtcccgtggtgcagagacatgattacccatctgcaaagagaggacaggggaggaaaaatgaacagcctggaggaactctgcagtgggtagctcctctctggagctggtagtcccaaagtctgctcagttctcagcagagcagaaaccacggagtggctagctccctgtgtccggaattggtgggttcttggtctcactgacttcaagaatgaagctgccgaccctcaaggtgagtgttacagttcttaaaggtggcgtgtccggagtttgttccttctgatgttcagatctgtttggagtttcttccttttggtgggttcgtggtcttgctggctcaggagcgaagctgcggaccttcgcggtgagtgttacagctcttaaggcggcgcgtctggagttgttcgttcctccctgtgggttcgtggtctcgctggcttcaggagtgaagctgcagaccttcgcggtgagtgttacagctcttaaggtggcgcgtctggagttgttccttccttccagtgggttcgtggtctcgctgacttcaggagtgaagctgcagacgttcccggtgagtgttacagctcataaaggcagtgtggaccaaaagagagtgagcagcagcaagtattgcaaagagcgaaagaacaaagcttccacagtgtggaaggggaccccagggggttgctactgctggctcgggcagcctgcgtttattctcttatctggccccacccacatcctgctgattggtagagctgagtggtccgttttgacagggcactgattggtgtatttacaatcccttagctagacataaaggttctccacgtccccaccagactcaggagcccagctggcttcacccagtgg

SEQ ID NO: 24386 - DNA, 1140 bp, Artificial sequence
  DNA replication origin
tgccgtgcgcccgcactcctcatcccttgagtggtcgatgggactgggcgccgtggatcaggggacggacggcactcgttggggaggctgggccgcacaggagcccacggacggaggggaggctcaggcatggcgggctgcaggtcccgagccctgccccatgggaaggcagctaaggcccggagagaaattgagcacagcagctgctggcccaggtgctaagcccctcactgcccggggccggtggggccggccggccgctccaagtgcggggtccgccaagcccacacccacccggaactcgcgctggcccgcaagcaccgcgcgcagccccggttcccgcccgcgcctctccctccacacctcctcgcaagctgagggagctggctccggccttggccagcccagaaaggggctcccacagtgcagcggcgggctgaagggctcctcaagtgccgccaaattgggagcccaggcagaggaggtgccgagaacgagcgagggctgtgaggactgccagcacgctgtcacctctcatgccttccacagctggtagtccagactctactcagctctcagcagaggagagcctggagtgagtagcaactctccgcagctggtagcccggaagtctctccatgggcaggtggtctagttgtctccttgagtctggctagttccgaggggttttatgagttcagagggaaggaagtgcatgctgattggttcatgggaggccatagacaggcccacagaaagcgtcataagttcacatccttgtccatcagcccagccctcaggcttcacgccatccttggcttgaaggtgaggcttcaaaggggacctgattcttttcaccctggagtttatctacctcctgccattgcctaggttgtttgtgctgagtggtatctgcaagccagtgccaggttgccctcagccccctctgtcagactccctcctgtggttgtcggtgcccaaagtctgaagggggcagaggcggcaaggggcgggcatgtcaatgctgtcttgagcacacgcacagccggccaggtcgtgacagcgcctgggctcagcctatattctgctccaagatcagagtgggtgctgggaacggagagaggccagacagccggagca

SEQ ID NO: 24387 - DNA, 1268 bp, Artificial sequence
  DNA replication origin
aaaggagcgttaaccttgattatgcctttggctccagccacctttttaagagtaaattgctgggcaggtgggggagggctagtcagggaacgaaactgtaagcccgaccaggtgtgaggaggggaggtgataaaaagattacagggtggaggagcagaggctgaggaagaattgggacctagctcagcctggccaggagcagcctggggaggaagggagaggtcagatgggtctgtagaaaaggaagattagaaagactcagcgacgcttggggttggtactgaggggacaggcaggagggaaagaaggaagatttgggacgagttgcactgggcacagagactaggaagggactgatgtgtaaaataatgcctggacgtcaggaacctcagactgtttgcctattttacgacaagaattatttagattttgcagggcggaaaaattcaaagtgccgttttctggctatttggaactactgtcgagtttgtactggggtcaagcggcattgcagaagaaaataaggcatttaggttttaggtcaggtgtgagttgaagaggttttaagtttttgagaacacaggccaagggagtagaaggaggaatggagggtggaatgttgcccatagtgaaggaagccagcctagagaaaagagagagtagagaaatggagggaaggggttcgggggttcttaccttccagaaaagtgggaaaaggggttggggcacagagataagaggttggggtgaggaaataagggattggggcgcagagatagaggttggggcatggaaataagggattgagacatagagataagaggtcggggtgcagaaataagggattggggcacagagataagatgtcggggtgcagaaataagggattggggtgcagagataagaggttggggtgcagaaataagggattgggggttcttgccccgtagaaaagtgggacttgccactaagggtgaattagaaggggttgaggggtacttgcccctgccccagaaaagtgggacttgccgctaagggtgaaggagaaggggttgaggggtccttgcccctctcccagaaaagcgggacttgctgataagggtgaaggagaaggggttgaggggtacttgcccctctcccagaaaagcagagaaggggtagaaacaaggagagaaggggttgaggtatttaccccttccccagaaaagcgggacttgccgctaagggtgaaggaccaaggcaggcgtccctgtgtggtctgacaccct

SEQ ID NO: 24388 - DNA, 913 bp, Artificial sequence
  DNA replication origin
tctcgcgtgctctccctctctcccttcccctctgcccctctctccttctccctctcctctctctgaactgaatttcttgatataactctcaataagcccagagggagggcgtgactgcccaggccccgcccccgggctctgattggcctgcatcttgcggcgcgggcggccgcagcccggcgcgagggagggagcgcggaacaaggcgctgactgtctcccagcctcccctcctccgcgccccctcggcagcagcgaaaacccggaaatctgatcctggccccaggagagccgggttccatgaggtgcactgagcatgctctgcagggtccggcgtgggagggacgcgctggcgctccccaggcccgggcggaagcggcgctcgcaggcgctgaaagcgagcgaccctctgagcccgggtggtccggcgggcaagggcggcgcgggagacccgcagggcgcgggcgcggatccggggaaccagggccaccgctgcgggcggatgggggtcaccgaggcggctcgtctccaggcgcacacttcgcacatctctttgctaagtgaaggggccaaaatgcacagatgggggagtctacccaggaacagaggcgcgagacgtatagccacccctgggttgggagcacgagccagcagatccccggagcgcgttaaacggacaacatgcccggtgctgcaaatagaggcttttgctggcagggacattggaaagaagggcggagagggagtacagcgaaaggtggggaccgcagaatttggaatctctgcggagaccggaaagaaaattaatcggagcacttcctacatgcagagccacggaaactgccttggaaagagaaagtggcagcgtctgggtcccctcggtcagcccgggccagtcggctgcgcgtgcgaag

SEQ ID NO: 24389 - DNA, 902 bp, Artificial sequence
  DNA replication origin
gcgcggccctctcctctccctgctcggggctcgccagccgcgcccgaccccctgagaagttggcacctcaccctgcccagacctcgctcttcggcccggtcctccccttgccctctgggtcccggggatgggctgctgtgggatgtgggaaagccgagcctcggggcggaggggacgagagggaggaggacggcgcctttgctggagccacagccccctgccccgggcgcgcgggcgcctggagacccctctcagcgctgctgtccgcgttcgtgcgctccccaggacctgggttccacggccagcctcccggcaccgacagggctgatctgtggcgccgagcggtgtcccgggggcggggggaggtcgtgacctgctccgcagggctcggggagcggggagacgcgctccgggtgagggccccgctgggaaaggcgagggagcggaccagcacccgaggagggcactttgaggtcgggagggaaatgacccgcgaagctgagagaccgggtccatcccgggggatgggctccggggacttgagctccgaagcccggaggggaagccagccgaggggaggggtctgtgtgttcgcgcatgtgtgcgtgtgtccgcgtgtgagcgagtgcgtgtgcaaaggaaataaaggggtacggtggccccggggcagatgcgagggcaaccagcaggttttcttcggtagggggaggtgaccgattgcccgagactcaatggaagctgaactggagagattaggaaggaaagccacggagcgcgctctctctcgatctctctttcgagttctctgtctctttctctccaaagtgtgttttctttctgtctttctctctcttttcttttcttaaaggttagtagcttaagcagcgagcaggtgcacactt

SEQ ID NO: 24390 - DNA, 914 bp, Artificial sequence
  DNA replication origin
tccctcgcctttcccagcggggccctcacccggagcgcgtctccccgctccccgagccctgcggagcaggtcacgacctccccccgcccccgggacaccgctcggcgccacagatcagccctgtcggtgccgggaggctggccgtggaacccaggtcctggggagcgcacgaacgcggacagcagcgctgagaggggtctccaggcgcccgcgcgcccggggcagggggctgtggctccagcaaaggcgccgtcctcctccctctcgtcccctccgccccgaggctcggctttcccacatcccacagcagcccatccccgggacccagagggcaaggggaggaccgggccgaagagcgaggtctgggcagggtgaggtgccaacttctcagggggtcgggcgcggctggcgagccccgagcagggagaggagagggccgcgctcgccggggcgcgcggctcgcgggcgcgcagagcgagcggcgccgggaaaggagcgagggcaggcgagcaggctggtgggaaggggcgcgggcggcgggggctatcccccccgactcaccttgcgttggtgcagtcattgtagagggtctcgaagtccttcctggagatgagtttgcagcggttcactcctggctggatggcgcccagtcccctcaggatgcgaacttgttccacattgcacaccaccggcgtgatctccagccgcttcagcttggtgtagaccgtatgcaagccccccaccaagtgcttcaggaacaggtcgaaagcctggggcaggcagatcagctcgcagccctccaccgtgaaggaagccactttggcccccctcagatccaccattttgcactcattattctgaggggtgttttccactggggacggggttgagtacacgggtttcccggggagggg

SEQ ID NO: 24391 - DNA, 1603 bp, Artificial sequence
  DNA replication origin
aaagcctggggcaggcagatcagctcgcagccctccaccgtgaaggaagccactttggcccccctcagatccaccattttgcactcattattctgaggggtgttttccactggggacggggttgagtacacgggtttcccggggagggggccgcagctgctgctgctactgctgctgctgctactactgctgctgctgctgctgctgctactgctgctgctgctgctgccggtgctggcgttgatgggggtgctggaagcgacgccgccgccagcgctgatgccgccgccgccgccgccgctgccgttgctcgcggccgccaggttggggttgcagttgctgccaccgccgccgccgccaccgccgcctccgttgccgctgctgccgccgccgcctccgctgccgccgccgccgccgccgccgccggtagaggtgactgtggccgccgccgccgccgccgaagcgatgggctccgggcggaacagagttggcccagaggacgccgggggtccgatggaaggagccggagacgaagtcgccgaagaggtggaggtggtggtgccagaggaggaagcagacgtggagattgggggttgaggggggaccagctgggtcggagggatcaaagccgccggcactgccatggtcacatataaggggaaacagacggaggagaagcgagaggaaaagttgccacacacccccgggaggggaaggggaaaaaaggggggagaaggagcgaggggggcaacaacaactccgggagagaacgagaaggagaaagggagagaagggggagaaaaggaggtgaaggtaataaagagcgagcgcaagaggggcgagcacgagaggcgctctggagaggaacgcacaaaagtgtcccgcaagtcgaaatgcgagtcctctccgggggctgggatcgagggctggtttgggggtgggggtggggcggggagggtcggctgttgttgtgtgggtctcgctctagcacaaagttaaggatgaaggtgaaaaggaggaggtttgaaggacttgggctctccctggcaagtacattgatcaaagattgagaggggaatgacagagagaaaatgagctgaaaagtgcaggctgccggctggacgagttgttgttgtcacacggtgcagaggggaggagctccggaaacttgaaataccctttgaagccgcaaaaacctcactcactagtattaacccaaattatccaaccaggaactcggagcagagactccgagagcgcgagacactggagagggagcgtgcgaggaaaggaggaggggagggggaggatacggaaagaaactgtgggagggacggagaggaaaagccggggacacagaagtggcgatcggaaaaggagagggagatcatctacttctcttctactactaccgttagattgcatgtctcacattccatttcgtccgcggggactggtaattttttccaaagcttctaaacaatcgcccgccaacttaaagaggagcctgagcgcgccgagctctctccttccaggatttaggatccatctccacgcgttttggcaatgagctagaaacgaaaacacagcccccacttcacga

SEQ ID NO: 24392 - DNA, 1121 bp, Artificial sequence
  DNA replication origin
gactaggggccgcaacgcctagcgcgcgcgacaaactacgcagcggcggagacaactctcaagggatagggccatcagccctgcggccctggcaggtccctaccaaagatcttggaagatgccgtttggggcactaaggggacctgaagtcctccccaggctcattcccgcctgggggccttggctctgggaaggcacgcaaggtaaagggagcgcaacggaaactcaccgtccatggtctcccgcaccgcattcagattcgccgccgcggccgccgccgccgccccagcaccgctgctactcgccatggctaaggccgagggaggcgggagaagggcctgacccggaactggagcgccttcctctctccgaggcaatcacacagcgcgtctcggcccacgccgggcaggctccgcccctcgcgctcgccgccggcgtgaggctgcgttgatttgaatttggagccacgttcctctgcgcggaacgtggagcgaggagttgccattcgaatttcctacgcggcctccgtgcgattggctggttcgcggatggcgggacgacacgattggctagtcgctcacaagccccgtgccctggttggcccaagacagcgcggaagcggggagttaaagagtctatgcctgtcgtggaagctggcctggcccccggagctccctggagtcggtactgggggcttcgttttgtacgcaccggtaggtacgctctttgtggtccctggcctttcctcctgtctgaatggagaggtttcttttcccagctcctgacttgcctgcccgctcgcccctggtgaatgggagcagtcagggagtaggtgtggaagagaggggcaccagaaagagtggccacgtagggttgggggcgacgcctccttcgcactccatccagggaagccggctgcatctcaaccttccagaagtagactcttttccaccccaccccgccaaggtgtagcctctgtagcctcctttgattgcaagtaatgcagtctccctttctatcccgggaggggtggaggggaggtcttggcgaaaggaggatttttggaggaaaggggaccccaggcagttaatttcctagcccctgtcaatcatacttctctg

SEQ ID NO: 24393 - DNA, 972 bp, Artificial sequence
  DNA replication origin
gcacttcccacctcgcccacgctggcttgggtcggcgagctcagcgcggggctgccggcggaggaggggaggtttcgggtggactcctcagacagcggcaggcagttttcgaaggcgcgcacgaaaagcaaaactcttccgctcttccacacgtaaacgccaacgtcctccgggcggccactttctcccgccccgccccaccgtgctctcaggctctccggagcccgctcccgccaccgccgacctccgcgagagaaccgcgagcgcacgtacctgccccgcgactactgacacttgacgcccgcctctatttcacccaactccgggggggcggggcccgatcgcctgattggcagcgccgccgcgaatcccgaggccccgaggccggccaggcctgagcggccagcctatgagcagggagagaggcagccagggccccgcctccgtcggcccgaccgcacccctctcgggccacgagcttcgcgcgcagggcggccgcgcagtttgtacacaacttctctgacagattgggctggcggagccgggggcggagggaagtagcggagcgggtggaatctgggaagagggggaattagggtggagacgcggagggagatctcttcgcactgttctctgccaggattaggaagaaaaagagtattgcacgtcttaggtgttgtgcaaggacctgaaactcaaaagctgaaacccagaaggcagctaggtaggggcgctgaggcttttagagatttgtctaatgagtgtgtacttttaaatatccaaaatgtacttctctttagcagaaaactaggggcggtgtgataaacaaatttaaaacagctcttgtccctgtgtatctttagcagtgagtgtatccgtttaacaaggcaaattcagaatgcctgaataaaagatttgatggcaagcgttttttcagatccttgcataaaagcctgggtttttcccactcct

SEQ ID NO: 24394 - DNA, 1786 bp, Artificial sequence
  DNA replication origin
gcccgacccgcgcctggagctgcgcccccgagtgcccatggctacaagggtgctgagcatgagcgcccgcctgggacccgtgccccagccgccggcgccgcaggacgagccggtgttcgcgcagctcaagccggtgctgggcgccgcgaatccggcccgcgacgcggcgctcttccccggcgaggagctgaagcacgcgcaccaccgcccgcaggcgcagcccgcgcccgcgcaggccccgcagccggcccagccgcccgccaccggcccgcggctgcctccagaggacctggtccaggtaggaagagccgctcccctcccaccgcagcactcccgggctcgggcgtgtcccgttgctgcgactcgcgggcgacaggggccgctccaggctggggcgtgcgtcggggcgcaccggagccggtgctgggtgggcagccccgccctgcacgcctggccggggccccgcgtttcgctgagagtaaatgggggggggggccgggggtgggaaggatggaggggaatctgccccggcgggtcggcctgggagaggtaagagggagggaactgggtgctcacgcgcaccttagttgtttttcttacacttgagggacgaaaccttgtaccttacgctcagttttacttaaattacgccttcgcctgtaccgctctccaatgccaaggcattggagccctcccccccatccccatcgtctcgggttaagtagaaacgcaaattggggtgctggggagaggttccccaaggtttcatacccggtggctcaacctgctttagaagcgattgcgggccgcgtttggaaaatgagagttaggaaagctaaggttgtgtcggagcgcttatttttccttaaaaaaaaaaaaaaaaaaaaaagaccgggggtgttgttttcttcgtgtgcacgtaaatttcctcccggagccgcgttgaaagctggcagttggcttttacacttgcccagcagccgaattagagcaaccgcctgtttctttcgcccacgcagggagtcatatagcccagaaaaaacttcccgggacttttagcctgtcccaaggaaaaaaaaattggaaacatacccacatgcaaacagctggaagagctaaaatcagaaaccactaaccgccgcgggagcgcagtgcacgaaagggtttagttcagtttatttcaagacacttcatttagtagctctttggcgtgtcgtatatttgctacccagcgcctactccgtggggtctgccagggtcttgctgtgagagggcagtggcgtttgtcagagatgtgactcacatgatgagagcgttaatttttatttttaaatcatgtctatccgggaaaccccgtccgcatccacaccaaggtccgagatgaaacgcatttgaaatgaagtagtagcagaaaatgactgtcttatttacctgttaaggtgccacagctaatatatgcgccattccatctagttggttttcttatctttcgaaatttccttttcagtgttaaaaaatgtaggcttaagttatactaggagagaagatagctggaaaaggcttgaggcgacttgttacaagctggtttatagcctagaaaagagatcaccgtttgaaaagtatttggttatttcagtttgtcaattttctgctctggaggcactaagaagataagggatgactgagctttttacagagtaggggggaatgtagcattggcccactgagaaggacatgataaatgttttgctgatgactgtgctagggatacagcagcctccccacc

SEQ ID NO: 24395 - DNA, 1846 bp, Artificial sequence
  DNA replication origin
gggcccctctgcccagccgcccctactgggaagtgaggagcccctctgcccggccagccgccccatccgggagggaggtgggggtgtcagccccccgcccggccagtcgccctgtccgggagggaggtggggggggtcagcccccctgcccggccagccgccccgtccgggagggaggtgggggtgtcagccccccgcccggccagccgccctgtccgggagggaggtggggggggtcagcccccctgcccggccagccgccccgtccgggaggtgaggggtgcctctgcccggccgcccctactgggaagtgaggagcccctctgcccggccagccgccccgtccgggagggaggttggggggtcagccccccgcccggccagccgccccatccgggaggtgaggggcgcctctgcccggccgcccctactgggaagtgaggagcccctctgcccggccaccaccccgtctgggaggtgtgcccaacagctcattgagaacgggccaggatgacaatggctgctttgtggaatagaaaggcgggaaaggtggggaaaagattgagaaatcggatggttgccgtgtctgtgtagaaagaagtagacatgggagacttttcattttgttctgcactaagaaaaattcctctgccttgggatcctgctgatctgtgaccttacccccaaccctgtgctctctgaaacatgtgctgtgtccactcagggttaaatggattaagggcggtgcaagatgtgctttgttaaacagatgcttgaaggcagcatgctcgttaagagtcatcaccaatccctaatctcaagtaatcagggacacaaacactgcggaaggcggcagggtcctctgcctaggaaaaccagagacctttgttcacttgtttatctgctgaccttccctccactattgtcccatgaccctgccaaatccccctctctgagaaacacccaagatttatcaataaaaaaataaatttaaaacaaaaaaacaaaaaaacaaaaaaacagggatgtgagccaatatctttaagtaaaaacagtcacatggaacttttgcaaaacacgcctacaacacacacctgtgtccaccaacctacccaggattctgacttcctgagatattaccatgttttccttgggattatcttggaataaatataaaggccaattaatatactggtgctataagcatattatatcttcatttttccgatgaaggctacctggttggctcttggagaggtgatctaatctatagtctcactccctaatctaagttcactttcaggtcagatgtccccagtttgtttctgattcaatgatctcatctccttcaagggagctactcatccttcaaaggactgctattaaaaaatcacgctggcgacttaccttacctactccagaggaaattttccagctctgaagtacagtattccctctgtgtattattctccacaatttcttccctggctcttgattggtcttggaaatactggctagtagtagcaggaataactctttcctaaaccttccattttcctacaagtgcatttaattaatctgtttcccaaagaagtttaaatgcttatgcttgaaagcatattttcaatgtttttcttactttatgactgccacgggacttacgtatcagatttaattaggagacatctatggggcataaaaagctcagggccagtgttgtccatcacactgtctttgtttatcctaacctttaccaagtcacatttattatgcacaatctaatgcactggacttcttagccattactgcttcccatgacttggatagttggattccatcttgtcag

SEQ ID NO: 24396 - DNA, 1044 bp, Artificial sequence
  DNA replication origin
ggaggcgagggccgggcagtgggtgttgccttctacctctgcgagcggggaggggttagtttcccacaggggatttcaaccatcacactcagagcccgcctcctaatcctcgggcggagcggctcgggggccccattttatggcaataaagcgacttagcgcctgctgagcgagcccctccccgccgccgcccccgccctcggccccaccccggggctcgccggcagcggcggggctttgtttctggggaggaggacccggagctcttttgtttgggggtttcttgttttcggccccccccctcacagcaccccaccccaccccaccccaagcgcctctccggtttcctgagctgcgggctgcgagggaggagaagcggcgtcctgcaaccccctcggctgggccccggggtaattcgatgcgggcctggcgaggctccccacactagaccggggctcgcaactcggcagcctccacccaccggcccaccctacatttagcgcatcatgtgatccgggtaagtcatttgcaagtacaacagttccccgggttgccccccattcatttcctgagaactgcagagagccgctgagaggctctgcgtgtgcgtgtgcgcgggtgacgccgtgtgtgtgcgagtgtgtgtgtgtgtgtgcgcgcgcgcgtgtgagagagagaaagggagagagagagggggactctgtgtgagggaaagaaaacaatttctcctgctctgcagcttctgttcaggtctgtgccgattccgtttcttatcaaaataaacaaccccctcctcttttttttttttttttgccatcccaaatcagaccgtattctcttaacgtgttttattttccttctgtcatctgctcaagttaaatcattttggttggtctgtgttcttaaagggggaaagtgctgggaagcgggagggggccggggaagggcgatgctgttgcaaagcaagtagcgtcggtcggattcgtggagaagaaagaaggaggtttcttccccacctcccctaattttttttttccagaagaa

SEQ ID NO: 24397 - DNA, 1494 bp, Artificial sequence
  DNA replication origin
gcctggcctcgccaccccagcgaaggggcccctgcctgcgccagttctgtgggaaagcacgcaaacttggaggactggggcagaggaagcgggatctgcagacccccgcggggcccgggggcggcggggaagggagtccagctccactgccccacgcccagagcggagccccaagaagcggacggcccggagccgagtccttgacgctctccccggcagcccctccctccccgcctccgcgccccggggagcggatccgcgggattgtggggcgggagagggaggaggcggccgggcggccctgcagttcccgcggcggctcggagggcgcggggtcagcgccgagccggagggtcggcgggggcggggagcagacggggcggaagcggccgggcgggcggggcgcgcggcggacggaggcgggaggctgtgggcccgcctcctcaccatcctaggtgagcgcggcgctccgggcacgacagtattcccctgccccgcgcccccggcccggcccgccccgcgtgggaaatcgccagggctgtgggaaggccgggaaggggaagtttgtgtgcagagagaaagctttgctgtactgtggcgtggagtggggtgggaagagaaacaagggagaggccgagaaacaggaaatgagaacgaaggcacgaatgtgagccagggccagctgggctccccatcggtgtggcggtttccagccacttcaggcgcggtgtgcgttcctaatgacaacaaaggcggcgtctgcctggtgcgttctctgcctcttgccactcctaggttctggggaaaatgggatgggtggtccaacctagaggaggggtcccacagcctaagatgcgtcttaggaaggcagcaggattcagaggaggggtctgtcctggtcttgaggtttcgaagaggaagaaatgtctgaaatttgtggagcactgctcgagtgaagtagcctcagcggcgggagcgggaaggcgcgggcgcagcgagggcgtcgggaacccagtgggactcgggggtgaggggttggtggttgctgcggtgcggtctctgttccggggaatgcagccgcaactcccactccctgatccgatcctgggcctagggtaaacagccccttacactccactacacccggatggaaacgacgtgaaaacacaagtttgaaaagcagcagaatatcaacaactgcgcaggatttcaacgagaaacttgcctctactagaatcactgtgaagtttccctctaggtggggcagggagtgaaggaagggagtttcactgtaagggtggaaggatgctgtaagaaattatgtcatcgtggcagttcttgtactaacagctctttctcgagtgagctgagtggcggatagaccataaatatattctatagcgagtgcttctgcacgtggaaaagcaaactgcactgccttcctatggcataagccacgggcttgttaggagagtgatgaaagatagaaaacaa

SEQ ID NO: 24398 - DNA, 864 bp, Artificial sequence
  DNA replication origin
caggcgcagccagaagcccgaggcgggcggctgcggggcgccggcggcccgagaggtgatcctggtgctcagcgcgcccttcctgcgttgcgtccccgcgccgggcgctggggcctcggggggcactagtccgtcggccacgcagcccaacccggcggtattcatcttcgagcacaaggcgcagcatatctcgcgcttcatccacaacagccacgacctcacctactttgcctacctgatcaaggcgcagcccgacgaccccgagtcgcagatggcctgccacgttttccgcgccacagaccccagccaggcaagacaggggctcggaggcgcgggggcgggctcggccttgggggatcggggagcagggcgggaggggcggggaccccactttaaggaccgactgaggtttggctgcaggcgcgcgcgctccacgtggcgcgctcaagcgccggctggccccttccctggaccttgggagtgggagagaaggcgttcgggggctgggcgagcggcgggagcggccggccggctacagcagggacccggagggaaaaggacaacggtcccgggatggagggggagctggcgcgtccaaggagcacgcgtggaggagcgcccgtcccgggaggacggcggtgtctggggtgtgaccggagatggcttgcttgccgtgtgtgtgtgtgtgtgtgtgtgtgtgtgcgtgcgtgtgcgcgcgagcgcgtgtatgaacgcagaaggttgggttcctagaggtcctcactagttctcaatcgcagtcaaatccttaaccggtttggctggtcgcgtcatcttcgcagcagcacctgcaggtctccggtctgggaggcaatttccgagcgg

SEQ ID NO: 24399 - DNA, 1071 bp, Artificial sequence
  DNA replication origin
tccccagcgggggaggtttcttggccgggaaaggtacaattgtgtgcagctatttctggtatgtcaagcgggccgggcggccgcgagccgggaggggcgccgctctcaggggcccgggagagggcaggggccaggcgggcgggtgcgggaaggatgcgggcgcgggggcgcatcctctcggggcggagccgcgggctgtgcgggaaccccagcggggcccgggccgcggcccctggcggactgtggcatctcccgggccagacagtctgaccacagaggcggccgcggccgggagcccggggagccaagggaggggcagacggaagcggcgactcggcgggccccgggagggcggtggggtgggccggggcggggccaccgcggggaggacggcggcggcgctgcgacttttgaagtccaaactgtcgtcggggctggtgccgcgcgctgccgctgggcacccgcttcgcttcccgcgtcctgcctgactgcccgggtccccgcgggccttgggtcgctttcaggagtttagagaaagccaggtcttcacgttcgtgtaggttcgagaccttaacgaactgcagagcgcaacaaagggaactagagccccggcgccttcgcagccggagcggaagccggagttgtgggaggcccgcgtgccctccccgcccgtggggcccagacgcgcggggacaacccctcccctccacgcatcccgagtctctctctccctcccttgtcctagccatggaagggctggaggaggcagaggccaactgctccgtggcgttcgctgaggctcagagatgggtggaggtgagtgcctttcactgctttcccttccgcaggtgttgactgcctcggggcggtcgtcgcgaggtgactgcagccccagtcactctgcactttagcctccttcggcgacccagccgacgtgaacaagctggtttgcttgtgcacttttggggactctgcgggttctgccgctcctgcatcttatgtcccgcttagattggcgctgccctaacccccgccccccgacggtgtcactggcttcctagggcagaggtg

SEQ ID NO: 24400 - DNA, 948 bp, Artificial sequence
  DNA replication origin
gaaggggaggggaggggaggggaagggagggaaggaggggaggagaagggaagggagggaaggagggaaggagggaaggagggaaggaaggaaggaagaaagaaggggaggggaagggagggaaggggagggggaaagggggaaggaaggaagaaagaaggggaggagaggggaagggagggaaggaggggaggggaggagaagggagggaaggaggggaggggaagggaggagagtggaggggaagggaggagagtggaggggaagggaggggaggggggaggcagggaagggagaaggggaggagaaaggaaggaggggagaggggagggggaggggagggaggaccaaagaaagaaaaaaaccaaaggaaggaaagtctttactttgtggctactaaaccagctgaataaaagcctgcagtcttggtagccatctttgtgtttgagagagaaagtgattcttgatgacactggctgactcacccctgaactccatgtcttcctccaaaatatctcacttatgagagccagtaaatatgcccttctatttaaattaacttgcaactgaaagagtgctgaacaattcagatatcaatcttgggattcccagagctacggtgaggctcaattaagaggttcacagtgttcatgctgagtctacattcaacagaaaaccaccgtaggaagacattaatggatgactgtacattgacaagcactagcaggacctgaccgttgacccatgtgagctgtgcaccaggaaggccccagagacttcaagtaatttcttccacctgctgcctgctacctgaaatgccatcatggagcatctgtgatgttggtagggggtagagggcaggtgtggagggtgttgcagagacttttgagaatctgaggaaagctatcaatcctctttgtaaataagcaaaaagatttgcatgcaatt

SEQ ID NO: 24401 - DNA, 1095 bp, Artificial sequence
  DNA replication origin
aatcaagggcttctggcgagcagcagctgaaaagggcgcctctgcaggcaggcggatcactttctataagtttaagctacaggctgagaccttttattctgtacgagaaaggatcctttactgtcccacgcactagattcttctactttacgtgtaacttttcaaaactttattagtttagttactgaactgcctccatggggtcctaattccaggctcagaatcttccatccagccttctaaaactctaccttcaaaagaggtcaaaaagactgtgtaatgaccttgtaaaacactaaccccagacagtggaaccaatcctgatctcttaaacccccagtgagtcataagagcttgagaagatttcaaggaaatcttccgcacattggacacggtccaatcaggttctgaacaattcaatcatcccccggtctgtggccacactcccccaatagatccaaactgaagtaccatctgggggaggggtggtttgaggcagggagtagagaaagcatggagtggtaggtgggggtggggtgggggttcctctgggttctctcggttcaggaggtccaaagaagacgaagcagcccagaggatttgcggctgcaggttctgtagtggagggaaggtgggcggacaggtctcacccagctactactggagggggagaatgggagggcagcagccaggggacaaaggtgggacaagaggctctgtaatcatctctcgggcaggagaaggactgggcgctggagtggcgagggggtctggggagctcactccctgcagaagacgtactcggtgtagctggtccagatcttgtcctcgctctggtcggtgctgctggcaaaggcgcaggtgcccgtggagctgcacgccaccatgtggaagcccgactcggacagcttgtcgaaggcctgctccaggaagttgaacttgaggtaatagcgcgaggtgtagcgctccgggggacggtcggggtcccggctttcgttcagggtgtccccaaacacctccttggccagcgacgtctttccgcaaacggtgatgcgcgccactcgccggaacttggcgtccgcctgcgcgtcccgc

SEQ ID NO: 24402 - DNA, 1397 bp, Artificial sequence
  DNA replication origin
tatcaaaatctgtacttgcaattaagataactggtttgggggttgatctcatttcagcacactgacatgagcgcggtaattgttgagcagatataaacatttcaaaataaaaatgacatttatctgtgaggagactgtgaagctcactgggtagttacacagaaggataaattttatcaagaacaaagatcttgcctgatttatcctgatgtgtggtctatacttcaaactgatgtgataactgcgcagacccctgaccctttgcttattgggctacactgaaagcgctttggagattattcgcctttgcattcctcactccctggtgccctgcaaataatagcaggtacacaagaaacattcagtgacccaatcatttcttgacaccctcctctgcactcttctctttttgcagcattcaggagctcttacttattttcatacccaaatcagtgatcagataatcactcataaatatgacatttcagaacgtgctgggagcagcgcagacagtgtgtagggagccatccagaggccccacccacctgggaagccagggaaagcttccagggggagggggcggttctgtgggctgcagtccgagggggaaaagcaaacgtgtaggcagcaggagttgagagatgggatccagacaagggccttcagatatataaatatccctttctgagactgacgggaacttggacagggccgaagagtgaccgaggcatgcgggagagaaggggcgcctggacttttggaaggataaacatgcaggcgccaaaggtggctttaaaaattacgttagatctgcaactgttgtgagtctaagggcgcgattcaacgaaggctgaatgggacccggagaccgaacgttccggagtcttaccccttcacttcgaagtgaagtgcctcgaaggccctgcgggaagagggaattgcaattaagagcagatttgaagcttcatctcattttgtctctgcagccagaaaataaactatcgtaaagcatcctactgcgggacactgaggtttgctttttgtttctaggtttatttatttattttccaggctggctgcaaggcaacttgaacaaaatctggctgcgctcggactggggcggctctttcgtctctccaggtttttcgcgtctctctactttcagtgacacgacaaccaacgatggcaggccgcagctgcactgctggaagcgcccagttccgcaggcgggagggccggaggcggccacgcatttccactcccggggcgacaggcttccgaaagttcacgtcctccttccagagtccttgggtgcgggctggggcgagaggggagggggcgcggtgactgtccctccaaggagctgtcttccgaagccgccaagtctcgggcgggtc

SEQ ID NO: 24403 - DNA, 894 bp, Artificial sequence
  DNA replication origin
gcgccctccgcgggaccagcgcctcggatgcgggcggagcgcggggggccgcggctgcgggagcgcgaagcggggggccaggggcgcctcatgtgagagccgcgggacctgcagccgccgccgtccccggagcacggggtggtgtgtgggggaagccgcccccggcagcaggtaacggcggaggggcagggccgagccccgctgcgacggcggagccggggagggaccgcggaccgtctgtgggcgggccggggtggggtggggtgggggggggcgcgggggccggggcgcgcgcgggccgctcctcaggagtgccgggcggggcgcggggcgcggcacccagaccttggagcttgcttgggggcgtttccccgccgtgcctgcttccaaacatgtcaacaaggcgtggtgcgtgtgcggcggccgcctgcagcctgcccgcgacgccgccgctcccgggttcgccgcggctcctgccaggctttatgacccttggcgggggctggtgacaggcaccatggagctcgcactctgtgggctctcccggcgtcggctacgcccgtgctggtagcttgagcaatgaggcactgaaatgtcaaagcaaactgcccagggtggggcgcatgagaaatgtcaggggaagccagtcggtggggaggtggcgcagggaggaggggacgcccctgccgcttagccaggcgaaaaacttggtcaacttgtgttgagcggattcgcgtctgcctttggcgtgggcagtcctttaggtggggttgcagacaggggtcaggaagcagcccagtaaatggtctgtatctccaagctgagaggtgagagagatcatttttattttgtcgttgctaatgatatccagttgagtgacccagattttttaat

SEQ ID NO: 24404 - DNA, 1118 bp, Artificial sequence
  DNA replication origin
cgcgtgtctgcccgcccggcccgcggggacgaggcggcggcggcggcggcggcggcgaggatgatgatgtgcgcagcgactgcctcccccgccgccgcctcctcggggctcggcggggacggattctacccagccgccaccttctcttcctccccggcgccgggggcgctgttcatgccggttcccgacggctccgtggctgctgcggggctggggctggggctacccgccgcggactcccggggtcactaccagctgctgctgtcaggccgggccctggccgaccgctaccggaggatttataccgctgcgctcaatgacagggaccaggggggcggcagcgctggacacccagcctccaggtgcgtccccagggtgcccttccttgcgccccatgccgcccttccttgcgccccatgccgcgcgtgcacccgcgtgtgtgtgtgcttgcgtgtgtgtacctgcgcatttattgagctttcagtccgctctggatgtctgttggcaggagcacttatcgagataggagggtgcggtggctgcagtttctcgtgtgtgtgtgtgtgtgtgtgtgtgtgtgtgtgtgtgtgtgtgtctgcctgcctatgtggggggatagtgaggggtggtaggggaacctgtgatgctggaaaaggcgatggtgctggtcggctgtgacacgtgtgtgtatcgttgaggtaggaggtggcatgggtagagagggtaagaggatgatacacgaagagaattgcaacagtggcaagggaagtggcgttttcagtgtctctgccgcaatgttatttgcacgtgccgcctctcccatgacattccttccagccctttccacctcccttcaatctgcctttcaccaagaggagtcatggtatagattggttgagttttggataagcaggcccgagggataggcgtgaggtttgctttaaaaagatttatgaataagggacgcagatggagatctgtgtggatgcgaaaggtgtctgatagagatttttagagctgtactttgataaccgggccttttggtcttctagaaatgaggttgcagttactcttgtgatctgatgtcccatcggccatttctcttcatcctctgttcg

SEQ ID NO: 24405 - DNA, 1036 bp, Artificial sequence
  DNA replication origin
gccagggcccggcctgacagcagcagctggtagtgaccccgggagtccgcggcgggtagccccagccccagccccgcagcagccacggagccgtcgggaaccggcatgaacagcgcccccggcgccggggaggaagagaaggtggcggctgggtagaatccgtccccgccgagccccgaggaggcggcggcgggggaggcagtcgctgcgcacatcatcatcctcgccgccgccgccgccgccgccgcctcgtccccgcgggccgggcgggcagacacgcgcgcgcacacacagcccttttccaacgacgacggctccggcggcggcctctggctcccgcagcagggagactacaaagacagcgacctccttctcctcctccttcttctcctcctcccccccgcgccgccctcgccgctactggggccgctcatctaaccccgccaccccgggaatgtgaggaggaggcggtgccgccactgccgccgccaccaccgctaccaccgccaccaccgccggggctacccgcaatgggaagctgccggcctcacagagcatgcgccactcctcgcacatgctcagtaactgccgccccttttcctccccaccccctctccgccaccactccctccgcctcggggctttgggtttggggctgttgggttgtgcggaatctgaagtagtccacttctccgggttttactggcagcttgaagaagagtaaggaaagtgctggggaggctgtcagctactgacgttcgacttcaggttccctccaggtggaagaacgaggaccagaaagcaagggggaacgtgcccatcgccagaggaggagtggcacgctcttctgctacctcttctccaaggctctgctgccaacaggaagatttactgtgaattgtgctggttaattcagagtttaaggcagagaaaaccatcccaattagaagtgcctttagcgatcttattttatatggtttttgtcattaggatttacgcttgtttaacacagcttttacttacaaagacaggtagt

SEQ ID NO: 24406 - DNA, 960 bp, Artificial sequence
  DNA replication origin
tgcttctccagcttgcgcaccagctcctgcagcttcttcacctccagctccgcgttcaccaccggcccggagcccgctccagagctgacccctgccgaggcgcatttcacctgctccgccatcatcgtgggccccgagggcgccgcggccgccggggagtgcgcgccgccgcgccggctcctcgggccacggggaggctacggctccttccctgtcgccccggcctggggggccgaccacgcgcgggctgaggccgagccggcggttcgcatcagcaccgggccctcgcctccggccgcggcagccaccaccgagctgatctgcacatgctcagtgcgtccctccagtcccctgggcgtcgcggcggctccgggttttagccgcggccccggagcggggcggggcaagagcgccgagggggcgggtgggggggggggggcggagaaccgtggggaagcccacccagggggcggggccggcagcccgggttggggccggggagccgcacccaccctcgctacctaatcccaggggcctgattggacctggcctgaactttcccgccacaagcacctcctcctgccgcttggtgggacagtgaactgcgcgggtctctgaggcggttgcggggaccagggggttcccaaagaagcagctgcaggtgctggccctcgagtagtgcaccaccggcccgctggtttgctcccttcccagctctctgttaggctccgtgacagcacttaatagccactggctaacgaatcctatagaaaacttaaaggctggggatcgttattctaaaaaccgaaaagtggagatagggggaacagaaaggctttgggaccatgccactcatgttctcattggtaatagagaagcaaaatggtgggagacaggagaccgagaagaaagagaagaaagccctctctctaagaggtagagtggccagctgctaaggag

SEQ ID NO: 24407 - DNA, 938 bp, Artificial sequence
  DNA replication origin
caccgccgcggcctcagggggcctggggctcgggctggcgctgggcgcggggggcggtggcggcagcggtagtggcagcggcggtggctccagccccgcgttcccgggcaccttctgcctgcctagccccgcgccctccctgctttgcagcctggcgcagccacccgaggcgcccttcgtctacttcaagccggcagcaggcttcttcggcgcgggcggtggcgggccggagccggggggcgcggggacgccgccaggggcagctgcagcgccgccctcgccgccccccacgctgctggacgaggtggaattgctggatctggagagcgtagccgcctggcgggacgaggacgactacacctggtactgcctggctccgctccttccccgagaccctggcctcgggggcttcgggcaccggggagcgggggcggggggcggacgggggtcccctcgcggcagccggggtgactccccgcggctcccggaggggccgacccagcaggtgttgagccaggcggtgacacttcccacgatgaggcttctcatgaaggcagaaacctgttttctaatcgctccgactgcggatgaaccggcccccccttccccccatctgccatgggttctgctatttgctgattgttgggtcccaagctcctcgttagcattaagtgcaaaatccatgtcatcttgtctttttgctcagtgctgctcttttccccagtgttttcggagggatgacgggggatggtaggggttggcctctgtctgcgactgttactgttctttcgttttaaacgaacgctggacaggatttgcgtgctcttcctcctcgggtggcatcggaagccgcgcagtgatggatctctctttatagagaggttcgttcttgctgtttgaattttgcagtcgtgtgcccttttgcgttgcattttcat

SEQ ID NO: 24408 - DNA, 1866 bp, Artificial sequence
  DNA replication origin
ggcgcgggcggcgcgggcgcggcggccggcggcggcggcgcccacgacggcccggggggcggtggcggcccgggcggcggcggcggcccgggcggcggccccgggggaggcggcggtggcggcccggggggcggcggcggcggcccgggcggcgggctcctgggcggctccgcgcaccctcacccgcatatgcacagcctgggccacctgtcgcaccccgcggcggcggccgccatgaacatgccgtccgggctgccgcaccccgggctggtggcggcggcggcgcaccacggcgcggcagcggcagcggcggcggcggcggccgggcaggtggcagcggcatcggcggcggcggccgtggtgggcgcagcgggcctggcgtccatctgcgactcggacacggacccgcgcgagctcgaggcgttcgcggagcgcttcaagcagcggcgcatcaagctgggcgtgacgcaggccgacgtgggctcggcgctggccaacctcaagatcccgggcgtgggctcactcagccagagcaccatctgcaggttcgagtcgctcacgctctcgcacaacaacatgatcgcgctcaagcccatcctgcaggcgtggctcgaggaggccgagggcgcccagcgcgagaaaatgaacaagcctgagctcttcaacggcggcgagaagaagcgcaagcggacttccatcgccgcgcccgagaagcgctccctcgaggcctacttcgccgtgcagccccggccctcgtccgagaagatcgccgccatcgccgagaaactggacctcaaaaagaacgtggtgcgggtgtggttttgcaaccagagacagaagcagaagcggatgaaattctctgccacttactgagggggctgggaggtgtcgggcgggacagaatggggagctgaggaggcatttttggggggctttcctctgcttgcctcccctcggatttggagtgtccgttatcctgcctgcatttggggagtcccttctcgctctctttcctccacccattctctgattttcctgcctttgctgtcccctagccttgaggactggggtgctgggtgtggggattggagtatagggtaggggagaagggggggagcattcgggggagtggggagtggggggaaggaaagcggagacccgagcaggggttttaaggagcaggatggttctggggtttgggtggggggagacgcgggaagggtaggaaaatggactgtttctgaccagagacacttacctaaatatcctggggaccaaggaactatgtacaaaaacaaacctaccaaccaccaaaaactagacaaataaagacaaactaaaacaaaacagaacaaaagcaaaggaaaatgctttagaaattttaactccggggagccataatctgcaacttcattttcccccatagaagagaaaaaagagcaccaccattattaccacctccccaaccctacacgcacgaactgagtcgaaaaacgaaaaccaaacgagcgagaagttgaagttctgggtatcaaagctagttgttctgtctgcgtgtttaatttttccctctctcacctccaccccatccatatcctctttatttcctccgttccaatgagaggcctatggctgctctccaatcccgggaagtgagtgggagcacagctgaaaagagagggtcagggggaggctggctgcttgcttaggtggaatccaagttttcccgtggccctgcctatactctggtggcctggtcctgttggggtgggggtctttggagagaagggcatagtctttgagctactaaaaagcagaattccggagcttcgagatatcttattctaggaaaatgaaacaatttta

SEQ ID NO: 24409 - DNA, 1238 bp, Artificial sequence
  DNA replication origin
agcgctccgcgaacgcctcgagctcgcgcgggtccgtgtccgagtcgcagatggacgccaggcccgctgcgcccaccacggccgccgccgccgatgccgctgccacctgcccggccgccgccgccgccgctgccgctgccgcgccgtggtgcgccgccgccgccaccagcccggggtgcggcagcccggacggcatgttcatggcggccgccgccgcggggtgcgacaggtggcccaggctgtgcatatgcgggtgagggtgcgcggagccgcccaggagcccgccgcccgggccgccgccgccgccccccgggccgccaccgccgcctcccccggggccgccgcccgggccgccgccgccgcccgggccgccaccgccccccgggccgtcgtgggcgccgccgccgccggccgccgcgcccgcgccgcccgcgccggccatgagcgcgagcgacggcgaggagatgtggtccagcagatcgccgggttcgagcgcctggtggtggtggtggtggtggtggtggtgcgccagaggcaccgtggaagtggacgtgcacggcacgctgttcatcgtgtggtacgtggcgtccggcttgaaaggatggctcttgccctgggacacggcgatgtccacggccgccagcgcctcggcccgcgccagcagcgtctcgtccaggctggcgaagaggttgctctgcagctgcaggcgacacaaaccaaaccaaaaaaaccacaaaaccaaaagagcaaaacaaaacaacagaagaaacacacacacaggccggaaagcacagcatgcgaagggcaaacacaaagcaaccaaaataacaacgggtttgggggcagtggagagcgggaaagacggagagggggcacattgacgaccagggagggggcagacgagaagggatgggagcgtggagagggggacagaagtagggagaaagggggacacaagaacacattccggaaacgggcgtgggagacgaaaaagagggaaaagaagaaatggaaatgtaactcgcagctggggacccgtgtcacacacccgagcacgcacagagactgcctttctgaggcgtgaaattaacagagaaagtagagggaagtcgagagtcctggccccagcgctccctactccgatcgcaggcgcctgacgcggaggcagaggcagacaggaacacgacattaagggccgccggacaaaacgtgcctcgctgcgggactgctctacaccc

SEQ ID NO: 24410 - DNA, 658 bp, Artificial sequence
  DNA replication origin
cacccttagacaatagctggaccttctgatctttccagaccacggtgggaaaggtgaggcgggcagtgcgcatgcccgggtagctacaggtgcatcacctgcgctgtccttgctggtggtcactataagagcggctcccacgcgctggtcgcggccggacgagcgcgcgcgcgcgcagacgcacggggccgccgagaaggagagcgcgcgtcagacagacggagacagctgatgcctgtcagcgcggtggggccgcgagctctcgcgagagctccccgggacggccgcgagaagtggggctcaggtgttagaggagtgcatcccgtcggcgcgcggggctagagctgtcggagaagcgggaccgcgaggccggcgcgcggcgctctgcgcggtcagagggagcgcctggcagcagcaggagcagcagcagcagcccgcggcggggccgccgccagccgccgcgaccgccgcggctgcagcctccgaagggaggccgggtgagccggcgtacgcactttcccgcggactttcggagtgtttgtggatatacatgccaagccgccacgatgatgtccatgaacagcaagcagcctcactttgccatgcatcccaccctccctgagcacaagtacccgtcgctgcactccagctccgaggc

SEQ ID NO: 24411 - DNA, 1358 bp, Artificial sequence
  DNA replication origin
agatgtggctggggtttgtctcacagtggaggcaaggaattgcaacttttttctattattgtacaccttgaaggcgaggttaattaaatcctgttgtggggtttgagggccagaatttaatttttggagttttatttaatgtcaggagcagattgggtaaaaaaaatgtattttgagaataagacggccttttgaccttttagggtctagggctgtaaagtgtctcagggttgctgccaaaccagccatgaactgggctgggtttttatatttgatgaaaaagagcctaaacgctatctgatttgggataaagaaaaaggagcattaaccttgactatgcctttagctccagccacctttttaagagtaaattgctgggcaggtgggggagggctactcacggaacgaaactgtaagccggaccaggtgtgaggaggggaggtgataaaaggattatagggtgggggatcggaggctgaggaagaattgggacctagctcggcctggtgaggagcagcctggggaggaggggagaggtcagatgggtctgtagaaaaggaagattagaaagactcagcaacacttggggttgggactggggggacaggtgggagggaaagaaggaagatttgggatgagttgcattgggaacagagactagagagggactgatatgtaaaagaatgcctggacgtcaggcacctcagactatttgcccattttacaacaagaattatttagatcttgcaggatggaaaaattgaaagtgccgttttctggctatttggaactactgtcgagtttgtattggggtcaagcagcattgcagaagaaaataagatgcttagcttttaggtcaggtgagagttgaagaggttttaagttcttaagaacacaggctaatggagaagaaggaggaatggagggtggaaggttgcccatagtgaaggaggcaagcccagagaaaagagagagtagagacatggagggaaggggtttgggggttcttaccctccagaaaagcgggaaaagggtcggggcacagagatatgaggttggggcatggaaataatggattggggcacagagataagaggttggggcgtgaaaataagggatcggggtgcagagatataagaggttggggcatggaaataagggattgaggcgcagagatataagaggtcggggcatggaaataagggatcggggcacagagatacgaggttggggtacttgaccctcccctagaaaagcgggacttgctgctaagggtgaaggagaaggggttgggggtttcttgccccccagaaaggcgcagaaggggtagagacacagagagaaggggtcggggttct

SEQ ID NO: 24412 - DNA, 1318 bp, Artificial sequence
  DNA replication origin
gcctctactctattattgtacaccttgacggtgaggttaattaagtcccgttgtggggtttgagggccagaatttaatttttggagctttatttcatgtcaggagcagattgggtaataaaataaaatgcatattgagaataagatggccttctgacctttcagggtctagggctgtaaagcgtctcagggttgctgccaaaagagccatgaactgggctgggtttttatatttgatgagaaagagcctaaacgccagctgattttgggagaggtcagataaagaaaaaggagcattaaccttgactatgcctttagctccagccacctttttaggaggaaattgctggacaggtgggggaaggctagtcgtggaatgaaactgtaagctggactggatgtgaggaggggaggtgataaaaggattatagggtgggggagcagaggctgaggaagaattgggacctggctcggcctggcgaggaggggagaggtcagatgggtctgtagaaaaggaagattagaaagacttagcgatgcttgaggttgggactgaggggacaggcgggagggaaagaaggaggatctgggacaagtcgcactgggaagagagactagagagggaacaatgtataaaagaatgcttggacatcacgcacctcagactgtttgcccattttatgacaagaattatttagatcttgtaggatggaaaaattgaaagtgccgttttctggctatttggaaccactgtcgagtttatattggggtcaagcggcattgcagaagaagataaggcatctaggttttaggtcaggtgtgatctggagaggttttaagttcttgagaacacaggctaagggagaagaaggaggaatggagggtggagaagataaggcatctatgttttaggtcaggtgtgagttgaagaagttttaagttcttgagaacacaggctaagggagaagaaggaggaatggagggtggaaggttgcccatagtgaaggaggcaagcccagagaaaagagagagtagagacatggagggaaggggtttgggggttcttagcttccaggaaagcgggaaaggagtcggggcatggaaataaggggttggggcacagagataagaggtcaaggcgtggaaataagggattggggcacaagagataagaggtcagggtgcggaaagaagggattggggcacagagataagaggtcgggacacggaaataagggattgggggttcttgccccctagaaaagtgggacttgctgctcagggtcaaggagaagggcttgaggggttcttgcccctgc

SEQ ID NO: 24413 - DNA, 1008 bp, Artificial sequence
  DNA replication origin
ggaggcgaggcagcgaggccgaggcgggggcggtgggtgcggaggaggaggaagaggaggaggaggaggaggaggagggtctggggcccgcccggggggggctcgccgttggcctgcgccctcgcctttccggaggaggcagggagctctgcggcggccgcggcagcagtaaatggcgtcatgtggatccgaggcggaacagagcagttgttgtcccagaggatatatcgcatccggtcccagctcattggctccgcggggctacattcactcacactccagcgcccgccagcgctccgagccgcaggaggcattcaaaagggcaaccgcgccgccccgcgcgtccccaggccggtcctgccgcccgagcgccgtcacgcggggcgcccgcggggccgggctgggcactgcagggtcagtttatctagtttcaaggaaacactgaccttaaggtttgcccagaggcaatgaggacgagccagaggctcgagctgacttagggaactttctccttgccaccaggaaaggggaatgaacatttaagactaatctgggccacgcagtgttagcatgaaaaacaagttgcaggttttaagactttatccagaatccatttcaagtctacctctccccttttctgttcccctttgcggagcgggtgacgggggctggggcggggggagaagaagggggaggggaaggggagcgggaagtgaggtgggagggctattggtttattctttgtctactggattaacccgattatacaccaggcaccagcacaaaccgcctcccccacctccgagccttgtacgggaggaacggaatgcagattcgagtttcaagtaccttctgctcttgctgggatttgcttttgattgtgtcgacttgtagtttttccgtttattagaatttcatttttaaggggggttatctatgaatggaggctttttgaagagcttccttactattttgcttcatgcagtagctaaagtctacagtctaagc

SEQ ID NO: 24414 - DNA, 1143 bp, Artificial sequence
  DNA replication origin
ggctgagtccaagcccaggtcaaaacatgaagtaagtgaaggtaataacctttagtatcttcttagacttccctgtcagctacctctatcctctcctttggtggtgcatgttaataactggcttcctggggttaaaaaaataaattccaacatctggggatgtctgtgttgtaaacacattgaccacggctaattctcttttcttttctttcttttttttttttttttttgagatggagtctcgctctgtcacccaagctggagtgcaatggcacgatctcagctcgctgcaacctctgcctcccaggttcaagcaattctcctgtctcagcctcccaagtagatgggattacaggcacccgtcactgtgtccggaattggtgggttcctggtctcactgacttcaagaatgaagccgcagaccctcgcgttgagtgttacagctcttaaggtggcgcgtctggagtttgttccttctgatgttcggatgtgttcggagtttcttccttctggtgggttcgtcgtctcgctggctcagaagtgaagctgcaggccttcgcggtgagtgttacagctcttaaggtggcgcatctggagttgttcgttcttcctggtggtatcgtggtctcgctggcttcgggagcgaagctgcagactttcgcggtgagtgttacagctcatgaaagcagtgtggacccaaagagtgagcagtagcacgatttattgcaaagagcgaaagaacaaagctaccacagtgtggaaggggacccgaaagggttgccactgctggctaggggcagactgcttttattctcttatccggccccacccacgtcctgctgattggtagagccgagtggtctgttttgacagggcactgattggtgcgtttacaatccctgagctagacacaaaggttctccacctccctaccagattagctagatacagtgtctacacaaaggttctccaaggccccaccagagtagctagatacagtgtcgattggtgcattcacaaaccctgagttagacacacggtgctgattggtgtgtttacaaaccttgagctagagacagaatgcctattggtgtatttacaatccctgagctagacttaaaggttctccaagactcaggagcc

SEQ ID NO: 24415 - DNA, 1642 bp, Artificial sequence
  DNA replication origin
tttggattgggaagaagggcggcaatgagatgctgtagtccaggaatagtcagggaagcagataatttagttaaagtgtctcagcctaataagggaaccgggcaggtggggataactaaaaaggagtgcttaaaagagtattgtctaagttggcaccagagtttgggagttttaagaggtttagaagcctggccgtcaataccgacaacagttatggaggcaagggaaacaggcccttgaaaagaaggtaatgtggagtgggtagcctccgtattgattaagaaggggacaggcttaccttccactgtgagagttacccgaagctcggcgtccctgatggtctagggggcttcccaggcgatcgggcagtgtcagtcttcagccgctaagccgagaagatctgggaaggagtcagtcagagagccttgggccagagttccaggggctctgggagtggctgccaggtgagttgaacagtccgattttcagtggggtcctacacagatgggatgcggcttaggaggaatcccgggctgcgggctttccttggcccggtggccagatttctggcacttgtagcaagctcctgggggaagaggttctggaggaacgcctggctgctgcagttcaggcgtttggaagttcttgtgtgctggagatgtggctggggtttgtctcacagtggaggcgaggaattgcaacttttatctattattgtacaccttgaaggcaaggttaattaaatcctgttgtggggcttgagggcgggaatttaatttttggagtttatttaatgtcgggagcagattgggtaataaaatgtatattgagaagaagacggccttttgaccttttagagtctagatctgtaaagcgtctcagggttgctgccgaacaagccatgaactgggctgggttttttatgtttgatgaagaagagcctaaacgctatctgatttgggatgaagaaaaaggagcattaaccttgactatgcctttaactccagccacctttttaagagtaaattgctgggcaggtgggggagggctagtcatggaatgaaactgtaagccagaccaggtgtgaggaggggaggtgataaaaggattagagggtggaggagtggaggctgaggaagaattgggacatagcttggcctggagaggaggggagaggtcagataggtctgtagaaaaggaagattagaaagactcagcgacacttggggttgggacctaggggacaggcgggagggaaagaaggaagatttgggacgagttgcgttgggcacagagactaggaagggactgatgtgtaaaagaatgcctggacgtcaggcacctgagaccgtttgcctattttacgacaagaattagttagatcttgcaggatggaaaaattgaaagtgccgttttctggctatttggaactactgttgagtttgtattggggtcaagcggcattgcagaagaaaataaggcatttaggttttaggtcaggtgtgagttgaagaggttttaagttcttgagaacacaggctaagggagaataaggaggaatggagggtggaaggttgcccatagtgaaggaggcaaacccagagaaaagagagcatagcgacacggagggaaggggtttggg

SEQ ID NO: 24416 - DNA, 1026 bp, Artificial sequence
  DNA replication origin
gcacatgtttcagagagcacggggttgggggtaaggttatagattaacagcatcccaaggcagaagagtttttcccagcacagaacaaaatggagtctcctatgtctacttctttctacacagacacagtaacaatctgatttctctttcttttccccacatttcccccttttctattcgacaaaaccaccatcgtcatcatggcccgttctcaatgagctgttgggtacacctcccagacggggtggcggccgggcagaggggctcctcacttcccagaaagggcagccaggcagaggcgcccccctacctccctgacggggcggctgccaggcgggggcgggggctgccctccacctccctccccagacagggcggctggccgggcgggggctgccccccacctccctcctggacgaggcggctgccgggcagaggggctcctcacttctcagacggggtggccgggcagagacgctcctcacctcccagacggggtggcggtcgggcagaggtgctcctcacatcccagacgatgggcagccgggctgagatgctccttacttcccagacgtgatggcggccgggaagaggcgctcctcacttcccagactgggcggccgggcagaggggctcctcacaacccagacgatgggtggccaggcagagacgctcctcacttcccagatggggtggcggcctggcagaggctgcaatctcggcactttgggaggccaaggcaggcggctgggaggtggaggttgtagcgagccgagatcacgccactgcactccagcctgggcaacattgagcactgagggagcgatactccgtctgcaatcccggcacctcgggaggccgaggtgggcagatcactcgcggtcaggagctggagaccagcccggccaacacggctaaaccccgtcttcaccaaaaaatacaaaaaccagtcaggcgtggcagcgcatgcctgcaatcccaggcactcggcaggctgaggcaggagaatcaggcagggaggttgca

SEQ ID NO: 24417 - DNA, 927 bp, Artificial sequence
  DNA replication origin
ttaacctctcctctaatccccaaatgtcaaatattaaacgattccaggaatcaaaatcagtcattattttattccttcattcctttataaacttaactaaaatattgttctgaaacattctaagataatagtaaaaatttataatgatcttcaaaagacagcagcaaataatttaaatgtaaggttgcgctctcaagtaagatacggcaaatttctttctttttttttttttttttttttttgaaacggagtctcgctctgtctcccaggctggagtgcagtggcacgatatcggctcactgcaagcttcgcctcccgggttcatgtcattctcctgcctcagcctccggagtagctgggactacaggtgcccgccaccaagcccagctaattttttgtattttgagtacagacggggtttcaccgtgttagtcaggatggtcttgatctcctgacctcgtgatccgcccgcctcggcctcccaaagtgccgggattacaggcgtcagccactgcacccagcctcaggcttgatttttaaaaagaggggaaaacaacaacaacaacaagtaagatatatctgtaagacactgtggctaatctgggagttggatttgattctaccatcgggacagaagatgaggccttgggattggatcaggcagtaaatggaaccagggttcctgagtctagattgcatttggaagtaggtacactctgtgaacaggcataacaataaaaataaataaataaataaataaagcactacatagtacagaagatgcaaaattaatctctttcacctctcatatgcgcctcattacctttggggctcctgtttacattagctacatggaccaagaaaatctaagacaagaaagtacatagaaacttttccaagtatggtatatcctgaccacagccaggt

SEQ ID NO: 24418 - DNA, 853 bp, Artificial sequence
  DNA replication origin
tcatttgagtttttcaaaatttatggccttatgggcagctttgctacagcctacgatgaggcaagtgatcatataattacgagatgccctgccggggctcatgggttggtattcccaggggggttcctccctgggaactgcagtggctcctacagggttagtagggtcttgccgatgaagattgttggcatgagcctgagctacgaaccacactctttccttatcttccaggtggagagtagaagagaggataatataaagatcacgccaagtgagtttgtaagattgggtaaggtatttgaactccttaatataagtgtcgggatcagagaaaaaggactccagatgtttttcaatttggaaatggtcagagagggagaagggaacatggaaatgcaaatgatcccttcagtcccagccacctctcaaagggtaagtatgggagctggttgttgggcatgctgagttcatgagtgggtatcaggtggggatggggaggaatcagaatcagaagctgggtggctggagatagtgggagaaagagataaggcaggatcgggagcatatggtggaggatcgtgatgctctggcagaagattatgatgttgttggggaggaggaaagcgggcagagtcaaaggaggaggaatcgtcagaaggagtggtgaggtgggtggctgaggatgggtcaggcttggagcagggaaggagggtctggaaggcagaacaagactgacagagagagggatggctatggagggaaaaaaagcttgaatataaaggatctccgaccactttccattgtgatggcagaagttgtctaggtccctgaggatgttagaatcaaaagtgtc

SEQ ID NO: 24419 - DNA, 1271 bp, Artificial sequence
  DNA replication origin
gcctctactctattattgtacaccttgaaggcgaggttaattaagtcctgttgtggggtttgagggccggaatttaatttttggagttttatttaatgtcaggagtggattgggtaataaaatgtatattgagaataagatggccttttgaccttttagggtctagggctgtaaagcgtgtcagggttgctgccgaaggagccatgaactgggctgggtttttcacatttgatgaaagagcctaaacgctccctgatttgggagaggtgagataaagaaaaaggagcattaaccttgactatgcctttagcttcagccacctttttaagaggaaattgctgggcaggtgggggagggctctcagggaattaaactgtaaaccagaccaggtgtgaggaggggaggtgataaaaagattatagggtggaggagcggaggctgaggaagaattgggacctaactcagcctggtgaggagcaccctggggaggagcagcctggggaggaggggagaggtcagatgggtctgtagaaaaggaagattagaaagactcagcgatgcttggggttgagactgaggggacagttgggagggaaagaaggaagatttgggatgagttgcactgggcacagagactagggagggaccgatgtgtaaaagaatgcctggacgtcaggcatctcagaccatttgcccattttacgacaagaattatttagatcttgcagaatggaaaaattgaaagtgccattttctggctctttggaaccactgttgagtttgtattggggtcaagcagcattgcagaagaaaataaggcatttaggttttaggtcaggtgtgagttgaagaggttttaagttcttgagagcacaggctaagggagatggaggaatggagggtggaaagttgcccatagtgaaggagggaagcccagagaaaaggagagtagagacacagagggaaggggttcgggggttcctaccctccagaaaagagggaaaggggttggggcacagagataagaggtcggggcccagaaataagggattgggtgttcttgtcccctagaaaagcgggacttgccgctaagggtgaaggagaaggggttgaggggttcttgcccctcctccagaaaagcagagaaggggtagagacacggagagaaggggttggggtacttgcccctcccccagaaaagtgggacttgccactaagggtgaaggaccaaggcaggcgtccctgcatggtctgacacctctgaaacagaa

SEQ ID NO: 24420 - DNA, 1246 bp, Artificial sequence
  DNA replication origin
ctgctgcggtggcggcggcggctgctgctgctgctgcaggtggtggttgctgctgtaggtgaccttgagctcgtgcaggtctttgtaatcctctacggagttgccctctcgggagcggtagatggggtttttgcacatgtggcccagtgggtgggggatgtattcatacacgtggcccgcgggcgtcttcaccttgggcagcgcgggcccgcggtgatgcacgtgcgcgtgtgggtggccgcccgtgccgccgccgccgccgtacacgctgtactgcatgttaaaggagctcacgtcggagttgttggtgctggtgtggtcgctctggttcttcttcctgcgcttcatgaccagcacgaagagcccggcggccacgaagacggacatgatgaaaaccagcaggaggctgagaattaacacagacaagggcaccgacgacgcccctccgcctgcgcccaagctcgcgggggccccggtgctattcaaccggaccgcaggagtcacggcgctggtcctcgcagggacctggatagaggagggtgtgggcgtggaaactactacatctgaatagtcagggcacagcagctccgacttaatggagcgcatgtcggtctcagcgaattttttgggcgccttacagatcacctcgtccactaggacgcccactttgagctgctccacccacagcttcatgcccacaatgtcacaggtacaatcccaaggattgtcatgcaggtcgatttggatgagtgacttcagctggtccaaaactccactcactggcaaggaggtgaagtggttactcctcaggtttagcctgaggagggtcaagccagagaagacgcctgagggcatggcctgcaggaggttgttattcaagaatagcagctggaggtttgggaccgggtcaaaagttccagactgaatctcgcggatgagattgtactggaggaagagatactgcaggctctgcaggccatagaataactccgggctcagcctctcgatcctgttgccattcaggtagaggcgcctcaggttggtgagatccccgaaagcgcggtcctggatcatcgagatgcggttattccccaggtgcaggaggtccagccccgtggcctccaggaagtctgtcctgcgcacgacagcgatgtagttctctgtcagatacattttcttgggattgtagggcttgggctgcagttcagcgatgctctcgatctttcgctcctggcagtttacgttg

SEQ ID NO: 24421 - DNA, 904 bp, Artificial sequence
  DNA replication origin
ggtcagccccccgcctggccagccgccccatccgggagggaggtggggggtcagccccccgcccggccagccgccccgtccgggaggtgaggggcgcctctgcccggccacccctactgggaagtgaggagcccctctgcccggccagctgccccgtccgggagggaggtgggggggtcagccccccgcccggccagccgcctcatccgggaggtgaggggcgcctctgcccggccacccctactgggaagtgaggagcccctctgcccggccagccaccccatccgggagggaggtgggggggtcagccccccgcctggccagccgccccatccgggagggaggtgggggggtcagccccccgcccggccagccgccccaccagggaggtgaggggcgcctctgcccggccgcccctactgggaagtgaggagcccctctgcccggccaccaccccgtctgggaggtgtgcccaacagctcattgagaatgggccaggatgacaatggcggctttgtggaatagaaagcggggaaaggtggggaaaagattgagaaatcggatggttgccgtgtctgtgtggaaagaagtagacatgggagacttttcattttgttctgtactaagaaagattcttctgccttgggatcctgttgatctgtgaccttaacccccaaccctgtctctctgaaacatgtgctgtgtccactcagggttaaatggattaagggcggtgcaagatgtgctttgttaaacagatgcttgaaggcagcatgctcgttaagagtcatcaccactccctaatctcaagtacccagggacacaaacactgcggaaggccgcagggtcctctgcctaggaaaaccagagaactttgttcacttgtttatctgctgaccttccc

SEQ ID NO: 24422 - DNA, 1253 bp, Artificial sequence
  DNA replication origin
gcggctggccgggcggggggctgacccccccacctccctcccggatggggcggctggccaggcggggggctgacccccccacctccctcccggatggggtggctggccgggcagaggggctcctcacttcccagtaggggtggccgggcagaggcgcccctcacctcccggatgaggcggctggccgggcggggggctgacccccccacctccctcccggacggggcagctggccgggcagaggggctcctcacttcccagtaggggtggccgggcagaggcgcccctcacctcccggacggggcggctggccgggcggggggctgaccccccacctccctcccggatggggcggctggccaggcggggggctgacccccccacctccctcccggacggggcggctggccgggcagggggctgaccccccacctccctcctggactgggcggctgccgggcggagacgctcctcacttcccagatggggtggctgccgggtggaggggctcctcacttctcagacggggcggctgccgggtggagggtctcctcacttctcagacggggcggttgccaggcggagggtctcctcccttctcagatggggcggctgggcagagacgctcctcacctcccagatggggtcgcgaccgggcagaggcgctcctcacatcccaaacggggcggtggcgcaaaggcactccccacatctcagacgatgggcggctgggcagagatgctcctcagttcctagatgggatggcggcagggaagaggcgctcctcacttcctagatgggatggcggctgggcagagacgctcctcactttccagactgggcagccaggcagaggggctcctaacatcccagatgatgggcggccaggcagagacgctcctcacttcctagacggggtggcggccgggcagaggctgcactctgggcactttgggaggccaaggcaggcggctgggaggtggaagttgtagcgagccgagatcacaccactgcactccatcttgggcaccattgagcactgagtgaaccagacactgtctgcaatcccggcacctccggaggccgaggctggcggatcactcgcggttaggagctggaggccagcccggcaacacagcgaaaccccgtctccaccaaaaaaatacgaaaaccagtcaggcgtggcggagcgcgcctgcagtcgcaggcactcggcaggctgaggcaggagaatcaggcagggaggttgcagt

SEQ ID NO: 24423 - DNA, 1125 bp, Artificial sequence
  DNA replication origin
tcaataaacacttatttactaaaacagaccatgaaccagatatatacaccatagtttgctgacatctagtactacattgaaattttggagtatgtttattactcaaactaacctgtccaaactaatatatattattattattttattttattatactttaagttttagggtacatgtgcacaatgtgcaggtttgttacatatgtatacatgtgccatgttggtgtgctgcacccattagaagtattctagaagtacatcaacacagggaagtttaatgtatttcaaaacatacttttgcaataacagtataggaatgaatctaaacaaggaaggaaatgaagaaagtgagataatgatgtactaagtataatcagtggagtcaaaaataggattttacaatacaattgaagaatggtaatggtgggattgatttacggttgaggtagaagtagttttaaattagtcacatgggagttgatggaaagttctttagtgcattgttgggactaagtgacaggaaacctagtgcaaagaagttgcatatatttatggtaatgtgtctggaattggtcggttcttggtctcactgacttcaagaaagaagccgcggaccctcccgtggagtgttacagttcttaaagatggtatgtccggagtttgttccttctgaagttcggatgtgtctggagtttctttcttctggtggattcgctggcttcagtagtgaagctgcagaccttcatggtgagtgttacagctcttataggcagcagggacccaaagagtgagcaacaaacagcaagatttactgcaaagagtgaaggaacaaagcttccacagtgtggaaggggacaggagcaggttgccactgctgcctccagcagcctgcttttattctcttatctgaaccctcccacatcctgctgattgattggtccattttacagagagctgattggcccattttgacagggtgctgattggtgcatttacaatccctgagctagacacagagtactgattggtgcatttacaatcctctagctagacataaaagttctccaagtccccatcagactcaggagcccagctggctttgcctactagatcccgcaggcccaca

SEQ ID NO: 24424 - DNA, 1193 bp, Artificial sequence
  DNA replication origin
cagcaactaatcccttttaatctctgtgaagaaattattttgtttttcctcaactgagatttgggaatcctcaccttttgagaggatctagattttatagtaactggaagacactgaatgggggagaaaattgaagattaattagctattattattgaaaggaagaaaaggaaggaaggaagaaatgaaggaaggagggagagaggaggaaggaaggaaggaaagaaagaaaaagaaggaaggggaaaaagggagggaggaaggaaggaaagaaaaaaaggaaggggaaaaagggagggaggaaggaaggaaagacggaaggaatgagacggaaggaatgagggaaaaagggagggaggaggaaggaaggaaaaaaggaaggaaggaaaaggaggaaggaaggaaagaaggaaggaatgaaggaaaaggaaggaatgagggaaaaagggagggatggaggaaggaaggggagggaggaaggaaggaaggaaggaaggggaaaaagggagggagggaggaaggaaggggaggaaggaaggggaaaaagggagggagggaggaaggaaggaaagaaggaaggaatgagggaaaaagggagggaggaaagaaggaatgaaggaaggaagggaaaaaagggaaggagggaggcagggagggagggaagaaggaaggaaagaaggaaggaaggggaaaaaggaaggaaagaatgaaggaaggaaggagggaagaaggagggaggaaggaaggaatgaatgagggaaggaagggaaaaaagggaaggagggaggaaggaaggaatgagggcaggaaggaaggaaagaaggaaggaatgagggaaaaaggaaggaaggaaagaaggaaggaagcgagagagagaacaaatagagtagtgcaagtaccaccacctagaaacaaatttttgtttgccacttcatacagctagcattcagggtgcactcaccatattttctgtcccacctgcacattgctatgtggctttatttctcatgtaaatactactccttattctgtccagacttgcacctcttattaagcatttggtggggatagggcactatagacctccttgtatttagtctaaaaatagattgatgctttaatgttttggagtacttttaatgtctcactttataactctagtatctcacctttgagttttccatctcaggaac

SEQ ID NO: 24425 - DNA, 1250 bp, Artificial sequence
  DNA replication origin
aaacgcttctgatttgggataaagaaaaaggagcattaaccttgactatgcctttggctccagccacctttttaagagtaaattgctgggcaggtgggggagggctagtcacagaacgaaactgtaagcccgaccaggtgtgaggaggggaggcgataaaaagattatagggtggaggagcggaggctgaggaagaattgggacctagctcggcctggcgaggaggggagaggtcagatgggtctgtagaaaaggaagattagaaagactcagcgatgcttggggttgggactgaggggacaggcgggagggaaagaaggaagatttgggatgagttgcactgggcacagagactaggaagggactgatgtgtaaaagaatgcctggacatcaggcacctcagaccatttgcctattttacgacaagaattatttagatcttgcaggatggaaaaattcaaagtgccattttctggctatttggaactactgtcgagtttgtattggggtcaagcggcattgcagaagaaaataaggcatttaggttttaggtcaggtgtgagttgaagaggttttaagtttttgagaacacaggccaagggagtaggaggaggaatggagggtggaatgttgcctatagtgaaggaagcaagcctagagaaaagagagagtagagaaatggagagaaggggtttggaggttcttatcttccagaaaagtgggaaaaggggttggggcgcacagataagaggttggggtgtggaaataagggatggggtgcagaaataaggggttggggcatggaaataaggggtcagggcatggaaataaggggttggggcacagcaataagggattggggtacagagatatgaggttggggtacagaaataagggattgggggttcttgccccctagaaaagtgggacttgccactaagggtgaaagagagggggttgaggggtacttgcccctccctcagaaaagccggacttgccgctaagggtgaaggagaagaggttgaggggtacttgcccctgccccaggaaagcaggacttgccgctaagggtgaaggagaaggggttgaggggtacttgccccttccccagaaaagcagagaaggggtagagacaaggagagaaggggttggggtacttgccccttccccagaaaagtgggacttgccgctaagggtgaaggaccaagacaggcatccctgcgtggtctgacacctttgaaatgtgggtg

SEQ ID NO: 24426 - DNA, 1130 bp, Artificial sequence
  DNA replication origin
ctattattgtacaccttgaaggcgaggttagttaaatcctgttgtggggtttgagggccggaatttaatttttggagttttatttaatgtggggagcagattggataataaaatgtatattgagaataagacagccttttgaccttttagggtctagggctgtaaagtgtctcagggttgctgccaaacgatccatgaactgggctggatttttatatttgatgaaaaagagcctaaacggttctgatttgggataaagaaaaaggagcattaaccttgactatgcctttggctccagccacctttttaagagtaaattgctgggcaggtgggggagggctagtcacagaacgaaactgtaagcccgaccaggtgtgaggaggggaggcgataaaaagattatagggtggaggagcggaggctgaggaagaattgggacctagctcgggctggcgaggaggggagaggtcagataggtctgtagaaaaggaagattagaaagactcagcgacgcttgggattgggactgaggggacaggtgggagggaaagaagatttgggatgagttgcactgggcacagagactaggaagggactgatgtgtaaaagaatgcctggacgtcaggcacctcagatcatttgcctattttatgacaagaattatttagatcttgcaggatggagaaattcaaagttccattttctggctatttggaactactgttgagtttgtattggggtcaagcggcattgcagaagaaaataaggcatttaggttttaggtcaggtgtgagttgaagaggttttaagtttttgagaacacaggccaagggagtagaaggaggaatggagggtggaagtttgcctatagtggaggaagcaagcctcgagaaaagagagagtagagaaacggagggaaggggttcagggattcttacctttcagaaaagtgagaaaaggggttggggtgcagatataagagttcggggcacggaaataagggatggggtgcagaaataaggggtcggggcacggaaataaggggtcggggcatggaaataaaggattggggcatggagatactaggttggggtgcggaaataaggtattggacattcttgccccctaga

SEQ ID NO: 24427 - DNA, 1061 bp, Artificial sequence
  DNA replication origin
gagggtggaagtttgcctatagtggaggaagcaagcctcgagaaaagagagagtagagaaacggagggaaggggttcagggattcttacctttcagaaaagtgagaaaaggggttggggtgcagatataagagttcggggcacggaaataagggatggggtgcagaaataaggggtcggggcacggaaataaggggtcggggcatggaaataaaggattggggcatggagatactaggttggggtgcggaaataaggtattggacattcttgccccctagaaaagcgggacttgccgctaagggtgaaagagaaggggttgaggggtacttgcccctccctcagaaaagcgggacttgccgctaaaggtgaaggaccaaggcaggcgtccctgcgtggtctgacacccgtgaaacgtgggtgtataatcagagaggtgtccctgcaatgattaaacaccaagggaaggctgccttcccagtccgtgaccggcaccggagttttgggtccacggataaaacgtgtctcctttgtctctcccagaaaatgaaaggaattgaaattaagagaagggagagattgaagagtggaaaggagaaagtggttgagggacagtgagagaggctggagaagagagtaagaagaggccgcttacctgatttaaaattgatgagatgttccttgggctggtcagtctgaggacctgaggccataggtggatctttctcacggagcaaagaacaggagtacaggggattgatctcccaagggaggtccccagatccaagtcacggcatcaaatttcatgtgcgtcggcgtgaagagaccaccaaacaggctttgtgtgagcaacatggctgtttatttcacctgggtgcaggcgggctgagtccaaagagagagtcagcgaagggagataagggtggcactgttttataggttttgggaaggtaaaggaaaattacagtcaaaggggttttgttctctggcgggcaggagtgggggtcgcaaggtgctcagtgggggtgctttctgagccaggatgagccaggaaaaggactt

SEQ ID NO: 24428 - DNA, 1483 bp, Artificial sequence
  DNA replication origin
agggaatgggataagaaataaaggggaaaggaagcccagaggtgcctgcacccctgcgccccgccctccttcctgggctagcgcgtccctttcgcttgggcccgcggctcccggcgcacaagattgcgctgagctgggtgagatccggccagcggggaccaccaatgccgggctcgccgtttccccgtgggagtctgggaggccccagactcagttgtgaacgcagattgtccgttcctgggcggagggcagtcccagcgtcccctcggggctgggcactgcgcgctcgcggaggacgcgcccagcggcggacatagaggcgctcccaggcccgcgggcaccggggcaagcgcccgaggagaggcgccgtccaccggacgtggaaaacaacagaagatcggccctttcgcttcttctcccttcttgctggccctttacccttccttccgggttgtgccggaggagctggtctcccttgtcaaggcgcccggggccggcgagggacagtgcacaccgggggttcccgggaaggggctatgagtgggtggggtgactgggcggctctgtcggactctagcttaggtttggccctggccgccagctcaatgctgtgcttcagggagtgaagccagagcctttaatttcggcaaaacttgactgagccactttggaaagacactggggatggggtggggtggagctgatgagtggcttcggaacagaaggcaatgccgcttgccataacacctcctgttcttgggctcacgatgtgtaactctcatcagatcattgtcatcagaagatggaaagtaaacgggacatttggggtttaagatcgccagtctatagtctgtaaaagcccacctgacgttgcgttgtccatggtcaccgtcaaatcctaaagcagcgtaataatttgagaggctgctgaaagggctgtgtggaaagccttcccacagtgaggcttaatcctttcttcctctggactattatagtacgttgttattctttcccgatgataccatgccaaattagaagctcacttccaatttatctttatagacagagtgcctgggcacaggaaagactcacaaaatatcgtggaatgactgtcctcttgcagtggttctcaaacttgagcattcgcgtcagaatatcctggaggcattgctaaagcagtcctgggcctcacctttggaatcctgattcagtaggcttggggtggaccctgagaatctgcatttctaacaagttcccaggtgatcccgatgccgctgatttggagaccacattttgagagccactgccctagggattgatttgccagctttgctgcacattaacatcagaatcaccttcgaagcattcaaaccaaagcaaacgaacaacgaagtgtgcccaagccccagtgccagatattctgaattaatagtttttgctggctagaaattggatttggtggccgggcgcggtgtctcacgcc

SEQ ID NO: 24429 - DNA, 819 bp, Artificial sequence
  DNA replication origin
gagccccggcggcgctgcggtagtcgtccccaccccctcggcctcgcccgagggcgcgaagtggcgcgaaggcgcaggtcgggcggcggcggcggcacctcgaaggaccatgtgggtgaatgaagggcggcggctcccgcctcaacgtaaatacggacaagccccactccctcattagcataaaaaacaaagtacttccgacctccccgcccgcccgccaatcaccgcaggccccgcccacggcggctcgttcttggcggccgggagagcgggagccgggagccgctggcggcgccgcgcagccttccccgggccgcgctcccccgtggcccgcccaccgccgccagcctcgcggagcgcctcgcccgaacacctcgcgccacgcctccggcacgccctccgttaacaagctctgcgcgcgtgcagacccccgcgcgccgcacaccctcctggaagcgcacgcttcccggggcttcctgggagccctgctctccctgggactcgacgtgtacgctgtgcgatcacagtttattactttaccggcccttggtgggtttccgaggtaattaggggcctgctccaggccaaccggaaccagagaagtaaaatccagtgactttaacatcgaaacagaattactcgctgcaaagatcgtttgagacccagaaataaatacattacacccgacactcttgtgaatgcacacttcgtggcaatgtgtttccttaacctggccgcgtgtaaaccaaaacgcatgcccgagcagaggtttcacagctgcagtacctgagcctcccctctcatgcccagctgcattta

SEQ ID NO: 24430 - DNA, 941 bp, Artificial sequence
  DNA replication origin
cgcagtcggcctcagccgcggcgtggagccgcctgcgcccggccgcttgctgggagtgtggcgcgggagggccagcccggctcggcgggagcggcgtccccgccgccatgttcctgcggggcgggctgcacgggggtgagggcgggggacatggcggcgactgcgcgccgccgccgattgttcccggcttaggcctcgggccgcgtgcgacgggcaccgcggccgcggagcccccgcccctctgggccgggctcgggggggctgggggacacaaaggaggggcggcgcgcccgcgtccccgccgcactcgggcctcggcgccgccggtcgccgcgcggctgccgccgggaaacgggttgggggggttgccgcgtccggcggggcctgactctgacccgccgccccctggcggctacgcggagaatcgcagggccgcgctcccccttgtgcgacatgtgctgccggcccgggctccatgagcgtggcgggcactttgcagtctcgggtgttcctgcccggtcttctgttcctaaactgcagcaaagggaaaaggaactgaaaaaggcaggctcgtcgttgcaatatcaccaaaagagaaaattaacggcatgccatcaggaccacagcagttggagaaacaactctttatcccggcttgcagccacgaggtcttgattgggggaggggtggtgaagaatagtctgtgggctgctttttttttttccttttactggagctgtacagtggagtcggtgattgctgctgatcataatcaagtattttaggagcttatttagacatgtatctgatagctaaggatttttcaactttattctcttacgtatttttcaactgtaaattattgggcttttaaatcctgctagtattgctcgactcttactctcacaaatggatggaattaattgctgttaggaggttgg

SEQ ID NO: 24431 - DNA, 1325 bp, Artificial sequence
  DNA replication origin
tgctcccaggtgaagccggtgcccgcgggcggtccgtacaccccgcagccggctcgcaccgctcgagagcctcggccgctgtgtcttccacgtctgcagctcagccagggcgcgcagggcgagtggggtccactggcgggtaaaggggaccaggacggcgaggatggacgcacagacctggcccgtgggctttcgctgcctcctccttctggccctggttgggtccgcccgcagcgagggcgtgcagacctgcgaagaagttcggaaacttttccagtggcggctgctgggagctgtcagggggctgccggattcgccgcgggcaggtaaggggcaatgagggggtctctggactggcggcgtccgagcccggccttcgctcccccaggctcccttggtggcactcgtgggaagatgacctttcgggccctgcagccgcgcagggtgaatcccggggaggcttccggggatgcttggtgcgggtagcctgagtgcagcgcagcgcagctctggggacccctaaccaagcctgcgacgaatccccgttctgggcatctgcttcccgcccggctcccttcgtcttggaggatgagttggaaggaaccaggaaagcagacatcagggcgtgggggacacgcagtctaactccgtttctcttccgagtaggaatttccccagtgccccaccggggatttcggtttactgctttctcataaggtggagggaattgaattgatcgccccaagtttggtactaaaaatcacaaacctgcgatatacccctttgctggagaatggggcacagacaagggcagccggtctcctctgtaattaggacttggaccctgtgcacccagagacgtgacccttagctgcccttctgtgccctcgtatcaagccctgcttggaggaaacccaaccacccagtgtgtctcccagcaccaaggtagtttttagcctgaaaagtgttagggcaacaggcgatcaaaccgaacgtactggggagtcacttgacatggatgagatgtaccagcgttccaaagggaaagatacagtttgtgtggccagcgtggatcttgcttcctgtgagcgccttttgcctgtgctttcgaaccctgctccccgtttccaccgcaccaatttccttctgctggtgggagttccagtgtaggttctgtctggaagaataggtcatagctgtcaaacgcaatagcaggtgtctagagctaagtaagatctcactagagccatgcacccctttagctgtgactatgaagccaacacagacgaatctgtgaggttactggttgaacaaagaacttgtgg

SEQ ID NO: 24432 - DNA, 1494 bp, Artificial sequence
  DNA replication origin
gggagagcagcagccccaagaggggaagaatcacagccccgatccaagaaggcatggtgcaacatacaaatccagctcggtaaaccccacggccggtgcgctcttcaccttgcccctcaagccgaaagcccgccagaggcagcggcgcgctcctcgccgctgcccagcgtcacccccttctgccagccgaggggacgagcagcgcagccctctggactgcgctcagcaaacttttataagccagatggacgatggcaagccaacaagggctggctgggaaggctgctgccttgctcctctagcccccagatggaaacggtgcaatcaaaacgaggaagagaaggaaaagaagtgtttaaaaaaccaccatgggggttcagagctgcaatccgagttccgagccgcagaatcctggagcgctgcgggctcggctcgccggagtgtgcggcaaaggtgggagcgcgcgccggctcccccgggagggagatggacaagcgagagcgagtgtgtatgcgcgcgtgtgtctgttggtgtgagctcgaggttcttggggatgtgtgtgcgtggaggtatgtgttggggatatacgagatctaggggaaacctcagcttaacacaggctgtgggagcctgtgagagtcctcctgaaataggaagagagaaatcctggagacagtcactggaggcaagagggaaggagaaaggaggggggagaaagaaacgtgctacacattgcacagccgaaattcacaggccgagtcaaaggcaaaacctggactggatctcttcctagtcggtagaaaggggaaaaaaagaaaaagaaacgtacctattttcttattcacttcacatcctttataccgatctgaaatgacatcaataaacaatctagaaagacaaggtaattttaagtcattaacatgttattaagctgtatttttatggaggtaaaggataacgcagttccaattgttgctcttaatatgtgtccctgacctactgaaacacaaagccagagtggaaatagtcatagacgggagttcatgggtggcagagcacaatcacggctctaactagttgcctaatttctgtttgactttgtttttttctaaaggcacacattacagactggtagttcttaatttttaaaggtttggttctagactcaacaatttcccctttttttatttcaaatatctcatagccttcgatcagaaatcattatgcttaggtttctaatgtgtggaggatcgggaaagctaacaaccagaccacagaagcaacaagaaaaggagagcacaagggtcagaggtgcataaagggacataatgggggaagggaggtgattccttccctctcactagatgccctcacatagtagacttaacattttcttccaagttaacataattctcaagtggagaatcaatccaatttcttcttcctgtctccatttacactgatgttctgtgaacgggataaaagtgaaaattc

SEQ ID NO: 24433 - DNA, 997 bp, Artificial sequence
  DNA replication origin
gagtaaaggaggaaaaggaaggtgaggaggtccagtgttggaataagcagaagtattctagccagagggatcagggagtgatataggcctagaagggagaacttgggagtgttcaggaaaccaacggcggtaaggatggagatgagaaaaaacagacatttgagagttgaagagccatattctagagtttgggttgtgtgctaaaggcaattgagaacctttcaaggcaagtgcagcaaattgtttcctacagctttctgtggctgtagggtagagatggattgtagccaattagaatgaagactgtagagacggtctttgccataggccaacaaagtgatgaactgagtaggactgtggccgctgcttcccaccctcaccagaagaagggctaatccacacttgttattgaattgattgaattgcgggggggggggggcctacaattcccagcggtctggtctgcgggcgggggtgggggtgggggtaatgtaattcgagaagccagagaacctaggagggaaaaatcggctggagatgccaagagaaggcatgcgttaaattgtggtcatgcggagctaagtgtctttgagacattaaatcggacacgtcctgtaggttatacaggcgccaaggaagaaaatctgcataagaacacagttttttctttgcgggagtttaactctctcggccagaaacagtcctgtcctgcatttcttaagttttttccgaatcccacaagcccttcgaaggccccgcggactcgtgccagcgcgcccgcgcatgctcagtagcaagacgtgctaggcaatgaggagggagatgagttttccgtaacctgaagcaacatcctcctgattcctcattaaagaaaaaggcgggaactagtcaaaagccggggactgatgggacgctaggatctgcgcgtcccgcccatttcggcctctgactggtgaatgtcttcggcttatggcagaggagcccgcctcattggctc

SEQ ID NO: 24434 - DNA, 1199 bp, Artificial sequence
  DNA replication origin
ccgcacgcgtcttcttcccgcagtcggccgctgccgccgccgctgccgccgccgccgccgccgcgggcagcccctactcgctgctcgacctgggctccaaaatggcagagatctcgtcgtcctcgtccggcctcccgtacgcgtcgtcgctgggctacccgaccgcgggcgcgggcgccttccacggcgcggcggcggcggctgcagcggcggccgccgccgccggggggcacacgcactcgcaccccagcccgggcaacccgggctacatgatcccgtgcaactgcagcgcgtggcccagccccgggctgcagccgccgctcgcctacatcctgctgccgggcatgggcaagccccagctggacccctaccccgcggcctacgctgccgcgctatgaccccgcggggccgcctcgcgaggaccggtgtgcacacgtgtacatatgtataggtacgagcgctgcggcctccccgtgcgccctcccgcgaccgggggcccggtttgtatgtacatagaatgtataggtgccaggtagaggcagagaggccaggcggggcaggagtggccaagcgcgcaagggcgcgggcgagcaggcctgtgaattcgcaggatcatttcagacccgcacttcggcagccaactcgaaagcaggcggttgtgtgcggcagcagttggcgtttgctttgcacttcggaacctgttgcgttttgacccacggaggtggaggagtaactttttgacatgttggcctttccagttttgttggaagtttcatggtcggttttgtttttgtttctcattcttcttcctcgcccctcagccccccaacccccaaccccctcccggtccgtgttgcatgcacgctgttcaaatgtgaggtctgaaatggctggcacacgggaaaagctgcttgtgtcattcgtttctgggagtgggatggctctgagcagcctcgcctccctgtttgtactatttgaactttgcagatctctgttctctcaagcagaactcccaaccagatccattcttgaccagtgaccggctcgaatctggccttttgtgtgagatgatcacggtttcttttgtttatcacgccatttgcaaatcagagcaagagctctttctcaagggcaagaaacgcaaacaagaaatatttgtgagatgaaagttgtcaattggattttcttcctaaacaaac

SEQ ID NO: 24435 - DNA, 809 bp, Artificial sequence
  DNA replication origin
ggtccagctggggcttgcccatgcccggcagcaggatgtaggcgagcggcggctgcagcccggggctgggccacgcgctgcagttgcacgggatcatgtagcccgggttgcccgggctggggtgcgagtgcgtgtgccccccggcggcggcggccgccgctgcagccgccgccgccgcgccgtggaaggcgcccgcgcccgcggtcgggtagcccagcgacgacgcgtacgggaggccggacgaggacgacgagatctctgccattttggagcccaggtcgagcagcgagtaggggctgcccgcggcggcggcggcggcggcagcggcggcggcagcggccgactgcgggaagaagacgcgtgcggcggcagcggcggcggccgcggccgccttctcgggattggcgagcagcgactcaggcaccaggccgccgcccgcccccgcgtgcagcccggcgcccgccttgagcgcagggtgctcggcgtccgccacgccgcccaggccgtagggcaccgggaaggcgaacttgtccttcttgagcagcgtcttgggcttgcgccgcggccggtacttgtagtcggggtgctccttcatgtgcatggcgcgtagacgcttggcctcgtcgatgaacggccgcttctccgactctgtgagcagtttccactcggcgcccaagcgcttgctgatctccgagttgtgcatcttggggttctcctgggccatcttgcgccgctgagcccgcgaccacaccatgaaggcgttcatgggccgcttgacgtggtccaccggcttggacatgctctcgccc

SEQ ID NO: 24436 - DNA, 1155 bp, Artificial sequence
  DNA replication origin
gccacgccgcccaggccgtagggcaccgggaaggcgaacttgtccttcttgagcagcgtcttgggcttgcgccgcggccggtacttgtagtcggggtgctccttcatgtgcatggcgcgtagacgcttggcctcgtcgatgaacggccgcttctccgactctgtgagcagtttccactcggcgcccaagcgcttgctgatctccgagttgtgcatcttggggttctcctgggccatcttgcgccgctgagcccgcgaccacaccatgaaggcgttcatgggccgcttgacgtggtccaccggcttggacatgctctcgccctgccgcggctgcagcccgccgcctcccgggccctcgccctcggcccggaggaaatcaatgttggctgcccgcggagacccgctcggccggccggggctcgtcgcgccccggcgtcgctcccgccccggaggagggggctgggggaccagcccagggccacgccgcgccccgggccgccttagtgtctccggccgagcgctcgagcaggttgtctctgggacactctaacttctcggcggtgccccctccccgcggcggcagtttgccctttacgttctttgggtccttcgtctgcagtggcgtttgctggtgagctccccgcaggtagcggcggccgggcagagcgctcctcctcctcggtcgttctctcttaaatgcaaagcgtccccaaaagttgcgtcgcggagactcctcgaagttgagccgaggagcccgccgccgcgtgctgccaagtgccaaagggggctctcagcggctggagtgtttgggttctcctcggtgactttctcatttgacagaagcagatgggggtggggaaggcggggaggtggccctggaggaggaagaggagggggaggcggaggagtgtccaggcgtgccacgagaacgcagagcgcagcaatggatataaatacaaatacagcagcaccagcctgtcttcttggctccgggcagggtgcgccgatgggaaacccccaatcggctgggtgattttttttttttggaggggggagctgtcccccgcagcacctgcctctcgagtcttcctctcccgctgctggactgacgggtggggcgaggaaggagggtggatgaggcttgagcaagcgttgg

SEQ ID NO: 24437 - DNA, 1595 bp, Artificial sequence
  DNA replication origin
attggagagtgggttttgctcgggcgacttgattgtctttcaagttggcgttaagagttttcaacaggtctccttccctgccagccgggaccccgggggtccctcggagcagggcgggtgggaccgctcggcctccttctctcgcccgcacgggcgccgccgcagacccggagcaggcacccggcggccgccgcgtgggctgcagcttagcctcctctgcgggcgcccggcagggctgcgcggccgagactcggggcgccggcgccggggcggccgggagctctgtcatttggcaactccctgcagactgatgacacggcgctttccatggtcgagccccacaaagtgtagggctgcggggcgcacctggctgggctcctaattacccggcctgggacgcacggggcagccgcggagggtggcgcctggggtcgggccggggtccccttcgccgcagtcccgcccacccgcagcctccgaggggtcccggccagggcgttctccacacgctcggctacctgcaggggttcgccactgcaagccgggccagtagaagtttgggggcgaaggcagagagcatttccttctcggcttttggcgcctccacgctgcacagaggcaggggcgactctgcaggccccgtttcccccatcctcccctccaccccagttccccgcaggacgtaggcgccgtccctagctcccccttctgtcctcgccctaacaccgcagggcctctcctggggatgtggggtcctgcgtgcttttgggggctacaaaaagtgggggccgtcgcagagcagagggaagctaggagcgggcaacgaattgaatcctggagacccgggaggagcgaggctgctgccgtccccggggaaagggcgacttcggcggggataccccgtgccaggccctgcaactcccgggccctcgggaatgggatgggggaggcgcggggtgcgcgcagctcccggtgatgttaaggcgtccgatggagacttgggttatttgcttcgcgtatcctcccctgttcctctgcaccgagctcctggctgccgctgcggccgctgtgtgcccgaggggcggctctgtaacccggctccaggcatttcttaggtttcccatccccgccctccaagctcccgggagcgcctgctccgctgcccgcagacaggcgtcgttcaaacctcagctctgctcggtctgcattcatggaccccagatcttcaccctaggatttccatctcagcatttcacgttcccggggaaaaagggagagggagaatgagagataaccgtgagcgcctaagcaagggattccttgcagctccattacgggagatgcccttttgctctaactccctgtaacttaagaagaggctgcacaaagctctgatctcggggaggagtcttggggtggaaagtacaaaagtcagttgtgccgggcaaaaactgaagttgaaatcttatcctgcacccagctcttgttttgaatttctgaacttgagctagtgagtgttatttcaggttaagaatagttctgggagggcgtggggtagtggggagggtgcaaacttcttgcttgatccatttcca

SEQ ID NO: 24438 - DNA, 1751 bp, Artificial sequence
  DNA replication origin
gttccgtgggaagcgagtggtcattgaagctccccgctgggaaggtcaggggctgggtgcaggtggacgcgcgaggcttccggggggacttcgccgggccacagtcaccgggctgagcccggttccccgatcctctgccccgggccgctttccgcgggagcgtcgggccccgggccgggcgggaggccgagtgtacggcctctgccacagagctgggcctggcgggggatcacaggagggcgcccccagatgctcggcgcgcacgcgctccctggccacggatcacaggcgcccgccctctgccgccggcccgggagctcgcctgccccctggaaagcgatcacaggccggggcccgggggcaaggaggggtgcgggcgccacccgtggggagagggctcgctggctggctcgttcccactgggaggaagggggcgaggagagtgcagctggggccaaggcgcttcggaggggccgtgtggacacagctagccatggccacgtggtagccaccgggtctaaagtcctgaccagggacgtgcctgggtgggattttctagaatttttttttctttttcttttttttttttttttttttttttttttttttttttttttttttgcatctgcaccctgttagttcaccgatcgcaagaaaagaaaatgaagcgcgcagggaataggtggcaaggcaggcctggatagagtttaaagggatccagtcctcccacaaaagtgggcctgatgctgcctggttccctcctggccgccactccccactcgtgcggttcgtgggctcctgagcgccttccctcgtgttagccgcaggcacccagggcagccctgtgtgtgtacatgtgtgtgtgtgcacacataaaatcacaggtaaccttctgggactctgggcgctgcaaggaaggtggactgatcactcatttacctactatgatggtccatcccttatctctacaggaggccaagggagattggcagttggttcccatctagtggacaaaagccgcaaagaactgtggagacggaagcatcccctcgataaatatgctcaccaggcatcacctgtagactaaaccaaatggaatgtctagaaaacatgtagtgttgtttttcaaattcacataggaaatgggattcatagactacaatttcactttaaaatattaacgaattcagggcggctctcctccaggggcatttgccctattaataaagcccagtggtacaggcatcctggtactagtggagggaactgtgtctgcctttccaacatccatccaccccttgctctcccaaccagtggctgcaacttgtcttgaatgggctgaggccagtggttcacaaacctggctgcacattagaatcagctgggaacttcaagaaattctctcacgtgcagccactcctgtatctattgacttgggatctctggaataaggggtgattctgatcagagttgagaactactgacccaaaccatcagaggaatctcatccccttgctcagagaggagcagtaggggcccaagccagacagcacatgggaaggaagggaatggcagggagggcatattggaaaggaggaagaacacggcaaaaacctagaaacaggcaatgcactgttaaggaacagagggtccatgatggaaggcggcagatgaggctagaagacagaattaagaatttttgttaagaattctaactggcacaacacacaactttatctttaacagtgggg

SEQ ID NO: 24439 - DNA, 837 bp, Artificial sequence
  DNA replication origin
ggggtggacatgcagaataaccggtggaactgacttgagggtggaagagggctaggagcccctcaggttctcccagcccctcttcaacctgtgctggggtgtcccagcgatagtgtttccacatggccccgatcagtttcagttggaaagaaatagaatgacaagtcggtgtcaatgtggccagtgtgtgcaggatttcctggcccagtttggctgtgcaacctcagagaagttgtctggtagccatggagcctctgtaagtgtctaaggctcatgccaggtgtctggttaggtgtagtgggaatcaatggcctcacataggtttcgaggcatgcctccctcagctacttccatttctctagtttccctttgtcaccagctgcttatgaaattgaaaacaggatgatttagaaggaactgagcttgtcatgctcagggctgtccatgctgtcatgggctgccagccacttggggtggggtctctaacccacagatggtgactggactacagtgagatttgggtaagcttttgggagaagcaggcacagaagtagaggctgtagaagcgtgaatttctcctgagacttgaggacaggccccactctggtgcaaggagcatggtaatctttactgctggtgggcatgtgggaaggggcccggatcgaggggagctttaatatgggtacagttggtggagagctggtcttttagcggggtggttattgggcagtcatggcagaaaagtagggagtggaggacctggcaaatatgggggctcatgctcagtactgcttagcagcagcagtgctagtagaagcagcagcaggattagtagtg

SEQ ID NO: 24440 - DNA, 1081 bp, Artificial sequence
  DNA replication origin
gtgctgggagccaaaatcccctctgggaagaaggtccgaggactgtgcacccaaggggattcatcacacccatccggtgtgtcttccttgttgtcggagtggattgctggttggaaggtagagtcttggtgcctggccctgcagagaatgtataaatggacattccatgaaaaatcaaagacagccagaagggcaataacctctgttaccccgaagggcctctcttgagatctgcagaaagacagtgttctgcctaggcacactgccaggtagcttgtccgttctggtctttggcctgctagaggagatgcagagggtcctgctgggtgacttgtgtcctctgtgctaccttagggatgtcagtggtccattaaagttagaggggtggatgttgctgttgttacaaaagggtggctttaaatgcaggatggggagttgtcacggtgcattttgttgggaatgaggtgggtggggggagggggttggtttgtatgtgggggggtttgctcctgttgaacatgctttttgttgtggagggcacggtgggcagtgggaggcaggtaggtgagctctgccctacaccagaggaatctgtcagacaacaggggactggacggtcctgggagatgaatggtctcattggtgacaaaggtgttttggccagggtgccagatggtgaatgccacctttgagagggtacccgccctgcctgcatgctactgtggctttgtggcagatggggtggacatgcagaataaccggtggaactgacttgagggtggaagagggctaggagcccctcaggttctcccagcccctcttcaacctgtgctggggtgtcccagcgatagtgtttccacatggccccgatcagtttcagttggaaagaaatagaatgacaagtcggtgtcaatgtggccagtgtgtgcaggatttcctggcccagtttggctgtgcaacctcagagaagttgtctggtagccatggagcctctgtaagtgtctaaggctcatgccaggtgtctggttaggtgtagtgggaatcaatggcctcacataggtttcgaggcatgcctccctca

SEQ ID NO: 24441 - DNA, 1303 bp, Artificial sequence
  DNA replication origin
ggctcccggaagcggctgcttcacaggctccagccgagcggacaggcgtggcggccggagccccagcatccctgcttgaggtccaggagcggagcccgcggccaccgccgcctgatcagcgcgaccccggcccgcgcccgccccgcccggcaagatgctgcccgtgtaccaggaggtgaagcccaacccgctgcaggacgcgaacctctgctcacgcgtgttcttctggtgagtgtccccgcccgaaacaggtcaccctgcagccgctggcgccgcggacgcactctcccggggccgcgcccgatgctgcccaagccctctgcggctgggggcgaggggagcgctttcctacgccacgcggtccacgccggggctttctgctgcgggtggcgccgcccccacgccggccgcgtggtccctgcctgcgccccggggcgcggcgcagggggacgcggggacgcggggccagtggctttgctactggaggccctgcgggcccttagggctcgggggaggaggagcaggaggtggggaggcggggaacccaggctgccgaaagggggagtctcttgcccagcgggagaagcgactgcaccccttacacgcccacccttcgctggctcccgcctcctgctctgggactcgcagtctcctgaactcaaacgcaccttttcctttctttttaagtaagcagcttacgaacagtttcctttatctgatctcagccaaagcctaattagtgtcctggacctatgccatctcccagtagtgtccccaccccttccgatattccttacgagacagctcgatccaactccacgtcccgttgtacctctctgtgtcccggtgtctctgtatcttttgtctcagtgaccagggctctccttttgcctctttgtgggaatctcactgtgtgtccatgtgggtcgtggtacctagttatggcaagtttcatgtgggtaaaataacactattattatttttcatttatgaatggggaccctgttcttgaacaagattttccaggatttgcttttaactgggacatgcaccgccacgactggagtctgtctttgaccagcttctttcccctgtttccaatactttcacttccacgtaggaggacagctcggaggtggggtccctggaatcgctaaccttcagagaggtgatccatggtcttgatgcaggtggttcctaccaggagttctaccttcttaaaaccaccccagggctcctgagctgggagggcccacagccctacccattttgtgcaaggaaacaaacggagaaagactcgggt

SEQ ID NO: 24442 - DNA, 1251 bp, Artificial sequence
  DNA replication origin
cccgggagagtgcgtccgcggcgccagcggctgcagggtgacctgtttcgggcggggacactcaccagaagaacacgcgtgagcagaggttcgcgtcctgcagcgggttgggcttcacctcctggtacacgggcagcatcttgccgggcggggcgggcgcgggccggggtcgcgctgatcaggcggcggtggccgcgggctccgctcctggacctcaagcagggatgctggggctccggccgccacgcctgtccgctcggctggagcctgtgaagcagccgcttccgggagccgggcgccggcggcacgccccgtccccgcctctcaggcccgccgcctcgggggcgcccgctacgcgccgccgcctggagcccgggagctgcgcaccgcgtgcgagcgcggccgggaccgacgggtgacgcggcgggaggagacgcggcgggaggaggcgaagctggcgacgccaaagggagcccagagctacgcccaggggtgaggcgagggccgcctgcgccgctggatggagagggtagcagagcgcgcggcaaggaggccgggtccggaggtgcccacgtgcacgaacccgagtgaaactttccgaaattcactatccgagtctaggcgccgacacagaaggtggagcagggaggcgtcggctgtgcccgcccctgcgccgcagaaacgccccctcggctacgggtttgggaagactgggagacagctgcctcgtgctctagcagcccgccccctgggcgcctttcccttctcaggaccaaacgacggtgccatgggaggctcttcaacctgtgagccaaacatttgaccttggacgacagcaaagtttagccacagattatccttgtagagctgcaagacctcaagaaagccgggtaactcgagagtatgacccagatgaattcgggagatggatgaatgctgtcgtcgatgggggcgggctttaggcatctcacatgttgcatgctacggtggacctctgagctttttgctgcccccttagattgggaaaggaatataagaggaaagagagactgcctgatgatttctgtcgtcaagccctaaagcctaacagataacagtggcaaacgacacgtgggttccagaataccagtgatgttcatgtgcatttctgagtgcgtagcctcactagtgtgtgtgtgtgtgtgtgtgtgtggcagtctcacacacagtgtcacgattatggctcattgcaccctcgacctcccagggctc

SEQ ID NO: 24443 - DNA, 813 bp, Artificial sequence
  DNA replication origin
tgacaagtcaaacagagtcacccaaacaagcgtggcacgcaaacctttagagttcagcaaaccgagggctgagttaccaaaccgtgtcctttcagggcatgcaaaaggcttttcctgctctgcttctacaaggtagtcaggaagccaagctatttgccttgggtagggctgggtgggggtggtgaggtgggggcgcagcaggttgtccacacccggttgccagtctgaacctgagccgctccaacaagcgagcccttctccgcggccctttggctcaggggagcgcaggccggccttcctcccgcacgcgggcgcgggccagctgcagatggagaacccggggggcgaccgcgagccctctgaggcccctcaagggacagggcatgggtgtgaggggtcgcgtgcgccccctggcgccgggtccgctgggcggggtggtgggcggggacggtgggcggaggcggaggcgggaggcggagccccggggttgggagtgcgggggtcgcggcgcagagtgggagccggagagcgagcgcggctgcagccggcggcatggctagcacggcttcggagatcatcgccttcatggtctccatctcaggctgggtactggtgtcctccacgctgcccaccgactactggaaggtgtctaccatcgacggcacggtcatcacaaccgccacctattgggccaacctgtggaaggcgtgcgttaccgactccacgggcgtctccaactgcaaggacttcccctccatgctggcgctggacggtctgcatccccgcggcccccgccctcagccctccttcctt

SEQ ID NO: 24444 - DNA, 1167 bp, Artificial sequence
  DNA replication origin
ggtcgcggcgcagagtgggagccggagagcgagcgcggctgcagccggcggcatggctagcacggcttcggagatcatcgccttcatggtctccatctcaggctgggtactggtgtcctccacgctgcccaccgactactggaaggtgtctaccatcgacggcacggtcatcacaaccgccacctattgggccaacctgtggaaggcgtgcgttaccgactccacgggcgtctccaactgcaaggacttcccctccatgctggcgctggacggtctgcatccccgcggcccccgccctcagccctccttccttgatggccagcccgctaggcgccctctcgcccccaatacccccagcgggacccctagactggactcctctgaggcccgacccgtctctcccaacagggccttagggagccagggacgctcctggtgcccgccctctcctgatggctgtctcgcggggcgcctgttcgagcctgggaccccgggaggggggacacgcagacaggcccgggttggtgactcccaggcgtcgggggatggggaagctttgcggtcctgagagtcaaggaagcggctgccctcccccaccccccatatcttggggaccgctgggacccagagttcatgctgcaggggcttgtctcctccacctccctcccctacgttccccgaaggctgggttctgataaaaatggtgtcattgcaagccaaatccgtttgtcctgacctcccttgagccatttcgttggttcttttaaaagtaggcgggggtgggggttgagaggttggaagcgggaaaacatattgcagaatttgttgttgttattgtttccctttaaagagcttctacaaacttgtctgcctaggcaacactacaaacacttcctccgagttttaggaaaataatagcccttgcggtgccgcgatgagtccgcagagggtagggaatcttgggccgtgagagcgtggcgccgggagctgaccagttctgcatccgagtccccggtgcctgctgctgtcctgggttgttcctttgtggaggttcacctgcgttgctctggttagtcaggccttatgctggtagcagctggtggatattcacacagaactctggctctgttgagtttcaagacaacagccgatgtcagcccggtccca

SEQ ID NO: 24445 - DNA, 1011 bp, Artificial sequence
  DNA replication origin
gcagcgcccggcacccgcccaggagcgcgcagctggggtgagccgagaccggggatgcgccaggcgcccacaggaggtggctgacggggcatcccgatacccgcgaagccggccctcctgcctctccaggctgcgagccgagcctctgcagatccagctggagtagccgccgctgcccccactgcctgtttgccttccaaggaagggcgccgaggttcccctggaacccgcgtctctcggcttttgtctgctggttcggctgcccggcggtgccatgcgcctgggacttgaggcgccgcgcaaggctgggggccctgcccgggatgggggagggagggaacgggaaagcatgcccccttctttcctgttccggccatcttgtgaccgagatccacgcaaggggaaaggggtggtcagcggcacgacgccccacgatggagtgtggcggccaacggagatgggtacctcgggcccgcaggcctctgcgcccagatctcagcgggggcgcgcgggccacccccacgttcagctctgaagcccttggcccagatcatgggttaatcgttctaacaggccagaggcagcaaaaataggagggataaagggccaggagctgatgtttccttaactaagcgcctaagtcattcgatcgttcttcattcacgtgtccattcagcaaattctgaacgccttctccgtgcctgtcctctgctaggttctagggacgtatacttgagcaagagagaccacagctcttgttcccgctgatcctgcagcccagtggatggagtccagaatctacagacctgccaggtcggtgtcttgatgctcttaaacagatggaggaagctaagtcttagagctgacaatttgttctagatcagggagcaagtaagtgacagaatcaaactttgaaactatttatgtctttagcactttttatgcctggttgcagggaataaaggccaattaacttggacatatggtttatttgaaaccatatgaagtgcg

SEQ ID NO: 24446 - DNA, 1117 bp, Artificial sequence
  DNA replication origin
cggagccgggggccaccatgtccgagggctcgcgagtgaagaggaggaaaggtgtgtggcccaccagcacgcgccggcgctccggcagcagctgcgcccgcccgccgtcggctctcgctcaggcctcagtggctctggagcccagcagaggaaggcagcggtgggcggggcccgggcgacgctacgccccagagcgccgccgccatccaatcgccttctttctggcggctttcctcccgggctcgccggggtcgtggttcgcgctgataggctgcggaggccgccgccccgccccgtccctgataggataacgtggaagcacgagacgaggctgcgcccgccggtcgcagagctgtcagcaagctccaaaccgcggctgccgcccggagggaagcagacggggagtcggtggcggccgccgagtccgcatgcgcaggctgcaaaggcccttttgggccggtcccgccgcgctaggttggcgagtgggactatttgatcctttccaggttcgccagcgtggtgttacgagaggaaagcgcagccgcagcgtacgaatgggaaggccaaacacggtcccggggagtctgagggaagctgcagggcgcctggaattggggtctcgagtgagccggtaaaaaccgcctcccgctgagcgtcccggaacaaatactgtctgaactgagccgtaagcaagaaacggtcaggagaagctggggcgatctgatgattagaacatttcagggactaccagagagaagtgcgtaattgctctaaggcaggtaggtaattggcctggaaacttgggaacgccccgccccccaccccgactttcagcaaaccaccgtgcccaggaaaaagagcgattgtggaagaccctgtgaagaagagaccaggaaggcactgtggcttaagagagcaaggcgttcctgaatgcagccaacatcaactggtaaacaaaaaactgtgagaacggatcctgaatcttgcgcttaccaggggaaattcaggagagatatgaacctgagcaagatgaggttgaagttactcaatgcggcattaagcctgttcacggccacttcctccggcgtcaccaacacacacactgtacaccagcagt

SEQ ID NO: 24447 - DNA, 1169 bp, Artificial sequence
  DNA replication origin
ggcgtagcgtcgcccgggccccgcccaccgctgccttcctctgctgggctccagagccactgaggcctgagcgagagccgacggcgggcgggcgcagctgctgccggagcgccggcgcgtgctggtgggccacacacctttcctcctcttcactcgcgagccctcggacatggtggcccccggctccgtgaccagccggctgggctcggtattccccttcctgctagtcctggtggatctgcagtacgaaggtgagtcctgccctgccccggccaggaagtgggctcccggaccaggccccccgcgctttcccgtctgcgcccgggcgcctgtcccggagcggctcgggaggtggggcgagcgctgggggagcccgcggcctggcttgggcctgagcccgcgcccggttccgggtttgtctggggaagaatcgaggggactggcgggccgcggggccgggacagcgggtttggactaaggaaccgggccgcaggagtcggaggaggcggggtgcgggggcaccgggctacgacttcaggaagtcctgggacgcggagacttgggcagcctttgggtcctggcctcgcttgggaccctcgctgggcgcctggggacactgtcagtcattggtgctggctgggaggaggcactaaggtggccaaaagacttccttcgctctggagttcttgggtggggaaggagtgtcatgtccggctgggagttggaggggacagtgttgactatttaaaaagtgtgtaaccatccccattaagatgcactgtcgtgtagagaaattgttagtttggtgcaatgaggagccgctgttggaattccatctcccggacggccaggcactgagtttgtggttttacaactcccaacatggtgtcattcaacgtatggctggcattacttttccaagttcgctgtaaaaaggttcccttaaaaagatacgaacgattaaatttcacttcagtcctgcagactggaatgttggctactccagaatagcgaaaatagagggctgtcctatcttagatggcagcggggaggagtaagaattaaagttgatagtgccgatttaacgaatgcttctggcgcggttactgtgcgaaatattcgagtgtaatgacacatcacatgcactgatctattttcatccccataaa

SEQ ID NO: 24448 - DNA, 935 bp, Artificial sequence
  DNA replication origin
ggtgggggtgtcagccccccgcccggccagccgccccgtccgggagggaggtggggggggtcagccccccgcccggccagccgccccgtctgggaagtgaggggcgcctctgcccggccgcccctactgggaagtgaggagcccctctgcccggccagctgccccgtccgggagggaggtgggggggtcagccccccgcccggccagccaccccatccggaaagtgaggggcgcctctgcccggccgcccctactgggaagtgaggagcctctctgcccagccagccgccccgtccgggagggaggtgggggggtcagccccccgcccggccagccgccccgtccgggagggaggtgggggggtcagccccccgcctggccagtcgccccgtccgggaggtgaggggcgcctctgcccggccgcccctactgggaagtgaggagcccctctgcccggccaccaccccgtctgggaggtgtacccaacagctcattgagaacgggccatgatgacaatggcggttttgtggaatagaaaggggggaaaggtggggaaaagattgagaaatcggatggttgccgtgtctgtgtagaaagaagtagacatgggagacttttcattttgttctgtactaagaaaaattcttctgccttgggatcctgttgatctgtgaccttacccccaaccctgtgctctctgaaacatgtgctgtatccactcagggttgaatggattaggggcggtgcaagatgtgctttgttaaacagatgcttgaaggcagcatgctccttaagagtcatcaccactccctaatctcaagtacccagggacacaaacactgtggaaggccgcagggtcctctgcctaggaaaaccagagacctttgttcacttgtttatctgctgaccttccctccactattgtcctgtgaccc

SEQ ID NO: 24449 - DNA, 1385 bp, Artificial sequence
  DNA replication origin
gggcggccgggcagaggcgcccctcactttccggatggggtggctggccgggcggggggctgacccccccacctccctcccggacggggcagctggccgggcagaggggctcctcacttcccagtaggggcggccgggcagaggcgcccctcacttcccagacggggcggctggccgggcggggggctgaccccccccacctccctcccggacggggcggctggccgggcggggggctgacacccccacctccctcccggatggggtggctggccgggcggggggctgacccccccacctccctcctggatggagcggctggccgggcagaggggctcctcacttcccagtaggggcggccgggcagaggcgcccctcacttcccagacggagcggctggccgggcagggggctgacccccccacctccctcccggacggggctgctggccaggcaggcggctgacccccccacctccctcccggacgaggtggctgccgggcggagacgctcctcacttcccagacggggtggctgctgggcggaggggctcctcacttctcagacggggcacttgccgggcggagggactcctcacttctcagacggggcggttgccaggcagagggtctcctcacttctcagacggggcggccgggcagagacgctcctcacatcccggacggggcggcagggcagaggtgctcctcacatctcagacgatgggcggccgggcagagatgctcctcacttcccagatgtgatggcggccgggaagaggcactcctcacttcctagatgggatggcggccgggcagagacgctcctcactttccagactaggcagccaggcagaggggctcctcacatcccagacgatgggcggccaggcggagacgctcctcacttcccagacggggtggtggccgggcagaggctgcaatctcggcactttgggaggccaaggcaggctgctgggaggtggaggttgtagcgagccgagatcacgccactgcactccagcctgggcaccattgagcactgagtgaacgagactccctctgcaatcccggcaccttgggaggcggaggctggcggatcactcgcggttaggagctggagaccagcccggccaacacagtgaaacgccgtctccaccaaaaaaatacgaaaaccagtcaggcgtggcggcgcgcgcctgcaatcgcaggcactgggcaggttgaggcaggagaatcaggcagggaggttgcagtgagctgagatggcagcagcaccatccagcttcagctcggcatcagagggagaccatggaaagagagggagagggagaccgtggaaagagagggagagggagaccgtggaaagagagggagagggagact

SEQ ID NO: 24450 - DNA, 946 bp, Artificial sequence
  DNA replication origin
gctcctcacttcccagacggggtggtggccgggcagaggctgcaatctcggcactttgggaggccaaggcaggctgctgggaggtggaggttgtagcgagccgagatcacgccactgcactccagcctgggcaccattgagcactgagtgaacgagactccctctgcaatcccggcaccttgggaggcggaggctggcggatcactcgcggttaggagctggagaccagcccggccaacacagtgaaacgccgtctccaccaaaaaaatacgaaaaccagtcaggcgtggcggcgcgcgcctgcaatcgcaggcactgggcaggttgaggcaggagaatcaggcagggaggttgcagtgagctgagatggcagcagcaccatccagcttcagctcggcatcagagggagaccatggaaagagagggagagggagaccgtggaaagagagggagagggagaccgtggaaagagagggagagggagactgtggggagagggagagggagagggagagggacaatttggactttttttgagtttattgaaactttccatggccaagcatatggttgattttaagaatgttccacacacagatgagaaaaatgtatattttgtggttgttggatagaatgttctgtaaatgtctactaggtccatttggtttagagtttagtctaagtctggagtttcattgttcactttctgccttgatgatctgtcttgtgttgtcagtgggggggttggcgtcccttcattattgtgtggctattgatctgttttcttaggtctagtagtaggagttttatgaatcttggtgctccagtgttgagtgtgtatatgtttagcatagttaaatattcttgttgtattgaatcttttattattttataaataataataaccccagggcccaaccccaatctcagccctactccactctag

SEQ ID NO: 24451 - DNA, 1062 bp, Artificial sequence
  DNA replication origin
ctttctacacagacacagtaacaatctgatctctctttcttttccccacatttcccccttttctattcgacaaaaccgccatcgtcatcatggcccgttctcaatgagctgttgggtacacctcccagacggggtggcggccgggcagaggcgccccccacctcccggacggggcagctggccgggcaggggctgccccctacctcctggacggggcggctggccgggcaggggctgccccccacctccccgacgggacggctggcctggcgagggctgccccccacctcccggacaggacggctgccgggcggagacgctcctcacttcccggacggggcggctgccgggcggaggggctcctcacttcccagatggggcggctgctgggcggaggggctcctcacttctcagacggggcagccggtcagagacgctcctcacctctcagacggggtggtggcggggcagagacactcctcagttcccagacggggtcgcggcggggcagaggtgctcttcacagcccagacggggcggcggggcaaaggcgctccccacatcccagaaggtgggtagccgggcagagacgctcctcacttcctagacgggatgacggccgggaagaggtgttcctcacttcccagactgggcggctgggcagaggggctcctcacatcccagatgatgtgcggccaggcagagatgctcctcacttcctagacggggtggcggccgggcagaggctgcaatctcggcactttgggagggcaaggcaggcggctgggaggtggaggttgtagtgagccgagatcatgccactgcactccagcctgggcaacattgagcactaagtgagcgagactccatctgcaatcccggcacctcgggaggccggggctggcagatcactcgaggtcaggagctggagaccagcccggccaacacagcgaaaccccgtctccaccaaaaaatacgaaaaccagtcaggcgtggcggcgcgcgcctgcaatcccaggcactaggcaggctgaggcaggagaatcaggcagggaggttgca

SEQ ID NO: 24452 - DNA, 1110 bp, Artificial sequence
  DNA replication origin
cgctcccgggtgcgcccgggccggcccgctccctgctcccgccccggcgcggctctctcaggcgacgcgcggcatcccgccggcggcttgcaggcgctcaggcgctggggagcggggttcgggtcctggacctgccgcgcgcagccgggcagccgggtagctgcggccgcgagcgccggggctgcatgaggctcgccagggcgccggccaagggcgaaggcgcggcccgctcccgccgccccggccggccgcgggcaccgcgcccggcacgcgcgcccggcgcctttgccggcaggtcgcggggctgtggagccgcgagggctgacggcgctcgccgcaagtttgcagagcggcccccgcagcgcagcggcagcgggcgaggcgcctctgcggagacgcctctcccggcgagtcgcactgccgctccgggctgtccgcccaggcgcaggcacgcagacacactcgcacacacaggctggcaccgccacaacccgccagccggtgtgacaggagccctgctacccgcagcaaaaacctgccctaggtacggagcatgcgccaaagcctcccccagccccggaggagtttccaggggaggagtccgctgctccgcggggctcggaggaggcagctgggggtgggaatcccttcggccgggagcaaggagagatttggcagaaaggcaaaggtggggcgagaggaggccccgaggtaagcgtcgctggcgttgatctgacaccttaaaatgggcagcttctctgtctggtagtggccggccttattttcaggaataacacctgcacactcccgggaacactcactagaccagactttacacgggttggcagttcccttctcagcaggggaacgtggctccagactgctgtgaatttctacccaagacattctaactggtgttcgagttttatggtggtcctcccttaataacaaacttggtgcgtccaactatacaactgtattcaaccagcatcaattaaccattaagcgcctaactgtgtatcaggctctatgttcaatacacactttctttcagcactagacagtccagccctcaaccatgcagtacttagaacataaaaaggagtttag

SEQ ID NO: 24453 - DNA, 1746 bp, Artificial sequence
  DNA replication origin
ccgcagccgcagccgagcgcgccggcgcccgcctcccccgcccggctcgcaggccccggctcctcaagccccgagggccgcggggccgccagccagccacacgcctcggcgtcaggggcatggaggaacggcgggctccgagccgcgccccggagtccgcgaaacttccgagcgggcgcccgtccgccctgccgccgccgccgccgccgcttcgcctgccggcctgagagcgggaccatggatgaaaggttcaacaagtggctgctgacgccggtgctcactctcctcttcgtggtcatcatgtaccagtacgtgtccccctcctgcaccagctcctgcaccaacttcggggagcagccccgcgcgggggaggccggcccgcccgccgtcccgggtcccgcccgccgggctcaggcgccgccggaggagtgggagcggcggccccagttgcccccgccgccccgggggccccccgagggacctcggggggccgcggcgccggaggaggaggacgaggagcccggagacccccgggagggggaggaagaggaggaggaagacgagccggaccccgaggccccggaaaacggctccctgccccgattcgtgccgcgcttcaacttcagcctgaaggacctgacccgcttcgtggatttcaacatcaaagggcgcgacgtgatcgtgttcctccacatccagaagacggggggcaccactttcggccggcacctggtgaagaacatccggctggagcagccttgtagctgcaaagcgggtcagaagaagtgcacctgccaccggcctggcaagaaggagacgtggctcttctcccgcttctccaccggctggagctgcgggctgcacgccgactggacggagctcaccaactgcgtgccggccatcatggagaagaaggactgtccccgcaaccacagccacaccaggtactgtcgcccgctgggtctctgttcttcccccccaccccccatccctcttcctcagtcctgacccagagcgaccccgcgctccctgcccctgccgatggtttcctggcgtcttcagcggttggcgccgtggctttggggagggatgagaaacctccggatagtgcctaggtcctgaactcgttcttcccccagcccccaccgcttcccgccacccctctgccttcaccctctaagatgtgcggagccaccgtgtggatcctgcctgttgcctagcacggcctggcctccctcccagtggacgctggaaaaacgccctgaaatggggagcggatcgcggtctgggttagaccagccttgtagaattgtgaacttaagttttgggagtgtaaacccaaacccaggaaaaggaagggggagtagagaggcaaggcacgagttttccaggcgtggtgaagctggagacgagtataatccctccctaagtggcttttggatggcagctcaggaaacagtcaatcctcttgatgccactttgaagacacacgtgcaaattcctgttctaccgcgatagataactctaattctggagatggtctttgttgcccagcagtgccaggatttggactcacctgtcctcagaaagatttccatgctcttcctaggccattacatcaacttattccaaaagtatgttaaatgcctacagggtgcctgacagtgtgctaggtgttaagtgagtataaagataacataacatcccttgttttcaggatggaatgacattcttgatcccctgcct

SEQ ID NO: 24454 - DNA, 1261 bp, Artificial sequence
  DNA replication origin
ccacctcacagccgcggcggccccctgggcgccggcggcggcggcggcaactgagggagcagcggccctgggcatgggccgggccgagccgggcggcgatgcggccccgtaggcaccgggtgggactgagggcgagcagagagagagaccgggagccgctggtgccgcccgagccgcgggcccgcagtgccgcccgccccgcccctcgcgcctccacgcccagatccccgcccgccgccgccgccgccgccgccgctacccccagcgctcgagcgcgcgcccgagccccagccgcagcgcggccaggggcggggtccggcggccggggcggagcccgcggcgcagccccgcccccgccccctaggcgacgggccgcgagcgctcccgagaggctttgcggggctcggaagcttctgcccgcgcggagataaacaagcaccgcgaccgccgagcagcgccgaacccagcgcgcccagtcagaccccagggcctgtgtaccgagcatgcgcagttcccgcccaagccaggagcagcgtcaacctgagactcccgagacattaagaattcggaagggatgagatggtagaggggctagagctacctccaagctttatcctgaggcggggagtgaaggagagatgcccaaggcccaagaggggccgcgagggcctttgtccgatgccacccagtctgtcagcactcctagagctttggttttatcttgtattagcatgtgaagctttaaggggggggcacctacaggcttctgactgaagttgtgtaaacgcaacaaaatgaagctttggagcgttaggacattgatgggagggtgacgcccccctctagcagcgcgccagaggggcgagtcagaggcggccacacaccacggaagtcgggtccaagcccgctgacgtcgccggggtcccgcccaccaaccctctggacccgcccacatttcttctagacccgcccctttcggtgccgaactgaagtcgagctcttcccacgccctgtcagccacgggtgagttgaaaacctggagagcggaatcccgaacggcagccggaaggccctggactcctcatagcaacagccagctaggggcatctagtgggaagctgggattcattctagccaaccacatcacgtctctgtaccacaaggtaccattcacgaccaataagagagcgcccccataccacgtgcctttactccttcaaccaatcgagaaaaacgctagtcgtaggatccgcaagcccac

SEQ ID NO: 24455 - DNA, 1246 bp, Artificial sequence
  DNA replication origin
cgcaaagcctctcgggagcgctcgcggcccgtcgcctagggggcgggggcggggctgcgccgcgggctccgccccggccgccggaccccgcccctggccgcgctgcggctggggctcgggcgcgcgctcgagcgctgggggtagcggcggcggcggcggcggcggcgggcggggatctgggcgtggaggcgcgaggggcggggcgggcggcactgcgggcccgcggctcgggcggcaccagcggctcccggtctctctctctgctcgccctcagtcccacccggtgcctacggggccgcatcgccgcccggctcggcccggcccatgcccagggccgctgctccctcagttgccgccgccgccgccggcgcccagggggccgccgcggctgtgaggtgggggcggcagcgggaggcggcggggcgggccgccggggccggggctgggggcgcagcgcggccggcgtaggtctatgtcgcgggcggcggcggcggcggcggccgcggagggacgatgcgcgagtacaaagtggtggtgctgggctcgggcggggtaggcaaatccgccctgaccgtgcagttcgtgaccggcaccttcatcgagaaatacgaccccaccatcgaggacttctaccgcaaggagatcgaggtggattcgtcgccgtcggtgctggagatcctggacacggcgggcaccgagcagttcgcgtccatgcgggacctgtacatcaagaacggccagggcttcatcctcgtctacagcctcgtcaaccagcagagcttccaggacatcaagcccatgcgggaccagatcatccgcgtgaagcggtgagcgagggcacacgggggcttggcggctgcaccccggagtcaccgtcccggggctggaactccccgcgcggggctccggggaaggggctttctggggggtggctccaagctggaggctttactattgtcattctgctcctcctcctcaatctcaaatttgagtgctttgtttcacaactaaaatttggcatcgtgttagcccacagaacagctctttgtctcttggacgttgttagcattgcttgttacagagcccccaaggaaacaaagtttaaaacttgcaggggggaaaggggtggatagatttgtcttgggaagagaggaactgtgcaggtatagtcgagacatttgcagactgaacaacaacaatctgccttggcaatgtttgacagtaaaaatcgctcacacacctatac

SEQ ID NO: 24456 - DNA, 1273 bp, Artificial sequence
  DNA replication origin
ttgaagaatcaaagatgcatggatggatggatgggtgggtgaaggggtagatgagtgggtgggtagatgggtgaatgggtgggtgtatggatggatggatggatggatagatggttggttgtgtggatggttagatgattggatggaaaaatgggtggttggatggatggttagattaatggctgggtagatggaaggatcaataaatgcgtggaagtgtggatgggtggatgggtggatggatggatggatggatggatagatggatggatggatagatggttgggtacatggatggttagatggttggatggaaaaatgggtggatggatagatggttagatgaatggttgggtggatgggaggatcgattaatgagtggatgaatgggtgggtggatagatggatgagtggatgggatgcatagatgggtgggtaggtggatacatggtttgatggaaaaatgggtgggtgggtgggtagatgaatggatagatgggtgggtagattgttggatggatgcataggtgaatggacgtgagggtaggtaagtagatggatgggtggatggatggatggatggatggatggactggtgggtggatgagtgggtggatgggtgaatgggtggaaaaatgaatgggcagtatagtagccattcagagactgctaaagtgctggaaagttgacacagagctacgtaacagtcttatttgatatttactaataatacagttccatggagaaaaacatcagcttatttgacttaaatatgacatgtatttgcaaatctcatgaagagaaactcacactgcttttcaaaaaatggtcctgccctgcagtggtgctgacatcaagcagtgtcccagagaggggaggaagcagacactggccagagatccattataagggctcttggctcattaactttctacttccatcagtggccttgtcacctcagttaaccttctttccatctcatttcactcccccttctcccagaaatccatgatacttccattttctcttccattagggcacaattaggaaggtgcttggcatgtaaggaaggcccaatagatatttggcagtgtttattaatgaatcccactgttcttctgacacatctatcccctctagtccttcacccacgcagctaccaaaaatatcaaaacagcatgagatgtcatattttaatgtgtaacacaaatgaaatgtggcctgcttgctactgatttaaggtctagcttagtcctgtgactcattgcaagtc

SEQ ID NO: 24457 - DNA, 1350 bp, Artificial sequence
  DNA replication origin
aagaaatataaattcaacaaagataggtctgcagacctcctgtagagaacccatcattgtcatggcccaaaactttctaagagaattttctctaggaaccaattagaatcctttagaaaaaaatcttggctggccatcccaattgcacgtggatcccagggctcagcccagattctaaacacagtggccaagatttaaaatcattcaccaaagagcaaatgttttgactttcaaagagcagaactgcagcagaatagccaacaggaaattaaattccctaagttaaatactatgtactgccagcggtgtagaactactcttccatctcacccagtatgaaacctcctcactagagatgtagtgtccctttggggcagaaatgaattgtttttgtagctgggcgcagtggctcatgcctgtaatcctagcactttgggaggccgaggcggggggagggcggggggggctggtatcgcctgaggtcaggagttcgagaccaactgggccaacttggtgaaaccccgtttctactaaaaatacaaaaaagttagctgggcatggtggaacatgcctgtaatcccaggtatttgggaggctgaggcatgagaattgtttgaacccgggaggcagaggttgcactaaaccgagatcgcgccactgcactccagcctaggcgacagagcaaggcttccactgacacccttagcccaatgtattggatacaacagggtctcaacaaaagtaccctctgatttgtacactgctctctgcctttggcagccccaggagttaaagaacatcgcgtgtattatctgcgcattagaatgctgaaattgaaattacgcctctaggttcctagactgagattgagataatcagccctgtaaaccagggctcctttaggaagaaaggtgtctctcttgacgttccccaatcattgcgagaacagaatccctaaacaagggattcaagggaacagtcacagatcctggggtgggggcatgtttgctacgtgtacatccgaagacgaccgcgggctggggacgggcggcctggcgggacagccccgggctgagtaacccctcttccgggcaagccccaggcgtgagtcactggagagcgcgacgggaggaaggggcgccctgagtccacagccctgggggaggtcggagggtctgaaagcgagaagtccgtgagtagaaggtacgtaggaagtgggtctaaagggactgccttcctgggggtgggtgaagggctggatcccagggagcgagggaccaaaggggtggggcctgctccagcggccacggggaggggccgggggtcgctagaaggaggccgaccagcccg

SEQ ID NO: 24458 - DNA, 1539 bp, Artificial sequence
  DNA replication origin
aggcggggtgggtggggagcgggctccgggtcgccatggccgcctcgacgccggggccagcgctactcgcgcagggaggagcggcgcaaagcgggcagcggccgcgtccccgccccgcgccccagccgagcgcccgcaccgctgcgcccgcgccggacccgccgcctctgaggccggcgagcgggaagtgcagtggccaccgcccctccccgggtctgggccggcccctcggcggggggaggcgggcgccgcgcagcccgagcagcggggacgcgggagagccacagccccctccagcgtccgggcccgcgccctgcgcccgccccgccccgctccgctccgcccgggcaggtgcgcccaggggcctcccgagcccagcgcgccgccggggatctgcgcctctcttgggcttccggccagggccgggctccgcgcggcgctacctaatgcagcgcggggagcgccactggcgagacgcgaatccagcagctgtggcgaaaaacgaaccggggagagcgggagacgtgtgcacggcgaagccgggagcggcaggcgggcggtcaggggctcggactctgcaggtcgctttttgaggtcctgcctggggctgcttcgcctgcgacgtcgcgcggggaggacagtcttcagggacccaccgagccctcccctcccccggagccacaggcacgggcttccggcaccaccccgggctgcgcgggacttaagcttgggggagcggcggccaccccgcgcccgcccacgtcctggcccagcgccctccgcccgagcgaatcccatgacagttcccgcccgcccagcctcgggggacagtgcccttggggaatggcgtgggggaggttaggagtggcttgcggtgcttgagagccttcggggtttcgggaactctacggagcggggagcaagattcaggacccaggaggcagcgatctaggggcacagtcaccgtccccacccagcagctgccgcgttaccttctcttcccccttctgagcctccagtccctctctctaagcgtggcgggaagaggcctagggcgcagcaagtgacgttctgccagacccggggctagcggattccggccttcggaggccactggctcagaaccgtgggccttttgcgtcttacaggagttccctgacctcagaccgagagggcagatttcacgggagaggcctcaagtgaactcacagctggacaggagctgggcagaagtggagtgtagggaccctgatagaagggcgggttgagacaagaacaggggtcttggaagtagggggtgcttgtgggcagctcctggggaggagcagagatgtaatacttgcagatttggtggtctgtggttgaagagaagaaatggtgggtttgaggctttgctctgtcagcccaaccagctgtgtgtcacagatcagatttttttctgctcgtgattctctaagtgtggttctcagaccacgaccaccaccagcagcccctggaaacgtcaagaaatgaacattcttgggccgcatccccgaccta

SEQ ID NO: 24459 - DNA, 919 bp, Artificial sequence
  DNA replication origin
gcgaaggtgggcgcgtggtccccgaggtcctgccctgcgcagtcgggcggcgggtcgggcccgggcagccccggccaccatcgcaggagctcgggggcctcggggctccgggctgccccctgcgcccctctcccctcacctccgccgacgtcgggctgcggggctccgcgccggtccccgctcgcctcccccgaccccggcgcccttcccccgtttccttccgtcctacccgcccgctgacagcgctggacgccgcttccggacctcgggccgcaatctcggcccctgaggccggttgcgggccggggaggtggccgctggcgcggatgccgccgggtgcccgccgctcgcccacgcgcggcgcgagggttcccggcgggtgacaaagaggaacacaccctctgcccaagttagatttgtgtctctctttactgtctgcctttatgcagggcaaagttttttttattttttattttttaaagcaaaggacagattgctttgcggcgagtatttccaaacaacttctgattgtggttttacgattcaagttccggaaactttagctgtgtgatccggctggaccccggagactctgtgtgtgtgtgtgtgtgtgtgtgttttatttgagggggggaaatacgaattccctgtaatgagtctggatctcgtttgtggcagctggaggccagcggctgttggggatcgagtagggttccccagaaaggagggagctgaggctcacaaagaagcgaggccctggtatctgatcagttcgtggagacgtgggagagcctgcttgtcatctggaacagtttagcagcctcggcctccctgtctctcccagccctggggagtaccggtggcctctggccgtttcattatattgttgttaaggctcttctccttgtcagtttaccag

SEQ ID NO: 24460 - DNA, 1047 bp, Artificial sequence
  DNA replication origin
ttccttatgggttaatgtatctacagactactttcagcatatttttgaagatttactgcagttgtggggaaataacaccagcattcagtatattgaacacttaagatacttaccctatggagaaaggagccccaagggaacaagtgccggtttacgcagctgtctcctattaggttctctaccctggaccgaccctggttgtgttttctctccctcatcccatcataaaaactggagcccacatccaggttcagccaaggccctcagggcaaacactggctccactgcccctttattgcgtgcttgcaattggagctctttgggcctgagtttccttactgttttgcttgatcagcagtgcgttgacaaagatgttgtttatattttatccagcatttttagctgtttcatacgatttctacactgtggaatcattttaagtggtgtgaggggtggagggggaggagacatggctggagctgaagaactgatctccagcatgagtggggctgaggtccggattaggcagtgctgttagagactccagcaggcctcaggcagggatggcaggcaccaagtggcctgggggcagtggggagaggtggtcccttgggtttctggctgggccactgagtggcgggtggcattggttattgaagggctgctcccggaggagatgagcggggagggggtgctcaggtgagacttctggggagcaggtgactctctggctccaagcggggagccccacctggacttgctggtggggctgctggtccagactgtgctagaggagagagaaagggctgctattgtttgcctcccagcaggtgaaggaggaggggcccaaagacacctgggcaggtaacttcatcaggaagacggctacctctcttctccagagagcgagagtgaagtgagcaggtgatatccgtggtgatccctccacaaggagggaaggaggcaggaggggaggtggctttagctccctttcctttagccctgtggactggaggggccttgatcatctcttctacccttgcacgg

SEQ ID NO: 24461 - DNA, 933 bp, Artificial sequence
  DNA replication origin
gttattgaagggctgctcccggaggagatgagcggggagggggtgctcaggtgagacttctggggagcaggtgactctctggctccaagcggggagccccacctggacttgctggtggggctgctggtccagactgtgctagaggagagagaaagggctgctattgtttgcctcccagcaggtgaaggaggaggggcccaaagacacctgggcaggtaacttcatcaggaagacggctacctctcttctccagagagcgagagtgaagtgagcaggtgatatccgtggtgatccctccacaaggagggaaggaggcaggaggggaggtggctttagctccctttcctttagccctgtggactggaggggccttgatcatctcttctacccttgcacggggtcacccttggccagggacgcctgtggccagtggctggggccttgtgctgcttaaagcatgagttattagcacaaccgattcagggtagacgcacgttttttgggacttttggaaaaggaacacgcgatgacgaatgaatgattagatctgaggccttggaggggtcagcgagtgctggccttgaaactcaagctgctttggccttggtgggagtcttgcctgcgtggtgatggtgacggttggagtggccttcccaggcaggaagggaggatgcggcgatgctcccagtttattgaaacctgactttgttccctgctggcagctgttctgagagaagaagggaggtgcagggcactgggggcaggcaaacagagaaggatggttgcattctatgacaagttgacagcattatgagaaactgtaccagatactttgttggtggatggtctggggctttgggtagaaaaagaaaacattagagctgagatgaaaaggaaaagaaatcatctgaccagcaagactggagtctagag

SEQ ID NO: 24462 - DNA, 2032 bp, Artificial sequence
  DNA replication origin
ttgtggtagagctgtgcatggggaactggacctggctgtttcattctgttttgtttcgttctgttctgttctgttttccattaaacttcctgtttgtaaaaccctgatcaggtgaaactgctttacatggatgtctgaaaggccagaaatgcatgtgtttgtgattctgtattgtgtctggtagaagcttctgtaccaggagtggcttactgagaattgctgtcaagtttggcatctaggaattcccttggcttaagaggcggagtggggctggagccatttgtgtggggagggctgggggaggtggtcgggcagacttgtgtctggaagtccgagcgtgggactcgtctgttctcgtgcatgccttggcagaagttaaagttggcccacagtgcaggtccatgtgccaggccagttgaatgaggatttccggggatgagaccctaagtggtttttcagggtctctaggtgattccagtttaaagccaaggttgagaccactgcccccggaagttcttgaggtactgccattgggagattgctggggtagcaacagggatgacaagagaaagagactggagagaggtttggagagccaggacgcggcggtggatttgggtgaaggagggaagccaatgttccaggctggggcagcgtggcaccaggtgttgtgatgtgtggtgcgggaagccgagtgtggggtgaaccgtgtgtgagtctgagttgtccaggagagacgtccagtgtgaagtggcaccgaggtgtggagttcaggtgagaaagctgggcaggtgaagcgggcttaggggccactgctctgtggaggtcacttgagccgagagaaaaaagggtgtcagttggggcatgtgggggagtgaggctggcccctaggtgtgagggtgaggctccgcctgtgagtgagaggggagaggtatggccgaggggcgggaggaggtgcaggcttaatggggccacaggcatcaggggatgatcagcagggcctggggctcattgcctctgaggcccatacaggacagggagtgatcagcacaccatcatctcatgatgggggagggagcgctcggagggacacgggtgggctttggagcgagtggagggtaccaaatagaggcagtgagtgtgaatcccagaaccagggctgagagatggccaaggtgaggccaaagtgttggaatgacaggcatgagccaccacacccaacacagggacatctgcttccctggtgagaggaggagcccagcagagagaagctgatgtcccagagatgggctcccagggaggtgggggaggtgttctccgggaggaggaggagggtgggcatgcacacactggcacgccagggagttgtggaaccacctcccgatggtctcttctctgtgagggaggaggcgggggggtctttgggaaatcccagagggactggacaagggtgtgatgggtggggacttggggctggtgggtgtgggtttagaggtccccaggcggcctccccctgaacgtcccagcgcccccagagcaggtgtgcgagcactgatgggatttcctgcatttctgtgttaagggaaacagatggccaagcctcggggggcagtgattctggggactggatcttcacaatccgagaaaaagatcccaagaatctcgagaatggagctcttcagccatcggacttggacagaaataaggtacgtctgctcactccagaatggccacgctgacctcagtctgcagtgttttggaggcacttgtgtgtgaagcttgctgtgggtgcggctggggtcctttgtggcagctgtcctggaattttgttgctaggggatgggcagatgaagagctttagttctgtctgatgatccaggtgttcacaccagggagtctggcctctggtctgttttgtgccactctattctgctctctgcagccctgctgttgagttaggatgtcccgatgtggcaatgtcatggggtttgggggtgacccgtgaaatgacttcatagctctgagggactgt

SEQ ID NO: 24463 - DNA, 1153 bp, Artificial sequence
  DNA replication origin
ggctcactccccggtgcagtcgggcctgcccggcatgcaggtaggcgggcgcgggccgcggggccgggatgcgcgaccggggcggaagcagcaacttggcggtatccacacggcgtccccctacgctcagccggccggggtcgcgccggagcctggctccccgcgcgcccggctcggccgggggtccgagtccgagtccctgggcgtccctgccggctccggcggccgaggtctccggcgtgtgcgtgcaggagccgtaggaaccgcggcctgggtccggatgtgggggtgcgggcgcctagtcctccgcgctcccctcgccccaacactcttccggagctgcaggccctgggtggccctgtccccgggagaagtgaggtggagtgatgcccttggaggcccccgccgggtcccggggccctgcgtggtggccgggttggcggagggccccaggacgcgtcccccaggctcgtcccccacccccgggcaggcgggcgggagacctgggcagggcggggacggggagcgcgcctggactcgtccgggcccgagcggagtaggcagggtggagtggaggaaggtaaccgcgagttccacttgcagtggctttgcccggagcccccgtgcacctgcggaccgggggaaagtgcgagttgcaaaccttctggaaggaggaatccctcggacagccgcgcaccagggtcccgggcccggccccgggaccctggactttcactttgagacttggttgcatttacaggaattcttcgcccagtaaacctctctttcggtacttggtgacaccttggcctaccagtgactttttggggagtgggagaggagttgaatttcaaatttacatgtataagttaaaggttttttgttgttgttgttttcgttgtcgttgcttttagccctttgaaaaacaaagctaccgtccttggctaactcttgtaaactttgtaggcgcagaaatggtggcaaaatgcttaggatggaaatcttaggatgcagttaggatatgtcatgaaagtttgctctgccagtttagctgagtgaacgttaagtgtttgaagaaaaccaaaagcatccaagtagattactggttgatttacaggtaccaacaggctccttccctgtgtcttgagggctg

SEQ ID NO: 24464 - DNA, 1559 bp, Artificial sequence
  DNA replication origin
ccgccgccgccgctgctgccgctactgctgggctggagccgggcggcctgggcccgcgcgcgctggccgctggagccggagtgggcgcgcacagcccgccgagcccgcgagcgccgagcgcgtcccgccccggcccggcccccgcgcccgcccccacggcccggccggggaccccgccccgcgcttccgggagggggaggggagaggccggtggccgcgcgggagccctaggccgcagccgccgcctgtcggcccggcccgggtcccagctgctcctgcggcgctcccacgcccccgcgggcgggcggcggggccgggagggggcctcggctggggcgggcgccgggagggaccgagtcggggccggaggctggccgcgtgcccaccgggccggcgccggggcgagcctgggccgcggccccctcttcccgccagccagcccaccccgccccggcggcctctgggaaaacgcgtcccgggcgagcccctgagggcaggatcggagtcgggggcacctggggaaggagagcgccccgtggggcctcggccggtggcctgtgccaaaaggccgggcagagctgcttcggtgtctgggtgaagtttccagccaacccaagaaggaaaccgaaagggaagaggccgagagagaggttaattcctagtgctttggttaccgaaaacagcccggctgggactgctgggctgggaacttagctaagcagtgcggaggctgaaccccaccatctctgggatccgcagcaaatcagaagcccccacccacgataaggggaaaatggggcgcagagggcagggaggaagggaagagaatggaaggaaagcgcgtctggactttgaactgcagccctctccctctttcccttgcctcggaagctccaggcccactcagcaccagttctgtctcctcttttcagccgccttctctctagctactgaggggaaaagtcaggatgaagcgggtccctcggcctccagaaggtgttttattacagtcgcaaacaggtagagcggcagccaccccagtgatgactccctgctccttagattgtagggacgctggcacctcactcatgctcctaagtggccattttgcgccctggctgggcgagttaggcagacaaaatgagcccccaaaagtttaaaggcctccaccaaaggagtatttcttttctgaggtgtcattgtattccatccacgaacttcagttcccccgggtgctctggatctgacatggagtaggatgctaacatctaatcccttctttccctttggaaagatgcatgttttttctcggagtcctagggaataccttagaatactttcatggttgtcattggtacacccatcccttgaggagccctgccacccgtaagtaggactgcaaggaaatacaaaattaagagaagtatgaaccctgatacccaggaacttaaaatcaggtgtataaattttgtacacctaaaaaatatggtacctaaagaggcgaacagcaaaacaagcaagaatgtgaatctttaaaatgtttctattcttcagcgcag

SEQ ID NO: 24465 - DNA, 1221 bp, Artificial sequence
  DNA replication origin
ttgtgcctcagcctccagagtagctgggattataggcgcccaccaccacgcctggctaatttttgtatttttagtggagatggggtttcaccatgttggccaggctagtctcgaaatcctgacctcaggtaatccgcctgccttagcctcccaaagtgctgggattataggtgtgagccaccgcgcccggctatatgtattttaatttctgtttgtctttattttttcatatatacgtgtgtgtgtgtgtgtgtgtgtgtgtgtgtgtgtgtgtagtatgtaggtatgtatgtactgagctccaagatacctggaaagatgtaaattagaattagttctaatgttctaatctcaagttaattaagtatattactgctactgactcatgctccaggcactgtacttggagtttcgtggttgatcctcagaacaaccatgtgtggaaaatatctattgatggagggctgtggaatggtggaagagctggccggcagtcggatcagctgggatatctgttgatggagggctgtggaatggggggaagagctggccggcagtcggatcagctgggatatctgttgatggagggctgtggaatggggggaagagctggccggcagtcggatcagctgggatatctgttgatggagggctgtggaatggtgggaagagctggccggcagtcggatcagtggggtatctgttgatggagggctgtggaatggtggaagagctggccggcagtcggatcagtggggtgtctgttgatggagggctgtggaatggtgggaagagctggccggcagtcggatcagctgggatatctgttgatggagggctgtggaatggggggaagagctggccggcagtcggatcagctgggatatctgttgatggagggctgtggaatggggggaagagctggccggcagtcggatcagctgggatagctgttgatggagggctgtggaatggggggaagaactggccagcagtcggatcagctaggtttgggtctagtttgcggctaatcacaaactgttacatgggagatatgtagtactgaaattgggggcttttgctgatggccaaaaaaacaaaggtgctcaatgaataaatcttggtgaagagtggatccctccattttacacataaggaacaaaaagctttggagaggtcagccagaggttctcagcaccggctgtgcacgagagtcacctg

SEQ ID NO: 24466 - DNA, 920 bp, Artificial sequence
  DNA replication origin
gtggggctgcagcgagactgcagggcgagggtggaaacacatcatgctcctggttcttcccttccttgagctgtgagcttgggcaggccgctggaggcgtcaacgtcaccatttgtaaaataaagacagtgcccgcttcccagggttggggtaaggcccttgtggtgccaagaaaggcccctgggtgagcccttgccctgtgctagttgttctacccatgcttaccgagcatgcaccaagggcagacacatgccaggcaggtgggatacctcccagaacaaaaagaagccagacccctgcctctgtgcacactcgcattctcgcagcagccgatgaaccataagcaacaaatgggctgaataaggaaattatggaaaatgatgtggtatagtaggaggtgttgggtgccatggatctaaaaaaaaaaaaatagagcagagggacagaggttgtgactgaaaaggatggtcagagggcgcttcctgggatggtggcatgtgagcagccacttcaacaaggtgagggcagagagtgcctggcagaggggcagccgtgcaaaggccggaggcggggcatgcctggtgtctttgagaggccagcacacaggatcagggggagtgagggagagccagagcccagcacacaggatcaggggagtgaggggagcgagaggccggcatacaggatgtggggagggggaaggagggagagcgagaggtcagcacacaggatcaggggagtgaggggagcgagttgctgagggcggagagaaagggtgtgtctttcatgttgggcaggccagggtgaaagcctgggcttttgagatgtctacagagggttttgagcctagaagtcacgtgactgctgtgtggcaggacccctctagctactgtcttaagaataaagtgatctgggcgtgg

SEQ ID NO: 24467 - DNA, 1560 bp, Artificial sequence
  DNA replication origin
gccggggctggtgtccacgcgcgacggctcgggagcacggacctctgctccccgcagcaccgccccccgggtggagccggcggccccgcctcgcagagctggggctgtacctggggcaacggggccgggcctggacgtcaggtcggaggagtagcacctgccaggagcacgtcccgccggcaggtcgcaggagccctgggagccgccgccatgggtacgctcggcgggtggggggccggccgggctaaagactcggagctacgcggggcgggggccggcaccgagggccgggaggcgcgaagggtacgcggcggcgggaagcggggcgacccgaaggcccacgggggccgggaggttgcggggcgcccgggatcccctcccgggtggtcaccgtgcggccggggcgcggaagccagaggtgcccagaggcgccgactccgccgaggttgcgatcctggcccgcccgcccgtggggcactgtaatcctcgtattcccaccctgcgggccgggagtgcgcttggagcgggacgggacccagcgggtgacggcaggggcggcagaaacaccgtctaactggcggaagccttgtggctgcctttgcacttgtcttgcctctggctggcgaggtgaccctggagttccgcagggaaccctggcccaagaggagatggggcctctctttgtggccccctcttaaccctctgcactgtcccctggcttaatttgaggcaccttctgtgccttacagaaggtgaggagctggctcttgatggggctggagcgtcagcaaaacagctaggaggcaacttgactcctgccccgcttccgaattaatcaccctggaactaaggcagacccagagagaatgaacggaagcagagccagagctgctgggagcagcccagcccgctgctttcttaaagatgaggaagcccagtcagcttcccaaagttgtgccatggatgcccccggccagcattttgcagaagatgtggccacgttgttgagggggatctgagcctgtagacaggaatgtcggtcggtggctgcctcagtggtcctggtggagtgatgtgtgtcagtgcccagccccagggtgcagccgtcctctggctctcagaatgcctgccggacacagcatgtggtggttcctaaggagaagcagtgagtggttcacactttggacttctaattgtagccagttgtgcctgttccagaaagacctgcaacttccctctctggcggagactgtggccgagctcagctctgcaggcagattcctgggctgcagttctgggtcccgccctcaaacaagtcccacctgtcactctatgcaactttgctgggaggtgctctgaactatttctgttgatcatcaaataccaaatacctgagcagcatccttgttgagttggaatttatgacccgtgtttagcatttccagcagatccaatcccgagagctgttagaggcagctgcctggttattggtgaaggaatacagagttagatttgaagcctcctttccaaatgaattgatgcgttctagtctgcaactgg

SEQ ID NO: 24468 - DNA, 1100 bp, Artificial sequence
  DNA replication origin
cttcgggtcgccccgcttcccgccgccgcgtacccttcgcgcctcccggccctcggtgccggcccccgccccgcgtagctccgagtctttagcccggccggccccccacccgccgagcgtacccatggcggcggctcccagggctcctgcgacctgccggcgggacgtgctcctggcaggtgctactcctccgacctgacgtccaggcccggccccgttgccccaggtacagccccagctctgcgaggcggggccgccggctccacccggggggcggtgctgcggggagcagaggtccgtgctcccgagccgtcgcgcgtggacaccagccccggcccaggtgcgggtgggccccgacgggagcgcgtggcaggccgggggagagccagtctaaacgcggattcccaggccccaccccccggccagctgactcaggaggtcggggctggggccccagaatgtgcatttctaagaagtctaaggggaggttgatgctgctggatccagaacgacactttggaaaccactgtgggaggaacgcacgcttctgggtggggaggcaaaacacggtgggacagtggtcagctgtgtgtgtgtgtgtgtgtgtgagagagaatgtgtgtgtgggtgtgagtgaggattgtgtgtgagtgtgtgtgtgtgaatgaggattgagtgtgagcatgtgtgagaatatgtatatagtttgcatgtgagaatgtatgtgtgatgtgtgtgtgagagtgtgtgtgagagtgtgtgtgtggctttattttgagattcaacctttgaaagcatttctgggggattctacatttcctttctttaagaatcatcctttctttaagaggacacaaccaaatggaagaatattctatgctcatggataggaggaatcaatatcgtgaaaatagtcatactgctcaaggtaatttatagattcaatgctatgcccatcaagctaccaatgcctttcttcgcagaattggaaaaaactactttaaagttcatacggaaccaaaaaagagcccccatagccaagacaatcctaagcaaaaagaacaaagctggaggcatcatgctacctgacttcaaactat

SEQ ID NO: 24469 - DNA, 1570 bp, Artificial sequence
  DNA replication origin
atgtaaatgaagaggatgaagtcaggttacaaaatcattgactcggcgtaccccctatggacaggatatttcctgtcatagctgaagtatcaatcggctggccttatgttccctgcctccagaccctattttcctgcctcactggggagggggaatggggagtgagtgttaaatgggtgcagagtttcagttgggtaagatgaaaaatgtcctgaagtgggtggtggtgatggttgttcaacaatgtgtgtgtacttaacgcctcacaactgtacacttgtaaatagttaagatggtacacttctgcatgtatgtttaattctctaggggtttccattggccagtctgcggggggtccagggaggcctctgatcagggacactggagagggacatgagtgagagccaagccccttgggggaactgaggggaaaggtgtttcagcagagggaacagaggtgggtgccggctgttcacagagatgccaagggaggggaggcacgggggcagagggaacagcaggtgacccccagagggccctggtggcctgggcaggactctgtgttttatgcgaaaatggaaatcaattggaaggttttgaacacagaattgacacgaccaggcttagggtttttcaaagatcagttggcttctgtggagaaggggttgccgcgagcaaggggtgaagcggggcttacggtgaagctgtggctgtggcccgggggtgggggctgaggttgggtgcaggtgtgcaggggctgaagaggaactagattctgaagatacacagaagggagtgctgccaggacgtgctggggactggattaggggagagggacagggggagggacaggagttggggggatccaaaattttggtcaaccactggaagaatggagagagcgaaaagggagactgggaaggtgcagtgatgtgagcagccccccttctgggcatgtgaaggttgagagggctctgagagtggggtggtcaggagtgcaggggatttggaagtcgaattcaggggagcgtctgggctggaggagacgctgctatgtagatgatagtaaagctatgaggaccagctggggccctggtgagtgcggacagaggagaggtccatggcagagcgtgggggttctgcagtgttgagaggccacagagaggaggaggaaccaacaatgcagaccatgagagagaagcagaggtctggaagggccaagagacgggcgttcaaaagccacgtgaataaagtagttcaaaaaggcagtgacccaatgaatccaatgagaataaaatgaggcccaagaatctgccgttggatttggcaaagtggaggtgtatgagtccattctcacactgctacaaagaaccacctgagactgggtaattcatgaagaaagaggtttaattgactgacagttctgcaggctgcacaggaagcatggctggggaggcctcgggaaacttaaaatcacggcagaaggtgaaggggaagcaagtaccttcttcacatggcggcagaagagagagcaaagggggacatgccacacactttcaaaccgccagat

SEQ ID NO: 24470 - DNA, 1908 bp, Artificial sequence
  DNA replication origin
cctggcccgccgtcccgccgcggcggcccctcctccgccgtccgggcgccccgccccgcccgcgccgcgccggacaccccgccccgaggaggcggcccggcgagtggtcgccgagggaggctggtggcatgggggagccgccgccgccacacgcacggtcgcccggagcgagcccgggcgctgctgcgatcgcggggggccgcggacgccgaggggggcgccttggggcgtgacacggtgcagagggcgcggcctgggctgcggcggccggactcgcggcgagcagcggggggagcaggcggcggcggcgccgggagcggcgggcggagcgggccgggcgccgagggcgcacctggcggccgcgcggccgggccgggccgcgggagcaggcggaggcggaggcggcgggggcaggaggatgtcgcagccgccgctgctccccgcctcggcggagactcggaagttcacccgggcgctgagtaagccgggcacggcggccgagctgcggcagagcgtgtctgaggtggtgcgcggctccgtgctcctggtgagtgcgggacgaccgcgggccgggggaggatggcgggggcgcaggcagctgcgggccccgggccgggcgcctcttagtcggcagggctgaggcagagcggccgaccctgctgggtccgcggaatcaagaggtggggccggcgggagggagttggacaggggagaagagaaggtcctggaggggctgcaactcccagacccctccccgccacccaagatcctgtccccatcgctgtccccttcctcctgggaaatttccgcagagtgatgtcgccctgtcactcttttcaccccgctctctcccaatttacctgctttctgtcaactgggaaattacactctcccccctcccccgcatccctcccccgtatccctcccccggcctccctctccttccatgttttggaggggcgcaggggaattgaggtgggggcttcctcatccagtctgcgctcagggtgggagatgcccctgctaaccctttgagttggctgaactccaggagggaaggacttcggcatcctctcctgcgccccccacctccaagccggtatcctgaagtttggccgccttttaggaaggcttggggggcatgatgggaaccctcgctaatttagtattggtgcaaattcctgtgacgtttgggggttctaagtaagcaaagccatcagcccaaaacgaatcttcccgtggcagaacgtctttagagaataggcctctgggtgtgaggaagatgaagttttcgattaactttttcacagccagcgccggtcctgctgtatttggaaacgcactacaacccgattcacctggatggtgcgggagtggagcgacgtttgagcaggagcgagctctgcagggcagctggaaacttttagcagctccttgcgttgccgccggcatttgttttcttgaaacgggcttgtttgtgggtgggtgtgacttgtgtttgttggaacagtgcaagaagatgggccttggaagtggttgtctgggccctgtgggggattgtcggggcagagtgccgggccccttaacacaggggcggatgcatcattttggtggcagatcgatgcccttcctgggcagacacagaattgcgtgaatgacgtttgtggagattggagatgaagcttcgctgatttctatatccagtttgctcagtttgaattttctctcgattgctagctctgccaactccaaatttctccaactccagtttgatccatagtaaacaaggatttaatttttctattttagggaagtcgattaggtaaggagtagagcaggagttgggaatagaccagaacctggccatctcttccataaccagctaacttctgtgtggcttcctgcatc

SEQ ID NO: 24471 - DNA, 1124 bp, Artificial sequence
  DNA replication origin
gcctccccaccgttcagtccccggaggcacggagctcgcggcgggacgatgacggttgggccgggccaggcgtgggagactcccagactccggcccgccgggacggccagctgcgtcaccttggacgtgggcaatacttcggagcctcggttatgtcgcctgtaacctgaggacaacggcctggaaggggctcaggtgacacggcggccctcactggggccgatttagccggtctgccgcccctccgcgccggaccgccaggcggggtaccagggaaactgcgatgcgccggcttgcgagcccaccgtgacgcagagctggcggccgctagcgacagccaccctgtgagggactttccccccaataccctaaccgctttcctgtccctaagggcccgctcccgccccggctccgtttctgtctctctgaggaagcccggcgcagcctaaccctcacagggccgcggagagggcgcgccaggcggggatttgcgccaggcccgcggcgcatgctcagtggttggggactgggcgggtaccccgggcggggagcctgactgaacggcggctctgctgattggtcgggctgctcacgccacgcccgttgccttccgatggacagttccttacctgccgggtcggcctccgcagagagtggtggtcttgaaaacccagttttgggagaatacctgccgcgcctcccgcccaaatacccagaggtttcatagccgccatcgctgcggtggaggaggccgcctgttgcgtcccaccccaccagaaagcctaacactggcctgaagcgtaatcttaaagtggtaggggaaaataccgatctagcgcagagagcaaaacacctccgttctgggtttaatgggcaggtctggaggtgaggtatgccgtccgcactcaataattacttgcaggatcggattgtttctccagtgggtggggactgcaggatgtagcattgagtgagcctggcagattgaaagataaaacaagggtgatgataaaaacaattacacactaacccatttcctcctccgtgaaatgagggaatggcccagacattttccagacctcttctgtcctaagagtggagctgggtgacagagcaggtgcaag

SEQ ID NO: 24472 - DNA, 923 bp, Artificial sequence
  DNA replication origin
ctgctggtgttgcaagcactggcatctggattcagctgctgctgcagaaagcagctgcatttgctgggtggagtgtccctggggtattgctcaaaggggccccaagcagcaaggaggtcacgagcccctccttcttcctcagcttcctgtagcaccccaaaatggtagaacccaacttgtggtttgcagagtctcagcccaacatcacaaagccaagcagagaagcctgggtttggagtgagaggcaataacttagtaactgtcatggggaacgcacaaagccatccctcactgtatgagtgacatttagggactgtgcaggcacatgagtctgtatattggctgaatttctttcctttgccttctgcaaatcatttcgtattctcctaggcccttgccatattggagaaatatcagaaaatccttaatgggtctcctggttcaaaaggaactgaccaacgattacaagtgtctatcaacagatgaataaataagcaaaatgcagcagaaacatacaatggaatattggccttgaaaaggaaggaaatcctgacctgtgctctaacatggaagaacctggaagatcatctgctaagggaaatacgccagtctcagaaggacaaataccgagtgattccacttatatgaggtgcccagaataggcagatgcctggagaggggaaggagagtggtggttgccaggcctgaaggaggagggaatgggcagttgttgttcggtgggtccagagcttcagttctgcaggatggaaaatgttccgcggatggtggtggtggtggctgcacaacagtgtgaatgcattgaatgcgtgtgactgcacactgagaaatggctaaggcgggacgttttacctgatgtggatttgcccacagtcacatatttttagaaaggaactaggctggct

SEQ ID NO: 24473 - DNA, 832 bp, Artificial sequence
  DNA replication origin
gccccctacacgccaccctaggcacctctttgaggaggctggggcagcggggaccctcgggtttgccggaggtggtggggccgaccctccagacccgcgtccgaaccctgctagttcccggtcttgggggtcagcggaaaccgcccccatttcggcctggaggggcgaatggggacaaagccccgccgcccgccccgaccccacctggtatccccaggtgctctgcccaggagtctcttggggccgctgcaagtgggcaggtgccctggtgttctcgtgggccggccccaggccctttgcggagcgtgtgccgcgctgaaggaaggggccgtcccccttaccatgccccattcttttaggcttgggggaccgaactaactccccccgcccccacttgcaaagttcagcctccgctttagaagctgacctctcagtttcacttggatgtgtttcttcttcagtctccaagaagagtttttagacaaacacacactgatgagagtgctttcaagtggagggaagttaggaagtcgtggcgagggagcgcagctgtgctgctggatgttgctgttttcctggcgtgttagcggtggtcagcaggtagggggcggagtatttttacagccagttaaacggcttttctcactgagtgtgtggaattgactttcggtaaggtagactgcgtgttaacagttaggcacgggtacagcaacggagaacagctctaattttgcaattgcttgtcactgttcatactccatgtgaagttaatgctgctggaggacagaaacatctgacatttccaaatattaaagatctgttggccgggcgc

SEQ ID NO: 24474 - DNA, 977 bp, Artificial sequence
  DNA replication origin
aggagcgtctccgcccggcagccaccccgtccgggagagaggtgggggtcagccccggccaggccagccgccccgtcggggagggaggtggggggggtcagccccccgcccggccagccgccccgtccgggagggaggtgggggggtcagccccccgcctggccagccaccccgtctgggaggtgaggggcgcctctgcccggccgcccctactgggaagtgaggagcccctctgcccggacagccgccccgtccgggagggaggtggggggggcagccccccgcccggccagccgccccgtcggggagggaggtgggggggtcagccccccgcccggccagccgccccgtctgggaggtgaggggcgcctctgcccggccgcccctactgggaagtgaggagcccctctgcccggacagccgccccgtccgggagggaggtgggggggtcagccccccgcccggccagccgccccgtccgggaggtgaggggcacctctgcccggccaccaccccgtctgggaggtgtgcccagcagctcattgagaacgggccatgatgacaatggcggttttgtggaatagaagggggggaaaggtggggaaaagattgagaaatcggatggttgccgtctctgtgtagaaagaagtagacatgggagacttttcattttgttctgtactaagaaaaattcttctgccttgggatcctgttgatctgtgaccttacccccaaccctgtgctctctgaaacatgtgctgtgtccactcagggttaaatggattaagggcggtgcaagatgtgctttgttaaacagatgcttgaaggcagcatgctccttaagagtcatcaccactccctaatctcaagtacccagggacacaaacactgcggaaggccgcagggtcctctgcctaggaaaaccagagacctttgttcacttgtttatctgctgaccttccctccactattgtcct

SEQ ID NO: 24475 - DNA, 1547 bp, Artificial sequence
  DNA replication origin
taaggagtcttgacacatggtctgctgagctctgtgattagcaggacaggcagcgggggagctggtctcagggggtgaggagcccgtgtgtgtgtgtgtgtgtgtgtgtgtgtgtgcagtaacacctaatataagcctcttgggtaggttgcaataaggtgtaaaatgctataaattgaccaaggtagaacattgccagaacttcagtcccaggctgactcagctcaatccccgcgtataaaggactgctctctgagacatgggagaggatgcgtgcaccaagggcagggcggggaccttcttcatctctagtaatttatgattttgtctctaggccaatactcatcttccacattcattcccacattcaccacgtgtggttctgggtgttggggacacagtgggtagacgtggtctccagcctcatggcccaggtaggccagcaggggacatacagaatcagacaattacaacgtaacatgtgaagtgtgttaggtgctgggtggagactgacgtcggagaaggggttagggaaactctgggagagctcccgagtttggggttgggggactggattgagggtgctgtcacttcctgagatagggagcgtggggtcagatgaagtttgagggtggaagacgtgggcttaggagccctaggacaggcacatggaggtgtccagtataaagtgggacatacgaggtgtgcagtctggaagagcgatttagggtgagggtacgggtttgggaggggtgaggtggacgacagtcccagggagagttgaggggcttctctaaactgtaggctttattgtttctcaggtatgatgaggccaacagatcagcggccgagcaccattgaaaagacagttcgttactcacagctcccaaggagaggggcacactctgccacccaggccagccaggggagaaccagggctggtcagcaggcagagggagggtcaggagagcgtgggcaagaccttgaatgtggtttccacgagaagcatcaacgggaggggggcatgcaggctctggggcagaggggctgtccttaggggcctggtacctggtactgcttgacaagggcaggggcatagtggcctggagtgtgagagccccagacaggtggtggaggtcgggggtgcaggcattgggttggctgccttgcctctgaacagtgtgctcccttcaggcctttttctgtctctagggattggctggccccggggtacagggtttgtctctccagggtcagcaaggccccaagatgtgaaagcattggaatgcagagagtaaaaagccctggctaacacggagggctagaaaggacccaggagcaccaacattcatggggagggaagaggctgaggaagctgcgggagagacagagaggcggtggtgtgggagccaggacaggaggccgctgctccagccatggagccgagggggttaccagcagcccgagagcgggccatagcatccagccaaaaactggccattgaggatggaggccaggtgttcgggagctgagagaatggggacagt

SEQ ID NO: 24476 - DNA, 852 bp, Artificial sequence
  DNA replication origin
ccaagagcaatggaggctgagagccagtgccttgctgacaaacagtgaggcggcgggaggtagtcccagatcagttcggtaggtcttgagatgtgcggaggctggggctgagctgagcttggggagcttggggcctgggctggagcgctgctctctctgcaggcagtgggagcaaggcagagttcccagggggcagtaggagaggggaggcagcaccttggtgggaggctggaatctaggtgctagaaacggtgaagaggtttgtcaaaggcacactttagttcactcctgaaggaggcggctgtgccccttccactgtcactcctaaatcttccacttaagtccacagccctggggatggactcagtgcctggcctcatcaaagaagaggggctgaggcgggtgcctggtgggcatgggtgggggacgggatggccgcgagcagggtgccaggcctgtgctgcgcttgctaatgggggctgccactgccgctgaggggctggtgacagcaggagagtctcccagtcacttggggtggatttcaaggattatctgaatagatggggaaggaaggaagagcgggaccgtagtgagggtttgtgttttctggactttggacagatcagagggtggggtcagggggtttctgcttcaactgtgggaaggaaaggggttgagacaggagagaaggtgaaggcaggtgggaggagcaagaagttgcagagaggaggcggtcacagactcagacccagactcacccccaaatcccaccagggctctgctaggccagctgacagtggctgggaacactcagcaccccaaccctaaccgtctggctggtaaggcaggtac

SEQ ID NO: 24477 - DNA, 1437 bp, Artificial sequence
  DNA replication origin
agagctgaggctgggggagatgtgccctggggaagaggcccctgaaaaatcaggaaggggggcccattgccaagggttgggggtgcgtcaggagccagtcccatctctttgccctgtgaggcctgaacaaattaaaaaatgaacacacaactttccaaaggcaccagatagcggctctgtgcctggtcaagtcggttctagaaggtgaggggacctgtggttcgcaccacctgagctaccctaggtcggctcaggcctcaggccccttccccacagcctcccaccttgctcggccagcaagttgttcaggaaagaaggggaggaggaagaggaaccttctctcgtggttgggagctggtgaaactcacgagagggccttggagtctgtgtgctcttccaaagagcggtcacttcagtgcgggctggttggcctgccccacccctggggctcccgggtcacttctccacagagtgagtttgagtgtgtgagcaagtgtgtgagaagcgtcagtgtgtgtgagtgaatatgcgtgagtgggtgtgcaagtgtgtgcacgtttgaatgtgtgttggtgtgtaaagtgggtgtgagtgtgcatgtatgtgagtgaatgagtgtgtgtgtgaatgggtgtgtgtgggtggagtgcatgtgcatgggtgtgagtgggtgtgtgtatagtgtgtatatatgtgtgcatgtttgtgaataagtgtgtgtcatgtgtgcatatgtggggtgtgtatggagtgtgtgtgtctgtgtgagtgtgcgaatatatagtgtgtgcacacacctgtgaggatgggtgtgtgtagtgtgtgtgcacgtgtgagtgggtatgtgtgaatgagtggatgtgtgtgtgcatgagcatgtgtgtgagtgtaagcgagtggaaatgttatgtatgcaagtgcaggtgtgtgttagtatacacgtgtgagtatatgagtgggtgtgcaagcatgtgagtggagtgtgagtaggtgtgtgcacatgtctgcatggtgagtacaagtgtgtgaatgggtatgtgtgcacatgtgtgaatgtgtgcatatgtgtatgggtggggaagtgtgtgcatgtgtgagtgggtgtgtgtgcacatctgtgggtgtgttttcacacgtgtgaatgggtgtgtgagtgcattgtgtgagtgggtgtgtagggtgaatgtgtgcatgtgagtgggtgtgtagggtgtgtgcatgtgagtgggtatgtagggtgtatgcatgtgtgtgagtgggtgtgtagggtgtgtgcatgtgtgtgtggttgtgcatgtgtgtagagtgggtgtgtgagtgtgcatgtgtttgggtatgtagggtgagtgggtgtgcatgtgcacgtatgtgtgtaaatgggtgtgtgcacgtgtgtgagtgggtgtgggtgttattaaagaaaactggagccgacag

SEQ ID NO: 24478 - DNA, 896 bp, Artificial sequence
  DNA replication origin
tgtctctccctcagcgagctgcgagctctgaaggcgaggccaagttggttttgctccctgcttctaccaccttccagcacaaggtccagcaggagtcatgcccagcacattcctccagccagcagggaggggaagggaggggaagggaggggaggatgcaggagagatgaggggaaggtgggaggggaagagagaagggaggagagaagagaggatgcaggggagaggggagacggtggaggagaggatggaagagaggagggaggagagggtggaagggacgagggaggggagaatgaaggggaggagggaggagagaggggagggtggaagggaggagaggggagggtggaggggaggagggaggagagggtggaaggggggagtagggtgaagggaggagggtggaagggaggacggagggtagggtgggagggagggcagggtgggagggaggagagagggcaggatggaggagagggtgaaagggaggagggaggggaggatagagaagaggagggagaagagatggaagggaggatggaggggagggtgggggggaggatagagaagaggagggagaagacaatggaagggaggacggaggggagggtgaaggggggaagatagagaagaggagggagaagaggatggaagggaggatggaggggaggatgaaagggaggagcgagggcagggagtcagttttcagcaggaattgaacagctctctcccttctggtcactccatgaaaaatagtttgagagttttcccctgtgctagccaatcatggggctgtttcagcatggagccccacttcctctcagggcacactctttcttcttggaaaccgccaggaagcagccggagccagcaagtggtgtgcctcagcctcc

SEQ ID NO: 24479 - DNA, 1084 bp, Artificial sequence
  DNA replication origin
cagtggcaggatcttgggcaacctctgcctcccgggtcaagcgattctcctgcctcagcctttcgggtagctgggattacaagcatgcgccaccacacccagctaattttttgtatttttagtagagacggggtttcaccatgttggccaggctggtcttgaactcctgaccttaagtgatctgcccacctcagcctcccaaagtgctgggattacaggcgtaagtcactgcacccgacccagttttctatatgtttacatgttgcatgcaacggtgaaagagagaaagtttcaccgacagaggagtctcacacagttttgggattcctcctcagtcaatggtaggcacaggtgagttgagaggctgtcttacacccatcctggtgacagccagctttgtcctgtgacttaggtgcgggtagcttgactctggaagtctggcccccttctataccttccagaatgggtttgttctcgaacaagagcttgtatgggagaaaagcaccttaacttggccaaattcagccctaatcttgaggacaggtttccagttccctgcgtatgagcaaagggggaatggggccaggatggagtgtgtctctctgcacgtttgaaaggctgtgtacaaacagaaggcctggcctcactcctcagacctcaggcaggcctctgacgggttgaggactgcagcctggcatagctcctgcccaccaaaaccggaggggagagggagatgaaagatggaaaaagtggctggtttcaaagcatatggcctgtagtttttcaaacgtttttaattcctaattcgcacctctcttgttatcatcacacactgtagtagccaatggcacttctttttgctttgacacttgacattattttaggcctctgctcctcctttggcttccacaagggcattctaatttcaaaagaaaagttcatctggaataagtcctgtgactggcccctctggcacccagtcgggttcaacaggtgtctgttgaatgactaaatgaatgaatgaagcaaatcccttcaaaaagttcggcgacatctttactctcagcaaaatttccccatttcc

SEQ ID NO: 24480 - DNA, 927 bp, Artificial sequence
  DNA replication origin
ccggcttagcgggccagggcgtttttacgagagcctcctgggaagtttcttcctggaaaaatcattaaggcggactgatcccgattagagagaaaaggggctcctgggaaaacgtgctccccaccggccatcaggcggcccgcaggagccaagccaaggctcccgcctcgggccaccccgacgctgctgcccccgcagagccccgagcgcccccggcccgagcgtgggacccggcggctacctcctggccgcagcagcgccgataaatctgccaagtgattactgaacgtaaactccagttacttaagtgtcctccgaggggtaatcgtatctgtccctataaatcccgactgcgttcgcgctcatcagcgcttccgcccgacgcgctggtccgctcaaagggggcacacgacccacaggagccatccaccgcctcgcgccgcagccgccctcctcagcgctgtgggatccccagaggcagggcttgaggtggggtgggagggtccccacgacgccggtggctccccaccaattccacgacagggtaggcctcaccgatggtgggaggctcgggtcctcctacaactagaaccttctctagaaaggcagatgtcaactccagcaccctccagggcgagtgtgatactgcgtgtgagagggcgcgtggggcgtgtaaatgatgtgagtgtgaggacacacaggtgtcgcgggaatggggtgcacgcgcaggaggatatgagtgtgtaaagttgtgggagacgcacgcagaagaaggtgtgcgtgaagagtgtgtcacggtgggcgagtgcgagtggtctccggggttccgaaagcgcattcctgtcttcccggaggggtcccttcccctcccggaaggcctgcctcgggcggcccaaatccggcagcaaatcccacgcccggtcctcg

SEQ ID NO: 24481 - DNA, 983 bp, Artificial sequence
  DNA replication origin
taaatgatgtgagtgtgaggacacacaggtgtcgcgggaatggggtgcacgcgcaggaggatatgagtgtgtaaagttgtgggagacgcacgcagaagaaggtgtgcgtgaagagtgtgtcacggtgggcgagtgcgagtggtctccggggttccgaaagcgcattcctgtcttcccggaggggtcccttcccctcccggaaggcctgcctcgggcggcccaaatccggcagcaaatcccacgcccggtcctcggagcgcggagactgcgcggggcctacgacccggtgggaagagaggcgcttgccggggcggcccggcctctctttccatcgccctcccagacttcccagggccgggcgggtggggactgccgaccgtcctgggcgccttcctgctccagctgctgctgcgtctgctccgaggtggcggcggcggcggctggcgcgcgttgcgggtcccggccgaggggctgcgggcgcgctggagactccgccgtgtgggaacccaacgcggggcctgtgtgtgctatcgaattacttattcatagaaaaaaaaaagggggggagagaaaaaaaaagaagtcacatgtccgggttatacgtatgcgaagagaagcagcagaaggagaaaaaaattaaggcgagcaggaggaggaggagaagcagcggcggaagcggcggcggcgcaggagctggtggcggcggcggcggcgcggccggggacagacacccacctgtatgagtacgcttgtggatcttgaggttctcggagcgcgcgaagaccttgccgcagccggggaaagggcagggaaagggcttctcgccggtgtgcacgcggatgtggttgatgagcttgtatttggccttgaagggcttgccctcgcgcggacagtcctcccagaagcagacgtggctgctctgctcggggcctcccacgtgctccaccgtgacgtgattcaccagctcgtgcatggtgccgaaa

SEQ ID NO: 24482 - DNA, 999 bp, Artificial sequence
  DNA replication origin
cgggtgctggggggagccggtgccggaccgctgctcccctccgagcggggccccgtgcatggccgccgcgggggccgtggcggaaaggtccctccggaggacgaagtccctgctgtggcctttgccgctgctgccgccgccgccactgttggtggtggtgtagcccgagagggcaggaggaggaggaggcgggggagggggagggggtgaaggggtgggaggaagaggaggggctgggggcgggggcgcggagggctgcgcgccactgctgcccccgccgcaggggtagctgcccgcgccggggtgcgcgaccaaggctgcagcacgggcggcggctgccggagcctccgggtgtgccgggaacgcctgggagggagggctgaggcccagcgtgctcgcctgggccatgtgctcgggtccgagcggagtggtggccacgccggggtcagcgcccaggtcccgcaggcggaggtgcgcgacggcggcccggagttgggagtgggcgggcgggccggccagcgccgggaagcctgtcatattctgaagcggctggacctgagccgttgccaaatccgctaatctcagcgctggcgggttcctcttgctcaaagggggctccatcagaactacacaatcaggcccatagaccctcactggggggactttattccctctgcccgccttcaaaaacatgtatgtattgggcgctctttaacttcttttgtcctggcctcttaactctgcttattcctgttcccactctatcctccagcgattggcagagtgaacaccacatttgagctgcacagtgggaccgagattttggaaatggcacgggtgggattggagggagccgcgtgattggcagtagcctcggctgctcgattggctcccgttcaggccctcgacccagcggggattcgcccccgtgcttgcggccgcctgcgctttcgcttcgcgccccctcctccgctggagccacacgtccccgcctccccg

SEQ ID NO: 24483 - DNA, 1094 bp, Artificial sequence
  DNA replication origin
actacacaatcaggcccatagaccctcactggggggactttattccctctgcccgccttcaaaaacatgtatgtattgggcgctctttaacttcttttgtcctggcctcttaactctgcttattcctgttcccactctatcctccagcgattggcagagtgaacaccacatttgagctgcacagtgggaccgagattttggaaatggcacgggtgggattggagggagccgcgtgattggcagtagcctcggctgctcgattggctcccgttcaggccctcgacccagcggggattcgcccccgtgcttgcggccgcctgcgctttcgcttcgcgccccctcctccgctggagccacacgtccccgcctccccggggatgcccaagttgcacttgcagaaagtttgagcctggcctgcgcgcgcagcgccccgctcttccttgacgcacctcgcggagcgcgcgccggcacgcgggcagagggcgcggggtggtgaggggctgaggacccccgaggggcagtcccagtttcaaaaaccttggcctcacttctctgtgtgccttctggcacccaagtactttctgcctctacctccacctctcttgtggggtggaagagccctgggctgctgtttgggagagaagggtgaatagcccgtcctacctgtagtggtgatgctagaaacttcttgtttggacacccaacctgcctagcgctcacctagggcgcatagacagtagacggagtgaagaagataaagtctattggttgcaagacaacttgagtgatttggctccgcgaaacaccaggtgaagtcaaaataagtctttcccccaaaggaaccgttttacctcgactttttatctcatggagagtccttttcaacatggttcaaaggagttggatggaagtgtaatctcactactcatcggttctagatctgccacttccaattagatctacagtaggggcgggggagaggagatcgggcagcgattctaacttttgcctttcggagatacagtggcggggcaggccaaacggcatctctgcagagagaagccgctaaataagcaccgtcctttaagtagaat

SEQ ID NO: 24484 - DNA, 1044 bp, Artificial sequence
  DNA replication origin
ttcccggccatcggggtgggcagcttcgcgcgccaccatcaccactccgccgcggcggcggcggcggctgccgccgagatgcaggaccgtgaactgagcctggcggcggcgcagaacggcttcgttgactccgccgccgcgcacatgggagccttcaagctcaacccgggcgcgcacgagctgtccccgggccagagctcggcgttcacgtcgcagggccccggcgcctaccccggctccgctgcggctgccgctgcggccgcagcgctcgggccccacgccgcgcacgttggctcctactctgggccgcccttcaactccacccgggacttcctgttccgcagccgcggcttcggggactcggcgccgggcggcgggcagcacgggctgttcgggccgggcgcgggcggcctgcaccacgcgcactcggacgcgcagggccacctcctcttcccgggcctgccagagcagcacgggccgcacggctcgcagaatgtgctcaacgggcagatgcgcctcgggctgcccggcgaggtgttcgggcgctcggagcaataccgccaggtggccagcccgcggaccgacccctactcggcggcgcaactccacaaccagtacggccccatgaatatgaacatgggtatgaacatggcagcagccgcggcccaccaccaccaccaccaccaccaccaccccggtgcctttttccgctatatgcggcagcagtgcatcaagcaggagctaatctgcaagtggatcgaccccgagcaactgagcaatcccaagaagagctgcaacaaaactttcagcaccatgcacgagctggtgacacacgtctcggtggagcacgtcggcggcccggagcagagcaaccacgtctgcttctgggaggagtgtccgcgcgagggcaagcccttcaaggccaaatacaaactggtcaaccacatccgcgtgcacacaggcgagaaacccttcccctgccccttcccgggctgtggcaaagtcttcgcgcgctccgagaacctcaagatccacaaaaggacc

SEQ ID NO: 24485 - DNA, 1064 bp, Artificial sequence
  DNA replication origin
ccccgccagagctgccgccgcccccgccgcccgccccgccgccgcccccgccactgccgctgccgccgcctgagccgcctcccgcgccgccactgcccgagcctccgccccggtgcaccgcggacaccgcggccgccgccgccgcagccgccgccgccgctgccgccgccgctggggacaggttggagctgctctggggctcggcgctgggggacaccagccccgggggcgtggacgactcatagccggagctggcggccggggaggattcagagccctgcggggaggactcatggacctgcaagacaaaagccgggaggggggaccagaggggactgggtgtgagtgcagctgctgtggggccgggcccctgggggagagcacccccagaaatgttccccccgccgccctggcccctggggaccctcccaggccggctgaggtggtccgggccagtgctgcaccggcgcctcggcctgcctcgccctcctcccggccgccgcggtggtaccttcatgtgcttccgcagcgagctggggtgcgtgtaggacttgtcgcacatcttgcagagatagggcttatcggaggtgtggacgtgcatgtgcttcttcctgtcgctgctgttggcgaagcgccggtcgcagccctcaaactcacactggaacggcttctcccctgtggacggcaaacatcggcgctggctgcagacacccagagcctgcagagcccccactcaggctgcgagggggctgggccgcggcgagggagaaggacctgagggggctgggtccctcaaaccagtccgatcccctctgcggcagaactaagatcaaattaaccgccttcccgcccgacagtcctgctcatttatttcgtattttactttcttccaggctgacgtccatctcctcaaatttctcaggaatgtggggaagctcctagccctgcctgcctttctagagggcttcttggatttgcagcttctaacaagttgctctcgccacggagaagctgttattatgacaaaatatttggggcattatcaaaatcacacaggctgctgg

SEQ ID NO: 24486 - DNA, 1280 bp, Artificial sequence
  DNA replication origin
cgcagccgtgggaagccgacgatgcctgaggcgctctgtcctcggcccaccctaggaacttgtatgaccgcaggaaaggatcaggagaggccgctgcccgtctcccaccggctctaggctccctcggccgaccgatgtggggaaggggaaggggcccgcgccgaggctctaggggaggctcctaggccgggttctctgacttaaggccctcttggctgtggttttgcgggagtgagttgagggagctgcattcactcaagtccctcacatgcccgagggcccgggaatcgtgaagccgggcctgcggacccggtgggaggaaggagtgcgaagcgcggccgccgtgctcggccggcgccgggctaggtcgggcggtggggaccgcgccggcataggacaacgcggtggagggaagcacctgcccccgcccaccttgactcagggccgccgcgcccctcctgggccatccgcgcgggggtctcaggatggcgaaacccgggacctcgcggccctctagtgctcccctgccagggtgcgacctaggtaccctttatcgagccccactccccaaggcagagagagttcgacgttcccaaggagggagtctccatggaggaattcgtcctgcttcacttccagagttgaaagcccgtcggttctgcaaagaggagcagtcgggcgcgggctagcaagcagctgatgaaaataattgtcctcgcacacacagccctgcgcccaggggcgcgcgcgcgcacacacacacacacacacacacacacacacacacacacaacttgcctcctctagccgcccaaccttaatattccgggcatgcagttttcaacaacttgcctgacacaataacaaagacatttaaatgccaggacgcagacttcactttttaacctgctgagaggagctactttcaaagcttccccaccgcgaataaactgacaaaaaatatggggtgcacttataaattaaacaccttaccctcaaagcaatatacgttaatcaggtttctaaggcaatagccatctctgtcttttcctattcacccaaataatgcccccagaaggaacccctttacacaagagagaactggaaaaaaaatgaattatacccattgctagtaaaaaatcatcttaaatcaatagagcaccacttgaacttgagtttctattgtttcactgaatcatcaatgtttttaattaaacagagctaccctttctgttaaaacattacataaaagggttaggtttctacttttgttgaggcag

SEQ ID NO: 24487 - DNA, 1305 bp, Artificial sequence
  DNA replication origin
ctcaacgagtcgccccacaggctgtcacctcatggcgggggcacacagggcagcggagcgaggggccggggagagcggcccccacccctttaatgttcatttccatttttgtttgagtcactttcacacaaatcacttctgtctttatgtaacagtctgtggcccagacccaggcaagtggtaaatatttaccttcacgctggagccaagatcgctgcggggagtcccgtgaagcaccactgccctctaagaccttggaaggggaaacaccagaaggtgtgggtgctgagctccgctgcgtcagactgccaggacctgagtggaactcagtgctgaaacctgggttctcactgcagctggatagcaggtggttacaaaattatatgtatttttagggttatttctaatttttctttaatagttattggcaattttcaaagtcctttaagaaacactgaaaactgctcaagaaaatggcagttctgcagggctcaggtagcagggcaggctgttgggacaggtttgacagactgtcctaatacaaggagcgccttttcccagatcagcagctctagagggtggcggccttgcctggaacctccgcaacctccgcgcccaccacacaagggctgagaacagtaaggtatgggctgtgctgggctcaggagcaggggtagttgctcacctggacagggtgtgtctgggagggccatactagggcctggacagggcgtcttctggccttgagctgctacgatgggggtaggagttgggaagggtggaaggctggtgccctcagggagtcggggaggctgcgcagtcagcaggtcaggactgtgttcctcagagaagggtggcctgtgcaggcgaggcagggctgcccctgcagggctgaggaacattagtccatccaggtggtgtggggaggctgagggcacggtcctcctgcccagaacgcaggtgtcctgtctgctacagacacatcaaggaagtcaccaatgtgtgcccctttctctagcctagggactggcaaacccaaaaacaccatgcccacaggttagagccgacctggtgcccgtttgtgaacagcccacaagctaggaatggctttcacatgtttaaatggccgaaagtcaaaatatctcatgatgtgtgaaaactgtaggtcattctcatctgcgtcggtaagtaacgccttatctgagcacagccaggcgcattcaggtggtgcggccccagtggaggctctgtgggccgggagccacgtcccaggtgcagacacagagctcccactgcgggctgacc

SEQ ID NO: 24488 - DNA, 1844 bp, Artificial sequence
  DNA replication origin
tgcggcccgggccggggtcacgggggacgcgggcccctgtgtgagccgcacatgggacaaagggcgcggcgtggaggctgcgcgccccgcccgccgcgctcgggcccctgagcttctccgcccgggcagaggtcgccgcccccagcccctgcctgcacagccgcgccggcgctccctcggcccgggcgcacccggcgcctgcggcgcgtccccggagcggccatctggccgcggggccccgcgcctggccgccagctggccgcggcgcaggcgatggctggacacagccgggccgcttggccgcctgccctgggttccgcggcggctcccccgccgcgccgcgagcgcctgctactccacgctcggctgcggagcggagcggcgcgagcgcggggccaccggcccgggcgcccggggccaccgagccgccgcttcccggcgtgggctcggagtttggggaagccgagcaggtggcgcagccactgcccacctcctgcgaactctgcggggcttctggtcttgttgatgttgtggctatgggctgcgtgtgtgtttttcttttttttaaaccacacacaaaagaagggaggagttagaggaacgatctagccactatgagtcatcccacacttcgctctttccccgggagagcaaataaatgcatggggagaatgtcttgagaaacagttatagtagggactgactaggtcccctccctgtcccttttctctgcagtcctgtctgcgccgggcgcgccccagatggagtggggtaaaatcacggccagtgcacctagataggggaaatggctacaagctagcaaactggaaactttctgggacagtggaactgtgaatatcaaaccacacacattcttgctataggcagccatggccctcgtgcgctactgaattataaaatgggaaggccgtcacagcaggacgataccttagccttcagtagcatgtattcagcactgcacggaggagggcggtggtggtggctcgcgcccctgccttgaggggcccagggtctgatcagtcaggaaactgccaggcccagggatgcagggtcacaaacgattgtgttctctaatctgattcccagaggcgctgtcacctctcagcgtgcataggatggctggctatgtgattgaatgttacagatgaggtagaaaggctgggcagaggtcagcaggcccctggatgcatggaggggaatattcttctgtaggtggctgctgctaatttttccaaggggaaacatttaggtttggtctcgccattctgtttaccgcagtccaggctgccgtgtcagctgtcattgggccctcatggttcacagctggatgacatttgtttttctggggtccctgtgtggggtctttttggccttctcactgatgattaatttgttttaacctcctgaaaacagaggctcgatatgagaagtttgagaaattgtaggataaagggacgtctgctttgttccagattcagcccctgttgaggggccagttgattctgtcgcaggagtcaggtagcgagcagaacactgacttcattcctcctgggttgtgccctctgcttggcctgtagcagaggccacagtgggtctctctttttgttgcttcataaggtgaactaacgatccagctatggcagaggagccagggagcccaggcaggacatcatgtggagaagagggaccagaaagttcaacctagggcccatctggaagaaaacagagcatcctttcctatttcatgtcctgactgtaaaaaatggtggaggccgggcacggtggttcacacctgtaatccccatgctttggaaggctgaggc

SEQ ID NO: 24489 - DNA, 1991 bp, Artificial sequence
  DNA replication origin
tgatataaaggatgtgtaataaacaatacacaagtaaaaggcagacactctttattgtcagttctatctacttgactgattctcacagaaagctttgcttcttttttgccaaaggcttgtatctgaatccatccaatgcttgtaactcaaccatgatgtgactagtgaaattacataccgatccactttttgccaacaaatttattgtccttaaatctgatatgtgatctgttaaactacttcttacccttgtataaactcattaaactgcaatcttgtttcagcactaaacacatttttaagtttaatctacattattaacatcttccccatcactttctgaagtctagagacaatcagcaaaacaaatcgatccctgattcatgattcataatgttggctaatttccatggtgtaaatacttcgaccatggcccattacagtctaccaacgagacatcactgagtgtgggccgggaaaacgcacgtgcagtaagcacattatgatacgtaatactggaaatggtaggaagtggacagacttcagagttatttaggaagtagaatcttggcgatttgttagatgccgaggtgaaggcagagtttgggaaacactggatagtggtgtcttcactatcacagggagacagggagttgaaagcaagcagggaaaggacgcattcagttttggatgggttccatttgaggtgcttgttaccaggagtagctgaataggaagctagataaacggatttggagctcagaggagcaaagattagagttgcaaatttgggatatattgatttaaatgttgacagcaggttaaatcattcagggaaaaattgtggagtaagaggaaaggtctgagaccttgaaaactctgttatttggtggtcacccagagtagacaagcacgccaagactggggacagacaggaaagtggagcacccccgccacaggaagacgtgttttaaggagaaagaaggaattttgctcagatcagttaacacgagaaaggagagtgtcctttgactttagtgatgtggatgctacttgcgacaattaaaaaggcaatttcaccgagtgtgaaaacgaacacgtggagttgagagaccacaaaactgggggcaggcgcctctttcaccaacttcagcgatggaaagtagaagagggtggcagcaagggtacgtggagtagagaatcttggaatgatgaaatgccgaggatacggattccagtccagagggagcaacggatcggattctgcgatactggaaaaacagaaggtgggggggggggctcggtgatggagggagcaggtgtgcagttttgccggtggaaagtggaagtttctcttttctcctgaagcaggcggcaaagacctctgagagtgggagtgtggtgggtgtgccgggcccctggatgggagtggaggtttggaaccaagtggcccgagcctgcggtgagtgggcccgccctgggtggctctggccgcagcagggtcgatggggcggcatggtctcggcgggaagaacacggcttcagtcagttctgttctaagaagcagaaggtggagatacgcatgttttaaacaactcctcccggacaggaagaagtggagttctggctgttctgcgaggacgccgcagtcccagcgtggagaccaccgcgcaggcgaagcgcgagacaggccagaaatagggtcccgcgcgcggaccccggaggaaaagcgagggctcactcggtttcccgcagccagcctcgcccgacccagctggggccgccccttcccgccccggccccgcctccgcctcagctccgcgcccacaacccggcttcctcctctcccgccgggtccgtctgtccctgcgcctccttcgccgccgactagcgccccctggcctgacgtcaccggcgcgtccgccaatgagctgaggagggacttggctgtggcctgaaagtgacgggagcagcagccaatggtcgggcgg

SEQ ID NO: 24490 - DNA, 851 bp, Artificial sequence
  DNA replication origin
actcagcacggagttagcttatttgccacagaaagcccattatgctaagagcatgggcttgagaaaattgggagaagatggtggtaggagcacatgtctcagatcccctctctgacttaaaacccaacaccagtccgggaggtgaggggcgcctctgcccggccgcccctactgggaagtgaggagcccctctgcccggccagtcgccccgtccgggagggaggtgggggggtcagccccccgcccgccagccgccccgtccgggaggtgaggggcacctctgcccggccgcccctactgggaagtgaggagcccctctgcccggccagccgccccgtccgggagggaggtgggggggtcagccccccgcccggccagccgccccgtccgggaagtgaggggcgcctctgcccggccgcccctactgggaagtgaggagcccctctgcccggccaccaccccgtctgggaggtgtacccaacagctcattgagaacgggccaggatgacaatggcggttttgtggaatagaaaggggggaaaggtggggaaaagattgagaaatcggatggttgccgtgtctgtgtagaaagaagtagacatgggagacttttcattttgttctgtactaagaaaaattcttctgccttgggatcctgttgatctgtaaccttacccccaaccctgtgctctctgaaacatgtgctgtgtccactcagagttaaatggattaagggcggtgcaagatgtgctttgttaaacagatgcttgaaggcagcatgctcattaagagtcatcaccactccctaatctcaagtacccagggacacaaacgctgcggaaggccgcagg

SEQ ID NO: 24491 - DNA, 1209 bp, Artificial sequence
  DNA replication origin
tgagctgagccgccgtaggtgaggggcccgcgtccccgcccgccctgggcgccgcgcctggcactgatcctgccggtcgcccactgtcgccgccgccgccgcccgcgggcaccatgacagctctgagcgctggggttacaggttggtcaccgccgccggtgcccgggaggctgcggcgcggccggctccgtgccctgcgcccgaggcccgcgatgcgcgctcgttagttccttggccggtccgggccaggacggctcaggggcgctggggctgcgagaggggctgctagaggggctgcgggcgggggccccgcgcgggggaggggtggggaggggcgcctccacccgagagcggggcggtggggtccttgccggcctggccggggcgcgggagccgcgatgcgccctccctattcctgcgcgtgggtgtcgggggcgcctgccgcgggatgcccctgggctggcttgggaagcccagggccggcgacacctcgggcctgccccgcctgggcatctagcaggtgttggggggcaggtggctgaggacgaggccactgggcatcactacagcgctgcacctgccccctcggcaccagggccgctgcctgggtaaacctctgggccaacgcgcgggtggggaggtgggggtgggcagcctggctccagcaggtctccgcgggggctccgcggccttgccccacccccatgctcctgtggattgctccttgctaaatgtcccttatgatattcattggccttgttaagcagccgtcattagggtggctacaccgaacgcaaaacagtgtcctgccaagcaacaccattttgtcactgaatctttaagacaccagcaaggatggcctggctgggatccctctgggggcccagatcgcagtcattttgctgacttaatgttcctctttcaggatggtgtgagaatgctgaactcagacccttagtgcttgaaataccttagaataaatctttcagtttcaggtacaatttttcagacactgtattattaaggatgtgtgaatacacgctcactttcaggcctcagaaggttttactcttaatctggtgttcgtgtggtcatcagctaggcccgactgccctggtggtgaaatgtgggttgaggaccagtgaccttcgtgttagtagttggtggataacacctctaataggggatcaaaaattaacaggtggcgat

SEQ ID NO: 24492 - DNA, 1430 bp, Artificial sequence
  DNA replication origin
cctccggtgcccccggctcgccgtcctcccgcgccctccctccccggacccgttcccggggccaccatggccgcggccatcgctagcggcttgatccgccagaagcggcaggcgcgggagcagcactgggaccggccgtctgccagcaggaggcggagcagccccagcaagaaccgcgggctctgcaacggcaacctggtggatatcttctccaaagtgcgcatcttcggcctcaagaagcgcaggttgcggcgccaaggtctgtgggggtcatggtcgggagatgcgccccgggtcgccccctccccgcctaaacggagcttctccaggctccttccctccctcggttttcccggcccaccccggccccggcctcccttctgagcactctgggtgccgtcgcggggaccctggagtccgctgtcgggcaacctgtagccgccgagaagtgcagccgccagagatggcaagttggctgctcctcgccggcggctcctgccctccgcgtccctgcaggctgggctctgggaaacctgttccccctgagtctcggcttcccgggaggatagggactggcactggctctggaacgcggggcaccccttcctgccacacccggggtcgagccaccgctcgcagtctgatctgagctggtgggggtttccatggggtgggcctggcctcacttggtctctggggtctcctagaaacctcccgggttcccagaccttggacaaatgtggatatcctggcggtgcccccagcgggagctgctgtagaaggagtggagggtgtgtgaactatggcccagtccgctgaggttcagcagaaggctgcttagcgcgcagccctgggctctgcagcccttcagtcaaatcctgggatggggacagaggctcagggagtctaaagaaagaatccgaattgcggggagcggggggcagaagtaaaaatccctaatatgtgtcagttttaattgaaaaactggcgaattgcctgagatacaagccgttactatataaaggtgactagaatagttaccttactacaggtatttctttgagaaactagtacctaggatgacctttcactgcctttgaaatgccagggtctgagaaggcatcctattcaggagccaggcgcttttgtctctctctctgcctgtctctgcatccagttgctaaggctggttgttttgcgagcatgtggtgtgttctgtgggggaaatgggcattgctggcttttcataaccaagtggggttggtaggaaacattgaagaatctatttacgttaatgggagtatatgtttgcccagcacattacattgtcggctcccagctgtatttgttttaaatgccctgttgttccaaagacgggggatagaagcataagctatacatgtgtttctcaaagagtgagtgcgtgtcct

SEQ ID NO: 24493 - DNA, 1431 bp, Artificial sequence
  DNA replication origin
cgggaggacggcgagccgggggcaccggaggggaaggcggcggcgcagaccgtggctcgccctcggggcagaggagggggtgccaggcgggactggggagaggggaaggggggctcagtcctgaccgggacccatcgccctctccgcggggcgcggggccaggcgcgcagatgcgcccagggcgcagccggacgatcccgggaagccggacgtcgtggccgccgccgcttggccacgtccgagtggagagcgggaccgcggctgcgggcgctgctggtcaccgctcgtcgcaggaaccccggcgggggtcgccaccgccactcgcgctgccttctcgccctgcccggctcccgggcgggaggtagagccggccggcggctccccgggcgccggctggagggcgggtcccggcagggtctctgcgcgtccgtcggtccgggtcgcgctgggcaggactcagcgccgggctccagctgcccgcgggccggtgccgccgccggcgccgcccgctctcggcttctgccggtgattgtcaagtgctttggaaatcagcatctggagagaccaatcttctcccctgagatctctaatcaaacgctccgttcccaccccactacaccccctccacctatgtggtccccctcctgatgtacctcttcagaaagaaacaaaacgtataggtaataatgatttaaaaataataagaaagaaagctaagatggattgcagggatggggtgctaagaggccgagccaaagcaggtggaattgaaggaacatcggggcgctttttcttagatgcaactcgctggttcccgagccttccgcggcttggttggggcttctcggtcttaacgtggttaccggtgcactgaaactctcagcagcggttggagggcgaggtggtttccgccctccctgctaatccctccagcaccaacgcccccccgtcgccacccccaaccccgggttggagggaggagcctccactcctcacctagtccacccaaacttgcaggaccctcccttctgctgcaggaagggtaggtttgtcattttgaaaggctacacggagcaaaaaggagggaatggaaagagagaaggtgtgattaagcgagatagaaagaccccactcccaaatatgctccccagccctgggaggaggagatgacagccgcagtagctgctacagaacagcagctgggtaggataaacgcccaggagaatgttgaagaagtcagggcagaaatataaggggcagaggagggtgtcacactattccagggacagtgaaaagcagccagacaggacactccaatttgagctgtcatcttctggtgtccctgggcaaagaagctctgtcagggagcaaagccatctgaactgtgtctgaaattcaaatacaacagccggcgtctcctcccccttgatt

SEQ ID NO: 24494 - DNA, 1565 bp, Artificial sequence
  DNA replication origin
gcgtgcgtcgtagccgaacgctgtggcggggcaggcgaggcggtcgcttcgagcgcgctagtcagctccctgaagggagtgacggcggttgggtgcccgcggccacttttgccttcccgggtaagtgcggcggtggcggttggcgccgccggctgacgggcggcttcctgggagacggggagagcacccggcaggcccgcctgagacgtttgaggctcgcgggcgtcactcctcaggggcgtctggtccgagccgggaggcgttccgctaagttcggtgcccgcgggcaccagccggtgggggcttcgtccgctttgccgggtaggagggcggaatgtggggttggtacgggcggggagagccggacggggccaacctggaccacgtcagccagtcccgggtgactggctcgaagtagcctcggagttgagaggggtcgaccggggcagcccgcggcgcagccccggcagcgcgcatttgcggagagaacggatcccgtgccccgagcgccgccgagccccgcacgcccgtgagacccgctttgaattttctctccatgtttgctggggttgttgacccgaccccccgtaagactcggactcaacgtttttgtttgccccacgacagccagcttaatgctgtggacgtaacagggcacgaacgtttgtaactgaaagttgaaggggctgtggcgtctccgtcccgtggcgtgggaggtgatcgcccagcccttgtgagtagttgtcgtcctagaactccgccgaccgcctagccggtggagccggcgctccggacgccactagagctggcgtttcgtgggcgcagcacctctagccggtcatcttcaccatcgccattgagggcactgaggccgggccaggcttcaaaccctgccctctctgaacctgaagccagagatgaaaacccagacgacagtggcctggcacggtggctcacgcctgaccccagcaccatgggaggccgaggcgggtggatcacctgaggtcaggagttcaaaaccagcctggccaacatggtgaaaccccgtctctactaaaattagctgggcgcggtggcggacgcctgtaatctcagctactcgggaggctgaggctggagaatctcttgaacccgggaggcagaggctgcagtgagccgagatcgcgccgctgcactcctgcctgggggacagagcaagactctgtctcaaaaaaacaaacccagatgacctagagcaggttgcttggggattgcattatggggcattttccgtgtttctgaagaaaaccagcatgtgtgcagctgccgtgaagaacacactgtgcatcgtgaagtctgaaaagaagtaaagcagaccgggagaggtggcaaacgccttgggatcccaacggtttgggaggccaaggcagggggtatcgcttgagcccgggagttcaagaccagcctgcgaaacatagggagaccctcgtctctacaaaaacatttaaaaataataagcgggcgtggtggtgagcgtctgtagtcccacctactcaagaggctgaggcgagaggatcgcttgagct

SEQ ID NO: 24495 - DNA, 907 bp, Artificial sequence
  DNA replication origin
aggggtcaccggtatccacatggacacctcctaatcgagctttgttcaccagagggctaggcccttctttccctggcgcttctcttccccccgcgacacagctcttccccctactccttcccgggagagcgcgcacccatgcagtggcctccatctggacgccacggggctcggagaggcgatgacccctggcagcccaggccggtatcgaattaagtaaaaattttgaatgcccaggtggctgcgcgtagagcggcagcaggccgggctggcggcgcccaggtgcccagcggagggccaggcgctcagagcgcacagccggccgccacctcggcccctgccccccgccccggggtacctctggcctgtcgggtggggtcgggtcgctgcggccgcggcggaacccggctccggacctggatcacagcatccagcgcgcggccggcgaggcgcctcctgttaccctggggccggcgtccctcgtcccatcggagcgagcgaggatgctgcggtgcccggcgacaggtcgtcggatagcattgacagcaccttcctttcaaggtgctttatgcctgccctctccacgtgcggagggcagggtgaccaacgcaaaaacctgagctgcgcctccagacccgtgcgcccctttgatgggcatctgtggtgtttatctgtcccccgaaagcggtgaccgagaagtaaataaatgggcgagaggtggtaaaatcctggcagtatttccgctcgtcctgtcgcgaactacatatcccagggagcccggggcgccgggacgcgtgtccaccccgccatccacttggagaaggcgttactgagcctggcccgacgcacgggccaatcccctcgccctacaccttggctggaacctgagacggattcgctcccaaat

SEQ ID NO: 24496 - DNA, 1269 bp, Artificial sequence
  DNA replication origin
gtggaggcaaggaattgcaactcagaaatacattgctacttggctgcctctattattgtacaccttgaaggtgaggttaattaagtcctgttatagggtttgagggccggaatttaatttttggagttttatttaatatcgggagcagattgggtaataaaatgtatattgagaataagacggccttttgacctttcagggtctagggctgtaaagcatctcagggttgctgccaaacgagccatgaactgggctgggtttttatatttgatgaaatagagcttaaatgctatctgatttgggagaggtcagttaaagaaaaaggagtattaaccttgactatgcctttagctctatcgcctttttaagaggaaattgctgggcaggtgggggagggctagtcagggaacgaaactgtaagccggaccaggtgtaaggaggggaggtgataaaaggattatggggtggaggagcggaggctgaggaagaattgggacccagctcagcctggcgaggaggggagagatcagatgggtctgtagaaaaggaagattagaaagactcagtgatgcttggggttgggactgaggacaggtgggagggaaggaagatttgggatgagttgcattgggaacagagactagggagggaccgatgtgtaaaagaatgcctggacatcaagcacctcagacggtttgcccattttacgacaagaattatttagatcttgtaggatggaaaaatcaaaagtgctgttttctggctatttggaaccactgttgagtttgtattggggtcaagcggcattgtagaagaaaataaggagtttaggttttaggtcaggtgtgagttgaagaggttttatgttcttgagagcacaggctaagggagaaggaggaatggggggtggaaggttgcccatagtgaaggaggcaagtttaaagagaagggtagagacacggagggagggggtttgggggttcttaccctccagaaaatcgggaaaggggtcagggcgtggaaataaggggttggggcacagagataagaggtcggggcatggaaataagggattggagtgcagagataagaggttggggtgtggaaataagggatcggggtgcagagataagaggttggggcacagaaataagggatcagggtgcagagataagaggtcgaggcacagaaataagggattgggggattcttgacaactagaaaagcagtacttgctgctaagggtgaaggagaagggttgggggggtc

SEQ ID NO: 24497 - DNA, 1340 bp, Artificial sequence
  DNA replication origin
tgttttttgcaatcaagaaagcattactaatatgtaaattagtatatactatacctcttgccattattgtgagccactatccctatctctaatgcttaggttcttatgaatctccacatttttaaaaaataatctataccacctcgggcgacaacacatattacctagataaatctttaaattgtttaaaatcaacctcctttaaacttcaagataatatcttcttcaaataagaagaatggaagggaatgcagaattgataggatatagattataagaggttggcaaaaaaaggagatgtgcatcaaatgtaatcatataaggcatttaagcacagaaatattaaaatggaatcaaaatacttgaagatgaaattatacataatcagatttatatttctcagtggcaaacagtcatcaggggagcagtggtcaatgtgaaacagggtaggaatatgttgcggtaacccagacgagatagtgggtggctggaatggctgggtgggtggaatggctgggtggctggaatggctgagtgggtggctgaaatggctgggtggctgaaatggctgggtgggtggaatggctgggtggctggaatggctgggttgctggaatggctgggttggtggctggaatggctgagtgggtggctgaaatggctgactggctggaatggctgggtggtggaaatggctgtgtgggggaaatggctgactgggtgaaatggctgactgggtggaatggctgggtggctggaatagctgggtggctggaatggctgggtggcggaaatggctgggtgggtagctgaaatggctgactgggtggaatggctgggtggctggaatggctgggtggctggaatggctggctgggtggctggaatggctgactgggtggaatggctgggtggctggaatggctgtgtgggtggaatggctgggtggaggaaatggctgggtggctggaatggctgggtgggtggctgaaatggctgactgggtggaaatggcggggtggctggaatggctgagtggtggaaatggctgggtggctggaatggctgggtggcggaaatggctgggtggaggaaatggctgggtggctggaatggcggggtgggtggaatggctgggtggaggaaatggctgggtggaggaaatggctgggtggaggaaatggctgggtggctggaatggctgggtggcggaaatgactgggtggctggtagtgtgaactgtgaggggtggtcggatttgagagggatgttcaggtcaacattaaaggacccctcagtgggagctaaatagtgagtatgttaacaaagacccaagagag

SEQ ID NO: 24498 - DNA, 1241 bp, Artificial sequence
  DNA replication origin
tcggtccccgccgcgggctccggacgcgcgcgggcctttgtgtgcggggagggcgccgggacccgctgcgtgcgcagctcctcgctccggccggcgccgcggtccccgccgaggagagtcagcgcggccgccgcgctgtcagagcgctataaacgcggggccccgccccgccgcgcgaagcccattggcccgcggctccgcggccgcgcgctggttggacggccggtccgtccgtccgccatcccctcccgacattgggtgccgcgaggcggggctcgggctgacaggtgagccccgcccctggctcccgcgggcggcgggagcggagcagaagccgggcaggagaagcgctcagcgcgtgcacagggcgcccccggggcggcgagaggccttctgggcgcggtgcagacgtggaaacagcgacggccgagtagcgggccacctgtctccgcgcccgggggcgccttccccctcggcggaatcagagggcgcggctttccctcgagcagtgcggaaggcagcaggctccgctcggcgtcccttctccgcagatgcggcgctgccccgcgtgcaagacttgcactccgcgcgcacccttagagctcccggcttctgcgcgcttctcccgacgcctctcggcgagggcttctcacttgattttggtaccaatcgcctacggctcagtttcagtcagtggggccgggaattgcaagacgattcctgcgacgcggcgccggaatttgcagctctaatcagggcctgagcatcgtcgcctcccgccttctctgcgggcgtctcccttccctcctggccccccgggaaggtggcgcccctggagctttccccgcgtgtcgccggcacaggcacgacgcggggaccgtctcactagcctctaggagacacgcgcgcttcccaaagtgaccagagatttagagggtgtgagatggaaaagtcaaggcatgtgcttctcactcggcgtctgcaagaccccagagcagagctggcaggaactcctcgctactttcccggtcgagcgccggtgctgacgctcgtccgtgacttccacggagccacagcgcccactagcggccagctttgcttctccgcatctcgagcgctctgcggtccaccgacccggatccagcatactgcagcatctaatcaagtcacagttccaaggaaaatctttttatatgtccaacagtaggaagaacacggtagaaataaggcacagtgcaaat

SEQ ID NO: 24499 - DNA, 1187 bp, Artificial sequence
  DNA replication origin
ggaaggatgggccggtctcggagccggagctcgtcccgctccaagcacaccaagagcagcaagcacaacaagaagcgcagccggtcccggtcgcgatcccgggacaaggagcgcgtgcggaagcgttccaaatctcgggaaagtaaacggaaccggcggcgggagtcgcggtcccgttcgcgctccaccaacacggccgtgtcccggcgcgagcgggaccgggagcgcgcctcgtccccgcccgaccgcatcgacatcttcgggcgcacggtgagcaagcgcagcagcctggacgagaagcagaagcgagaggaggaggagaagaaagcggagttcgagcggcagcgaaaaatgtgagtgcccgcgcggggagggaccggggcgtgcggagagcagggcgcggggcgagggcgtggggccggggcgggacggtgcgggccgggagaatggcggggacggtccggggctggggaccgggcgcgggaacgggtcggagaggcggcggcggggcgggcaggcttggcgtttggaaagcttggggtgggacagacccagaagttgttcgggatggaaaattcgagggcttgagcagaaagggtttaagagaaggcgattttggcgcgagagaggagtggtgtcccggaagtaggggtggagttcggagtgaggtcggagagctgcgttggcttgtgaggccgggagcgagccggcctgcagatgtggagggtggtgagcgtttgctggtcggcttgaggaggagagagaagggaattaacctttgagatgcgaatcacagctggccagaagcattctattgaagctcaaatttgggacaggacttaactaatctcgggaatcatacactttaggtggtccgccagaaaaatgcattttcactttagtgtattcctgttgttaaggtgttgggattgcttttttccccttgagcctacaccctcaccccttccttgagatgttaaaaaaaaaaagcatagaccttaagtgtacagtgcgatgagttttttgacctttgaattcacctgtgtaatcaccatcccaaagcctaccgcttttttaacttgctttctattcctgtagcaaacacgtgcagttttgttgtttcccttacactgtgcttcttcagaagacacttgaagggttgattttattttggcgttgctcccatg

SEQ ID NO: 24500 - DNA, 1312 bp, Artificial sequence
  DNA replication origin
acctcccagacggggtggtggccgggcagaggggctcctcacttcccagtaggggtggccgggcagaggcgcccctcacctcccggacggggcgactggccgggcggggggctgacccccccacctccctcccggacggggcggctggccgggcgggggactgaccccccacctccctcccggacggggcggctggccgggcagaggggctcctcacttcccagtaggggcggccgggcagaggcgcccctcacctcccggacgaggcggctggccgggcagggggctgacccccccacctccctcccggtcggggcggctggccgggcggggggctgaccccccacctccctcccggacggggcggctggccgggcggggggctgaccccccacctccctcccggacggggcggctggccgggcggggggtgacccccacctccctcctggacggggcggctgccgggcggagacgctcctcacttcccagacggggcggctgccgggcggagggtctcctcacttctcagacggggcggttgccaagcggaggggctcctcccttctcagatggggcggctgggcagagacgctcctcacctcccagacggggtcgcgaccgggcagaggcgctcctcacatcccagacggggcggcggggcaaaggcactccccacatctcagacgatggccggccgggcagagacgctcctcacttcctagatgggatggcggccgggaagaggcgctcctcacttcctagatgggatggcagccgggcagagacgctcctcactttccagactgggcagccaggcagaggggctcctaacatcccaaacgatgggcggccaggcagagacgctcctcacttcctagacggggtggcggccgggcagaggctgcactctgggcactttgggaggccaaggcaggcggctgggaggtggaggttgtagcgagccgagatcacgccactgcactccagcctgggcaccattgagcactgagtgaaccagacaccgtctgcaatcctggcacctccggaggccgaggctggcggatcactcgcggtaaggagctggaagccagccctgccaacacagcgaaaccccgtctccaccaaaaaatacgaaaaccagtcaggcgtggcggcacgcgcctgcaatcgcaggcactcggcaggctgaggcaggagaatcaggcagggaggttgcagtgagccgagatggcggcagtacagtccagcttcggctcggcatcagagggagaccgtggaaagagagggagagggagaccgtggggagagg

SEQ ID NO: 24501 - DNA, 885 bp, Artificial sequence
  DNA replication origin
ctgggaagtgaggagcgtctccgcccggcagccgccccgtccaggagggaggtgggggtcaccccccgcccggccagccgccccgtccgggagggaggtggggggtcagccccccgcccggccagccgccccgtccgggagggaggtggggggtcagccccccgcccggccagccgccccgaccgggagggaggtgggggggtcagccccctgcccggccagccgcctcgtccgggaggtgaggggcgcctctgcccggccgcccctactgggaagtgaggagcccctctgcccggccagccgccccgtccgggagggaggtggggggtcagtcccccgcccggccagccgccccgtccgggagggaggtgggggggtcagccccccgcccggccagtcgccccgtccgggaggtgaggggcgcctctgcccggccacccctactgggaagtgaggagcccctctgcccggccaccaccccgtctgggaggtgtgcccaacagctcattgagaacgggccatgatgacaatggtggttttgtggaatagaaagcggggaaaggcagggaaaggattgagaaatcggatggttgccatgtctgtgtagaaagaagtagacatgggagacttttcattttgttctgtactaagaaaaattcttctgccttgggatcctgttgatctgtgaccttaccccccaaccttgtgctctctgaaacatgtgctgtgtccactcagggttgaatggattaagggcggtgcaagatgtgctttgttaaacagatgcttgaaggcagcatgctcgttaagagtcatcaccactccctaatctcaagtacccagggacacaaacactgcggaaggccgcagggtcctctgcctagg

SEQ ID NO: 24502 - DNA, 1581 bp, Artificial sequence
  DNA replication origin
attccgagagggctcagaaatggcgactgtctctggcatctctcttgtttttcacagtcctgctctctgatcacttgtggttctgcgccgaggccaagctgacccgggcccgggacaaggagcaccagcagcagcagcggcagcagcagcagcagcagcagcagcagaggcagcggcagcagcagcagcagcagcggcggcagcaggagccctcctggcccgcgctcctggcgagcatgggggagtcctcgcccgccgcccaggcacacagactcctctccgcctcctcgtcccccaccctgcccccctccccgggagacggcggcggcggcggcggcaagggcaaccgaggcaaagacgaccggggcaaggctctttttctaggaaactctgccaagcccgtgtggcgcctggagacttgttacccccagggcgcgtcctcgggccagtgcttcacggtggagaatgcggacgcggtgtgcgccaggaactggagtcggggggcggccgggggggacgggcaggaggtgaggagcaagcatcccactccgctctggaacttgtcggatttttacctttcgttttgtaattcctacacactttgggagttgttctcggggttgtccagtcccaacactttgaactgcagtctggatgtggtgctcaaggaaggcggcgagatgaccacttgcaggcagtgcgtcgaggcttaccaggactatgaccaccatgctcaggagaaatacgaagagtttgaaagcgtgctccacaaatatttacagtcggaggagtactcggtgaaatcctgtcctgaagactgtaaggtaggaaccctcgggggtttccccctttcctgcactttcctatctctgcttggttggggtgtcttctcaagtttattattattattttttggctatggttttgttactttgtgttttctgcggttattaagagcttggcttgctgtttgagatgagaatacctggtggattgctggtggactgactgatgccttcttctgggagtccttggaagatcagggaagtccccggttatctgagataatcaagctggcactttaactgtttcttacattcatgcagttggctcaaactctgttacatcttttaagaaaaggaagttgaaaaagtcttgtcaggaaaatagcaatgagactgcacactgatgctcacaggtaaagtcagaagagttcgagacaggcatgtgtggtttgcaatatagatctgcacacaggaacgctctcatagtgacatcattaagttggttgagcaagagaaagtggttgtagttgtttcggtagttaaaaagaattacctgtttttacaggggtagttctggttgttcagaaagtctgggggcctacctgaggatatttactttttttaagttttctgtttcctcttggacatttgtataattattgatctgggactcactatgaatgaacagttgtaattaggtgtctagtgattgactagcaataggctatttatcagacacactatgtaattagcttgattttcagtatgctttccagaagtattaaatagcaaaacg

SEQ ID NO: 24503 - DNA, 1084 bp, Artificial sequence
  DNA replication origin
tgtgtaggaattacaaaacgaaaggtaaaaatccgacaagttccagagcggagtgggatgcttgctcctcacctcctgcccgtcccccccggccgccccccgactccagttcctggcgcacaccgcgtccgcattctccaccgtgaagcactggcccgaggacgcgccctgggggtaacaagtctccaggcgccacacgggcttggcagagtttcctagaaaaagagccttgccccggtcgtctttgcctcggttgcccttgccgccgccgccgccgccgtctcccggggaggggggcagggtgggggacgaggaggcggagaggagtctgtgtgcctgggcggcgggcgaggactcccccatgctcgccaggagcgcgggccaggagggctcctgctgccgccgctgctgctgctgctgctgccgctgcctctgctgctgctgctgctgctgctgctgccgctgctgctgctggtgctccttgtcccgggcccgggtcagcttggcctcggcgcagaaccacaagtgatcagagagcaggactgtgaaaaacaagagagatgccagagacagtcgccatttctgagccctctcggaatcgatgaacggtttctcgttctctcggggtgctgccaaccagatttttaagccgtcgtcatactgccgacacatccaagcacccctggtcatattttgggaacgcacagccctggccgactccaccgtgagggcgcctgtgccggtgtcaccacaatatgcattgacttaaagggtttaatttccttatcccctcctcccgtttcttctctctcctctctctctttctctctcttcccctctccctctctcctctctctctctctccctctccctctcttttatctctctctgtctcttttgcctacataaatattaccaggctttgaaggaaggtctgacttgcttcctaatcatcagccgaccccatcctctgtagagtgggaaacaataatggagagagagagagagagagagacggaggaggctggtgctggtggccggcggcgaggctgggtgcagggggcgatggtggaggtgacagggt

SEQ ID NO: 24504 - DNA, 918 bp, Artificial sequence
  DNA replication origin
gctctaagtgctgccgccgccgccgccgccgccgccgctgccgcagggccgcccgcgggcgccgccgccggggctccgactgctgacgccgcctcccgcggagctccgggccgaatcgcctgggctgggcctcccgagagccacagtcatcttcagtccgcgggctaagttgccgccatcttcgtcctggagaaacacttttttggggggagcgctggcttttgcgtcatctcctcccgcgccgagctcgctccatcctggcgcagtggcgccggctcggcccgggaggagggagaaggcgcgcgggggcgggcggcggcggggccgcggggcccgggggcccccgcccggctccccgggctcaggcgcctgctctttcctttctgtccccctgtccacgatattttgttttaatcactgaagagaaaaataaaagtcagactgcggacggcatggccggtgaggctcctcgcggccgcgccgcccgcacgctctggctccgggaagcgtccgagttgcaggcgcccgggcagaggtctctactggtgcgagggtctgggcagagtcctctcaactaaggaccgagccacttcggatggaaggtgggggtccgcggaggaagctcgaattggctagaggagggatgaggtgacatttggtctctgaatgcgtctcggatcccggaccgcgagatccatcgctcccagtgcgtgcagttattccgtcctgctgtgtgacacgggagaatggcgcgcacgcctgtgcacctgcatcgaccgtgtagctgcctgggtgacagccacccatttgtctatgttttctttcctattctaaagtaaacgattagaagtggcctcatagagtcttaggaagaaacagtaagccctgtgccacccggggtcactgcctagccctgcc

SEQ ID NO: 24505 - DNA, 1706 bp, Artificial sequence
  DNA replication origin
ggagttttcacaaccagcgaaatcagtatagttaccactgttttacgtacagagaacaagaattagaggctatcactagccagagcacaaagtgatcttaggtctccctcgagacaaaatccactggcgtgtggatcaactgcttgcagagagcatctgctgccgaggccaataggagccgtgtgtactcaagaccctaaccaggatcctgcaggtcccgcctccgcagccccacggggctgccggcccccccacctcccatcgcgagcctggctgcgccggcgtgcttgagcccggtgactgcaaggccccgggtctcccctgcgcctgcgcggcgagcagctggcggaaccggcatcttctggcgccagcttccggcttagcggctgagcttcaggcttgacgtcaggtgggaagggtgtggggtggcaggtgggggcggttgggaggttggggggggttggggtggggggggtggggggtggcagattgacggtgtggggggagtcaagtggaaggtgtggtccagcaggcggcgagaagtctgtggggcaacagaccgggggaaggtctgtggggcgtcaggcggggtatctgtgggacgtcaggttggggtctgtagggcgtcacgttgggggtctgtggggcgtcagaggggggaatctgtggggcggcaggtggggggtgttcggggcggggtttggggtgtgtgtggcggcaggaggcgggggaggtctgtggggcgtcaggttagggtctgtgaggtgtcaggcggggtttacgtggggtggcaggtgtggggtgtgtggagagtcaagtggggggtgtggggcgtcagattgggggtctgggggatcagatgggtggtgtctgggacgtcaggcgggggtcggggggtcgtcaggcgggggatgtgtggggagtcaagtaggggaagtggggcgtcagattgggggtctgggggatccggtcgtgggggtgtctgggacgtcaggcggggggcctgaggggcgtcaggtgggggggtctgggaggcgtcaggcgggggtcggtctatgggggcagcaagcagggtgtttgtgcagcggcaggtgatgggagttgccgagtccacagcgctgtagactgcgccgcattagaagcctggcctcctgatgctgtgctcttcatctagacccaagccccaggtcgtgggacgatttctcccgtttttgactccctggaactgtattgcctgctttacctgcgtacatgttgattctttctcatggcaaccccgcaggaaaccatcaagatctcattttacagctgggattctctggttcacagaggtaacggagcttgcccgaggccaggtattcactgggaatccgtgaagggttgggggagagtagggggaacgggcagaggaatgatgtagactccttagggattttccattttccgagagggtacagggggcattggagcgggagagactttaggcttggagggaattactttatttctcttcttacacttggtctttcattaacttttgggatcccaaagcccttctagcgtctttgtctgctcatttctttttgctgagattgtcccaaattgtcactaagtgctgtggaagataggcagctgtaaaccctttgtttcctagggaaacacagcttgtcaagggttgcatgaaggatacttcagttgcattcgtc

SEQ ID NO: 24506 - DNA, 1680 bp, Artificial sequence
  DNA replication origin
ccgcagagcgaggcgcggcgccccgggagctggagctcagccccacgacccgcgctgcggcgggcaccacgcggggggcgcgcggggaggggagaggcggggccggcggggactgtgtcgccgccgacgccgcggctgcgggtcgcagaggcgggcagagagagccgccgccgagcgggtggcggagcagtccccagcctccagccggcctggctgcgcgcaaccgcgccggccccgggcacaggggcaactgccgacccctctcacccgccgcgcggggctggtttccgagccgagtcccggccatcgccgcgtcgcctggcgcccggctccggcggacccttctccggcaggtaggggcgtcggcggggcgctgcgcgcggtccaagcgcggggaacgcggcggggcagcctctccgagtctggaggtacgcggggcgcagaggctgttctgcaccgccgggctggggacgccgggagggtgccccgggtcggacttgcggcgctgggtccccacccagagttcccgcacggtgagggttggacgcgtctggggggcgtggagaggaggcttgtcggtcccttcctgggaaaggaatcgcggggacttcccaaccgctaggacgcgtaagccgaggctgggagtagaagccttctgaactctggacctaccccagaaggagggggcgaaactggccatttcgagggacgcggaagccccgttgctaggggagatgggggaagcggcgtggtcacctacacaaccgctcccaggcgcgatgggggctctgcttcctcctcctctgtttctttggggatggaaaagagagcagaacaaagatgtagagtgaaggagggctccccagctgttgcctcttgcgcggattctgctgacccctctgcgcgaccccagctgggcagtgtcagctccattgtctcagaggccggcggccaagtgagggaccagtctcacccggggggcgtcgagcctcagcgcatcgccccgtcttccctggctgcagaaaaccactaggccggtggaagtgctccgtttaattggtccctagtacgcccccgaaaggaaatggagacgatttccgtcaagttctcttagtatttctgtcatttacagaaaagcagtagctactcacatgtggctcagatgtctgtgtgggggttgtgagccagggcattaaaattgggtgttaaccgtttgccactcagaagaattattagccattggaggaggagcggtttctcttgctaagcggggttaagtgaaacttggctgctctgaattggccagaggagtaaatgagcagagggctgacctgcgtcttccaaaggcagaagcacaggggaagcccggagcctcttctgagttagtggctttctctgcgaatctcatgcggtctctggagtctgtgttgggatgaaggttaaagcatttacaacacgcgtttgtcatgtgttcttgggactatttctgacgctcctgcggtctatccatgcatctcccagtgcttttcacttagaatctagaggaagaacaagggatcccaaagtcgtcaatgagatcctgagatcaaagccacatgattgaggaggggccaaccacagatccactgggacaaccagcttctttcttttgggattattgcatagctaccagattaaatt

SEQ ID NO: 24507 - DNA, 1504 bp, Artificial sequence
  DNA replication origin
gcacggggtacttgaggttggtctccaggactggcagcttcttcacctccaggggtgtcaggggcgactcgtcggaggcgggggagcaggtgacgggggtcggggggaacaccagcaggggcggccggtgcggcagcaggttggggaagggcggcgggatgtcgcacgcgtcccctgggggccccgccgcctcgtcctccggcgcgcggtggagcaggggcggcgatgcgccgtggagcaggaaggagcccgcgcccgggccgccgtcgtcgggcaggcaacacttcatctcctcgtacacggactccccggggtccgggctatcgggcctggccgcgtgccccagcatctcgatgtacacaggctcgctgtcgtcctcgtcacccggaggcgccgccgggggcagcgcgcactgcggagtcccgggggtcagaacgcgcgctgctgcccccggggcgcccgcgggcctcgcgtccccgggccgggaccccgatatctcctcgtaggagccgctgagcttggtgttggggctgcgcttgggctttcgaggaggaatcttcttcatggtgctgtagtcgtcgctgtgcggtctgggccgggccagagctgcggcaggaaaggacgcggtcagtgggtgccaggccaggcccacgggtgcccaccaagcccggggctcgactcggagggagccacggccccgtgccccgagaatcccaagggaccgggcctgcatgttcctccacccactaggctccctggctgaacccgaactcctgagaccacccccaagaaaagagagttttgatcttggagatggaagaagactcccaccctctgaggaggttgtccagtggaacgtcaaggggttccagtgaggaaggagaccaccacttctgctgctacccacccaccccccttgcctagtttataagacaggagaaaaaggagaaagcaaaaagttaaaaagaaacaaaagtaaaataaatagccagacgaccttggtgccaccacccggctctggtggttaaaataataataataataatatcaacccccgacctaaactacttgtgttatctgtaaattccagactttgtatgaagaagcattgtaaaattttctgttctgttagctgatgcatgtaaccccagtcacgttccccacccttgctctatctattacgaccctttcacgtagaccccttaaacttgtaagcccttaaaagggccaagaatttctttttcggagagctcagctcttaagacgcaagtctgcagaagctcccggccgaataaagccacttccttctttaacctggtgtctgaggagttttgtctgtggctggtcctgctacaccaggatgtcagccacccatggaggctgcggaggtgcggtccctggagatgcagtggggaagtgacactcagggatcaggtggtggaacacacttaggtgtggattcttaggacctaacaggtgtgacataaggtatgggttgaactgg

SEQ ID NO: 24508 - DNA, 1482 bp, Artificial sequence
  DNA replication origin
aagtctgactggttgcggacagccaatttcccatctgtggtgcagaaaaggtgggggtttgcagagggagtagccttgggtccttttgttacttaggcatggaaaattatgattttcctttcaatttagttctagggagtcgacatgaaagggccttaggttccctgcctccagaccctatcctcctgcctcacctggaggcgagtgggggatccagtgccatcatgatggaagagactggttataattttccttaaggagaagatccttttcatcaatgaacttcttccccaaaatacacaccattgagaaaacattttggttttgtatacaaaccttaacatgtcttttggaagaggaagacattctttgtgattaaaggaatctgtgcaaaagcagtgcctttggcactgaggtcgtgtcatctgaaggaagagccatgtggttagccagttacaaaagactggcaaaaaacgtcgtcatgaaaatcttattttgccaggtacattcttctacagggacacaaaataaatgtttttgaatgcaggcaacagcctgtcatggagctcacttgagtggactgatttccacctgcaaaccccactgtgggctgagtcgctggatgagaaaacacagataacggggctgcgttagagtgctccttggatggcatacgaccagaagaaaagcagttcatcccaaacagcccacagccgagtggcattaagcgcagggtagtaactggctaggtcaacatcccagacaccgccaggcaaagctagatggatggcaaaccgcacgctcggggattagctgtgaactgtacatcaaacggaaatcggcgatagaaacatacacaaaataccactttcacgttataaggaaaaaatatttttttaaaaaaagaaattagtagctaacatttaaccttgctctgtcgaacatttatcaagttataatttattaaatccagttgcggtctgcgtctttctatatcacgagcctttcctatcatattctgcaatatggaaatattaattcctacctatttggtcacagtgggtgtatacgatttttttttaaagctgatatctgctctgaacgaccacggccatcacctgaaactttactatttcacatctgcgcagacacggatgtacacaggtgcacgcaagcacagcgtccatgcaaaaggagtggggggatgtctgctccgcttaccttctgcttccctgatttttcttcccgccgcggatttccgaagcacactcctccccgagttgaagaggctggcgagctcgtccagggggctgctgagaggcctggagctgggagggctgtagggcgcggggggcgaggcactggagccggccttcctggcgtccgccctggtggccttcacgggggaatatgggatcttggggaaggagctgcagggcccggccacgggggcagagtttggctttgggtgaaccttgggcg

SEQ ID NO: 24509 - DNA, 1201 bp, Artificial sequence
  DNA replication origin
ccggcacctcgggaggcccaggcgggcagatcacttgcggtcaggagctggagaccagcccgaccaacatggggaaaccccgtctccaccaaaaaaatacaaaaaccagtcaggcgtggcggcgtgtgcctgcaatcccaggcactcggcaggctgaggcaggagaatcaggcagggaggttgcagtgagccgagatggcggcagtacagtccagcctcagctgggcatcagagggagaccgtggaaagtgggagacgagggagagggcgggggagagggagggggagggggcaattcttgaaggagagtctccaggcagacttaaaaagtaacatctgactctcaaaaagatgcaatcatctgtctcctggagtttgaattataatgatgaaagacaaataattacagttcagggtagaagtatggtcacagatgcattcagtgcatgaggagggtgacagggccatgaaatgtcccaagaggggcagcctgtctgatccatggaacatcccaggagacttcttggtgcaggaggcatttgacctgttacatattctctcaggacttttatgtttgtgattgttttgagaagtaaaatgtaagctatttgtaaagggcaggacaggccttgcagactgtatgtcctcaaataatggttgtcattattaattaaatattctttaaaccgttggggacacttttggtactaaggtgaaaaatttcccacacttcatcctgaatatgatccagggctttactgtaacatggaatcaggcctatttgtacttagtttgctctcagcagccttgtgttgtgaggaggggaggtttgcttaatgagagaggtgtgtacagtttgggctggcggttaaacataccctgcagtggtgctcattccaaagttaacaattatcttaacacaatatttaccttatcagaggaagttgcgctgtttgcctgttccttcagtgagatctcctactgagctgaattcaaaacagttaagataaacgttagctctttagagcacaccgctagggctggaaaatgatgggaaccaaggtcgtctcgtgcagcgttttggatctgtacaatgacgtcatctcaccaaggtccttcagctgtgagtctgattgatcgttctgcataggttgctaactacacctgcacactttcttccaaattatgctaggcaatatgg

SEQ ID NO: 24510 - DNA, 1256 bp, Artificial sequence
  DNA replication origin
aaggagcatgctgccttcaagcatctgtttaacaaagcacatcttgcaccgcccttaatccatttaaccctgagtggacacagcacatgtttcagagagcatggggttgggggtaaggttatagattaacagcatcccaaggcagaagaatttttcttagtacagaacaaaatggagtctcctatgtctacttctttctacacagacacagtaacaatctgatctctctttcttttccccacatttcccccttttctatttgacaaaaccgccatcgtcgtcatggcccgttctcaatgagctgttgggtacacctcccagacggggtggcggtagggcagaggggctcctcacttcccagacggggcggccgggcgggggctgccccccacctccctcccggatggggcagctggccgggcgagggctgccccccacctcctggacggggcggctgccgggcggagacgctcctcacttcccagacgatgggtgaccaggcagagacgctcctcacttcccagacggggtggctgctgggcggaggggctcctcacttctgggacagggtggccgggcagagacactcctcacctcccagacggggtggcagttgggcagaggcactcctcacatcccagacggggcggccgggcagaggcactcctcacatcccagacggggtggcggggcagaggtgctccccacatctcagacgatgggcagccgggcagagacgctcctcacttcctagacgggatggcggccgggaagaggtgctcctcacttcccagactgggcggccgggcagaggggctcctcacgtcccagacgatgggcggccaggcagagacgctcctcacttcccagacgggatggcggccgggcagaggctgcaatctgggcactttgggaggccaaggcaggcggctgggaggtggaggttttagcgagccgagatcacgccactgcactccagcctgggcaacattgagcactgagtgagcgagactccgtctgcaatcccggcacctcgggaggcccaggcgggcagatcacttgcggtcaggagctggagaccagcccgaccaacatggggaaaccccgtctccaccaaaaaaatacaaaaaccagtcaggcgtggcggcgtgtgcctgcaatcccaggcactcggcaggctgaggcaggagaatcaggcagggaggttgcagtgagccgagatggcggcagtacagtccagcctcagctgggcatca

SEQ ID NO: 24511 - DNA, 1437 bp, Artificial sequence
  DNA replication origin
tacaagtaggtgaaataggtagtactttaaagaatgagaacaacatggaaaaggaggctatgaaatactgagaatatggctggagttttcattttagataagtaaatagccaaagaagccttgactgaggaagcagccagccctgtaagaaaggagacccctgccatggtcctgagacaagggtttgagtggtttccgcaggaggcatttccaggaggggaaggagggaaacaacgagggaaaagtacaaggtgtgctcacccctgaatgagtccccggggcaacccggatccacctgtccaggctcctctgagcacgtggggagcacgtggagagggagtgggggagtcgtgggggagcgtgggcagcgcttgggggagccgttggggacttggggagagcgtggagagccgtggggagggcgtggcggagctgtcggggagccgtgggggcgcgcgtggtcagcacttggggagcgcattgagagccgtggggagcactgagggaggatgcggtggccacggctgcgtggcacccccaggccatggccaggagaccctcgggcggcgcaggtgccggaagcagcgccatccgtgctatggacgggtccccccaattggcagcggtctcgggggtgagccagaggatggggtgactgagaggtggccgatgtggggatggtggttttcaaatagaggcgagatcggagcaggagctgggaaccaaaccagaaggttttcaggacgtggttagactttgaagcggcctaaggctgtggcacatctgacccactttctcaccaacattgcggtggcttcttagtaaggaacgggctgaaaggggtaagggaaagggtgggggcagggcactgggaaaccaccattgccaacatccaggccaggcaggggcggcaggggctgggccagggcgcaggggacccgactcttgctgcggccgctgggaagagggaattgccatagagccagaacaggaggcgctggggcagggctctgctgtggggcggggtgctcagtttgggacagtgttgacacttttggagatcatcagccatcccagtaggtgactccaggaggccactggatatacagctctgggaacaaaaaacggaatcatcagcctatttacaactctggaatggatgagatggctgtgacgactggcagcagctgcgcctgagccctcagcacctgcagggtcccatgggaggtgagggctgtaagggagcaagcaactcctctccctggagcaggcgggcagggagaacagaccgccactgtgctgctctcaaaaccaagtgcatggccggtcggggtggctcaggcctgtaatcccagcactttgggaggctgaggcaggcaggtcacctgaggtcaggagttcaagaccagcctggccaacatggtgaaccccctgact

SEQ ID NO: 24512 - DNA, 1912 bp, Artificial sequence
  DNA replication origin
ggaggggagggcagaagacgtgtttgtggccacattcccggtgtggcccgcctggacaggagccagggtgcacactgacctgcacagcctctggcctctgtccctgggcctgagaggcaggagcaaggggcctgtcctcactctgaatccaactgctggtgactcagggcaccctgctggaccctccaggagaagttggggcccacgtttctaggctgcccactcatccaaacctccctccatgtccctgaccaaagcatttcgcagatctgggtcctctggtgtgtgaggctcctcccagcccatgagcattggaaaatgtctacaagatctttgccattttaggttctaccgaggctaaagaatgtatgtttcctctgcttagacttaagtttttgagtaactttatagacactttggcattttggctgaaagggcatgtgcagtaactgaatatgacttgtgcactgtttcagtgccagtgggtcacatgcaggggagtcagagccaaggtggatgaggctgggatatctacatgcttggtggggagttggagtcagggtggatgaggctgggatatctacatgcttggtggggagtcggagccagggtggatgaggctgggatatctacatgtttggtggggagttggagtcagggtggatgaggctgggatatctacatgcttggtggggagtcggagccagggtggatgaggctgggatatctacatgcttggtggggagttggagccaaggtggatgaggctgggatatctacatgcttggtggggagtcggagtcagggtggatgaggctgggatatctacatgcttggtggggagtcggagccagggtggatgaggctgggatatctacatgcttggtggggagtcggagtcagggtggttgaggctgggatatctacatgcttggtggggagtcggagtcagggtggttgaggctgggatatctacatgcttggtggggagttggagtcagggtggatgaggctgggatatctacatgcttggtggggagtcggagccagggtggatgaggctgggatatctacatgtttggtggggagttggagtcagggtggatgaggctgggatatctacatgcttggtggggagtcggagtcagggtggttgaggctgggatatctacatgcttggtggggagtcggagccaaggtggatgaggctgggatatctacatgcttggtggggagttggagtcagggtggatgaggctgggatatctacatgcttggtggggagtcggagccagggtggatgaggctgggatatctacatgcttggtggggagtcggagccagggtggatgaggctgggatatctacatgcttggtggggaggaggagccaaggtggatgaggctgggatatctacatgcttggtggggagttggagccaaggtggatgaggctgggatatctacatgcttggtggggagttggagtcagggtggatgaggctgggatatctacatgcttggtggggagtcggagtcagggtggttgaggctgggatatctacatgcttggtggggaggaggagccaaagtggatgaggctgggatatctacatgcttggtggggagttggagccaaggtggaggaggctgggatatctacatgcttggtggggagttggagtcagggtggatgaggctgggatatctacatgcttggtggggagttggatccaaggtggatgaggctgggatatctacatgcttggtggggagttggagtcagggtggttgaggctgggatatctacatgcttggtggggagttggagtcagggtggatgaggctgggatatctacatgcttggtggggagttggagtcagggtggttgaggctgggatatctacatgct

SEQ ID NO: 24513 - DNA, 858 bp, Artificial sequence
  DNA replication origin
aacacctacgccagcattgacttcttgtcccaccacttgaaggaggccaccatcgtgaaaggtgaggaggccctttgccttggcgtctggcgggaaggaggggcggggcgctgagggagcctcttgggtttcactgctcccactttttggggaccttgacccagaagccgacagcctggcactggctccttgttttgtttttctgcgggctgccctgttctcttccttcagagaacttgccaggaacattcgtcttggagttgaatgtgacgttttccgcgtgggagggagactgattttttgaggccccacccattcacccattctgtgcgtcccacagccccctgtcccttaacacagtggaagttctcccagaccggccacactagaggccgcggggcacccgactgtcttcatccggctgcgtgggtccgtccttctggaaggacctcgggtccggaccgctgccctcagccgcagctttcacctttccctgtgttcctggagctgggctccgcctgattcttggtgagcttgaaggttcagacctgaaagtcatttaagaaatgagcatccattttgatggctgctaatagcgacagttaaccatttccgttttacacacaaactgtgggagcttttccatcagaggcattgtttttctcggaaggggtgaaacggtaaggctgcacacagcctaatgcagtggtgttcaacttgagcatatgtgggagttacctggaggctttgctgaaacatggatctctggcctgtgttaaccccgcagtttccgatgctgtagctttggggcgcggcccaggctgtgcatttctagtgagtctccgcataatgccgatg

SEQ ID NO: 24514 - DNA, 889 bp, Artificial sequence
  DNA replication origin
cgccgccgccacagttccgagaccttctcctccaccacgacggtcacccccgtgtccccgtccttcgcccacaaccccaagcgccacaactcggcctccgtggaaaatgtctctctcaggaaaagcagcgagggcggcgtgggtgtcggccctggagggggcgacgagccgcccacctccccacgacagttgcagccggcgccccctttggcaccgcagggccggccgtggaccccgggtcagcccgggggcttggtcggttgtcctgggagcggtggatcgcccatgcgcagagagacctctgccggcttccagaatggtctcaactacatcgccatcgacgtgagggaggagcccgggctgccaccccagccgcagccgccgccgccgccgcttcctcagccgggagacaagagctcctggggccggacccgaagcctcgggggtctcatcagcgctgtgggcgtcggcagcaccggcggcgggtgcggggggccgggtcccggtgccctgccccctgccaacacctacgccagcattgacttcttgtcccaccacttgaaggaggccaccatcgtgaaaggtgaggaggccctttgccttggcgtctggcgggaaggaggggcggggcgctgagggagcctcttgggtttcactgctcccactttttggggaccttgacccagaagccgacagcctggcactggctccttgttttgtttttctgcgggctgccctgttctcttccttcagagaacttgccaggaacattcgtcttggagttgaatgtgacgttttccgcgtgggagggagactgattttttgaggccccacccattcacccattctgtgcgtcccacagccccctgtcccttaacacagtggaagt

SEQ ID NO: 24515 - DNA, 739 bp, Artificial sequence
  DNA replication origin
cccagcgagcgcgtcccccggcgccgcccgagagcccgaggaggcagcggccgcaggcagccggggaggggggcggccaccgcccgcgccgggcatcctcaggagccccagagcgcggagggcgcggcgccgccgagcggtgctggcccccgcgggcctccccggaccttccccaccgcctgggcccgagggacgcgtgatcgggcgggcggccgggcgcaagggtgggagggagccgcccccgcccgcgccccctccgcccctcgccccaacccctgggcgccgggcccgggccgcgcggcctgaagcgcccgcgatggcgagcccgccgcggcacgggccgcccgggccggcgagcggagacggccccaacctcaacaacaacaacaacaacaacaaccacagcgtgcgcaagtgcggctacctgcgcaagcagaagcatggccacaagcgcttcttcgtgctgcgcggacccggcgcgggcggcgacgaggcgacggcgggcggggggtcggcgccgcaaccgccgcggctcgagtactacgagagcgagaaaaagtggcggagcaaggcaggcgcgccgaaacgggtgatcgctctcgactgctgcctgaacatcaacaagcgcgccgacgccaagcacaagtacctgatcgccctctacaccaaggacgagtacttcgccgtggccgccgagaacgagcaggagcaggagggctggtaccgcgcgctcaccgac

SEQ ID NO: 24516 - DNA, 986 bp, Artificial sequence
  DNA replication origin
ttaaaaacggaattatgctgagcgctatgaagtaaacaaagcgcaggcatgagaaagtacgctaggcagggcagcctttagaatacagccaggagcaggctttggtggggcaaagagctaagctgagaactggaggcgtaagacccagcatgagaggacggaagtggaagcatctgtgaggaaggaatgttgcacagaggattcagaagcagaggagagtttggaggagttgaaggtaggcaggcatcttgaacaccatgtgtaaggggcacggttcctgtggaaaagggagaagaagccgggaggcgcagggctttgcaggccacaggcaggagtgtgggttttcttctactggtcatgggaagtcactgaagagtcaaaagtaggcgagtaagagggcccagtgagctctgaaaaagatctcagtggtggccttggggccacaagggtgggaagtcaggggagtggttggtgggggatggcaggaagcccatggggtggtgaagatgagacaggagtgtgctggggtgaaggcggtggagaagggagacgtggctggagatgacaggtcacttggagacttagtggggtgtgctgatgggagggatcacagagaggaggaaacgcaaacaggggagacagagaagctacgggattctttcctgaacagccacgtggttggagatgtctgggtagaaatgggggcactgagggacagatggagagtttagagttctgttttgaataaacatgagttgtgcatgagactttgaattagagaagcttactaggaagttaggcatacagggctggatctcaggagagacacaagagctgaacatataaactgcggagtgtagggattgaaaccatgagaatgacagtctcccctgtggatggtccaggcagaaccctgcagagctctaacacagagaaatcgctcagaggagaggggctggaaaagagtgggggcaggaatcaggaag

SEQ ID NO: 24517 - DNA, 1872 bp, Artificial sequence
  DNA replication origin
gtcatatgtgattgacttctagaaagtccctagactgttacatgaggaattgcattttcaagggagatctttgaacgatctgccccagagattgaacaacatcaattaacaggaatgcagtgggcagaggacccaaagggtttcattttctgtcttttttaaacaatcaaaatgaaaaggtgagtgagtggtcactgtgcctaaagatacatctgtttttaaaaagtcctgtaaaaagtcaagaattaatggaatggctctatttgtgtttatgttttttagtcaaggagtgctgagatatttttccctcaggaaagaggtagaattcatgcttcctgaaaaccattttcttgacgctcagtggaaagtgaaccctaaaattgtgtggtctatgggaaataatggctaggagatgaggagcagcctttgtttccttttaagtttgtttcctattattcacacgtgtacttttctgggattttgtgaacatttacaattcacgtgagataaatgaagtagcgtatttccccctctgtagctagcatgatttgcaggttcttaaagaagttcagactgtgtgtgtgtatctgtgtgtgtgcgactatgtgtggtgtgtgtttgtgtgtgtatgtctgtgtgtggggtgtgtttgtgtgtgtgtatgtgtctgtgtgtggtgtgtgtgtctgtgtgtggtgtgtgtgtctttgatgtgtgtgtgtctctctgtggtgtgtgtgtgtggtgtgtgtgcctgggtgtctgtgtgtgtgtggtatatgtgtggtgtgtttctctctgtgtgtatggtgtatgaatggtgtgtggggggtatgtgtgtttgtgtgtctgtgtggtgtgtgtttgtgtgtgtatgtgtctgtgtggtgtctgtatgtgtttctgtgtgtgtggtgtatgtgtggtgtgtgtttctgtgtggtgtgtgtatgtctgagtgtgtggtgtgtgtgtggtatctgtgtgtgtggtgtgtgtgtggtatctgtgtgtgtgtctgtgtgcatggtgtatgtgtggtgtgtgcgctgtgtgatgtgtgtgtctctgtgtgtggcgtgtgtgtgtgtggtgtgtgtgtgcctgtgtgtgtagaatgtgtgtgtggtgtgtgtctgtgtgtgtgtgtagtgtgtgtgtgatgtgtctgagtgtgtggtgtgtgtgtgtggtgtgtgtggctgtggtgtgtctgtgtgtggggtgtatgtgtggtgtgtgtgtctgtgtgtgtgtctgtatgtgtgtagtgtgtgtgtggtgtgtgtgtgtagtgtgagtgtgtggtgtgtatgtctgtgtgtggcatgtgtgtctgtgtgtgcaagtgccaatggagtggctatctcagtacatttccggggaggctgggctgtggggaaagaggccaggtcttgcacagcagggccctgaaggggacgacagttccggagcaggacccctagaaggttgatgatggttgccatgctcttctgacaaggctgggaaacaggatgggagggacgcgtctatcccttcggtgatggacggccgcatcaaggagtgtttcttggagatgtttttgaggttcttgggatgagtttcaaccttcctgccagcaaccacaatgtgatctaccaaggcctctggagtccccaagtgtggagaacgggatctgcccgcatgtctcccacttaagccgggaggtttctgtgcagtccaagagctcggggtgggtgagggttggcaggcattccgaagctgacagttgacctgagccttcacaaatgtccttcctgcagaactcttcaagctcggtttccgttgagtgctctcgccttctttataaggacagaagttaaagacacaacc

SEQ ID NO: 24518 - DNA, 1056 bp, Artificial sequence
  DNA replication origin
ggatccaggaggctcccgggtcacatgcttggggcagtcggaggttccaagtgtggtgccaagtgcccagttgagttgttggcacttctggcctttggagtcactctgtggacgctggtaagtcatcaaagagggtgttgcctctgtgaacgtcaggggcacagcctagcggagagtgggccttggggacatggggacccctaatttaatatagacatggcacacaaggcagtggaggcagctcctgtcagcaccctggggcggcagacaggctggaacctgtggtctcgggatcaaccaccctgggaagcaaaacgtacttcccgccgttctccacactgaggcgccattaacaaggccctagcaagcaactaggcctggctcgggcaaggccgccacttccgtaagctttagagccaaagacagcaggtgcccaagggaggcactgcaccagtgtgagagtgtgagtgtgcaacagaacacacgtgtgtgagtgtgtgacagtgtgtgggtttgattgtgagcatgctgtgattgagtgtgtgtaacatcatgttaggtatgggcgagtgtgcatgtgagtgtctacaagcatgagtgtgtcacagagtgtgtatgtgaataagtataggagtgtgtgtgagaatgtgtgtgcacgtgcaagagtgagagggtgtgtgcgtgtgtgactgcctgtgttgggtgtgtgtgagtatgggcctgtgtgtgtatgtataagtttgtgaataagtgtgcatgtgtgtgggtagagatgagtgtgaatgtgtgtatatgtgtatgtgcatgaggttgtgtgggctgtggatgtgcatttatgagtgtggatgtgcaagtatacacctgtgtgcatgtatgagtgtgtgtgtgagtttgtgaataagtgtgtgagtgttgatgtggttgtgtacatgtgagtgtgtgtgtggctgtggcagtgtgtgtgtgtgtttctaagtgagtgtaggagtgcaagtgtgggcgggctctggcaaatgcatgggagcctcaagaggcccaggaatgaggctgaccagg

SEQ ID NO: 24519 - DNA, 1189 bp, Artificial sequence
  DNA replication origin
ggcaggaagggagggggcaggcaggcaggaagggaagggggcaggcaggaagggagggggcaggcaggcaggaagggaagggggcaggcaggaagggagggggcaggcaggcaggaagggaagggggaaggcaggaagggagggggaagggggaaggcaggaagggagggggaaggcaggaagggaagggggaaggcaggaagggaagggggaaggcaggaagggaagggggaaggcaggaagggaagggggaaggcaggaagggaagggggaaggcaggaagggagggggaaggcaggaagggagggggaaggcaggaagggagggggaaggcaggaagggagggggaaggcaggaagggagggggaaggaggcagaggaaagaaaagactgtgactgaccttatcttatgacaggagaaggtaataggtctcattttcttagctggtaattctactgtcaattagacaaattttatgtgaagatttttattctacaaatcacgctgtatatctcatgttcttcttatctattaaatcatacctaactgttttaaaatcttgcctaacatttcagcctcctccccatgaaatctccggctagagacaagacacctatataatgtttaagatgttcaagagttgtcctgggccccaagcgacagggtgaatagggcgtggtttctaccttcgggcatattctagtccggggggaaaaacacatcaaaaaaactaaatgactccacaggatgattgcaacaaacctacaagatgctggagaaggaaaaatggttttggacgaggatgatactcgggaggaagaggtgaagacagcagaggaggatggccacttgctgagtggtgctgccctgtcaggaaccagcaggcactgtgaacgtgcatcctcgagggagcaggtgaactggacctcagagcccagaaccacagggaggatgtcagtgcccgggaaagcaaaggaggaaattccagaaagagaaagcaagggaaccaaatatggaaatgagaacgtgcacagggagtttgaagaacattgggaagtttaaagagggttgaagccctggtgtatttacaggtgcaactggaaatgcggaggtcggccatggggtgaggggtttgcatccactttaacccagctacactctattcatgccccagaccggcggcggggg

SEQ ID NO: 24520 - DNA, 1306 bp, Artificial sequence
  DNA replication origin
ccgcccgagcccccggggccggcgcccagagagcccagcaaggccggccgccctgccggtgtgccgccggcgggtgcttctggaagggccaatgcgttcgggcagcagcccctgaagccgagcccgaggtgagagcgacccccgagcggcgcccagaccctggcccgagagcaccgacttggagcgccttgtgcaggctagggctgcacgctctcctgcttgggagtagaaagggggagggtgggagagcgaagaccgagctcctcggccaaggagcacccacaggggcctaacgggaggctctccttctttccgggtcgtgggggggacggccctccggtcacccctgcatgcgggccgcgcaccgcgctgtccccgcgtctcgcggaccgagaccggcggtgaggatgggctgcctccctcatcctgcgctaaactcgctttgtctgtcgcctctaggctaagtgggactgaccggggcccagagtggacgaaccgccagcatggggagagaccagcgcgcggtggccggccctgccctacggcggtaagcgactttctgcctggtccccgtgggtcacgcgcgcatggacccttcggtgtaactctcggggactgacaagccgggcccgcacgttcacgtctctcttcctccctttcccatgcaggtggctgctgctggggacagtgaccgtggggttcctcgcccagagcgtcttggcggtaagtcctggctcccgcgcttggacttgcgcgcccgagagtggttgggacgtttgagtggccttggagaaggcagctcgtccgtgcgctcccgagtgtgtgtgtgcgtgtggatgttcgccaggctgcccaccaaggttctgagaaagcttgctcttccctcatcatgctttccacctttccttccccttgggttcccagcgtcaatcctgtgttttgcaagcgtcggcctttcacgggaactgggaacttaaaatgtagcctgaggcaccgttttcgttgctttgggcaaagctgcagccgtagaggccaggaaagtgtgtcagtcactaggcagtgagacgccaggcttagggcgaaaaaagttttcctggaactcgggagctggtggggagtctctgtcacggactgagggttttttgtgtttttaaatgggagtctctgggtaaaggggcggggcgaggaggcgaacgagacaaccttagtattgtttgaattgaagcattgcgagggaacaatggcagaaaaaccgcgttttctcccaagtcctgttccggccctggaagagctgctccgggcgcca

SEQ ID NO: 24521 - DNA, 1289 bp, Artificial sequence
  DNA replication origin
aatgaggacatggataccgtcccatgtagtttgctcactgcacgtttaccatagctcattcattcattcgctcatcaaacacttatcccgtgcctatgctgtgccaggctgtgtgcgaggtgctgtgtgtatacaactggaaatgaaaccgatggactctcatggagcttacagcttagacgtggagacacacattaaacacacaatgcaggaaacacactaatgcggattttcaaattatggcccgtgctggggaacaggggaaaagcagcagggagaggcccagtgaaatgttttgggggtagtcagctgagtcctttctgaggaagtgatgcttcaattaaagcccaaagaataaaaaggagcccctgaagtggggagcgggagggaatgctccagagtgaggacagggtttctaaaaggccctgaaataggcagaaggccagcgcccgcagagtggtgagtgaagggcagatttgcacaaagggaggggaagaaaccggacttggcttttaccccgagggcagtaggaagccattaaagggcatcaaggagggaggctacgcggtctgccatgtgagtctgccgtgtggacgacaggctggagagggaaggaacaacgggtgccatcctagcaggctacgcgggcggtggtggtggatagcaagggcacacacagcactggagtggaggacccgccaggattgtgagggagccagtacagaatgggtgaggtaggcagagtagcccagggctctgctggagctcccgggtttgtgcaggagggtgaggaccaagggagaggtctgtggggtggcagggggtggggacggaggaggcccagagctccattttggacatggagagcttgaggcatttgtgagacacgtgcatagggttgactctgtgtcgagttaacggtttctgttagtagctcagcacacagaacagggccagagaggaaacgagcgagtgaccagcacacactgcatgtactttcatgtggaggacgagttcatccggcggggagtgcagggaggggcagggacttcaggggagagatgtcgggggccagtgggatttcccgggagtggaggggagaagacagcgtctcaggaggagaggcggccgcaccccgcactgctggggacaaagggtgaccggtgaccaggtcagctgcgtgtccggtcagttgtggacttttgtgagctttgttctctgtctccaagctctccctctgtgtgatgagacgtgcagtgtcgcaggtagagagaaatttaaccacacac

SEQ ID NO: 24522 - DNA, 1263 bp, Artificial sequence
  DNA replication origin
ggaccccaggcgtccgtggggctgatgccctgcgtctgcgtgggaccccaggcgtccgtggggctcatgccctgcgtctgcgtgggaccccaggcgtccgtggggctgatgccctgcgtctgcgtgggaccccaggcgtccgtggggctgatgccctgcgtctgcgtgggaccccaggcgtccgtggggctgatgccgtgcatctgcgtgggaccccaggcgtcgtggggctgatgccgtgcgtctgcgtgggaccccaggcgtccgtggggctgatgccctgcgtctgcgtgggaccccaggcgtccgtggggctgatgccctgcgtctgcgtgggaccccaggcgtccgtggggctgatgccctgcgtctgcgtgggaccccaggcgtccgtggggctcatgccctgcatctgtggttgtctctctaggcttcctgtttgggctgaaaggagcaaaaggaagagcaggcttccctgggcttcccggctcccctggagcccgcggaccaaaggggtggaaaggtaagaacatctgggagggacgggatgaggacagcctggcctttccaagtccctcaccttacagaaggtgaaatccatcccccactcacgtgtttggacatgaaaatgagcctgcatgtctctcccagcctcctgtccccttggcggtggcactgagagggaggcgcatggagccagtggtgctgtctgagcactcggcccccaggctcaccgtccctgctctccatctgccatcctcgtcactgaccttcctagcagcagtgagcctgatgctgagtcctgtgctgggttaaaagggaaaacagttatttcttaggctgcactcaggtagtgtctcaagggctcagctccaaggcattgtaacagaggtctgtagagagctctgtccatagcaaggtgctggtatagtcaccatccctggtcctactgagactcggtagagtgacgtggtttgcccgggtctcccttcccgttgatgaggaggcgaacttggaacaggtggtctttgcacctgaccctttccagtcacctcagggactctgcccctagctcgaggccgtcctctgtgaggctctgtgggccctggtgtggtgcaggctgtgctcctgctcacctctcccctcccagaacatggggagcacttcctgggacttaccacgtcttggccgttttggcgtatgtaggatgtgcagtgcattcagcaccccgctgtggatgggcatgacctgagagcaggcacc

SEQ ID NO: 24523 - DNA, 1308 bp, Artificial sequence
  DNA replication origin
tggccacagaagggaagatacgacctggactccaccaaccagggctgggaggatctgtgcctttgaaatcctccaaacacctggaggccacaccacggcactcccaccagggtctctggggcccgggtcccactcttcttccttcttcagaggtttgtggtcattgctcaggagggactcagcctggttagagtctcccaggagcacggagtgaaggccgagctcagagccattgccccttctctctggaagacaggcaccatctccatgtctcatggggtctgtctcatgggccttgagcagcagctcacctctgccggagggatccatgtgctgggagcacccgtgtgctatggggatccgtgtgctagggggacccgtgtgctggagggacccgtatactagggagatctgtgtgctgggggagggggaacccgtgtgctggtggtatccgtgtgctggggggatccgtgtgctgggggggagccgtgtgctggagggacctgtgtgctggagggacctacgtgctggggggatccatgtactggggagacccgtgtgctggggagatccgtgtgctggggagggaagccgtgtgccggggagggaacccgtgtgctggggagaacctgtgtgctggggggacctatgtgctggggggatccatgtgctggtggtatccatgtactgggggaatccacgtgctggggagagaacccgtgtgctggggagggaacccgtgtgctggggagaacctgggtgctggggggacccatgtgctggcggaacccgtgtgctggggagggaacccgtgtgctggggagatccgtgtgctggtgggggagcccgtgtgctgggggtatccatgtgctggggggggcccatgtactggggggcacccgtgtgctggggtgatctatgtgctgggaacattcatgtgaggttgttttcctggcacagcagggctgtttaaaccaggaagttgggtccagaaatggcaacgtcatactctttaagaaactaggcctgggagcctggggaaggggacattctgactgacagcacccagattaccacatacccaaccccaggactccctgacaccactgccaggcacgaggctttaagggcactaggaaatacctggttatgaggtgtcattgaggaaagggttctcatctgcatggggacatggacagctggaaagtgcagaagggagctccaagaccacacacagccatgaaccctggaccgtcacttgctcatctcctccctggagtggccgctttgtacaaaggaaagacggat

SEQ ID NO: 24524 - DNA, 808 bp, Artificial sequence
  DNA replication origin
gcgggtgggacctacttccccagggtcctgtgtctgtagaggtggggcgggtgggacctacttccccagggtcctgtgtctgtgtagaggtggggcgggtgggacctacttccccagggtcctgtgtctgtgtagaggtggggcgggtgggacctacttccccagggtcctgtgtctgtgtagaggtggggcgggtgggacctacttccctagggccctgtgtctgcgtagaggtggggcgggtgggacctgcctccccggggccctgtgtctgcgtagaggtggggcgggtgggacctgcctccccggggccctgtgtctgcgtagaggtggggcgggtgggacctgcctccccggggccctgtgtctgcgtagaggtggggcgggtgggacctgcctccccggggccctgtgtctgcgtagaggtggggcgggtgggacctgcctccccggggccctgtgtctgtgtagaggtggggtggtgggacctgcctccccggggccctgtgtctgtgtagaggtggggtggtgggacctgcctccccagggccctgtctgcagtgagcagggcgtcttcatttctggctgctctgaactcacggttaaagtcctggtcagttttgctgcatttcagtagtttgtccaacagtgtggctgatcagacattggaggcgttcttacagattcaggtttccctcaccaccaggggtaattgacctcttcgtctgtatgtgttggtgacataaagctgagcagatcacttacggatttgctacatagacgagtaataattcctggacaagtcgaa

SEQ ID NO: 24525 - DNA, 923 bp, Artificial sequence
  DNA replication origin
ctctgcctggccgcccatcatctgacatgtggggagcgcctctgccctgccaccccgtctgggatgtgaggagcatctctgcccggccgccccgtctgagaagtgaggagcccctccgcccggcagccgccccgtctgagaagtgaggagcccctccgcccggcagccaccccgtctgggaagtgaggagcgtctccgcctggcagccgccccgtccgggagggaggtgggggggtcagctcccggcccggccagccgcctcgtccaggaggtgaggggcgcctctgcccggccgcccctactgggaagtgaggagcccctctgcccggccagccgccccgtccgggagggaggtgggggggtcagcccccctcccagcgagtcgccccgtccgggagggaggtggaggggtcagccccccgcccggccagccgccccgtccgggaggtgaggggcgcctctgcccggccacccctactgggaagtgaggagcccctctgcctggccaccaccccatctgggaggtgtacccaacagctcattgagaacgggccatgatgacaatggcggttttgtggaatagaaagcggggaaaggtggggaaaagattgagaaatcggatggttgccgtgtctgtgtagaaagaggtagacatgggaaacttttcattttgttctgtactaagaaaaattcttctgccttgggatcctgttgatctgtgaccttacccccaaccctgtgctctctgaaacatgtgctgtgtccactcagggttgaatggattaagggccgtgcaagatgtgctttgttaaacagatgcttgaaggcagcatgctcgttaagagtcatcaccactccctaatctcaagtacccagggacacaaacactgaggaaggccgcagggtcctctgcctaggaaaac

SEQ ID NO: 24526 - DNA, 1277 bp, Artificial sequence
  DNA replication origin
cgatttctcaatcttttccccacctttccccgctttctattccacaaaaccgccattgtcatcatggcccgttctcaatgagctgttgggtacacctcccagatggggtggtggccaggcagaggggctcctcacttcccagtaggggtggccgggcagaggcgcccctcacctcccggacggggcggctggccgggcggggggctgacccctccacctccctcccggacggggcgactcgctgggaggggggctgacccccccacctccctcccggacggggcggctggccgggcagaggggctcctcacttcccagtaggggcggccgggcagaggcgcccctcacctcctggacgaggcggctggccgggccgggagctgacccccccacctccctcccggacggggcggctgccaggcggagacgctcctcacttcccagacggggtggctgccgggcggaggggctcctcacttctcagacggggcggctgccgggcggaggggctcctcacttctcagacggggcggccgggcagagatgctcctcacatcccagacggggtggcagggcagaggcgctccccacatgtcagatgatgggcggccaggcagagacgctcctcacttcctagatgggatggcggccgggaagaggtgctcctcacttcctagatgggatggcggccgggcagagacgctcctcactttccagactgggcagccaggcagaggggctcctcacatcccagacgatgggcggccaggcagagacactcctcacttcccagacggggtggcggctgggcagaggctgcaatctcggcactttgggaggccaaggcaggcggctgggaggtggaggttgtagcgagccgagatcacgccactgcactccagcctgggcaccactgagcactgagtgaacgagactccgtctgcaatcccggcacctcgagaggctgaggctggcggatcactcgcggttaggagctggagaccagcccggccaacacagtgaaaccccatctccaccaaaaaaatacgaaaaccagtcaggcgtggcggcgcgcgcctgcaatcgcaggcactcggcaggctgaggcagaagaatcaggcagggaggttgcagtgagccgagatggcagcagtacagtccagcttcggctcggcatcagagggagactgtggaaagagagggagagggagaccgtggggagaggggagaggggagaggcaacttggttataattaaaaggaaattggctaggcacg

SEQ ID NO: 24527 - DNA, 860 bp, Artificial sequence
  DNA replication origin
ccgcacggaggctcccatcacccaagccgcgcccagccgtcgccgcgccgttccaggaggcctccgtcctctccctactccgccccgcaggccacacggcgccccggccccgcgcgcgggctgcccctcggcggcgcttcccccccgcgagccagcagaggcggtcagcggtcgggtacctgcgtccagtggcggcccgtacagcgcgagtgcggccgagagcaatgcgacaacgaccgcgccggcgacggcagttccggcccccgcgcgtgtgaccatccccgggccaaatggaatcgaccttacctcgtctgcaagcccggattgccccacagcgaggacccagggccatcgggcagcattccggattcccagctgcccccgcgccgtcgccggaaacacagccattggaagcgttttccggtttcccgaccgcctccgcgcggctgtcggcagtgggatcccaactcgctcaatcacacccggttctagatgattgacaagcgcgacgcccaacccggcctggtcccagctctggcctaagaggttcggctggaaggcaggttgaagagttaacaacgatctggttcagggtctggtttgtgtttatcggcccatttttaggcttgcggcgttatagaaaatgattttgctggcaggtggagtgccgaggcccactatgtgcccccagtatagcagtcaggtgcctttctgctccaggcgcaacctctgccctgaaccccaaaccagctcgctgcgaggccccttcgctttccaccgtctcaggtcagggcagctccatcactccaacgctgaggcccaaacccctggaaggcattctgacctctcctgccctccca

SEQ ID NO: 24528 - DNA, 1328 bp, Artificial sequence
  DNA replication origin
gtgtttccggcgacggcgcgggggcagctgggaatccggaatgctgcccgatggccctgggtcctcgctgtggggcaatccgggcttgcagacgaggtaaggtcgattccatttggcccggggatggtcacacgcgcgggggccggaactgccgtcgccggcgcggtcgttgtcgcattgctctcggccgcactcgcgctgtacgggccgccactggacgcaggtacccgaccgctgaccgcctctgctggctcgcgggggggaagcgccgccgaggggcagcccgcgcgcggggccggggcgccgtgtggcctgcggggcggagtagggagaggacggaggcctcctggaacggcgcggcgacggctgggcgcggcttgggtgatgggagcctccgtgcggggtgacagaggggcagagggtggcgccgggccggagccagtgcgcgtcccaggagcggcggagcccgcgcggtggccggggaacggggggccgagggccgaggacggtaggagggccctggggcgccgtggtgcgctggtcggatccgtctgctctgctctgtccccgctcccggtctgggaaagatgctcgccaactgcgggcttgctgtttggtcggagctggatacgggggccctcctggggcccagggacgcggcgggcgtgcaggcgagctggccggctgagcgggcttcgcgcacaccaggagcagggccgtgtctgcatccccaatttgaagtcccagtgcgactgggcaagtacagaccctgcacgtccttggacgagagggactggatattgcgacgcctgggccgcagaaaaggactccaccagccaggcctccttcgcccgcccccggttcggggtgtgtgtgtgcgtgtaggaggtcccttggggagggaggctcacctgagtcatccccagaacctgaagtgctggccagatgtccccgagggccctgccctggccttggctggtccttgcacgctgagatgccttttcaaatagaacggataaggtagaaagaatttaaacaggagctgagcaagtgcttggagccccatctcttcatagggtttttttgtctttctgtttgccttgttggtattggtgtatctaacatattttatacaggaagtagttcgtgtatatctcatttctcataaggagagattgctgttatccaccttggtatagaagataaatagaagctcagagaaagtgacttagccaggattctccagccagtgagtggccgaaatggttaaacgcaccatttgttgctgtagtcattagatagattttaccttgtgtgtatgttgggca

SEQ ID NO: 24529 - DNA, 836 bp, Artificial sequence
  DNA replication origin
tcttgtgctccttcatcagggcgcagacttgtcccacgtgttctgtgccagtgcggccgcacctgtgattaaggcctacagcccggagctgatcgtccacccagttctgtgagtcgctctgcgccggcttctcgtaggttctctttccctcctgcatcatttggggttttggcactgacaccgaaagcgtcctgatggattttccatcctcagagtttctcagcaggtgctgtagaggaagtagggaaatgaaggagcccgttcttctggggtcagaataagacagagacggcggggtggagaggtgggtgggggagcttgggcctgttggaaatggccggggcccagctccagaggcagggaggccctgtgggctgtgtgtgacaggtttgcagaaggtggaaacgaagggcctctgagcaataacaagacccttcctgcactcggcacatatgtctggtgccaggccctagcctgtgttccatgggtcagcgtggaactgggcaggcaaaaacctgcccccgtggggctcccccagaccgcctatgctatagagcttgctgtgtggaggtgttctctctgccgtccaggattgtggccactgagggcttgaaatgtggctgggaggtgcgggagcagagcgtttgctcttgtttacttttcattgtgtgtgtttgcaccgactggattgggctgtgctgctctggagacaagggagaggaggatgtcaggtggtgaaggaaccgtagagagcggcagcagggagggggctgtgagagtgggcagaggggcagttggggcggcagcacagtgtgatgacgcctgggtcgagcccg

SEQ ID NO: 24530 - DNA, 1733 bp, Artificial sequence
  DNA replication origin
gaggccctgtgggctgtgtgtgacaggtttgcagaaggtggaaacgaagggcctctgagcaataacaagacccttcctgcactcggcacatatgtctggtgccaggccctagcctgtgttccatgggtcagcgtggaactgggcaggcaaaaacctgcccccgtggggctcccccagaccgcctatgctatagagcttgctgtgtggaggtgttctctctgccgtccaggattgtggccactgagggcttgaaatgtggctgggaggtgcgggagcagagcgtttgctcttgtttacttttcattgtgtgtgtttgcaccgactggattgggctgtgctgctctggagacaagggagaggaggatgtcaggtggtgaaggaaccgtagagagcggcagcagggagggggctgtgagagtgggcagaggggcagttggggcggcagcacagtgtgatgacgcctgggtcgagcccggcctctccacaccagagaggagccggcgcggagctccaggtgcggtgctgtgatgtgtcgggtgaccaagaggtgcagggctgggccccacagggtgtggggctgctgtcagggctgtggctctggccctgagtaagcagggcagggccagtgtgggtcataaaggctcctacgcggctgtggggctgggccggaggctgtggtaaggacctgtgggagggaagggtgcagtcagatggtgagaggggccggattctgggtatgtttggaaagtttgggggtggaatttgccgacagattggattggaaaaggcaaggggcacagactccaccaagggttttggtctgagcgagtggtcactccatgtggtggaaacgggcttgggtgggatgaagatgaggcgttgggtgtagggcgcagtttggctgccagttagacatccaagggacgtggctagagggcattggacagtggggacacgggcttgggagtcatgcacatgtggacggtgcttaaagctggaagacgagggagtaagaggcggaggggggctggggttgggggcaggggggacttggcactcagatgctgggagcacgggctggggaggaggcagcaggggcctccaggagtcagtgaagccgctgtttccagacagctccagaagggcctgtgtgtgcgactctgggtcagttggagatgaggcctgagaacagttggtgcatctcacagtgcggggtgaccctgacaagggagcttgtcggggaggaaaggggacagaagccttaacagtgggctctaggagaggtcacaccgaacaggaaggagttctgaaaaagcaaacccctgccctgttctgaatgagaaactgcagcagggtcagtgcgttgtgtggggcctggtctataagcacacaaagtaggctttacagccacacatgtatgtgatggaaacaaacgggctaactttagagggcaaagatgattttgaaaatagccatcgttctttttctaacttgtcgtaactgttgaaagctaggcatgtaaatctgggcattaaaagagagatcagggagaggcaatggccacatgcagtgtggggcctggtttgggtcctgacatgggaagaggacatcaagaggaaatgggaaatttggaaaatgctgtggtttaatgaatagtattaaccaatgtgaacttggtcatgctgatccggaatgtgggtgtgtgaggcgttaacctcggggaggctaggcga

SEQ ID NO: 24531 - DNA, 973 bp, Artificial sequence
  DNA replication origin
cgttgtgtggggcctggtctataagcacacaaagtaggctttacagccacacatgtatgtgatggaaacaaacgggctaactttagagggcaaagatgattttgaaaatagccatcgttctttttctaacttgtcgtaactgttgaaagctaggcatgtaaatctgggcattaaaagagagatcagggagaggcaatggccacatgcagtgtggggcctggtttgggtcctgacatgggaagaggacatcaagaggaaatgggaaatttggaaaatgctgtggtttaatgaatagtattaaccaatgtgaacttggtcatgctgatccggaatgtgggtgtgtgaggcgttaacctcggggaggctaggcgaagggtacatgggagccttctgtactgattaaataataaatctaaattacagaaattatttaaaagtcattactatttataagttattttttcaaaataaaatgtaaacaaatacatgacagtaagtaaatgaggaattgtgggtaaccatcctggccttcctttccttctttagtgacagccccaatgctgttcatgaggtggagaagtggctgccccggctgcatgctcttgtcgtaggacctggcttgggtagagatgatgcgcttctcagaaatgtccaggtaatgtgtatactcactcacttccctcatgacaggcttagccttaggcgtgaagttggaacagaggcatttctcttgcattttgtgtagtgttccgtgtgcctctttgtggcatgattgagataagatttgagggacggaggagaaactgagtgcaaaggtggggaggaactgtgctgagatgtgcttctctccgggcccgactgttttctcatggagcagctgcaggaggtgtgtgtgtggagttgctcagttgttttatgtctgatgtgaggagagggtgagcaggactgaggaggtgacagaggtttggggtca

SEQ ID NO: 24532 - DNA, 1280 bp, Artificial sequence
  DNA replication origin
tcctgggcagatgggacagcaggttttggtgagcatgcgccactggcagcctcaccgcacggtgatgggcaccttgctcagagtctcgggtccataagccgcgttacctgacacgatcacgcgcctttcactctgtgtgattagtatctttttggaaaaaacaaccctgaaactcagttactgataagcagagtatttctcgtaagacagaataaggaaaaatgggaaaaccccacctggtccacagtacattcctgagaaatgagcctctgtgggttcccggccgcccagctctccctgtgcgctggtgcatctgaggtgaaagcgttgccggtgctcctgtccctcacgtgggtgaaacaggagtgaacgagaagccaaggctccttcgaagagacacagcctggggcgtgctgcccactggcggctggaggggcttccaccggggtggccggctggatttccctggtgggggtgaccagctgagtttctgtggtggggggtgactatctgggcttctgtggtgggggtgaggtggtggtgacagcctgggcttccctggtggggtgacagtctgggctttcatggtaggggtgactgtctgcgtgtccgtggtggggtgattgtgtttccatggtgggggtgactgtctgggtttccgtggcggggtggctgtctgggtttccgtggcggggtggctgtctgagtttctgtggtgtgattgtctgggtctccctggtgggggtgactgagtttctgtggtggggtgactgtctgcgtgtccgtggtggggtgattgtgtttccatggtgggggtgactgtctgggtttccgtggcggggtggctgtctgagtttctgtggtgtgattgtctgggtctccctggtgggggtgactgagtttctgtggtggggtgactgtctgcgtgtccgtggtggggtgattgtgtttccatggtgggggtgattgggtttccgtggtaagggtgactgtctgggtttccatggtggggtgattttctgtgtttccgtggtgggggtgactgggtccccgtggtgggggtgactgtctgagtttccatgttggggtgattttctgtgtttccgtggtgggggtgactgggtctctgtggtgggggtgactgtctgggtttccatgttggggtgattttctgtgtttccatggtgggggtgactgtctgggtttctgtggtgggggtgaatgtctgagcatccgtggtggggtgactgagcttcttcccactgatgtaccgtttgtca

SEQ ID NO: 24533 - DNA, 1482 bp, Artificial sequence
  DNA replication origin
tttaataaaacaccaaagcaaactaaaaacaacaacaaaaaaccagaggaacgtctcctgttttgagaactggaaaagcaaaggggactttttcttttttttgagacatcgtattgcaagacaccaatagaggcactttttttttttttcaggcggagtctccctctgttgcccaggctgcagtgcagtggtgtgacctcagctcactgtgagctctgcctcctgggttcaagcgattctcttgtctcagcctccccagtagctgggactacagatgcacgccaccacgcccggctaatttgtgtatttttagtagagacggggtttcaccatattggtcaggctggtctcgaactcctgacctcaggtgatccatccgcctcagcctcccaaagtgctgggattacaggtgtgagccactgcgcctggcccaatagaggcacgtttgtcaagctattgtgagtaactttcagaatgtttttgttctcaagatacgggatcatggtgggggaggcatgctgtgtattggagtgcagacatggtgtgtgttgggttgcacactgtgtattggggtgcacactgtattggggtgtagatgtgtgggggcgcacactctattgaggtgcacattgcattggaatgcagacagtgtttgctgggatgcacatgtgctgtgttggggtgcacactgtactggggtgcagacatggtgtgtgttagagtgcacagtgtattaggggtgcacactgtattggggtgtacactgtactggggtgcagacatggtgtgtgctggggtgcacactgtattggagtgcacactgtattgggatgctgatgtggtgtgtgctagggtgcatactgtgtattggggtgcagactgtatgctgggttgcacactgtgtatcggggtgcactgtgttgggatgctgatggtgtgctgcagtgcacactattggggtgcagatgtgtgtgctggggtgcacactgtattggggtgcacactgtattgggatgctgatgtgtgtgctggggtgcatactgtgtattggggtgcacacttcttggggtgcagactgtgtgttgggttgcacattgtgtatcggggtgcactgtgttgggatgctaacggtgtgctgcagtgcacactgtattggggcgcagatgtgtgtttggggtgcacactgtattggggtgcacactgtattggggtgctgacgtgtgttctggggtggacactgtgtattagcgtgctgacgtgggctgtgctgggatgcacacgtgcttcgctaacaggccagggcccggcaacagaagcttgcactgtaaacgctcctcccgcgcggcggacacagctccaggctggtaccgcgcgcacacggacgcctcgcaggacctgggctaataaggagaggagatcggcacggtaccgcctcttcccacggcctcccggcgcggcaccgccctcctccctccaccccgg

SEQ ID NO: 24534 - DNA, 907 bp, Artificial sequence
  DNA replication origin
gcggggaccccagcgcctgagggcgcgggccgcggtggcggtggctcccgggcgcacgccccggccggcggcgcaggccccctctcaggcggcggggctggcgccgggggccgcgcgtacgagcgcgcacacaccggcgggagagggcccagcgccgcggccgccgctgcccactcgcccactgggctgggtagaagagaggagcggagcgggcagcgggaaggggcgcgctccgctggccgccgagccgcacttgtccaacgtggaaaacccaaataccagtttcaaacacttgggaaacattcagccccgctgcgcagcgcgcatgcgccccggccccctcccccggcaacggccccgccccccgccgcattcacgcccctcaccgtcccaggccctgggggctgcgggctccaggccggccctcgcgggggcgtggccttgcctgtcactttttccagaggcgagggtcgcggaggggacagcgtcagggccgctggggtgtggacggcgggcgaggcgcaaactttactaggagtttttggcacttggaggcagagcctgttgggcggcacagcacgcccgctgggaaacgcaggggagcggcctgcttcgctgaaaacccgaccaggacctaacgggccgcgggacagaaacctccgagaccatggtacacagcaactaccgcaactcgctcctcagcccctgactcttcgtccccgccccacagagcagtataagtagggcccgaaacagaactggcaaccgcagtagccaatctacttgccaacatcactttgacagcccaatcacgatgaagaggaggcggggagaccgtgagtaatgccccccggactcttactactagaaacccaagtcctccgggaggcggaaggaaggggagggc

SEQ ID NO: 24535 - DNA, 1252 bp, Artificial sequence
  DNA replication origin
gggacacggaggaggaaggaggcgcgagaggtctcgctgcaaggctgcgcgaccaaagcgctctttgtagtgaagtgatgaggcgggtgctgcgggggagggggcggcgggtccaagccgcgtcctctaggagggggtgcagattacggcgcgagatggagggatgtgccggcgcctggggctatagggcgccgagacggggctgcaggaggagggcggctgtgggccggggttcccgcggacccggtgcctcggtcccgggcaacgccgttcctctggcccttcttcgtcgccccccactcagtcccgaatctgagtgttacataaagtaccgggtagtactccgctcggggtaggtcggccgcccccgcccagccccctccggccctcacttggagctggacaccgagtaggggccgactgcgaggggcgacgccgccggttgtagtttgcggaggacgagggcttttctctgtgtgccgtagggaagggaagggaaggggaggagcggaggcggggaaggcgcccatctgcgctgcgctcgggggggcgcgggcagatcgctggcttggagaggactgtggcaggtgagaggacctgtgcgtcgttctctgcagacctggccgccccgggtgtcagagagaggtggcgagttcgtgtccgccgggaattgttggctgttggggaaactttcctgcgaggtcagtcaaggctttgggggctctgttttgaatgtggatcaccactcggagtttactaatgtttacaaggctgcgcagtagggaaacggaagagttgggtgggggcaaaaaaaaaaattgaccgctatccccgaaagtactagacgcctctgccgggaaggcgcccctgcgcgttctatccgagacgtagcttcgcagcgaattttataggaacttcattagcatattatggaacgtcccgcctcagccccccagtagttggctgtgatgtccttcgtggaatgtccttatcattcccctgcggaacgattggtcgctgaggcggatgaaggcgggcctagcgcaataactggtatgggtctgtgtttccgctgtcttcttttttctttttcggggaggagcggggtggagggtggacgagttgatttgaacgtcttcgggtcgctcggcctccagccttggattggttcttctcgctgctggggcgggccgtgctcttccgccctgcggtgtggttggttctcctcctggcctccgccctccaaatcggc

SEQ ID NO: 24536 - DNA, 1179 bp, Artificial sequence
  DNA replication origin
ttgcatcctcatagcttagcccccatacttctttttttaaaaatagaaacagggtctgtctctctcacccaggctggagtgcagtggtgtgaccatagctcactgcagccttgaactctttttcaagcctcccaaaccactcggattaaagccttaagccactatacccggcctaccaaatcacttttttttttttctgatcttgcttctttaacgttttccttgctctgtagttgacttctatctttcatgcctgtctttgcaaacttcctaagagtctatctccctagggaaaagaaaatctcattttgggagattgcttacctttcacaattaaagaggtgccactcccacacaagggttaagagagtaggttaggggagctgctcaggaggtaagggttggattaggggagctgatcaggggtagggggtggttagggagctgctcagacgtaagggggtggttggggagctgctcaggaatagggggtggttaggggagctgttcaggaatgggggcggttaggggagctgctcaggggtaagggggtggttaggggagctgttcaggaataaggggtggttagggaagctgctcaggcataaggggtggttaggggagctgctcaggagtaaggggtgggctgtggaagcttctcatcccttaccaggatggtttgaggagctgctcaggtgtttagaagtttgtgtttttcttgtcagggacataagccagagcctagaaaattggaaagaatctatcagcctctgtgactgaattcagatggctttgagcgtttttagtcggcagtagtagtgtagagtagaatgtactggaaattgaggttctcgtcattggcgcagatgtgtgtgtgagtttgacggggacgggctcagcaggtgaggcaacagtcttgctcgcattcatgtttggggtgtgtggaggctggaggtgggagaggagctctcagtccccggtcagccccagctctcatgacttgcaggactgtggacatgacatgaggtgtctgctgccctctctggttctttctgttcaatcagagacaatgttttcacgtagatttttgtccccaaacaattcactaattgagttgtcactaaatggtttctggctgctttttttttttttttggacggtatctttctctgttgccca

SEQ ID NO: 24537 - DNA, 840 bp, Artificial sequence
  DNA replication origin
gtggagggcgtcgtgacggggacgtcgtgaggagggcacgtcgtgaggaaggcgtcgtgagggggaggtcgtgagggggacgtgacgaagggggcgcgtcgtgacgggggcgtcgtgagggggatgtcgtgaggagggcgcgtggtaacgggggcatcgtgaggggagcgcgtcgtgtggagggcgtcgtgacggggacgtcgtgaggggcgcgctgtgaggcgagtctctgccccctccccctggagctcccgctcctcagctgccccccgccgtcaggggctcttcctgtcagtgcctcatgggccctgcattcgcctcccccaggcagcgcggtcctcctgggggagtcagcctgtctcgcctgagcccgaaggccgcctccccttctgccacagccccctttggctcccggctctggagatctgccctccagtggatctgtctgaaaccgccctcccttagccgggcgggaggcagcaagcgcgcgcgctgcgggcaggagcggtttctgcaggagggaccctgcccgagctaaacaccgagaagacggcaggaggcagaaggcgagatgggggaaaggaagataatctggaaagttccactgcaggaaagacagtcccggtggccagctggcctctcagaggccccttagtaagccgaggacccgaacccttacggaaatgtaattgagacaagcccgaagcagagcggaacgaaacagaacagaggagacgcgggcacaggagagcgcagagggagctctgggcgcttaaggaatggagactgcagcgggccagcgggggctaagtcccggggtcgcagatgcctgtgtgcggg

SEQ ID NO: 24538 - DNA, 2273 bp, Artificial sequence
  DNA replication origin
tactatattacccatcatggaatggaatgcatatacaccactgtaatagcaggttctctagaaggaaacacaaacaaaaaaccagaaccaacaggatatgtgtatatgtatatatagagagattacttttaaggaattggctcaggtgactatggaggctggtaaatttgaaatctgcagggtgggccagcaggctggagaccccaggaagaccgtgtctgcagcccctgcttgctcagggaggtcagtctctgttccattcaggtcttcagctgacccggggaggcccacctactagcaagggccatctgctttactcaaagtgcacgggtttaaatgttcatctcatccaaaaacatcctcacagggacatccagaatgaggtttgacttcacgtctgggcccagccacatggacacataaaattaagcatcgcaaccatgtagacgctacagctgtgaccgctgttggtggatttagtgtgcgccagcgtcatctaagcttcatgaggacggggatttttctttttcttcactgctatgtttccagtgcctagcacttaataaataaaataaaataaaataataaaataaaaacactgttgaccacatgactgtgttgctgttgtttgggattagtgtgtgcggctgtgcatgcattcatttgggaattggtccctctgctggacagacactaaggtggcaccagggtccccacctcctagtgtgttcatatcttgctgaaatcctctctccttgatgtggggggatctgtgacttgcttctgatccacagaatatggtagagggatagcacgtctctcccatgatccaggtacattccctggcctccacccacagctcacttgctctagagcctccctgctggctgatgacgtaagtggccgcactggaaacttccgcgtggagagaaactgagggcagccacggacctggacctggggccctcagagagaaagtgaactcggccaacagcctgtgggaacttccgaagaggtggattcttttccaggccgtcctcggatcctccgcgtaagaatacagcgcggccaacacttgatcccgcctagtgagggcccgggcagcgcccccagcacgcgtgtcccggaaccctgagataacgcacgtgtgtggctccaagctgctcagctccgaacacagctgctgaaaagggacgcagcccccatgcagccgtgcgtgtcggagtgggaagacggccggctgggggaagagcctgaggaagaagatccgtgtctgaggcctgggtctgccagtccgcgtcgccttgggcagttccccggcggatttctctgagcctgtttcctcacctgcaaaacagcccatccctgaagcctttctctgttctgcgactcttttattccagaggcgggaaagtttggaaggaaagcaaaggtcaaaaagaaaccctggagggttgaaggtcaagctgccaagaggggcggtagtgtgagggggacgtcgtgagggggacgtcgtgagaggggtgtcctgagggggacgtcgtgaggggggagcgtggtgacggggacgtcgtgaggggggcgtcgtgagaaggacgttgtcagtggaggcgtggtgagggggggtcaggagagggacgtcgtgaggggggcgcattgtgagggggccgcgtcatgagggggatgtgtcgtgagggaggcgcgacgtgaggagggcacgtagtgaggaaggcgtcgtgagggggactttgtgagggggagcatcgtgagggggacttcctgaaggaggtgcatcgtgacgggggcgtcgtgacggggatgtcgtgaggagggcgcgtggtaacgggggcatcgtgaggggagcgcgtcgtgtggagggcgtcgtgacggggacgtcgtgaggagggcacgtcgtgaggaaggcgtcgtgagggggaggtcgtgagggggacgtgacgaagggggcgcgtcgtgacgggggcgtcgtgagggggatgtcgtgaggagggcgcgtggtaacgggggcatcgtgaggggagcgcgtcgtgtggagggcgtcgtgacggggacgtcgtgaggggcgcgctgtgaggcgagtctctgccccctccccctggagctcccgctcctcagctgccccccgccgtcaggggctcttcctgtcagtgcctcatgggccctgcattcgcctcccccaggcagcgcggtcctcctgggggagtcagcctgtctcgcctgagcccgaaggccgcctccccttctgccacagcccc

SEQ ID NO: 24539 - DNA, 1039 bp, Artificial sequence
  DNA replication origin
gcattcctcagcccttgggtggtcgttgggactgggtgccgtggagcagggggtagtgctcgtcggggaggctcgggctgcacaggagcccatggagtgggtgggaggctcaggcatggcgggctgcaggtcccaagccctgcctcgcgggaaggcagctaaggcctggcgagaaatcgagcacagcgccggtgggctggcactgctgggggacccagtacaccctccgcagccactggcccaggtgctaagtccctcattgccccgggccagcagggctgactggctgctccgagtgcggggcccgccaagcccacgcccacccggaactccagctggcccgcaagcgccgcacgcagccccggttcccgctcgcgcctctccctccacacctccctgcaagctgagggagtgggctcctgccttggccagcccagaaaggggctcccacagtgcagtgggggggctgaagggctcctcaaatgccaccaaagtgggagcccaggcaggggaggtgccaagagcaagcgagggctccgaggactgccagcatgctgtcacctctcagttccaccaaggcagaaggcaaaccttattccagatttgcagagggtctagcctgaaccagtccactatggatgggaagtgggccccagagagcacacggggcatggggctgggccttcccagatcagggaccctgaacccgtaagtcattccctgcaggagccaccaccctcagaggacactcagctccccacgaagcccttgctgtccagttccgctgctgcttgtgttccctggacgccacgtgcccatttcacaactaaacagttaaatcctcgagggactcaccccttatttctaagggttttcttaggtgggcaggatggacaggctggaagcagagtcctcggtggaaacattaactgcagagataaccacttcagagcgaggcagtccttaagttccctgtgtccacagagtctgcttgacaacgccatcagacacctgaaagtcatccccacggtaacagtca

SEQ ID NO: 24540 - DNA, 981 bp, Artificial sequence
  DNA replication origin
gtcgaggtgtgggcatgtgtgtgaatgtgacttgtgtatctggatgtgtgtgaatgcaggtgtgtgaatgtgtcacttgtacatgtgtggatgaatgtgcgtgtgtgaatgttatgtgtgtgtgacttgtgtgggtgtggatgtgtgtgaatgtatgcatgtgtgtgaatgtcgtgtgacgtgtgtgtgtgaatatatgtgtgacttgtgtgggtgtgaatatatgcatgtgtgtgaatgtcttgtgtgtgatgtgcgatgtggagaatggatggaagagcaggcgcttggcgaggggggagggaggaggatcagaggccatgggagagggcggagggagcgtaggagaggccatgggggaggggaggggcggagaggccactggggaggagaggccggggtcgggggcgcctgcccaccgtgaagaggcccctgagggcagctcggcctcctgttgggggccagggtcggctctggcgggaaggcccaggcagtgcagaatcatggagctcaggggccctgctggggtccgctcaggagcctagggtccttagagaggtctcaggaaatgggcagggggagatggggctggaaaggggacatgtggacagaatggggtcggaatcggagtctcccgggcaggaatcgctgggaaggtggacatctcaagccctggagaagcttccagtccgcggaaaggggagaggactggagctcctgggtgtctggggcaggacgtggatggggtcacatttttctctgttgggaatagcacgtgcgaggcgtgggctcgggctttgaaggtttgcagggtggggaagggaggccggtgaagctctgaaaccatccccgaggggactctgagtgaccactttgtggtcaatccgcagggagagctgaggacgaggcggaggccccacaggtgagggccaggtgaaaagccctacagctgctgtgttgtcgagccccgtggccaggcgg

SEQ ID NO: 24541 - DNA, 1496 bp, Artificial sequence
  DNA replication origin
gttctgcaggccacagtgagagaactgctggaatgttttgaatgatgagatctaagcaactagtgataaatactggaaaatgtagactgggtattcattgaattaccctttttgacttttccataggttggattttcggggttttattaaggagaagaaaacgggagaataatttggagacagaacatgggaaacattgaagagtttcccggaaagggggagccaagaaacaggcagcgggtggaagggaggagccctcgggagggcgggaaccgggggcggggcgccggcgcgggtgcagggacgaaccatcaggagggcgggaaccgggagagaggcgcaggggcggggagaggggggtgagccgggcggttctggcgcggctctgcttggggaaccgcagccaaggttggggcgaggccgtggttgggatgggccggggcgggtgaggggtcccggggcggtgggagggtagcgggggctgcggcagggcacggctggagctgggggctggaggtggacaccaccccaagagtctgcactgagcaacggtaacagtgagcccgggcacagctgcagccagggagaccctgagtgtgcgagtgtgcgtgtgaggatgtgtatcagtgtttgcaaatgcatgtgagtgagcgagcatgaggatgtgtgtccatgtatggatgtgagtgtgcaaatgtgtgcgaggactgggagtgtgtgagagcgtgtcagtgtgggaatgtagggggaatgtggagggaagtgtgtcgttggcaatgtgtgagtgtgcaaatgtgtgagaatgtgaagggaagcgttgagtattggatgtgagtggtaatctggtgtgtgtgaatgtgtgaatgtttatgtgtgaatgtacgtgatgtgtgtggatgtgtatgatgtgtgcgcacgtatgaatgttgatttgtgtgacgtgtgtgcagatgtgtatgaatgtgtgatgcatgtggatgtgtgtaaatgtggctgctgtgcatgtgtgaatgctatatgtgtgtgacgtttgtgactgtgtgtgtgcaggtgtgactgttttatatgtgtggctgatgtgcatgggtggtagtgtatgtgaaacatgttatatgtgtgcatgtgtgaacgtgtgtggctattgtgcacgtgtggatgtgtgtgaatgttgcatgtgggtgttgtgtcgaggtgtgggcatgtgtgtgaatgtgacttgtgtatctggatgtgtgtgaatgcaggtgtgtgaatgtgtcacttgtacatgtgtggatgaatgtgcgtgtgtgaatgttatgtgtgtgtgacttgtgtgggtgtggatgtgtgtgaatgtatgcatgtgtgtgaatgtcgtgtgacgtgtgtgtgtgaatatatgtgtgacttgtgtgggtgtgaatatatgcatgtgtgtgaatgtcttgtgtgtgatgtgcgatgtggagaatggatggaagagcaggcgcttggcgaggggggagggaggagga

SEQ ID NO: 24542 - DNA, 1025 bp, Artificial sequence
  DNA replication origin
gacgtggggcgtgccgggatcgcggggcggaagcgggatcgacggcgcctgtgccccgaggggcctagggcgcctgtgcggcagcgctcgcggcccggagtcgcggcggggcagccggggggcgcggggcggaagcgaggtcggtggcgcctgcgtccggaggggcctagggcgcatgtgcggcggcgcgcgtagcaagtttctaacaaggcgggctccaagggtcccggcgcctgttggccggatcctgtgcgagcgcgcgcgcgcgcggatggtgcggggccctccaggccgggccggaggcgcgagcgatttcgcagagccgggtattaggccgcgaagtcgcccaggcggcttccggggagccgagctggggtcagaggcgcgcggggaatgcccgggcgcggtcgaccttctggttccgcacagcctcgccagtagccgagggccgcgctgcggacgagctcagccgaggagcaagcgccccggcgggactggaaggccccggcagctgtgtgggatggaggccggctctccagcttctgggtttgctttaaggcttgtagctggccccgcttcagcaaaattagtgacggctgtgtttatcttggatctaaattactgcagaagtggttaaattaagcagaattctcttcccgtggaggctttacgttcccctcttttttcttaaactgaaaattctgggggaacacagtgctgctttaaggttttaaaaggttggatagctaccgtttcctcatctgtgaagtcgttggggtacttgctctcagaaatcttaaataagatttcaccgtgcatttcagaagtgactggttttaattaatatttcttaattcactgaaattcagggatgtgtatagtgtttttctcgtaagtgatgagatggggttaaatggttttgcagaaatatgtgagaggtaatgtgaaataagttactttaagaaggcctggccctggtaatgtcgttaccagctgatgaagttgcggtttaccttgctgcccct

SEQ ID NO: 24543 - DNA, 1578 bp, Artificial sequence
  DNA replication origin
gcccagtgcacgggcgtccagccatagaaggagtcctcagaggccaggtgggcgtggggtgtctgctgcagcagcgagcagagcgtggccaggtccccgtcgcggcaggcgcggtgcagcgggaaacggagcgagagcagctcctcgctggagaagcccgcctctacgcccgcgcccgctcccgccgccgacatggtccgtcaccggagagcgcggggctcgctggcctagaggacgcgtcggggaggactcgagaagccgccgccgcagcacaaaggaacgagactagcgccgcggtcgcgtcccacaggctgccgagcggagcgcgcacagagggggcggggcggggcctggagcggccgggctgggggcggggcctggcccagaggacgccttgtgcagccgggcaggggtcggggcctggagccgcggacctctggagccgccgggcagggggcggggcttgagccggaggccgcctggagcagccgggcggagggcggggcttggagctgcggacgcctggagcggccggtaggtggcggggtctagcctagaggatgcctggagcagccgggtagggagcggagcctggaccagaggacgccagcagcagccgattaggaggcggggcatggggctgtcgacgtctggagcagccgggcattgggcttgggctagaggacgcctggggcggtgggcgcctggagtagccaggcagagggcggggcctggcttgggtccacgcctggggcggccgggggcggggcctggctggaattgacgcgtggagctccggtggagggggcggggcctggctgggccgctgcctacagcggcttccggggcttggaggtcacggggctcggaggtcacggggctcggaggtcacggggctggctgtgtggggggctcaggggcgtagagtggccaagcagcggtctgagcgggtcccggggcctccggcgcggtgggtctcggctgcgccccgggtgcggaccatgatgtttccagcctgggagccggtccgggcggggaatcccggctgccgggggcgcgggttgaggctctgcgggcccgcgcccagagcgggtgggagtcacgggtctcccggaggcccagtagcgcgcggtgaagttgtccagtaaaaatttatggagcgcctacggggagcagggattctcgttaaaatctgggaatcagcaagccctagttccttacagagcaggacagattcctcggttttgtccgagggacgccttcttcggaaccgagtgcggtgggctaggactatacgtttgcaagtttaagagataagcgagaagaccagacagagcaaacaataaaaggctttttgttgagaactgtataaatgtaagggagtaccaaatcccctattttgaatgacagtatcacggactttattacatatgtaattttattctgattatgaaagcatcagtaatttcactattgaggaataaccacaatgtttatgaatatttcctttgcttctaaatatgcggtctttttaaatcatgtattttatttcatttgtatatatagtttttcgctgtg

SEQ ID NO: 24544 - DNA, 1215 bp, Artificial sequence
  DNA replication origin
atttaagttgagatcaggacttctgctcatcatcatggggtactacgctggagccaggttgcaagtgcaaaccacaagacactggaagaaaatgacctgtttagcaagattgacagtctgcagagatgactcctccaggccccttaggaaggaattttgaataaagagaaaaagttcaggtctcagactcctaaggcagcatgtggctttagtcccagggccaagagcaagggtggcccttgctgatgcctccgaggccctgtgtgccctctgaggctggttgagggcagcttgagaagagtctgtgctttatctggatgatgaggaagcctggcagcgtcctcttttggaagatccccacagaggccctgcagaggtatagtcaggccagcatgctggagagccaggagaaaagccagcaggcactgagctaaggctgtgtaataggctggacaggaggggagagatttgggagaaatttaagaagcaggctgggcgcggtggctcatgcctgtaatcccagcactttgggaggcccaggaaggcggatcacaaagtcaagagatcgagaccatcctggtcaacatggtgaaaccctgtctctactaaaaatacaaaaattagctgggcatggtggtgcgcgcctgtagtcccagttacttgggaggctgagggaggaaaatcgcttgaatctgggaggcggaggttgtagtagccgagattgcaccactgcactccagcctggtgacagaatgagactccgtcaaaaaagagagagagaaagagagagaaagaaagagagagagggagggagggaggaaggaaggaagaaaggaaggaaggaaggaggaaaggaagaaagaaatttaagaagcaaaattcgcaggacttggtgatctagtgggtgtaaacattgcaaggaaaaagccatttaagatgaattccaagtgaccggctgaaatgtgcaacggatattcactttctaaatagagtgcgcaggagggggtgtttgggtggagaaaatggggagatgattgggtgcctgtgagctgcagtgtggagcactcacgtgccatagagatgccgggcagggtcgggagactgggctcagcagctcgggggtgccgaggtggtagcatccaggagaccacctgggagcgtgtgtccaagggaagtggactccttccccccaccacactcttctctctgctgcag

SEQ ID NO: 24545 - DNA, 1088 bp, Artificial sequence
  DNA replication origin
gaatgagactccgtcaaaaaagagagagagaaagagagagaaagaaagagagagagggagggagggaggaaggaaggaagaaaggaaggaaggaaggaggaaaggaagaaagaaatttaagaagcaaaattcgcaggacttggtgatctagtgggtgtaaacattgcaaggaaaaagccatttaagatgaattccaagtgaccggctgaaatgtgcaacggatattcactttctaaatagagtgcgcaggagggggtgtttgggtggagaaaatggggagatgattgggtgcctgtgagctgcagtgtggagcactcacgtgccatagagatgccgggcagggtcgggagactgggctcagcagctcgggggtgccgaggtggtagcatccaggagaccacctgggagcgtgtgtccaagggaagtggactccttccccccaccacactcttctctctgctgcagggacagcccccagaacagttcttctgtggaaggttctgaaagacccaagacaggtcagttctccatggaacgtggaaaaggctactaaaaagtacaggcgcgtattacttagaatctggtttgggggacacgaagcagaaggaaaagcacgacattgtaaaacagatatgactgttgcgcccattgctaaattatacagtgtgccacaagggtcaaaaggatggtccgtgaacacgcaggctcagggtcggactccgatggggatgcatttccagatacacgccaggtcagtgctgggcattcctgccactcgggtcctctccctaacgcctctactggtccaactgccttgtaatcaccgctctccactggttctttgacaaagggttttcaaccccgatctgcagggtttaaaagtgtttttaacccctaccttgttgctgacctaggaaaaggttgctgtcccattctgtgctagtgatgctagctgagcactttttttacagtgaaattctggccagagcccagtgggacccgtgacaggctgtttccgagtcctcccaggctctgctggaggctgcacacctacgttcggtcttgtgcctttgtcccacatcgccacg

SEQ ID NO: 24546 - DNA, 2273 bp, Artificial sequence
  DNA replication origin
tggtttctaaccacatgcaggaccaagctggcacggcctgtcacagcacccacatccctactgccttctggaagctgctccttttccttcagggctaagcagggacccagaccccttccttcactgtcctggaggctccagcacctggtcacatttctgctctcagccttgaaatgtggagggctcatctcatcttctcagaaagtaaaacatgtggcagcctcagtgagcccatacagttttcttcagggcagcccacatggcacctggcatggtctcctctccctcaaagcaggaaagagaccttctcatgggtaagagaaggcccatggtggaaacacaaaggcagccatctggctgagaaggaaaaaacactgattcttccagatgagtctgcagtggcggaaaacaaagctggggtggcttccccactgcagtgcttagttctcggggggatctgctgctcattgatttctaacattgccttccagttacatcatggaaaacaggaagaaagaggaaaaaataggaaaggaagaacaaaatgcactgaagcaagagcaggaagaaagggtagaatgaagcatttaaacagagaggaagagaaaaatagcaatcacagaaagaaccagggagtttataaaacaggctgcatgaaaatcatttatcaaaacactgtccaggaatttttgttaaaaataaacataaaacaattagctagtcacaaaaagacaagtactgtggaactccactcattgttagtcagtggcgaggcagacatgagcagggcaggagagggcccaccccaccaggaacctctggagaccatcaggtgatactcaggcagtggttaaactggttctctaaaatagtaattggttgcagctgtgccagggaaaggcgggctcccaatagctggaaaacacctgaaactgatcagcagctttctataagatctcaggagtggggcgaggtggcttaggcctgtgcactaagaggtaaaatgtagtttaactggtgtgtgaccttcctccaggaacacgagacaggtaagggcaaaatacttcaggtgagcatgtgcacaacttcagtaatacagcgcgcacgcggccccgcccaagcgctggccggtcactgcgcatgcggacagcccaccccaaggaaaggtcaaggaaggggaaatggaaaccctgaaccatgcccatgtataaaacccaaagtggggggttgtaccctgcacttggatctctcaagtcgcctacttcaccctctcccaagtgtactttacttcccttaattcctgctctaaagctttttaataaactctcagtcctgctctaaaactcgccttggcctctcactctgcactatgcacctcggccgaattctttcctctgaggaggcaagaatcgagttgctgcagaccctacggattccctgctgctaacagtattagtccctggactaatcaaattcagacacacaaagtggaatggtggatgccaggggctggggagggcaatggggagtgagtgcttatttaagggggacagagttcggtcttgcaagatgaagatgttctattgattgtgaaaaatgtgaatgcacctaaatgcctaaaaatggttaaaatggtaatcgttatgtgtattttgccacaatttaaaaacataaaaaataagaatgtctgagtaaataaacgtataacgcgttctttaagtccactgacagcggcgtggccttggcctctgtgctcatctttccaggacagagccccgtttggtgtttctggttctgtgctgcgtagagaacttggcaccctggtcctatgcacagaagaggagctttccgaaggctccgggagagaacgctggggagtcaaggccagtccgagcacagcagctggggccagattggagacagggacttttttattcgagagaaagcgaacgtagtatctaagcggaagagcccttgcaggcgcgggaagggaggccgcgcttccccgggcctgcggggtcagaggaggagcttctgcgggagcttaaaggggccccacagccccctgcaccccttccacgagctctggggaaggcgttcctcgtgggagacctgtctcccacgttgttgccggttaagaagtcagagctaggggacaggccgggtgcggtggctcacgcctgtaatcccagcactttgggaggccgaggcgggcggatcacgaggtcaggagatcaagactatcttggctaacactgtgaaatcccgtctct

SEQ ID NO: 24547 - DNA, 1316 bp, Artificial sequence
  DNA replication origin
tgcccatgctggctggggtcccctgggaagcggcatggttgtctgccaggtaggattgcacctgagggaccggttgttcaatagaacccactggaggccacaggtgaagggggctctgagcttccatggggtgacccgcaggaggccactgcctacagggctggcaggagggaaacgtgaccatcagaactgagaacgggggcaggccctgtggacctggagcccaggctcgacagggagggactgccaggctgctggagcccagggggtgctggccagtccacggggacagcctgggagaggaggctgccggttgctggtggggcctccggaggctgcggagggctggtgtaggggagtgggggaggaaactgaaaaggggacagacagctctgccagagtagggtggcagggcagcaagcctggacgaggagcgcagcttcagcccctctgggtgccactcttggcagcacttacaggggtggggtgggattggctagggtgcaggggaacagagctgcgaggctccagcgcagtgtgatgcggcaaagcacaggagggcgtgttgggagctgagagagaacagcaccagaacaggtatgacctgccttttaggacattttgtaattcagatcagtgttcgtgtttgaagagagtcaccgtcctgccatgggaaacacttgcatcgtcttccaaccttgacaggattacgcgcgctcctggaccgcatccaaatagaactctcccttatgcccagggctcgatgtggcgaccggctgtgggggtcacggacccctgcttttctggggtgtggctgtagttgtagtataaacggtcgtgcttattttctatacactgacctcacgctcttcacgttcctgctgacctcacaatggtctgtgaaggttctaccctgtttaccacgccctttcccagtgatacgaatatttccaggctcctacatgaagtaattacactgctatgaacacatgtatgtatgctgccttttcttcatttaatgtgtttccttatcctaatactttacttctaagccacctttagccttacatttgaattagctggcaccccacactcacattttattagaacctccagtgctcgcatattgccatgagcctagtctctttttctttctgtcctttctgtgtttcgttcttaacccctttgaccgatgacttctttattgggctggttgttccactccttattttcttaactcctctgtgaacccttcgtttcgttttactgccttcatctctaaccagtttcctgagctaagggaaccccctccacca

SEQ ID NO: 24548 - DNA, 926 bp, Artificial sequence
  DNA replication origin
tgcgcagcctccgctccaggccgtgcgcggggcggcggcggcggctgggagcgggcggggaagggaaaggggaaggggagcggggagcggatggggagggagccgggggtgggggcgggcgcgcacctgcgcttacctgccccgggcccgccgtgcgccccgcgcccctggccggggcactcggaagcctttgtttatgttttgaattcgtgagcgttgaaatgatgaagtacttcccagaatgctctttttatttttgccggttttatttcaaggtggcggggacaggctgaaaacgagacgtttgtttcgctttgctaccttgcaagccggtcatgacggaacagaaatgatggttccatctgaagccatatgggtctgaatcgggaggaaccgactctccggagcgcggcgccgacctcaccggcagggcaggggcctgcgcgactctgctctagacggacggtgacgcttcagaccctgccgggggaaggtcaaggaaacggcgtggcctgaagtggggctgtgcagagggccgggccgggccgggccgggcgcctggctgcgtctcggggacgccgaagatctgggctgtgaaagcagcaggccgaacctggagagcccagacggcaagtgtcgcgtcatgcgcgagcttcctcgaacaactgatgacacgcacacattgacatgcgaggaagaaatggagcctcttcttaaaaggacacgagtctccactcactccatccactgtccctgggcgctcccccagtttgctcgctatgacccgcgggcagtttaacaagcaaagcacttagtctatgccaggcacatacattaatccattcaatgacaaaggctagaaagcatataaagcttccaaaaataatcagaggcttaagtcgtctccccctgccttctgccggtgg

SEQ ID NO: 24549 - DNA, 881 bp, Artificial sequence
  DNA replication origin
gagtcgcccaaaaaaaccatctcggacccggagggctttctgcaggcgtcgctgaaggatggggtggtcctctgcaggctgctggagcgcctgctccccgggaccatcgagaaagtaagtcccggcccgcgcccccgcccgcgccccccggtccggcccgctgcggcccgggatgcgcgcggagcacctgaggccggccgcgctcgggaaacccgtgcgccctcctttgtgcgcggagcggcggcgcggccggcgccaggaccgtggcgggagctcggggggcgccattgtgtgcggggcagggggagggggccggggagcggggtcggggggaggggcggcgcgggcggcgggggtccccgggaaggagagtgcaccgcagcgaggagacggggcttctgcgccgcccgaacgctaagttgcccctccgcgtggggggccggccccgctccctggcagcagccgcatcggaaaccgcgttccgacgcggtgcggctcactccgctggctttgtgtggacagttcttgccggtggcgttgcgtgagtttcgcctcccaggttaattgaccggttgctctgtatttttaaagaggcacgcatctgtagctgagggctgcgctgtgaaacgatctactactttcccctcgagaaaattccccacctatccgagccgagaggacggcagacacagggtctaagtcctggcactcttcaaggcttgttaaaattctagatttcgttctcaggtccctccctcgttctgaacagaacctttagtcctgcaggcactgcttctcccttccggctggtggttcccaggctggagcgtgtgaaccctgacccgaatctctggaagtgattaaagtttgttttcatcgcc

SEQ ID NO: 24550 - DNA, 1307 bp, Artificial sequence
  DNA replication origin
agcactgggccagaggaggtggcagctcgccggcaaagcagggtgggctgcgtccgcgggggcgaacacccgacgctatccgaagacgtcccgcgcgggccggcgggggcgcggtctgaggacgtcacttccggcgccggggctcacttcctggtgcgggaaggggcagagattggtgcagccccggaggaagaaaaaagggtgaggagaagcagcggctgagcgggttggcatctggggcagcgggctcgctccaggccgtcgggggccgctcgccagcgtcgcccgctgtgttgggagcgcgggccgtgggcgtcgctcggccttgtccgcggcgtccccgctgccggccacggcgctcagcgcttgtgctctgtattgcaggtctaccccgagccccggagcgagagcgagtgcctgagcaacatccgcgagttcctgcgcggctgcggggcttccctgcggctggaggtgagcgcgggcggccacgggccgagggaggggccgggaagacggggttgggcccggggtgggtgcttcgctccagccggacctcctgcctcctccgcgcccggatccgaccctccccggctgctcgagagtccgggatgtgtggaacggggcgttgcgggtttgggtaatggccgggaggtggcggcgcgcgggccacccccagggcagggtggagtctgcgtgtggaaccccagacattgctctcgttccagtgaggaagagtggttctggtcgctggtggtgcaggtgacacacattttcaacaaccgtttatcaggggtgtgaaccgatttcttggcacctgcctcagcatgaactctgcttttagagattgtcatctaagggctggcatctaggtctgggtcaggccttagaatcctcagcaggtgatcaggcaaagtcgtgcagaaataaaatgggccagccctccgcctgcttctcccagccgcactcctttctctgctttttcttcctgagaccagaaattcggtggtttttccgtaccctcaacacttaatgtccagagaattcacattaaccagtatgtgacgtttataaaacatgctgtcggggaacatactgggcggggtctcgattccctgttgtaaaatgttgtgtcactttactaaacattgtcttttcagtctttcagtggcagtttctgggaatttaactctttcattttattttgctattgcgattcttcctacacttggggtagcactttaaatacagaaatctagctttgcttttcttgggatctgcttaagtggttgcagtcagtcctgtactta

SEQ ID NO: 24551 - DNA, 755 bp, Artificial sequence
  DNA replication origin
gagtcgctaacgtgaaggccgggcccagaagaggattcgggctaaggcgctgagtcgctaacgtgaaggccgggcccagaagaggattcgggctaaggcgctgagtcgctaacgtgaaggccgggcccagaagaggattcgggctaaggcgctgagtcgctaacgtgaaggccgggcccagaagaggattcgggctaaggcgctgagtcgctaacgtgaaggccgggcccagaagaggattcgggctaaggcgctgagtcgctaacgtgaaggccgggcccagaagaggattcgggctaaggcgctgagtcgctaacgtgaaggccgggcccagaagaggattcgggctaaggcgctgagtcgctaacgtgaaggccgggcccagaagaggattcgggctaaggcgctgagtcgctaacgtgaaggccgggcccagaagaggattcgggctaaggcgctgagtcgctaacgtgaaggccgggctcagaagaggattcgggctaaggcgctgagttccgtttggggttgctgtgcatttcagttggagatgtcacaggggagggtggaagcggatactgggagctgcagacttcccacccggcctactgcatgtgtgggaagaggtgtggcccaggtaaaggttaggtttggattgacagctctcctggtcacctgcctcatgttgcttgcccatgtctgtcccagtgtcctcatctataaagcaggggtgctggtgtcacccacccagagtcttg

SEQ ID NO: 24552 - DNA, 1527 bp, Artificial sequence
  DNA replication origin
gttgtggaggagggtggagggccgggctaggaatggaaatgcgtgagagacttttcagggtctactggatttttaaaatgcatggcgacattgtggaggtgcgtgcaggaaaataacggtgggtgtggagggaaaatgggacaccggaggaggcgcgggaggactgccgggattcgacggctgggcggtcagatgcgatggggactgaacttttaaaatgagaaagaatgtatgaacgtttgtgtagtgatattgaagagaacaaatcactttatgaataaaaataatgcttcgttcagtggcatatttcctgcccagtctgtttgctgaaattaaacatccgctgtcacctggagcaagtcttcagaaacctttgttctcctggctctgtgagcagatgcctctgtgctgctggggcttctcctcccgtgtctggggacggtggggagggcgcctggcactgtggagacagcaggaccctgaagccagaggtctctgtggatcccggctccgctgcgtccaagctggtgggatcttgggtttcgtctggatcttcccagatggggtggaagagcgttcgggcatcacgagctgggtgctggctggtgtctgctggggtggaggagactgcgggcagtgtgagcctgtctggtggggtggagactgcgggcaacgcgagcctggcgctggtgggtgtctggtggggtggaagagactgcgggcagtgtgagcctgtctggtggggtggagactgcgggcaacgcgagcctggggctggtgggtgtctggtggggtggaggagaccgcgggcagcgtgaggctgtctggtggggtggaggagacggtgggcagcgtgagcctggcgctggtgggtgtctggtggggtggaagagactgcgggcagtgcgagcctgtctggtggggtggaggagaccacgggcagcgcgaggctgtctggtggggtggagactgcgggcaacgcgagcctggtgctggcgggtgtctggtcgggtggaagagactgcgggcagtgcgagcctgtctggtggggtggaggagaccacgggcagtgcgagcctgtctggtggggtggagactgcgggcaacgtgagcctggcgctggcgggtgtctggtggggtggaggagactgcgggcagtgcgatcctggcgctggcgggtgtttgctgtgcagctgctgtcatcacctgcgtcagaaagtggaggcagtggcggactctgtgggtagtgtttgtgaagttctggcgctgtgtccaccctggaattgcactccaggaaaaaggccgtggtgcctggatgccctgggagcaaagccctcctagtcacccactgtagacacatgggctgctgcatagaacgtgggggaccatctggccagccacagcccgagaccagtcacccaccccaggcccctctgagcctggctgtgcagtacctgcctgctgctatggggcctcttccggcctcccccgacctctccctacatggtaggtcagctcaaatcacac

SEQ ID NO: 24553 - DNA, 1687 bp, Artificial sequence
  DNA replication origin
tgagcagtcccagggatgtctgcttaatgactgagagcactggggtccttaggaagaaagtctgtgagggtctctgactgtctgcagacactttctccactttctcctcatctgttctgctgtgtctccttactggagtatgattacagatgtaaaatccctgtaaagtgaccagcagagcagcactgatgcagatgaaggtgtgtgtggaggcagctggtcccaggagtctggctgtgctctgcacctctggacacagtaggcgtcaactcaatgcacatttattagttgaaggaataagggagggcactggtgagtgagggagctcccagggcctcctgcccctttcagatggtgagatagtcattctgaagtcaaggatgtgtgttctgatgcagatgcaaactctacagtagaagctggggcagggagagctctgcagagatggtggaaggagtggctgttccagggctgtggtgactgcggggtggggtctgcagagatggtggagggagtggctgttccagggctgtggtgactgggggtggggtctgcagagatggtggagggagtggctgttccagggctgtggtgactcaggggtggggtctgcagagatggtggagggagtggctgttccagggctgtgctgactggggggtggggtctatagggatggtggggggctgttccaggcctgtggtgactgaggacttggctctatagagatggtgggggctattccagggctgtggtgactgggggtggggtggggttgcagagacggtgggggcctgttccagggctgtggtgatgggggtgtgggctctatggggatggtggggctgttccagggctgtggtgattcggggctgggctctgctctgtagagatggtagagggggctgttccagggccatggtggcttgggggtggggtctatagagatgatggggggttgttttagggctgtggtgatggggggatgggcactagagagatggtggagggagtggctgttccagggctgtggtgacttgggggtggggtctgtagagatggtagagggttgttccagggctgtgctgatggagtggggggtgtggtctgtagagatggttggggggctgtttcagggctgcagtgactgaggacttggctctatagagatgttggggcctgttccagggctgtggtggttgtgggggtggggtctgcagagatgatggaggatgttccaggggtgtggcaatggggggatggggttgtggagatgatggaagatattccagggctgtggtgatgggtgggggtcgggttgtggagatggtggggcctgttccagggctgtggtgatggaggtggggtggggttgtggagatgctgaggggctgtttcagggctgtgatggagaaaggtggggtctgtggagatggtggggcctgtttcagggttgtgatggcggggggtggggtctgtggagatgatggggttgtttcaggctgtgatgatagagacagggtggggttatggagatggtgggggctgtttcagggctgtggtggttgtgggagccctgcagagatgatggaggatgttccagggctgtgatgggagacagagtttgggctcagggccacgcacccctggggatgaatccagctctttccttgcctactgggttacc

SEQ ID NO: 24554 - DNA, 961 bp, Artificial sequence
  DNA replication origin
gtttaatcacttactaagaaggtaagttaggatgtgagttccttaacttttccaaggttcattttcctcatctttaagatggcaatgataatatgcacatggatatccatcacattcatgagtgcctgtgttccagggaggaattgtgccagcctttgttcttgaagggcttaggtaagtggaaagaagtggggaagaacacaaattaaaaacagcatctacagggaaaacccatggcaggtcaggtacacaggctgtggatgaccatctgtagggtggggaaaggctttgttaagggggtattggtttcatggaggggactcaggatgatcatgagagctggcaggttttaaacatttatgtactcggtgttatgctccatgttttacatgcataatttcacttagtgcccacaaaactcctctgaggtagattcttgttatcctctcagatttggggtgtgggggtgttttgggaatccttctgaaggaagtcacaactaagctaagacctgaaggctgaaagggcttggtggttgactctgttctatgagacagtatctcataacaggttgtgctaagacctagatggagtgaggaacttgaagcatgacctgctcgagaatgggatgagttccttgtgtggagattggagggaaaagggtggaaggagagcaggacatgagataaggacagtaagtaagcaagtatcagaccatgaaggaccttgtctattgcttgaaaagtaagccattgcaggaaaacctacatgccttcccactagatggagcacaatggctatggtgtggctactagattggtggatgaatggatgggtgtgtgagtgggcagaaggatgagtgtgtggatggatggataaatggtggatgtgtgggtggatggatgggcagatgaatgggtggatagatgggtggtatgaggatgtgtggatggatggatag

SEQ ID NO: 24555 - DNA, 1623 bp, Artificial sequence
  DNA replication origin
cagtaggaactaggaaggacacaggtggaaatgccagggccgcagccagcctgaggctgcagatgcagggaacttttggaggcatgaccacctgggattcatgttatttacctgatactgaaagttatcaaccaactgtaaaagttatttatattttatagtccagatttacacatcctgtgcacatatgtggtgcaaaaaaacaagattttcaaatttcacgggtaagaaagcttaggttcatataagaagtgattgacaaaaacgttatagggaacaagagaaagggaagagcatgttttctgttttgaacttgtgttccttgtgaaataactcatgaaagctttagagggaaaggaggagtggaggaggggtgtgtgtgagagagagaggggaggaggagggagaaagagaaagagaaggggagagagagaaggagagggggagggggaagagggagagagagcgggagaggggaagagagaaggggagagagagaaaggaaaagagcggcagggagtgggggagaggggaagagaagaagggagaggagaaggagacgaagagagagaagggagggggaaggagaagagaggaagagcaggagagagcggggagaggggaagagagaaggagggagagagaaggaaagggggaaggagagagacaggaagaaggagaggaggagagggagaaggagaggaaaagagggagagagagaagaggggaagagggaaagaagaggggaagaaggagaggagtggagaggaggagacagagaaagaaggaaaaggggagggagagagacagggagaggggggaggaagagggaaagaggaggagggagagagggggagaaggggaaagagggagaaggagaggaagagcaggagagaggaggagagagggagaagagagagtggggaagaaggaagaaagcgggaagacagagtgaagagagaaggggaaaggggcaaggaggagggatatgagagacatgataaagctgacttatgagatggggttccgtattagggaggagacctggttgctggccacactggactggtgttgctgtaaggccttgtctcggggcctggttgcctcctgaggtccgtgctgctcagggtggagtgggtcccggcgagggatctgggggctcctgcctgcagcagatttgcttttcttcgctgcaagtgaaggtggtttgcagttgtgcctttccctctgcttggcagataatgcaggattgtgaaccgcagctcagggccaggcagggtgaggcccctctggtcagcatgccccagctcaggctcaagcttcggcctctcctgtgaggaccggtgcagggatggtttcagccacaaggcaaggcactgctcaggatatttttcctaaagaaactgctggaagcagttgctggccttgggacaggtgctggctcaatggattaggaacttgtgaggtcgtcgccatctagtgaggagatgctggaacgtccctgtgggctgctgtggccgactcaccgagccacgaagccggtgctgcgtttgtctcacgcccttcaccacggcagagatgaagagctaggatgagttattgtcatccttctaagaatgtgtg

SEQ ID NO: 24556 - DNA, 773 bp, Artificial sequence
  DNA replication origin
tccttcctcctttcatgcagtaaacacttactgagtgataatactgtctttctcctccagggatgtggctggaatgtgtgttgtaagtggggtgagcgggcgcctgccctgggatgctgaacaggagctagaatgtgagatgtcccaacaggagaaccactgcagagccgttcaggggacattgctgggggagggagggtccagccagtgcctgacaggagctccatggtttgctctgtgagtgctggttaagggcgggcatgaggctggctgtgggacggggacatcctatgctaaggacagtggcccccatgagggctggggcaggtcagacctttcccagcaggtgtcctaggtggctgcaggaaagagagagggcagtggcctggtgtgaggctggagagacacaaagaccaggctgtggaccaagtgatggggtctagacttgatcctatgaccgaagggacacaattgatgagcaatgtgtgtgtgtgtgtgtgtgtgtgtgtgtgtgtgaaagagagagagagcgcgcgagcgcgagagagatgggacatggtctatgttgtaggcattgctttgcctgcagtgtggatgatgaacaagtgagtggtaggccccacaggggtcaggaggacgcgtagtaggaagtgatgggcggtggctgggaccaacgtctggaccaggggtggcatgggaaggaaggaagcaggtaagacattggaagagttgaggtgggagaggagtcaagggggttcagtgggcctgtgtgg

SEQ ID NO: 24557 - DNA, 1221 bp, Artificial sequence
  DNA replication origin
tggaagaaaagagtctgcaaggcgcagcgtcactggctttgaagatggaggaggaaaccagaggtcaagaagcaggcgcctccctccctcccgctgggaccctcccactctcctaccagccgtgggaggcatagaaagccaagagcagtccgtggctggggatttggcctaagatgccccagtggggaagcttcaccgactcctgcccctcaggaccctgtgtgtgcataggatgacgctgggccccgtgtggcgcacacagacctgctccccagagccaggcaccagcacaggtgcagcacgcgggcgcttcgtgtgaaccacagtctagaaacgaccaagatgggcacgaggaggggcgcgcatgggattagaggatgggagggctccagagaggagtggcgaggagactcagtggaggatcttcacactcccagaaatacagccactcctctctggagccctcccctcctctaattccatgcatgcctctcctcccgaggcaggactgtttgcccttccttgtgcccgtcttggtcacctctggatcattccctgagtctggggagcatgtctgtatgtgtcacatggggctgggtgccgtcctgtgtagatgcagtgtcctgaggtgaggatctgaaggtggaaaggacctggtgtgagagtctgagggaggagggtcctggcatgagggtctgagggaggagggtcccggtgtgagagtctgagggaggagggtcctggtatgagagtctgagggaggagggtcctggtgtgagggtctgagggtggagggtcctggtgtgagggtctgagggtggagggtcctggtgtgagggtctgagggtggagggtcctggtgagagggtctgagggtggagggtcctggcgtgagggtcttagagtggggagggctagcatgaggtaataggagaaggagcagtcatgcgaaacttcccagcctgagggactcctttgctttcgggaaactggactgtggacctccccgccacagctgacagccctcctctccccgggcactgggctgggatcctgcgggaccctctgggtgctgctgtgctggactcaccctccacgctgggaagacagacctgctgctggcccggctgtccctcgaaagcgtctcccatgtggccattgtcctacgtgcagcgggagccctggattcagtccctgctctgatgtggggagtgaggtttg

SEQ ID NO: 24558 - DNA, 1138 bp, Artificial sequence
  DNA replication origin
agtcctggacagagaaccatgaggggttttatgtgtgaatgacaactgtgcgggccctgcatgttatatgtgtgacaacctcacgattctggcagtgttggaatcctcagcgcacacaggagtagtcagggatgggagagggtaagtcactaagccaagaccccagcagggagggaacgctgagggtcacccccaggtgttggagaccgcagccctccctttctgctgttattccatgtggtttgcatcagcacaacaggctgctgagtgtgagctggcagagctgttggtctcagcctggcatgctggggtgtcccctccacaggcagggtgacagtgcccaccacccactcctcgtcctccatggccaaatgaggagccccaagagaccttcctcactgggaaaaagaggccatggccaggcacagagggcagggcggaggcacccgcctccctctccttgtcacagcaaggtcgcaggagtggctggcgagtccagcgaacgggtggaggacacgaggcctgagctgcctgggtgctttcccccgggtaagagggactaaggtccacaggatgcctcgccccatgccccacagccagccacggttaaccgggaagctcggctcatctccaacagcagactgaggccagacgccagcgaaatgaaagcacaaaagcctttgccttttttgcctcattcctgttgctccccaggaaagaagctggagctgctttttctcccaactcacagagctcagctgcactagacccggggaggggccagcaagtgggagagaagactgaagtgtccacacagatcctatgcagccgtgagaaggaacgaaaccaggtcctttgcagcaacacgggtgcagctggaggcggccgtgatcctataccgactcacacaggaagagaaaaccaaagacctcatggtgtcactgcagtgccagctgaacactgggcactcacggacacaaagatggcaccagcagaaactggggactactagacaggggagggagggaaggaggcggcaagggctgaaatatgaactgttggggactatgttcacacctcggtgacgggatcagtcataccccaaacctcaatctcacacaatatacccaagcctgca

SEQ ID NO: 24559 - DNA, 775 bp, Artificial sequence
  DNA replication origin
gaaggtgagggagccgggggggcaggtgagggagccgggggggcaggtgagggagccgggggggcaggtgagggagccggggggggcaggtgagggagccgggggggcaggtgagggagccgggggggcaggtgagggagccgggggggcaggtgagggagccgggggggcaggtgagggagccgggggggggcaggtgagggagccaggggggctggtgagggagccgggggggggcaggtgagggagccgggggggccaggtgaggaagccgggggggctggtgaggaatccgggggggcaggtgaggaagccgggggggcaggtgagggagccggggggggcaggtgagggagccggtggggcaggtgagggagccggggggtggggccaggtgaggaagctggcaaaggcccacgtgggtggtaagcagggctgtgggcaggcccagtaggcctcctcatgcagtcctggacagagaaccatgaggggttttatgtgtgaatgacaactgtgcgggccctgcatgttatatgtgtgacaacctcacgattctggcagtgttggaatcctcagcgcacacaggagtagtcagggatgggagagggtaagtcactaagccaagaccccagcagggagggaacgctgagggtcacccccaggtgttggagaccgcagccctccctttctgctgttattccatgtggtttgcatcagcacaacaggctgctgagtgtgagctggcagagctgttggtctcagcctggcatgctgg

SEQ ID NO: 24560 - DNA, 1098 bp, Artificial sequence
  DNA replication origin
cttgccacctcagcctcctgcccctcctccccattcccacctggagtcagcagccactgcttcaccagatgcaggaggagaagccagaaggtgagtccagaggctgccgggggtctaaggaccacgatgcccagacccagaacctccgtgctgcagagggacagaaaggcctggcagggacccaagaccatgaccccgtcagggaccccggggacttccagcaggtagtggccctggggcctgttctccaaacggctttgcaggcagatgtgggtcctcacagtgacaccatgtgcttctgatacttaaaaaacctcagttgttcaactgccctacactggactaaacttttaataaagaaacttaaaatccattggatttgtttttaaatcttattaactatgagacatacctgacattatggttgaaggtggtaactggataaaacatataaaatcttttaaaagtaattcaaattaatagtcttatatagtgtcacaaaagaaggagtctgccagctgtaagcagaaactgaatatgagtgtcacctggggaccctatgcacacacagtcactcagcacaaagggaaaatgtgtcgtgaaaaagtatggtattaccacggacgggacaacgggttctcattgatggtgatgctgtactttttcactgtaccttttcaatgtggagatacaccaacactgcccacgtgttacagctgcctgccatgctcagtgcagccacgtgctgcacaggtgtgtagcccaggagcaacaggctccaccacacggcctaggtttgtaagtgcaccctgcgaaggtcacacaacaacaaaatcacctgaccgcgcatttctcagaacgcatccctgtcattaagccacgtgtgactgttgacacattcgtgtatcattacctcagcctccaaatccatcaccacactcccaagtcactggggtcatccgcttgaggccaccctggtcgagatggccctagcaagtctgcgtctcaccccgcgtccagtaccacagggagcaggaagccggggggcccaggtgaggatgctgggggggcaggtgagggagctggagggggaaggtg

SEQ ID NO: 24561 - DNA, 1521 bp, Artificial sequence
  DNA replication origin
gcactattgtcatttacaaccagatagttctttattgttgggggctgtgggtgcacatcagggtgcttcgtgacatccctggactccaccaaccagatgccactagcacttccaacctgacaacaatgtctccaggagttgtaaatctctcttgaggatcaaatatcgcaccccgagtgagatccactagattaagtaattggtagagccagattcaacacaggcagtctatctcaggcccattttcttaaccacgtatattaagtgctaaagaaattcgaagttagtgaaataagggagggaggatgggagggaaggaaacaagaggtgaggggagggagggaaacagcaggtgaggggagagagggaaacaggaggtgaggggagggagggaaacaggaggtgaggggagggagagaaacaggaggggaggggagggaaggaaacaggaggtgaggggagggagggaaagaggaggtgagaggagggacggaaaaaggaggtgaggggagggaaggaaagaggaggggaggggagggaaggaaagaggaggtgagaggagggacggaaaaaggaggtgaggggagggaaggaaagaggaggggaggggagggaaggaaagaggaggtgagaggagggacggaaagaggaggtgaggggagggaaggaaagacgaggtgagaggagggaggggaaaaggagagaatgcacatgatcagatcacacagagatatgcaagccgtgttgagccacctctagctttttctggggtcaacagagaacctctagagaggtttccaggaagaaaggaatgtgttgggatggtctgcaagctcatccatccaccagcatgtgaacagtaagagacagccaggctgctggagcctgagtgaagactggcgcctgcaccctcctcccccagggctgcagccatggcccctgcagctgctttcacccccttctcctaacttctccacagcaactgggcatctttccaaacagcagatgggatgatctgtgtcctcctatataaaacttcacaattatatatccactattgtttaaaaaaaaaatgccatacactgcgtggcttaaaacaacagaggcctactcgctcacagtcctggagatccaaagttcaaagtcaaggactcggcagagccactcttcttctgaagactctagcgaaggtccttcctgcctcttccagattctggtgtcccccacgatctttgggtgcccttggcttgtagacatgtcgctgcaaacactgcctctgccgtcacttggctgtcttccttgtgtgtctgcatctgaacttccctcttttttcttgaggaccatgggcagaggggacgaggacctgggctactccaggatgactctatgttcatttgtcgacgtccacaaagttttgtaaaactgtgattgcgtgtgtgcaggtgtgcatgtgtgtgctgagtgcgaatttaaaactcacttctggctgggcgtggtagctcacgcctgtaatcccagcac

SEQ ID NO: 24562 - DNA, 1289 bp, Artificial sequence
  DNA replication origin
agcccagtgcctgagaaatgggagcagctggaaaccagcagcaagtgggctgcctggaccctgagtgaggtcagaaggtcttgtgtattcagctggacatgacaactttgggcagcactggacacccagatgctgactctagccaataccctgcagaggctggcaggtacacctgtccctgagcgcagggcaggcacatcactgtacctcatgtatggagaatgtgactgtcaggaggggagctggttctggggcaattggtgagactaagcctgaaacagaggagatagcaaacacagctcaaaacttctcctgaaacatctcacaggacacatggtctgacaactctttaggtctgtgaatttattaatgtgccaagttgaatgatatttttagtcaccattaaatgcatatgtaaaggattccttgtagaaaatgttaaatgtacaatttggatagctgtaaagggttaagagccaatgaataagcaatggagtagatggatggataggtgacaaaagggatggatggatagatgacagagcagatgaatggcgatggagggatgggtaggcaacggaatggttgggtaagcaatggagcgaatgatgtggaatgatagatgatggactggatggatggataggcgatggagggatggatatgtgatggagtggatggataggtgatggagtggatggataggcaatggagtggatggatggacagttgatggagtggatgaatggataggtgacagagcagaagaatgggctacaaagcagacaaataggttatggagagacgatcaggcagtggagtggacggatgaacagtaatagagggatagataggcgatggagggacagataggtagtggagtggatgaatagacagtggagtgaatggataggcggtggagtggatggacaggtggtggagtggatggacaggtggtggagtggacggacaggtggtggagtggatggacaggtggtggagtagacggacaggtgatggagtggacagacaactgttggagaggacggatagatgttggagaggacggacaggtggtggagtggacggacaggtggagtggacgggtaggtggtggagtggatgggtaggtggtggaagcaagttccaggtgcagttccagggaggtgatgtttgggtgtgtgacctttgaaaggacagtgaggacagccaactgagaaaatcacatttgtgctctgtgagagattcaggctgaaaggcaagtgttcactccacatctctgactacac

SEQ ID NO: 24563 - DNA, 1217 bp, Artificial sequence
  DNA replication origin
tgtgttggtggggagcagtgccatgtcacgacagctgcttttgaatcatcgatcttcgccgaggacaccacacatttgttgccagtcagcaaggtgtggcctacaagcatctttcaaaatattcaaaacatttcaaaccagccggaaaggtgagaaagtggtccctttgggaatccattcctagcatgaatgctttccttccatgcacgctcagatggacactcgcagaacagatccaggctcagtatcagcctctgctggtcccttcttgctgcccacattagcagagcccatctgcgttcctggcgtggacttggccacccagcgggggcggtgtcccatgactctgtacatccataagggacatggcatggtgtgcagccagtgacagaaaggacaagcttagaggtcagaaggagccccaaggtcacagcacgactacagtggtgtgagggagaaggggcaggcgtggccttgggagggctcgggggtggcaggctgggtctgttcctggcgggtgtggaatggacttcctagtggagagacaacctcccgggggtcgggagtgaacgtggtgtgtccaggaacacaagtaagttctgtggtggggaagaaacagggagctgtgtgagtgatgggcagggccagtggggtggagggtgactctgtggcaaagtggagtgggtgggaggaagcccagcaggggtcggctggaagagccaggaggacctgcagtcgactttcaggcatccgaatcctatttccaggaaaattgctccagtgatggtggcacatggggaggggctcaggggaagtgtccagagccgggaacacaggcctggaagccattgcagccactgaccaagacgcaggagcagggcttcatgcggctggatgcaggaggtaaagacaaggggctgggggagggggagagagagagaggcagagagagagtgaggaagagagaggataacagcagtggcaaggaggccctgcctccctcatgtctcccacatcttgtgcttccgtggccccagtcagcaggtggggtgctgctgatcctccttaggtgggatgcatttgaaagtcgcccggaggaagcctgggaggatcaggaaaggacccttccctgtgtgggaaacaccttagaaatgcgaattgaggatgaggacactggcataagaaattatgggtggcatggcccccggaaacgcact

SEQ ID NO: 24564 - DNA, 2621 bp, Artificial sequence
  DNA replication origin
tttatcacatctgaaatttatttttgtgtagaatatttaatatttttgaaaggagtagttcaaaaccacttgttgaattgacaaatttttccttgatataaaaatgtcacctctaccgtatacaccaagatgcatacatgcatttcctacttctaggctcttcctcttgttccatttattgaatttttatgtttctgagccaacaccacaatgttttgagcactacagttatcaaatattctttgatattttacactgctaattattggtttttcctgtagattttctttcctagatgaatcttgaaattagctagtcaaagtctgtaaaatttcctttgggatttggatgtggattggattggattaatttggagaactaacattctgatgataatgtttagcggtttgattttcattttccgtgttatcattttcaactgcacttgcttcgaccttcccttggctctctgggagaaagtcttctgtctctccccagcagcattgattccattttctacccggtccactctgctttttgctgccttcagtgcatattttaaccctgctcctgttgctttccctatgacgctctttcctgttgagaagtgtcaagtaaaactctctaaaagtgcttttcacctcctttagtagataatttccaagggtacagttttccactgaatcttagatgattattccctttctcctgtgttgcaaggtgtccctgcagagacatattaaatgagagccctctgggagctggtggtgggcttagcgtggtgcacgttgaaccaactgcaggattccaatctgaagggaggttctcctgcagggggatgctgctgatggactactgatactgatgggtactgacaagcaccaggcctggagaagcaattctttacaccaggatgaacaaacagaaaggacatcatgatggaagccgtgggtgtattttgaatgcagcagaaaggaaatgttagccccacacttaatgggagatatggtggttttttcactggctgtgggatttcacatagaggcaagaatgtgcacactctctgatcacagaaaactgacttatcacgggaggaggcagacggctcagaaaggcgagagctctaacttccatgaagtggcagagtgatgtggtgtgtgtctgtggaggtggcatatcacgtgtcatggcgtctaataatgtggtgggttagaacatggtgagaccaacgtctggaatggccaggctggcttctgcctgcatccctgtcctccgtggggctgtgaagggccccggcggcagggccctctcctggggggctgtgggaatgcctggctgcaggtcagcccacggaggagctttgacactggcccagtgtgagctcatggggacacccatacctgtgtgaatgtgtgagaggacatctgtgcgtgccagtggggaaccaggatgtgtgtgtgtgtctgaggtgtgtgtgtctgtaggtgtatggtgagtgtgtgtttacgtgtttgtggggcatatgtgtctcttgtgggaggttggaggtgtgtctaggggaggctgtgtgtgtgcatctgtctgtgatatgtgtatctgatgtgtgtgtgatgtgtgtgggcatgtgtctgtggtgtgtgtggtgtgtgtctggtgtgtggtgtgtgcgtgtgtctgtggtatgtgtatctgtggtgtgtttttgtgtctggtgtgtgtagtgtgtgttgtgtgtgtgtggtgtgcgtgtgtgcatatggtttgtgatgtgtatggtgtgtgtctgtggtttgtgtggtatgtctggtgtgtgtggtgggtgtctgtagtatgtgggtgtctgtgtgtgtggtgtgtgtgtggtatgcgtgtggtgcgtgtgtctgtggtgtgggggtgtgtgtctgtggtgtgtgtgtggtgtgtgtggtgggtgcctgtagtgtgtgtgtctgtgtggtgagtgtctgtgtggtgtgtgtctgtatggtatatgtatgtggggtgtggggcgtgtgtgtggggcttgtgtgtgtggtaggtgtctgtggtatgtgtggtgtgtgtgtgtctgtgtggtgtgtgtctctgtggtgtgtgtgtgtggtatatgtacatggggtgtgggcgggcgtgtgtgtgtggtgtgtgtctgtggtgtgtgtattggtgtggtgtgtgtgtctgtgtgtgtgtggtgtgtctgttgtgtgtgtggtgtgtgtgtgtctggtatgtgtggtgtgtctttggtgtctgtggtgtgtgtgtgtggtgcgtgtatctgtgtggtgtgtgtgtggtgtatgtatggtgtgtggtgtgtgtgtccgtggtgtgtgtgtggtgtgtgtttattcgtggtgtgtgtgtgtgtggggtgtgtgtctgtgtggtgtgtgtgtggtgtgtgcgcgtctatgtggtgtgtgtggtgtatgtctgtggtgtgtgtgtgtccgtggtgtgcgtgtggtgtgtgtgcatctctctgtggtgtgtggagcacacagtcccagctctccctctggtgccctctgcccatgtctccatcagccccacgtgtccccctcgtccctaggccgcatccgactgtccacgttgccctctgaggtccggcg

SEQ ID NO: 24565 - DNA, 845 bp, Artificial sequence
  DNA replication origin
tatataaaaggggtaagatgttggtttgagggatgaactggaaatactacgtctgcccgtcccctgtcccctcctcccttttcccctcccttcctccttcctttccatctttccttcctccctccctctctcttccgtcttacacatgtggctgcacatgtgacggggagcgcgggagccatccccacagggcaggggagacaggaaggtgataggcgaggccggactgtgaaaggacggcagggcagggcgtgaggcagcccagagcccaggccaagagctggcaggaggcaggattgcctgtgggatggggcagcagaggcagggcagtggcggtctgcggtgggaaggagggcggctgggagaggcgaggctggcagggacgtccagaggcctcagcccaactggtcctggaatcccatggaaaagtgctgttgcggggcgggggtaggggggtggcggcgttagcaggatggcatccgaatcaaatgtgtgttcctttacgttcaggggaaagtgggtctggaagaaggcccggggccagggcaggtcacagaggctcttccaatggccaggccaggggttcaggtggtgtagacctggagcagagagacacccaggagtggggaggaggactttggggtgcaggtgatggcaggcacagggaggttggggagtcatcacccatccttagtgctgtggatggaagcgtccccagaggcagaggagcagatgggggtttggcaggaggaggggagtttgtcttaagacgtggagacgtccagtggtggatctgcaggtggaagctccggagagaggcgggggctgagagcacagagctgggc

SEQ ID NO: 24566 - DNA, 1437 bp, Artificial sequence
  DNA replication origin
aatccacgccagaccaggaggaagggcaggaagataagtggctctgagtgttgggaacaacacaaggatgagccttcagtttcactttgttatacaacttgactgttcatacatgttacatgcatttctagtgatgcataggatggagtgtgactgttcatagatgttacatacatgcatttctagtgatgcataggacagggcataggactgttcatacatgttacatacatgcatttctagtgcttcatcggacagggtgtaggactgttcatacgtgtaacgtacatgcatttctagtgatgcataggacagggcgtgtgactgttcatacatgttacatgcgtttctagtgatgcataggacacggagtggaggagcacgtttcctgagggaatcgggagtcctctggaatctggaactctgctctggctgtgctgtggtgaaggtgccactgggcatcccgggggcatttccagccgtcgtcgttaggggagtttccagtggtggttagggatggggaacggggaacctctctggtggtcgttaggaggcggggggatgtctctggtggtccttaggggatggggggacgtctctggtgggcgttaggggacagggaacaggggacatctctggtagtcgttaggggatgggggatgtctatggcgggtgttgggggatggggggatgtatctggcagttgttaggggacgggggcacgtctctggcgggtgttaggggatggggagatgtctctggcggtcgttaggggagggaggacctatctagtggtcattagaaagacatcacagcaggcgtagcttgagatgttgatctgggagtcatcagtccgagaaagcctctaggctgccgtagcacacacagtggggtcttaaccacagaaatgcattttctcctgattctggaggctgggagtctgaggccgggtgtgggcaggacgagttttcctgaggcctttctccccggtgtgtggacgccgtcttcttccgggggcctccacccgccgtccctgtgtgcgtgtctgtgtcccaatcttcttctcttgtaaaagaaacgagtccggctggattagggcccacctccatgccctcatttttcattaattacctctttaaggccctatctccaaaccatcacattctgaagtgtggggcctcgggcttcagcgtgttcattgtgggagacgtgattcagctgtgacagtgtctagtgccacggaacgggtggacacggggcttggagaagcagcctttgcggggccttgttcactgggacactttgcacgtcatcgccttggtgcttccggcacccctgtctcctacgtcctcggaaacgggcgggtcacacgccacgtcctgagaagctcttgagcagcgctgcatggagctcacctggattcctccttcctccgtc

SEQ ID NO: 24567 - DNA, 1014 bp, Artificial sequence
  DNA replication origin
tcctgcgcagttgcgctgctggcggaagtgacttgttttctaacgaccctcgtgacagccagagaatgtccgtttctcggagcgcagcacagcctgtcccatcgagaagcctcgggtgaggggcccggtgggcgcccggaggccgctggagggctgtgggagggacggtggctccccactcccgtggcgaagggcaggcaaaccagaagcctcttttgagagccgtttgggattgagacgagtaagccacagcgagtggttagaagtaggttaggaagaaggggaggtaagaaagccgagtagggttctgggccggagccgttcactgagacaggaaccctgggggagatgcgctgtctccctggcgtctcggtgcaaatgcccagagagcggctggaacccctcgaggctggagcacggggacgccggcctggggtgtaggtctgggagcagtcggccgtcaggtagttcacggacaccacgagtctggaggggcagcccgagctgttggggggtggcggtgctgtggagggagaagggtctggttctgccccaggggctgggagcagcgacagtgagggagtgggaagggaggggaccacagagaaggccagggaggcagttggggggccggggaccccagccctggagccatgggcgcaggagaaccatctgccgggggcctaagggactgagtagcacccactgggagtcatcaccccgggttccgggcaaggctggctcatgggcagggagaggaagcagacctgggtgactggaagagcaggaaaagtgagaagtctgggagagggggtggtagcaggagggtcttaggagcaggaaaagactttacagaacaccccaggggagacttaggaagaggaaatccggaggcctggggctcggtgggggtcctgaagggcgtgcaccttctccagcttcccagagaccgtgacaaaagacatcattctacgctgcacaaaagcagccagaggcggcctctcccacgctccg

SEQ ID NO: 24568 - DNA, 716 bp, Artificial sequence
  DNA replication origin
tgataacaatggccgaccacttggatagataaatcagcatgaacataagagtgcattccagtgacatcaaccctttgctgtgattagcccaggcagggacggcggcagtgggggggcccggattgccactgggatatgccaacccttgtcgtgattagcccgggcagggacggcggtagttggggggggtcaggttgccactgggatacgccagcccttgttgtgattagcctgggcagggacggtggcagtggaggggcccgggttgccactgggatacggcaacgcttgtcgtgattagcccgggcaaggacggcagcagtggggcggggtgggggggcgccgggctgccgctgggatgtgccaacccttgtcgtgattagcccgggcagggatggcagcagtggaggggcccgggttgccactgggatatgccaacccttgtcgtgatcagcccgggcaaggacggcggcagttgggggggctgggttgccactgggatacgccaaccctttgctgtgattagcctgggcagggacagcagcatggggaggcccgggttgccactgggatgtgggtgggctgtgttttgtgtgtgatgttgattcacttagcaactgtccttgaccccaaactaaataccacatatgccactttgtattctttccccatcttttccggcgtaggacgagacccgagctttggtgtgcctgcgt

SEQ ID NO: 24569 - DNA, 1018 bp, Artificial sequence
  DNA replication origin
gtttttagaatgtggactgtgaagcaattgcatttttcttcgtaagtctcaggagagtcagaggctggcttgatgctcatgacacgcatccaccatcttcctggcccaccggtgacttcacgtgcctaagccaccatcagtgcagctatgaggctgagttccagccaacagtctctgaaccacggaacggagtagggtctgtcttccaccccaaaaaccaacatacagcactgcgaagtaaggacaaataaaacttgtgtcacgtgaagccactgaagtgtcagagctgtgagcagagctctgaccctgccttcactggcacacaggcgtgagagggcagcttgagagagaaagtgacagtcactgagggtggagggggcggggacgcggaagggggcggggacgcagaagggggcggggacgcggaagggggcggggacgcggaagggggcggggacgcggaagggggcggggacgcagaagggggcggggacgtggggccacactccaaacacgtgctcctcccgccttgctagtccactgtttaagtctggcgagctagaacacagacggacagggacagaggctgggttctaacctgagccacagaagccacatcccctgccgggaactctctgtgaacatacgaaggtacatggactgcttatttgtcatgtcacgatgggcttcacaagaaaaatgctttaaaaggcaggaagcttcttggagcccagcggcaccgcattaccaagatacgatcaggtttccaatggaaccaaggccggtaagagtggacaccgcccacccagcagctgcgagcggctgacctgcaacgtgtcctgtccctgggctttgtcactgtattcaaccacgcagtcctgctctcgggtctgcataagtgcgaaggctattaaacagcagagtatctaaactgctcctgcaggtgaacgcatgtggcacgcctgtgagttgggctggcagagaaaagatgctaaaatactgatggaggaagtggggg

SEQ ID NO: 24570 - DNA, 1324 bp, Artificial sequence
  DNA replication origin
ccgggaggaggggtctgggcagcgcctgtgctccagggagactggaggcctgggccggggaggcttgttcccatgagggacaccgggcaggagggaaccgggtgaggtcgttgaaggaagaaaggaaacggagaaagtgcttccccagcagacagcagcattgtctgttccccgtgagggtcagtccggaaagttcaggattagtaaatttaatatcctgtcaaaattcccgtgataatgagccctggctggccgggccggccccgcggcttcagctctgcagccggcgagatagcgcggctgattgatgagcagggatcgcgctgcgctggcaccaaagcgggtgggtgggtgggcgggcgggggggcggcggcggcccgcggtgccagggagctcgctgggggctcgctggggtcttacagccacctccggagcggcctggccgcagcccagaggaccactgcgtggctggatcccgcgggccctgggttttgcttttttaaggaaaatcaggaaaaggccttgtagaaaataatcctacagggatcttttcctggcctgttggggtgcctcaatacccatcttttcagaatggacaggagcgtttcggagccggcgaggcggaggtgggggaaggatggagctcgctggggaggagctcacctcggaggggacagtggccaaccagggcgcggcctgggtgggtgggttttaggctgtaagggcgatgcaaaatatgatgttcctcaccgaggagcacagaaaccagaaagttcctgggcaatttgtccgaggctctgcacctctctaagcagctgtcagatctgtacattatggtacattgaatctgaatgaggctctcaacatcaaaaccctgcatccattatgatatcatctcccgctctaggctgtaatgcttattaattctgcacccatactctcccggcttcagcaaatgtattccatcagcctagcatttaatttaattagtacagctgggctctcattctcctttctgtgtcagaggtattgtcagcacgttctgctgtaacacaattactgattgcttttagataggcagaaatatgattagggtattgggtgactgtatcataagccttattagattcatttgaaatctggagataaataggaaacttttatttgcagtgtaatgagattatgcttattaggccaaggcctcgcaaccttttgcaaagaacacagtgtatccgccggattatgctctggaaacacactttctgctcccagcctccgagccattgctccgcgcctcgagactgaactgttgttgccctgcgt

SEQ ID NO: 24571 - DNA, 1470 bp, Artificial sequence
  DNA replication origin
catcccagaggccgccagttccctgcggggtccacatctgagagcaggggaagggcagcccaggtggaacccactcccagctgctctacagaatcctcaaatgggcaattcagccactgagaaaagcagaactcagtaggggcagatggaagggccataagccatgctgtctgggccttatcctggagaaatggatggggagccaaggagaagtgtgaggccaggccgcactggcccatctgtacttagaaagatcggcatgtagaaagagcattccggcaacggcccagatcagcagggctggggacaggctggggacccagggtcccaggagtcaggtgggggacaggctgagacccacggtcccaggagtcaggtggggacaggctgagacccaggatcccaggagtcgggtggggacaggctggggacccggggtcccagaagtcgggtggggacaggctgagacccggggtcccagaagttgggtgggggcaggccgagacctggggtcccaggagtcgtgtcggggacagatggcccccatagatgtgtggccagcactggagggacctagcactgacctcggcaggagaggtgggtgacagcaaatggacatgggaaggcttgcactgtgtccttcttgcaaagaagcctgcagaaccccaagctgggagagaggggatgagggtgagaaggcaaaatgccagggacatgtgggtccatcctgaacagcagcgagaaatgcgtggcacaaaggcatcaaagctcctcgcagcccacccaaaatacagctgaaggctaagtgggaagttagggacccgtgcaggaggatgtggggtgcaggtggctctaacgtgcacagggccagccccatggcacaggggtgtctcctgaaggcacaggggcatggacccagccaggaggcaggatggcccagcaggcaggaggatgaaccagctgggagggaggacgacccagagagagggaggacagcctagccagaagggaggatggcacagtgggttggaggacagcccagccaggagggaggacagcccaaccaggagagagaacagccgagccaggagggaggatggtacggtgggtgggaggacagccccgccaggaaggaggatggcccagccaggagggaggacagcccaaccaggagagaggacagccgagccaggagggaggatggtacagtgggtgggaggacagccccaccaggaaggaggatggcccagccaggagggaggacagcctagccagaagggaggatggcacagagggtgagaggacagcccagccagaagggagggagggtggacggcccaaccaggagagaggacagcccagccaggagagaggacagtccagccaggagagaggacagtccagccaggagggaggatggcccagagggagggaggataactcagaaggagggagaacggcacagcagga

SEQ ID NO: 24572 - DNA, 1911 bp, Artificial sequence
  DNA replication origin
cttgactgtattaattctgctaccgaaaaaaaaaaaaaaaaaaaagcaatgagccgcaagccttggactcgcagagctgccggtgcccgtccgagagccccaccagcgcggctcacgcctcagtctcgccgccccaaggtgggatccgacgcccaaaggagggcgccccaaggtgggatccgagcgggccgccctaggaggagtgaaccccgcccgggcgcacagctccgtgcgcctgtcctccctcctccagcgaaatcacacccgctttgcctcctcttgcagcaccgcgcgtgcctaggttctcggtctgcgcagctgggagtctcccccaccagcgccgcggagccgcccgcttccgctccctctttccgcgggtttgagcctcccgtggagaggaaaggtcacgaagtttcaaaggtgaaatggattttcggcggtggctggtgcgggagtcaatgggcagggcggggcaagcctggcagtcatcgacccgagcagggacccggctggccgcctccccttgcaggaaacaggtgtttgaacgcgatagcggccgccagtcaactaaggcattaaaagctcgctttataacatcgatttcctggagtgcggtggggcctgcgttctggaagctcgtttgtgaaaggcggggttgggggaattgccctgatggtaccccagttggcgcagaagatccccaaaagtccctgtcaccgcagcggcggacagcggggctgcccaggcggctgggagggcagcttttccctcccgctggggtggaaagaggagtcctgctccgttccccacccaggacaatggtcttgttaccccggcctcctcccctgcacctagggcctggcatgcagagagcgcccgcagcagagggggaagtctccaacaactggcaggtgtcccccgaggagctccgcttgatttggaagggtggttaaaccgggatccaggaggaaagcaattccgttgccacccacatcccctgggccctaccaggcttcttcccctgctagcacatctcccggatgcgacgcaggccaggtggcagggctgaagcaggcaggcacacaggagatggcatgcgtacctgtaaggatgaagagagagccttcagatggcctagtgctaggatcttgttatcaatgtcatggaaacggatggagccctgtggggaggctgccacggaggcagagagaaaggggttggggaagggagggggctggcacctgggcggctggacttgctggtcctagtctccctccccgcaaggaagaggaggccccgaaaaccttgccttggctgtgctgggtctgagggaagaggctccaagtggcgagccttcctgtgcctacctggctgatggcagaggatacaccacctgagaaggcaggctgtaaccagcctctactccagaagcaaatctgcctgtgtgttctgagcgttgagcataattgtaaacagctgaaaataatgaaaatgcatagaacccctaccctgaaacccacacacccctccactgccgcccgatggggtcctttgtctgggtggggctcctccactccccagagccatgggagccagtccagaaggagtcagtccatgaagggacaggtggcccctggggagtcagagtggcgtgtttctgctggcaagaagaggtgcaaatctccctttagctggtttagcagaaaactcacctatgtttgcccacttcttctcactgcctctaagttgagatttagggtcaagcaccatccaaaacagggctctttctctgcctgatctgccaaacctcccctatctcatttaggtggcactctctccctaaagctagtgtctgtcctgtggggtatccgaccctttcagggtcagcgcaggccattcccgttcccccgt

SEQ ID NO: 24573 - DNA, 1688 bp, Artificial sequence
  DNA replication origin
acaaaaacttctgtgctactctggcttctctggttttgtttgggaacagtggaaccaagttagcccgggccagggcgcagatgatggactcagagcgcccagggaccctagagagaggagcactcctcaagagccccctggccatcacccgagcgccctggagcgccatcacccgaacgcgcgctccaggccctcgaacaaggcctctggctgccagagcgagtgaggggcgcagaggcggcagagagcggagagccccggtgtctccgcgagggcggcggcggccagcagacggcgatcgaggcgcgcgccacggcacggccagcgcagacacgccgcggggtctcgggccggagccgtgcagccgggcccgctgcctctttgcccctcatggctccgcgcgggaggaaaccgggccttctccgcccgccctcctctcgctgcggtgtccccagcacccccgccccgcccccgcgcggtccccaccgtcgcgctcccctccctcctcgccctcgctccgcgcctcctgttggcagagatggcctcgaaggcctcttccaatttgaatggctctttcttcttctctctcccgcgctttcttttccgccttctcctcctctccttctgactactcttgtctctttcaaaagctccgcctggaaactagcggcttcctcttcatctgcctcctttaactgtggcctcggccctctggggcgacaccagagcgcggaagcctgagcccctcggagatccggggaggcacctacacatggcctcaatcctccaaccggccccagaagccgtaggagctgaacccaggagggcaaccggttgtggtgcggccacatgtccctggagagtgtcagcaagacgggtcgacttcaccaggaccacgaaagacagggcagagtttctgtcttctttcactgtcccgtagaactcctagcttgtccatcgtgctccttgcttgggactcgggactgacactgggccagaaaatccacctctagatgcctcaaagctcgctttcatgctggggggcgggcgggagcggggaagggggacaaaagctaaaagtgctaattattccatacagacagtttaagctaatggtgttacagtccagcactcaatttacttgaaagttgaggtttcttgcataatggcttaacctatcacatacatacaggcatatatgtgtgcgtgtaacttctagggatggcttggttctggattggctttgaagattatgaccacaggttacatacaacaatagaaagtgtctttatccacatttctaagttgatcttcgctttggcattttgagcaaagaggcacaatgaagtttctgagctgccaaaaaagcaagtttggtcaatcaacagtgacagtaaccctgtgcctgggggtctagacttcctattacattacttgggaatagggaagtcagtgttcaaatctccaggagtccagcctttgggaaagtactgggtttgaaggaggtaactgccaacttggctggaggtagaagggagaaggaggtgcttttcaaactggttttggactgtcttctctcttcttaaagagtcactgaggaaagagtttagaaggagcaagaaattgaggcttccagaagccatcgatcaccagcaggagttaatattatgctcgtcaatcctcatgcc

SEQ ID NO: 24574 - DNA, 1614 bp, Artificial sequence
  DNA replication origin
gcggggggggggaggcgcaggggggcctgcagggggcgattacggtgcagccagggaggggcccggggacagcgggaggagcgcgggctcgcggagagggccggagagccggggccgccgagcccgggatgggctgcccgctgcctgcccggggccgtgcgctcggagcggaggcgcacgcggggccggcggcgcgcggggcccagcagccatacgccgggcccgggctgccattaaatgagcgcgccgcggccaatgggagccggcggcggcggtgatttgcatggcgcgctggcgagtgacgtggggagggagtagatacactgggcgcgggcggcggagcggggaggaggggaggaaggagggggagcaaagcaggaaggaggggggaggaggcccgggagggggtgacagccacaccgcttcctgagcgcgcgcgcgcggcggcggcggcggcggcgaaccccgagctcgccctcctcgccgctccccgcccgcgcgttccgaatgattaacgattgggttgaaaagcgaagactaagaaaggatcgtcgtggggtggggggaggaaacgcagcccctggccaggtttaaacgggcgcagtggagacccagctcctcctctgcccccgccggccaactctgtgcctgcagggaaggggaaagttgagtgcggggctggcacgtcgccctcagttcccccgagtgctgaaaaggaggggcgctcccttggacgcaggggataccctccgagggcccctgcaggttctctgcaaggatcaggcggctcagccatcccccgccctgcatccgttctcggccgcggcgtgcactgaagttcgccagtgcccgctcttgcagcgaaggccttcacagtccaggccccacaattcgggtaaagggggagtatttgtgtgggcatggctccatagcttcgtttagtatcagccctaaacttttgtggggaggagtctttcaatgagcccggggccatagtcacgcactcttcccaacccggatcttcttcctctggaaaaggaatttctaggaaggccgaacacaacaagatctatctggaatctagttcctgaacaacagttgaaaaagtttgttgaatcgcaaaataatgatatggcgcacgcttttctggagtgaatttcccacgagctggttgcctaagaacggagaaaactgcgtgaactgcgcggggccacataaaccgaatgaaaggcggggcctcaggacgggtctcagccgccggtctgcgtcatgcaaaggaaaggcctggctcgtggaaagagtaaggcattcacctgtggttatcattcttaaacctcaaagtggctttgatttgggaacgtgaaagagattttcaaacgcagtctcaagtagcatagcgctcacactaccgtttccaccagactgatctgaaagtggtccaaagacgacttttgagcccaagtattcctcctctgccctccccgaggcaccctgagatgagagtgcttgtggagattggtggtgggtaaagtagaaccttcaccgcatgtcacatgtctgcctgtcttgtagtaggaatattcagtaaagatgatgataacggtaataggagta

SEQ ID NO: 24575 - DNA, 808 bp, Artificial sequence
  DNA replication origin
gcccgccgcgccgcctgggctctccaggcgctggcccacggccgccgcgcccacgcccacgcccacgcccatggccacagccgcgccgccgccacccgcgccggccgccaggagcccgccggccagcgagtacttgtccttcttgagcagcgtcttggtcttgcggcgcggccggtacttgtaatccgggtgctccttcatgtgcagcgcgcgcagccgcttggcctcgtcgatgaacggccgcttctcggcctcggacatgaccttccactcggcccccaggcgcttgctgatctccgagttgtgcatcttggggttctcctgggccatcttgcgccgctgcccgcgggaccacaccatgaaggcgttcatgggccgtttgacccggtcctggttggccttggcgcccccgccgccgccgccgcccccgcctccgcccccgccgccgcccgccccggcggggcccgagaggttcgtgggggcctgggcgccgccgggcgagtgcaggtcggtctccatcatcatgctgtacatcggggcggctggcgggttcaccggcaccgcgaggagagggcctggagcatagacggccggggtgggagggagacggagaggaattcagacggagtgagacgggggcgggggggtcctagcggagagaagaatggggaggggtggaggcaacgacaacaaaaaaaggcagaaacacacgcactcggcgccggttcggctcgcaggtggaaagtttctcctgatgcacaaaccacttgccaaagaggccgacggtcggggtcgccgtcttcgccgc

SEQ ID NO: 24576 - DNA, 1103 bp, Artificial sequence
  DNA replication origin
agggagggaagaacgggggaggcggggaggaagagggaggaggagagctcgccctcaggcaaggggaggtgatcccgaggcctggctcgggcgggagcagaggactgggtgaggggtccctgcgtccccacctcccggcctgggcctccacgcgagcccccccgccggccctcgctccgtcctgacgccgccccaccccgccggatactgggggcccgcaccccgctcacttttccccatctggcctggcctttcagtctcgccagatagtcacgctggaaagagagccgcgccaaggccaagtctgcttttcacttgaagtttccaaggactcagaccgggggttaaattctgccgccgacgcctctggagccgctgcccccgggcccaggccgagcgtgggtggggagggggcgggagtcggccggagcccgacggggtcgagggggcgctggagtccgggctggcctgaagcgagccttcgggggggggcgggcacacgtccggggatgggtttcttgaattaactggaattttccggagacagaaatctgcggcgcccagtctttgccgggggaatgaaacgcgggagcatgagtgccgttctcccacacgcgtgattttaatagacctatcagtcacgctcccgacgcgcatctggagatcacgctgtgcccgagtcttctttaaaactaatccatctagtacgttacgggtgggtttctccggggaaggggacgtcaaaatctcaacaacaaaaggggcgggtgagttgaaaaacaaaacaaggcaaaaacagaacaaaacaaagcaaaaaaaccctcaagtaaaccctcctaccctcagtttggagggcagggcccgagcgcaatggcagatttacgaagtcacactgtcgcccccgcagaaactgatgcaaactttgcactaggcctcaaagactcctatccgccttccctacacgggttgcaaacataattggactaagcgacagaagcaccaccctgtgatttgggaagtgaatgaagtcgtcatataatataataactatcatcatatagtatttcactccgtgaatacgatgagtgttaccttggccaagc

SEQ ID NO: 24577 - DNA, 1864 bp, Artificial sequence
  DNA replication origin
cccctctccgtccctctccggcccttgggcgcccagtcggaggtcggggcgggatggggcacgagtctcggggcggcccgcgctccccctactagtcccctcattgcctcggccccgtccccgcagcctcggggcgggagggcgcaggggtccccgggcgccctgggagcccatctccctcaggtccgcgccggtgtcagccgccggcggggggcgggtggagattaagatgagtgctgcgagggacggggccgagggttttgtgtagaaggagagcaggattagtggagagaaagtgctgacccggggtcagccgcaagtcaaacccttttacactcagccggcggaacgagcacggctcgggccggacggcaacaagtgggcgcgaagggagggggaggggaggccgggtaccggccgggtccggcgtgagagaggggagggggaggggacgcggccacagcgccccagggcctcagcgtcatcggggacgggcgccgaggggagcgcgcaccagcgacccgggcgcggactggggcctgcagggcgtgactggctgccccccaggactccatctccttcataaacacctgccttttccattccccggggccgcttcggctgctcctctggagggaagactggggagaaggttgcctgcgctctctgccccagaggctctgttttagaaactgtttcttaatttccataagaaacaaaaaaatcacaggaaggcctggttcctctcccggacgactgcgtccccaggctctccaggaatcttcgccttatccgagcttcttcgcagccctggatctatttctggggggcgtgtgtgacgcagaatcggggtataaaatatcaatgctgtttgtcacgacaccgctttctccacccgggcagagctgcggctcccgggcgttgcgcgtggcgtttttcatcacggagggaaagccgcggctccgcgggaaaggagtgaaaaccgagtgtgggtgaagaggagagggaggtcagggggcaagggaagaaagcagataaatgcatcttccctagcagccaagctggaaatttgtgctgaaagtacaacagcaagagttttcacatgaaaaacacgtgaagaacccgagcaagtgatagatccaaagacggaaaatgatcgtctattttgatagtaaaaataaaaagaacagaattgacatattttcgtctaaattacttttcatctgccgatatgaaacaccaacactcaaacaaaaacaaaggacaaagcagtttttaaaaacaacacaaaacaagcaactctgagtgaatgacctgtccacagcttaccctgggtgacatgggggcgctgtgatggaaaatgggttctgggttcaaaatcaagccacagaacgctgcctggcgagttgctaagtgtgacttgtggggaaatcgtgtctgcggcagaaacactggaccttgtgagtaattcccgatgcccggtaggcagctggcgaggctgtaattgccctcggccacttcagagcaaccatgtgggtgcattgaagacgttgtttgtggagagcagcaggtcatcacatgcaaagccctgaaatagtcagccagtcaaatcagtggaaaaaatccgcttttgttagattttgcagtttcaggaattaggcattcactgcagagctgcagttttgagaaattgcaatgtcaggcatgttcccaatggggaaatattgtgagtgtggaggaacgtgagatggggtttgacaatggggagactgacaagagtcatcacccagacattgttttctctctgagcaccccggaaatgctaacgagagatgatatttagtggcagcaatagcactctgcg

SEQ ID NO: 24578 - DNA, 924 bp, Artificial sequence
  DNA replication origin
gagcgattgtgaggggctctgctggaatttggcagcgcggaggcttggagagaagccccatgctggctcccattcagccggcccgttttcctcgagctttggaagtttcactcagccgtgcactcaatggcttcacaaagctgattacaagcttcagcgcattcctgaaggagccaaaagcgacgcaggtgcaaacgagccgagggagccccttatcccggtgacagaatgggacaagctgggaaaggcttagaccacacaagtccaaggctcaccaggccgcagaaagcctgccttgggaaccgggggtcattatccgccctattcagcggggcccggggaccctgggggccgagcgaggccagcccgggcgggagcaccgccgccagcgcgcgccggcgacaggggggaaccccgctgggcgctgcggccaggccggggctcagggcgctgggctgtgcgtttgcacaaatctgtgttccggcgggccggtgtcaaccctagtggggacacgggagaaagagcacgccagtaggccacgcggcgcgtgggcagtgcgcaacttctgtcggcgtccaggctgtacggccacgtttcagccggtgcccccaggccatggacacccagctccagggtcgctctgcgccctttctccccagcccacctttcccattggtcccctctcctgtccgagtggcagcgcggccccgcagggagcgaccccgggagggacagtgaccgcacgcgtggagtggggacggcggggcacaggacggtagtctaagagtgttcgcatggccgaggacgctttcgctgcgagtttggggtcgaggggcagttccctcccggagtcattaacttcgtctcctcgtgctcagggaccagcaacttggtgctgcgggcgccagaaagaaaagggtagcg

SEQ ID NO: 24579 - DNA, 1423 bp, Artificial sequence
  DNA replication origin
ctgccctccagcgtctgctaggggagacctgctgacccaccactgctagacaactgggctagaaagttctctttgaaaccaggccagaactgcatccaaatctgtacctagtgatcctagctcagcatgctggagctgtacaaactcaccttgtttctatgtcagagacctaaagcctctgaggatggttactacaattctctaagctgtctctctcctcgcccagttgcagctcccatccttcacatgatgtgcactgtcctcacccatggtcaccacgcagctcctgcagagacactctgcctgtcacagttcctttccgttctgttccatgaaactgggcatcccccatgtgcaggcaccacctgacgactgagggaagggaggagggagggagggagggaaggagggagggagggaggcgggaagaagggagagagggagggagagagaaagggagggagggaagaaggaagggagggagggaagaaaggagggaaggaaggaggaaagaaggaagggagagagggagggagagaaggaagaaggaaaggggttgggggaggacagagaggaagaaaggaaaaagggagggagggagatgaaagaaaaagaaagaaagagacagcaagtgggcacagtagacccagcccctgccaacctgagagccgcaggaagggcttcacagtgaggagcattctgggtagagaaggatgtcacccggaggagggccccggggtcaacatgacccaccttaggagaactcccttgagccaagacctggaggaagggtaggtggtcacacctgggaggaggagccctaatgatccaggagcagggggaaaggtggggaggctgccgttccagaacattccctcctggtatgttggtgaagttgccaactgaggcagggccagagagaaggttgggctcgagtctggggaccaggtgccctggaggttttgaggtggggagccacggactgtggccaagggcgtggagagtggatgcgtgggtgaacccagaggcagaggcctaggcaggaggctgtgccctggggatgcagagagactgtcaagcagaagaggcttagaacgttccctaagtgatttctgtacaatgctggctgcgttacaggtagaatgggtttgggtaggcttatctgggaacctaatgtcactttttaacattgtttctgtggggaatattctaagatcctataactgaacttgggtgtgacctatctggagatggagcatggcgtataccacagcttggcagtgcccagggggaggcccagcttcctggtggctcttagtgagagctgggtctcggatgcttctggagggaggatcaactcttccaggggctgtgggtgtctgggaccgtccccggcaggggccctaggacagagttttaggcc

SEQ ID NO: 24580 - DNA, 1220 bp, Artificial sequence
  DNA replication origin
tgctcttgattatactgagttaaaatgcaagtctctttgtcaccccaaaaaggccagagaaaagccccacgagggcctctgtcagcactgggcacagctctgtcctccccagggctaaggagaagccccgggactcccctttccggaatctcaacccattccttcaaccgtgcatttcgacggcctgcgcagggccatgatggtggaggatgaaacagtgacccccaaggggaagcgtttatgacccagcagcagaaatcaggcaccagccaattcccacggtgaaaagtggagtctatcaccgtcgacctgggccatgaggactggacggaaggcatggtccacttctgattttcagggaagggcttggaaaggacatgggtgggtgtagaccgggaaacctgggaagtatgttctgctcagaggtaggagcgtgaacagctgggctgtctggcaggggcttgggggtcccctgcatggagaatgaagtagacaaagaacatctgtgagagggaggctgggagcctgggtggggactgtggcttggaggctgcgagactgggtgggaacatggcttggaggctgcgagactgggtgggaacatggcttggaggctgtgagtctgagtggagactgtggcttggaggctaggaagctgggtggggaccatggcttggaggctgcgaggctggatggggactatggcttggaggctgggtggctgtgaggctgggtggggactgtggcttggaggctgggtggctgtgaggctgggtggggactgtggcttggaggctgggtggctgggtggggaccatggctaggaggcccaggggagccgtggctgggaggttgggtggggactgtggctgtgaggctgcgtgtggactgtggctgggaggctgggaggttgggtgtggactgtggctgggaggctgggaggttgggtgtggactgtggctgggaggctgggtgaggaccgtggcttagagagcattgaatgcatgaagaagatgctttgcctcaaacagcaccaaggttatcagaggactttctgtgcctgagccatgagatcagagtgtgctggggcacagggctgggagccacaggacagcgggcgtggcgtgggtggctccacagtttgctttctcttctttccacccactggtcctcgtcccagaagtggcagatgaaagcctgaaatattcccttcctggaca

SEQ ID NO: 24581 - DNA, 2049 bp, Artificial sequence
  DNA replication origin
ctagaagaggtcaggggtgtgaggcaagggtgcagctaagtggggcagggggcggggggtcctgccggatcctcggcatccacttcagcttgctgtgggcctgaggcaggcccccctcactgcaccgcttagaaggggttggcttctgtgggtgtgcagcttccagatctccaggccagcagggtgttcgaggtcactctcctatcagccacatgatgacagaaatctgaggctggtgcaaaggctactgtctttttttttcatgcttctctttaagatacacatctaatacttgcacactgaatggatctgcagaatggctatttctgtgccctaggcctcccatctgtctgataagagcatgctagtgccgtggctcaggactttagtgtatctttttgaaagacacagttgaagtcataacacccagaaattcaagatgtcgctgtcagtagcatagctggattcagcactcaagtcttgggtgaaatgcatttatgtttgctttgaaagttttgttttcttgttaccttgaccagatagatcatcctgagcatgaaatactgggcaaattatttcacctgctccaggcctggctggctcttctctgtaaactggagtgctaacaccacctcctgcctagagatgctgtccagacaaacccaggtggcagtgtgcttgccgtgggtgtgtgtgtgtgtgcttgccgtgggggtgtgtgtgtgtgcttgccgtgggtgtgtgtgtgtgcgcttgccgtgggtgtgtgtgtgtgcttgccgtgggtgtgtgtgtgcgcgcttgccgtgggtgtgtgtgtgtgcgcttgccgtgggggggtgtgtgtgtgcttgccgtgggtgtgtgtgtgtgtgcgcttgccgtgggggggtgtgtgtgtgcttgccgtgggggtgtgtgtgtgtgcttcccgtgggggggtgtgtgtgtgcttgccgtgggtgtgtgtgtgtgcgcttgccgtgggggggtgtgtgtgtgcttgccgtgggggggtgtgtgtgtgcttgccgtggggggggtgtgtgtgtgcttgccgtgggggtgtgtgtgtgtgcttgccggggggtgtgtgtgcttgccgtgggggtgtgtgtgtgcgcttgctgtgggggggtgtgtgtgcttgccgtgggggtgtgtgcgcgtgtgtgtgcttgctgtgcgcgtgtgtgtgcttgctgtgcgtgtgtgtgcgcgcgtgtgcatgcgtgtgtgcgtgtgtgtgtgcacgtgtgtgtgtgtgtatgtgtgtgcttgccgtgcgtgtgtgtggtgtgtgggtgttggggtggggtggggcaggaaggactccatccccatcttcttaaggaatgtgaatgtgaccattgcctgaagtagaaaacgtttgcaagtggttccaaggaattttagacccaggagcactccgagccggatgtgggagctgaaggacttcacattttgttctctaagtgccatcgagcggcctctcagcggcgggatggacacggcagtgccggtggggggagcctgacactgttctatttctagttcttccattaccttgatgtgtgaccttgtaaaatcttcccttaaaaaaagtatctctgtggctgatttcttcttcatcttgaaagtacaggtggtagtcatgaatatttgtttcctgcaggttggttttgtaaacctcttctcgaaggaaaagtacacacagctgtggagtattgttcttattaataacttcatcttggcatgcactcgccggcttctaagtctttatattaatattctactgcagaaaatatgccacaatagcaacctgtctgatttctctgtcttctgttttagaagctgacctatacactaaatagttgtcctaaacagaacacattttttttctctttccacgtcaatgtctaaccatggcatctggtggatccttgcagtccagctgtctgttgccagttgtgttggtcatcttggggctgccatgacaaaggaccatagactgtgtgggtcaacccacaggaactgatttctcaccgt

SEQ ID NO: 24582 - DNA, 862 bp, Artificial sequence
  DNA replication origin
ggggggagcgtctccaggctcggaggtggactcagcgcggggggaacgtctccaggctcgcaggtggactcagtgaaggggaaacgtctccaggcttggaggtggactcagcgcgggagttacgtctccatgctcagaggtgggcccagcgcggggggaacgtgtccacgctcggaggtggactcagcgcggggggaacgtgtccacgctgagaggtgggctcagcgcggggggaacgtgtccacgctcggaggtggactcagcgcggggggaacgtgtccacgctcggaggtggactctgcgcggggggatcgtgtccgtgctgagaggtgggctcagcacggggggatcgtgtccacgatcagaggtgggcttagtgcggggggaacgtgtccaccctgagaggtgggcttagcgcggggggaaagtctccacgctcagaggtgggcccagcgcggggggtacgtgtccacgctgagaggtgggctcagcgcggggggaacgtgtccacgctgagaggtggactcacgtttttacgctcctacgatttcatccgcaaccaattggcggcacccattccctatctcctgaccacgaaagtatcggcgaaaatccctaatctccaagtctttgtgagatggctgtgggtgacagctcagtctcctccgtcagttaaactccttctttattgcaatgccctggcctcagtgagttggttttctctgtgcagtggacagcatgaacccgtcagatgattacagcttgttggagtagatgatcatttttattaagttggcttcagaaaagccaagaaggggctggaacatttatttttgagcaccttagagaggataaatgctca

SEQ ID NO: 24583 - DNA, 1297 bp, Artificial sequence
  DNA replication origin
ggacccaggaaaccagggaaccaggggaccagggaaccaggggaccagggaaccgggaaacagggtgctgaggaggcaggagcagggaggagggagggagggagggagagagggcgtaagggagggaggaggaaggaatgaagagagagaggaaggcagggaagagagggagagagggagagagggagacaaggaaggaagaaagaaaggagggaagaaaagtaaagaaagaaggaaggaaggtagggaaagagggagggagggaggaaagagggaaagaaggaagggatggagggagggagggaggaaggaaaaaaggaaggaagggaggaagggaggtgagggaggaggaaggaataaagagaaaggaagccagggaatgaggggagagggagggagggagaaaggaaagaaggaaggaagaaaggaaggaaaaaagaagcaaaggaaagagggagggagagaggaaggaaggaagaaaggaagggagggagggaagggaggagagaggaggaagaaatgaagagagagaggaaggcagggaaggaggggagagagggagggagggagaaaggaagaaagaaggaagggaaagagggagggagagaggaaggaaggaagggaagaagggaaggaaggaaggaaggaagaggggaaggaggggggaggaggaaggaatgaagagagaaaggaaggcagggaaggaggggagagagggaggaagggggaaaggaaagaaggaaggaagaaggaaagaagaaaggaaggaaaaaaggaagggaaagaggaagggaaagaggaaggaaggaaggaaggaagggcaattggtactaaattcttgtagtgcccaggcactcttcccctagtgggcagggcagagagactgtgaaaggtggagatgaaggagagccatcatttcactcttgagaaaggacggagcaggctgtgtggaagagatgagatctgggataaattggaaaaggtatcaaaaaattaggagggaagaaatattttcagcaagtctgctaccacactcctcaaattcaactaagagtggtgatttaatgtaagatttatatttttattaactggtgctttgttttcatgttgatattaaaagtgcctgtcttctgcattactttttatttttagggaggagaaatttattttgcattttccgggttcttgggagctgcttcagcactctagagtctttatggataagatcctgggtcgctggcacctgagtgaattagtagtgggttccctgatcttccctcaggtcagaaaagctccg

SEQ ID NO: 24584 - DNA, 1881 bp, Artificial sequence
  DNA replication origin
ttgaccatgcctgtagtcaaggcggtggggctgtgtggggctgtgtgtggctgcatgacatgagggagttggggctggggctggggctggggctgagggcatcgggctgctgggatcttgcctctagatcctgagcatgccaatgtccattcttattcagctcgtgttagtcaggtgaggactgggtagcatcaagaaagtgtagcctggagtttgaaacagaacatgatgaaactcttctccctgttaggattttattttattttattttattttattgtactcgaagatctcaagccaggcagtcacacagtacgttgttcggtttattgacgtttccttcatcagcaccctgacaggaaaaagatgacttgatttccatttgttttccttgccaaaataatgaagactgtgatgagtgtttgtttaatatgcaccccccactttttttggaagagaagagcaaagaaagatcaagagaggaggagcacccattaccttcatggaacaggaggggcgcgggcataatagatgcggcagccgtgggaacaggaaccagggcaccagggaaccaggggaccagggaaccagggaaccaggaaaccagggaaccaggaaacagtgaaacaggaaaccagggaaccagagaactaggggaaccaggaaaccagggcaacagggaaccagggcaccagagaacaagggcaccagggtatcagggaaccagagaaccaggggaaccaggaaaccagggaaccagggaaccagggaaccagggaaccagggaaacagggaaccaggggaaccaggaaaccagggaaccagggaaccaggaaacagtgaaacaggaaaccagggaaccagagaactaggggaaccaggaaaccagggcaacagggaaccagggcaccagagaaccagggcaccagggtatcagggaaccagagaaccaggggaaccaggaaaccagggcaccagggaaccagggaaccagggcaccagggaaccaggggaaccagggaaccaggaaaccagggaaccaggaaacagtgaaacaggaaaccagggaaccagagaactaggggaaccagggaaccaggaaaccagggaaccaggaaacagtgaaacaggaaaccagggaaccagggaaccaggggaaccagggaaccaggaaaccagggaaccaggaaacagtgaaacaggaaaccagggaaccagagaactaggggaaccaggaaaccagggcaacagggaaccagggcaccagagaaccagggcaccagggtatcagggaaccagagaaccaggggaaccaggaaaccagggcaccagggaaccaggggaaccaggggaaccaggaaaccaggggaaccaggaaaccaggggacccagggaaccagggaaccaggaaaccagggaaccaggaaaacagggaaccaggaaaacagggacccaggaaaccagggaaccaggggaccagggaaccaggggaccagggaaccgggaaacagggtgctgaggaggcaggagcagggaggagggagggagggagggagagagggcgtaagggagggaggaggaaggaatgaagagagagaggaaggcagggaagagagggagagagggagagagggagacaaggaaggaagaaagaaaggagggaagaaaagtaaagaaagaaggaaggaaggtagggaaagagggagggagggaggaaagagggaaagaaggaagggatggagggagggagggaggaaggaaaaaaggaaggaagggaggaagggaggtgagggaggaggaaggaataaagagaaaggaagccagggaatgaggggagagggagggagggagaaaggaaagaaggaaggaagaaaggaagga

SEQ ID NO: 24585 - DNA, 2140 bp, Artificial sequence
  DNA replication origin
tcatttcacgtccagcagatggtgtgaaattccgggtcatcgtaaatggacaaagaatatttttaaatactccaaggaaagccatggttatgttatttttttcagtgttattggtcaccctttctgggaagaattctcactataaacgtgtaagtctcaccgacaccgacagccctgcgtgccaattcagaggttcttgtctggcgccctcacccaaagaaatgttacactctgcagcttaattcccatcccagcttcgccgaccacctcccggtggcgtctccatctgtaacttcctttcccaggctggactgcgtccctctaaaatccacagttgaagtccgagcccaggcagctcagaatgaggcttcacagttcttccctggcactcgaaggagactggtccaaggaacccctcaggtgtaaacccatggatgcccaaggcccttgtatagaatggcatggttttccatataacctgtgcgcctcctcctgtgtgctttaaatcagctctggaatacttacagtacctaatacagtgtacatgatgtgtcaatagttgttgctttgtgttaattttttatctgtattatttttattgttgttagtatgttcgatctgcagctggttgaatccataaatgcagaacctggggataaggcgggaagtgtatttgggcataggattgctgcagaggtgattcatggagatgcggtcatagtggagtaggatgggccctaattcaatataactggtgaattcatacaaagaggaaattggacacagaggagaaaaccatgtgatgtgggaggcagaggttgcaggggtgcagctacgagccagggaccaccagggacagcaggcagctccaggagctgggagaggctggggtggacacttggaggccccacaggagctgggagctgggggaggctggggcagaccctcggaggagctgggagctggggtaggctggggcagaccctcggaggagctgggagctgggagagactgggacagaccctcggaggccccacaggagcgggtcgtgcccacaccctggtcttgcacttgggggacctccggagctgggagagaatcaaacgctgctgtggaagtcactcagtttgttgttacagcacctcctacatctccttaatttatttaaatttaggctctgcttcctctcctctaaaatgtggtggttactcactatggttccccctaatatagaacatggtgtaggagatccagttttgatatcataagcatttacctttgggtaaatttcagggtccagagtgcatatgggtcgcgggggcgcagggcagacagaccctaaagtggggcttttaatgactgcaaattaggggcagattacacagaaatgtctagaataagaatggtaacttgggagtggtcctggtgttgccgtggcgatggtaaactgacacgggatgggtgggcacgtcccgtggagaggtgctcttgcctcttccctatttcagccagacctcagtccagtccagagtccgggtccccacctctggggtcgagtccggcctcctgcctctccaaggcctggcattgccaccttccacgggctcccgggggcatcccctgtctcgactgtgcatgagaatggatggctctgagtgagggagcccatggcagcttctcctttcttgttttaactgagccagttgctgaatgatgtacccaggaggccctggtctgagaacacagggacgcactaagctggctccaaagaacggcacggggagaagcagtatcggtgggaagaccccagagccggggcccctgcagcgtctggaagatgactaagagggagcgttggagatgaaggagacctagtggggttcctgtggaaggcaggcagggtgcaggtggggtgcaggcagggggcaggcagggtgcaggcagggggcaggcggggtgtgggtggggtgcaggtgaggtgcaggcagggggcaggtgaggtgcaggcggggtgcaggcaggggcagttgggatacagtcagggggcaggcgggggacaggcggagtgcaggcagtgggcaggcagggggcaggcggggtgcaggcagggggcaggcagggtgcaggcagggggcaggtg

SEQ ID NO: 24586 - DNA, 1774 bp, Artificial sequence
  DNA replication origin
ctgagaacacagggacgcactaagctggctccaaagaacggcacggggagaagcagtatcggtgggaagaccccagagccggggcccctgcagcgtctggaagatgactaagagggagcgttggagatgaaggagacctagtggggttcctgtggaaggcaggcagggtgcaggtggggtgcaggcagggggcaggcagggtgcaggcagggggcaggcggggtgtgggtggggtgcaggtgaggtgcaggcagggggcaggtgaggtgcaggcggggtgcaggcaggggcagttgggatacagtcagggggcaggcgggggacaggcggagtgcaggcagtgggcaggcagggggcaggcggggtgcaggcagggggcaggcagggtgcaggcagggggcaggtggggtgcaggcatggggcaggtggggtgcaggcagggggcaggcggggtgcaggcagggggcaggtggggtgcaggcagggggcaggcggggtgcaggcagggggcaggtggggtgcaggcagggggcaggcggggtgcaggcagggggcaggtggggtgcaggcatggggcagatggggtgcaggcagtaggcaggtggggtgcaggcagggggcaggtggggtgcaggcagggggtggttagggtgcagtcaggggcaggcggggagcagttggggtgcagtcagggggcaggcggggtgctgatatcaccgggaatggtggaggcagaggaggcccaggagacatctcagacatcgagggtggagtccttgctaaactgactttgcagggatttttggcaaaactggattttacaaggaagcgcacggatggcctaggagaaggtctaggagcctggccactgcttactcatgcagagacagtcagggccacgcctcgatgagttctccagctgggcttgacattgtgctaaattcctagcagtgccacggctggtgattagttacttgataaggaagaaagtgatgctactagctcggttcctgttgcttacagtgggtgatctgggcaggttcttgggcgcctgaggtgggcagtggtgggcgtgagcctgtggggttgagtgcagggacccccagtgtacacagaggcaccacgcagacagcacgcctgggcatgggtgtgaggcagagatatttacgccgtgtgagagtctagagtcagaaacgctggttgaaataaaagccttgcatcccagaccagcactcggacaggatgaccctcaacaagtgtctttaatgtttattacagaaaaagcaggcgtgaccaaaagtagagagaaaagtacaaaaaaattcacgcatactcatcacccagcgtcataattaccatcttatagccgcctccttcgactctactcctacctaattctgctccaaagcctcctgtgttattttaataaaatctcacacagtattgtttcatccatcaacgttatggtacgcatctctaaaagtaaaacactcattcacacacacacacagagaacctcggagatgtagtacctacactaccaccaacaatatgatcacttaaagacactgtttaagattctgttgcagttctttttgtccttagaatgtatcccagtagggatgccacagttaaattactgactgttaaagtcactggaaaaggccttctctctgtgtgtggtggtgactaactcaatacatacacatgctcatctgtttcattttgcttttgatttttaggacttttaaaacttaatcatgtttgataatta

SEQ ID NO: 24587 - DNA, 1798 bp, Artificial sequence
  DNA replication origin
atgggcccatgggctcacggactcagtggcagagctgggacttagccctggtgggctgactcaggcacctgtggtctgagctccttccccaaatacacacctgatccaaacatgtagacatataaccccagtcctcaccttcaccagcactccgtttaaacccctctgtgcagaagattctccaatgtccacagagtttaacttaattgcattgttcctgagtcagctgcacaaataaagtaaaagataaaatcaagttctgcagagctgaggcctgtaggaggccatcagagagcccagaaacaggaccaagggcactgtgcacagagctcaaaggaactgtttcactcaattaccaatgggggtttcagatacctgagatacacacttacctctccattacatacagctgtcttttggcctgcccagtgttccagcagatcctgaaggagaggaaggaagggaaaggcgaaggctggaggggaggagggggatggtgagggctggaggggaggagggggatggtgagggctggaggagggagagagatggtgagggctggaggagggagagagatggtgagagctggaggggaggagggagatggtgagggctggaagggaggagggagatggggagacctggaggggaggagggagatggtgagaactgggggcggggagagagatggtgagggctggaggggaggagggacatgggaagagatgaagagaggagggagatggggaggcctggaggggaggagggagatggggagggctggaggagaggtgggttatggtgagggctggaggggcgaagggagatggtcagggctggagaggagggagatggagagggctgaaggggggagggagggagatggtcagggctggagaggagggagatggagagggctgaaggggggagggagggagatggtcagggctggagaggagggagatggagagggctgaaggggggagggagggagatggtcagggctggagaggagggagatggagagggctgaaggggggagggagggagatggtcagggctggagaggagggagatggagagggctgaaggggggagggagggagatggtcagggctggagaggagggaagtgggggggactggaggagggagggagatggggagggctggaggggagaagggagatggtgagggctggagtggggagggagatggggagggctggaagggaggagggagggagatggtcagggttggagaggaggaaaatggagagagctgaaggggggcagggagggagatggtgagggctggagtggggagggagatggagagggctgagcaggaagcactgagctgtgctcctctcctgccttctctgtaccttgctgggtgtctgactgtggagtctcaaggcaccctagctcttctctggtggggctgatttttccatccccgttttgtgaatagggaaacaccagtgaccagtgtcaggtgggccttgttcctttcaggagcgggagaaaaagagctccttacccatgtgtcatttctcctattgcaatgttcaaagaaaaaaaggcatgttctcatctccaccgccaccagaacccattaacaggtccgttctggttgatttctggagtctggcttccaatgccattgtttttcactcttatttcaagtacatgcagtttttgagaggcggggctgatgaagtcaacattcaaatctgtacaaatctcccagtttccaggttatctgcagagaaaaaccgagtggcacgccagcgggat

SEQ ID NO: 24588 - DNA, 1006 bp, Artificial sequence
  DNA replication origin
gggcgcaagccgccaggaacacgggcccggggtcggaggaggggcatggggagaagaggaggcacccacaggcggcgagttcagagtgggagcagaggccgcgacggagcctcgacctcggtccctgaggtcccagggctgcgcctggctcggcagactccgtctagagatgcagaaggcggggctgtgagcgcctcgcccgtgaccttcggtttcttggccctgttgttagaggctttaattagaagtctcttctttccatgacacatttctaatgctctttgcccacaacacagacactcgctctgagcgccaataggaacaattcgttcatgacgggagaaccgagtgctccattctgagttcccgcagagggttctgtgcgtttccagaaagagcagatgggggcgcgggcgtgtgtttgaaggagcttcgaagagggtggccccgtggggtggggtggggggatggggcctcgtggcatgtggagggtggggtggggggatggggcctcgtggcatgtggacagtgaccccaggaagcttccagccaagaggcgtcactcacatggagccgagtgtgactgagggtgagcgggtggtgggaggctacgtcccgggggcggcaggcagagggtgaggtcctcggccatgggtgagactgaagagggccgcaggatgcgctgtcaggggctgctccggtaagtatgcaaacatggggcatgtaacatgcatccctgacggctttcctttgtgatttaaaaagcatgttttggcccggtgcagtggctcatgtctataatctcagcactttgggaggctgaggtgggcggatcacctgtggccaggagttcgagaccagcctggccaacatggcaaaaccccatctctactaaacatacaaaaattagccgggcgtggtggtgcgcgcctataatcccagctacatgggaggctgaggcaggagaatcacttgaacccaggaggcagaggctgcagtgagctga

SEQ ID NO: 24589 - DNA, 1090 bp, Artificial sequence
  DNA replication origin
ttgtcctgtcttgttttattcccactttccgggcggcagaaggggcgtctcccgtgggcgcctggctagcacctgccctgtgcgtggggagtccccggagggcgcgcggtgggctcgggtcccctccccgtccctccccggcctggccccgcgggcccaggggcgctgctgtcggcttcctcccccgcagaccccggcctgccccgtggactcgcctcactcacgcggaccccatccgccctgggcagggcctaggacgcagcgtcttgggggcagacccgggccacgccgcgacgtccctggattcccgggaggctggggctgccgcccccccgagtaaggccccgactgagcgtccggggtgtggccggtgatccccgcgtctcccccgcgcaggcggctcttcctgcaccaggtcccgggaccttgggctctcgggcatcgctgcccgcctggaagggaaggtggtcttcaggcccgcccggagggaggacgctgtttaatctgcgttttcattagtcccaacctaggctcgaaggctgcttctcacgccgagggcaggtggagggggggcttcggaataagtctctgaaagcgtggctactaggcatccatggccgcttacgcagagacccccccagacatgagccagtgcctggagccgcccgtggctgctgttggagattgccccggtgcttggcttaaaactgaaattccttccctcaaagttctggggtcagaagtcagaaatccaggcgtctcagggccccactccctccggggggccagggagggtccttcctgccccttccagcctcctgtggcgcgggagctccttggcttgctctgcatcgcgctggtctctgcctcgtttttctcgcggccacactgtgctgtgctttcacttcccgtgtctcttagaaggacacctggcgttggatgcggggcccgccctaatctaggacaatctcctttccaggtccttagctacatctgcagagaagccttccccagacacggtctccttcttagggtctggggcttaggaccactgcccaaccccctcctctagtttaatcctgatcacacc

SEQ ID NO: 24590 - DNA, 1309 bp, Artificial sequence
  DNA replication origin
aagccagaggctgcggagggcagggtggtggggggcgggggaagtgaggagatgtcctttacggggtgcagagtttcaattttgggaaatgaaagagttctagagatcttacacgacagtgtgcatgtacttgacaccgtggcactggaccctgaaaaatggttaaaatggtaaattttaatatatgcgttttttaccataattaaaaaaaaaacccagaagtctagacgaccaactcacaggatactgtttatgatgtcattgcaaccatctcctggaaacaagtggaacccgcggactcaggctaggggttcaaatctcctctcagggctgggggttcaaatctcctcacagtaaaggcaaagctcacatgttgacagcctgtcaggggaggtgaggggcacgcgtcgtgaacaacagaaaagactttttacataagtctttttgctcagaagttagaggaatttaaacattttttttcttgcaccattgattcagaaggcagaggggctactaggccaattttgccgcgttcttcagagcgacagacaaggaagaggcaggagctgagacctcaccgtggtaacagctatttcccttctggtttacttcctggctgattacccagggtcgagtccctttcagagctggtaacgagacacatcgctggtactttcccaaatctgtttaccatcttttggactccgtaatgtgaggacgaccctccagagcagcttgcccgtacaacattttctcttggttcgcagccagtagtggcagagtctgattgttcttcagattacgggattaccaactcatccctggagagttaattcagtaagatttttgcttatgtcagaatcctaggtacacgcagggagcgtcatcttgtgctttttctaacctgaggctaagaaatgctgtctcgtctgcacattggcgtttttgggatagcagagggaaaaggcagagaagaactgtctgagcctcactgagccctgatgcagggatctcgtcactagaagcagagagatgagtgtgcgcgcttgttctagcccgtattttggaagtctgagcactaagagttagacaaaggaaaggcatgcttcgcaggggcctccatggccatggaggtcacattgtctctgaattgtcaacgagagaaatccctagaaaaacgtgcacaaacgaaggatgaaaacgatggtctggcatggggtgaggaggtgattccttcgccagcccatgtgcgaactccccctgctttcaggacagggacgtggtctccacggagagaagcatgggcgtg

SEQ ID NO: 24591 - DNA, 750 bp, Artificial sequence
  DNA replication origin
accactggacctgagtggggtgtgtctccattctgtgcccattggctcctccctactcctcgccaagggagagaccagcccctcccatcacaggctccttggagggctggaatccagctcagcttagttcagcaaaagaccatgaaccctactgtgtccaggtacaggatcgaggtgagtctaaacagaacagaccccagcgttgagacagtgacagtgagcctctgtgaacacctgcgggtccccagcccagcttctcactgtgaaatcttgaggggcagcgggaaagtaggggccgaccttgctccaagtccctaacagggagcccgcttccctgagggtgaaggcagaggggctcagcttgtgcgggaccagggcggggagagcccggggagggagggcgggcgtggcgggcagggcacggggagcggaccttgagcggccgcctgccgccccctccatggggggtgcaaggggtggaagctgtgagtgtggacacgagtgaagcggacgcaggcagggcagcctcaggctcctcgaagggggctttctggtcagagtgggaggggtctgacatctgtggttctgtggtcgcacagcctttacccagtattgaaaagtaatgttgcctcgtggggaaacggaaatggccagcaagggtgggttcacctcagtcctcctcacccgttcacctcagtctccgcacccccatcctgctctgttcacctcagtctcctcacccccaccctg

SEQ ID NO: 24592 - DNA, 898 bp, Artificial sequence
  DNA replication origin
gcagaatcgaagtccattgaggagctggaagaagacaggtcccttctctaaagcactgtgattagctcaagctcgttggatttgcacttttggagaagatgtgttcagtgagggctgtggaaggctaggcaggctggacgcccggctagaggccaagcctgcagacggcagaaaggcgaatgcaccttccagatggccgcctttcctgaagaactgcctggggttgcatttgtggaagccagccatccttcatcaacaaagcaacaaatatcgattgttcaatttacacattttcattttcataattttatttgtacacatttgaacaccctgaggtttgtaaacatttagtaacttatccaaaggtcacaggactatccacgcttcaaatccgggcccctgtcctggacttgcaggggtgcaggatgaagaaaccccagcctgctgtgagggacctgaggctgctgggagagctgagaagtgtgtgcggttgcaatgacgaagcgtgcacggtggctgggagagctgggaggtgtgtgcggttgtgatgatgaagtgtgcacggtggctgggagagctgggaggtgtgtgcggttgtgatgatgaagtgtgcacggtggctgggagagctgggaggtgtgtgcggttgtgatgatgaagtgtgcacggtggctgggagagctgggaggtgtgtgcggttgtgatgatgaagtgtgcacggtggctgggagagctgggaggtgtgtgcggttgtgatgatgaagtgtgcacggtggctgggagagctgggaggtgtgtgcggttgtgatgaagtgtgcacggtggctgggagagctgggaggtgtgtgcggttgtgatgatgaagtgtgcacggtcgctgggagagctgggaggtgtg

SEQ ID NO: 24593 - DNA, 759 bp, Artificial sequence
  DNA replication origin
ttatccctcccggtaccacattctaatcacttgcgattagatcggcactcaggcctctggacacccgagcatgacttctgggacaagctgtgtcttctcccccaacctttaaaaatgtgaaccatgattcaggtggtgaataaaagctggcacggaattaagcggtggatggatgcgacatctttatcgctgtgtcctgattgtggtgcaggacggtcctcgcggtgccgtggctgtttctgtggcggtcgtcggcgcactgtggtggtgactgtggctcacatgcacccttggaggccctcggaggtggcaccacatctgcggacacagcagccccggtggcctcaccctctcactgaggattcccgccatcacctggcgacatcccctgaagattctttttaagaagtctgtgccctacacggcaacattaggctgtaggcgtcacgctcctgtgattgtgaagtcaagcgaccgcggcgtcaggcggggctccgtgctgtgagtgtggccaggcttgcagctgtcagtgctggggagaagttcaggggtccgggcatctgggcggtccttctctgatgccacatcctgggaatggaactccctgaatggaggggcttctctccgttttctcggggcagttttgtgatcggcattggccttgtgttccttccttccctcactgatgtgcacccgacgcctgcatgtggactgacggcctggggtcaggacgctgctgggggtcaggggtgtgtggtg

SEQ ID NO: 24594 - DNA, 1296 bp, Artificial sequence
  DNA replication origin
cccctttgctttcagttttttgtagcatcagatccaacagttaaaacagatcgactgtggcacgacaagtatactttgaggaaatcgatgattccttcgtttatgacgatggatcagtctaggaaggtaggattagaagagatttttgtgattttgatgttttatggctatgtatacttagattatgtgacaaaaccaattttcagttaaaatttcatgcgttttgagattgttaacgttctggagatgaagtaagtgcatgttaattgaatacatcagtatagtatgtgttcaatatatctttgagttactagaattcgctccatactgtagcagatgctcttgttagttttcaatcaatagccaatttgtagcttacgaatatttgtagatttgggcagtcgttttaaatttacataaaagtaatcatagaatgtttttctttttaggtccttttgataggaaaatcaataaatttcttgcaccaagtttgtcatgatcagactcccactacaaagatgatagctgtgaccaagtctgcagagtcaccccaggacggtatgatgatgctggtggggtggtgatgatggcaatggtgtgatgttgatgatgatgtgaggatggtgatactcatggtaacagtgatgttgatgacgtagtgattgtgatggtgtgatgatggggatgatggtgatgtgatgataatgatgttggggatgggtggtgatgatggcgatgatgaatgcgtggtggtggcagtgatggtggtgatgatgttgatggtgatgatgatgggggtaatgatggtggtgtgatgatggtgatgtgatgatgttggggatggatgatggggatgtgatgatggtgtgctggtggtagtgatgatggtgatgatgatgatggtgatgatgtggtgatggtgtgattatggtgatgtgatgatgttggggatgggtggtgatgatggcatggtggtggcagtgatggtggtgatgttgatggtgatgatggtgatggtgtgatgatagtgataatgatggggatgggtggcgacggtgatgatggcgtggtagcggcagtgatggtggtgatgatgttgatggtgatgatggtggtaatgatggtgatggtgtgatgatagtgatgatggggatgggtggtgatgacagcgatgatgatggcatggtggtggcagtgatggtgttgatgatgttgatggtgatgatggtggtgatgatggtgatggtgtaatgatagtgataatgatggggatgggtggtgatgatggtggtgatg

SEQ ID NO: 24595 - DNA, 1369 bp, Artificial sequence
  DNA replication origin
taaaatacagagaaaatggtgagacagagctggccatggggagctggcattgcccgattccaaacgctcgaagggggccctgcccagctgctgctgcctcctccagaaggttgaggaggggccctgctgggacggggcctgccaacaggggacactcccagctgcgtgattccccaggcagcacggtgaggcaggatttgggaacactgccgaagctggagatgggaatcctggctatggctgtctggacagccctgggtgggcactgccgatggcacagtgcatggttgggagggagctgctgctgcttctcctcctgttggagcctgacagggggcagctaataggagccgtggcatctccactgtccagcccttctttgtggctaagcagcatgtggtcttgtccataggttgattattgggcagtaattactgccaatgaaatctccaaaaattattgaatcacagaacaactgtgtactataagctcagcgtagcacaggacttatggcagcgtagctggtgggtaggagggtggctggtgagtaggagcgtgactgatggagaagagcatggctggtggggaggagtgtggtgctgtagtgtggctggtgggcaggaacgtggccggtgggtaagaatgtggctggtgagtaggcacttggtgtggcagtgtggctagtgggtaagaacatggctggtgattaggcatgtggtgtggcagtgtggctggtggggaggagcatggctggtgggtaagaacgtggctgggagtaggagcatggccggtggttgggaatgtggctagtgaggaggagtgtgggtggtgggtaagaatgtgtggctggtgagtaggcgagtagtgtggcagtgtggctggtgagtaggagcatggctggtggggaggagtgtgctgtggcagcgtggctgctgagtaggagcatggctgatggggaagagcgtggctggtggggaggagcgtggctggtggggaggagtgtgctgtggcagtgtggctgctgagtaggagcatggctgatggggaagagcgtggctggtggggaggagcgtggctggtggggaggagtgtgctgtggcagcgtggctgctgagtaggcatcacactttgagctttgaagcgaggcagcccagggttctggtttgggcttctcctgtaatggtcacgtcatcttgcccaggttatcttctgttggccacaagtttcttcctgcatagagtggggtagtgattacctctaggattgtgaaggtggggagagaatgcgtataaagatgctgcttcccagtctagtactgttttctgttctgtttgccagtctagtgaattgctcgatgaccagccaccac

SEQ ID NO: 24596 - DNA, 955 bp, Artificial sequence
  DNA replication origin
gttaaaatggcgccctggtggccggcggcgcccgcgccttagcctgtcaggagcagggagcttgcggggcgcaggaagggcgcgggccgcggtccctgcgcgtgcggcggcagtggcggctctgcccggaccaccgtgcacggctccgggcgaggatggcgaccccggaccagaagtcgccgaacgttctgctgcagaacctgtgctgcaggatcctgggcaggagcgaaggtagagtggccgggcgacgcgaagcccgcagacccgtcccgggggctgctccctgcgcgtgcagccctaatacgttccggggctggaggaacgaggatgcagggccgggcagagggctgggggacgggccgaggacgtggggcccggacgagggagcggagggctggggttcgagggtcagggagccggggaggacagcggagggctgggggccaggaccggggcggagggagtggagaggccaaggccggggcgagaacgccggggcgggaggcgggagggcggagccgagccggagcgggctgagtcaccgctcactccgctcgcgggtccgtcagtgaggacgggaggaatgccagctcgccaatttatcccccttctctggtgtcacgcgccgtgggagggcgcctctgcgcgcctttgggttcatcctgtggggtggagagagcggctgcgccgcggaggtggatgcggggtgctggagtgtcacatcatcgtcccttttcgttaggaaagtttaacaggcttgagtattatgggaagagggtgttaacgactgtaactgccgtgttttcctactgtttaaagggttgaaggttggatttgatataaaactattctgggaaagttcacatggcgaatattgttactaataagcaaaactaatcctatacggtaggtaaaaccattttgtagtcgaggtactttgaaagaaatggtacag

SEQ ID NO: 24597 - DNA, 1132 bp, Artificial sequence
  DNA replication origin
agatatgtttatggccaccctgtttgctatactacctgctaactggcttatcttgcttttttgagtgtctttgaatggcctggaatcttgataatggctaatgattttggcaatagtatggcttgccataattctgaaacaaggcacccatttttttgtgggctgactagaaaaggttaaaaatcctttgtctccatagcattccaaagttatgagctactctataagcatacctgctattggtataaagattagcagttattccttttgccaactgacaggctctaattaatgctattaactttgcttgttgagatgattgctcctggaagacaagcactttctatttctttgggcaaagacgctatggcataaccagtgtaataccttccagctgcatctttaagtaagagccatctgtaaaccaaataacatcagcgttagtgaggggggttcttgcatgtctgtcctaggagagagctggtcaggtaagatgatgcagtcatgcagcgtttcagctgaaggtgggggagagggtggcaggatttagatgacatctggacattgtagtatgcggctgagagaataacttcatgagaagccagttactaactgatcgtgttgagtgtgatgcaagtttagaagcgtttccacagaatgcgtatcgaaggcagtgaggggtgatcgcatccttggtggtttggttgctcttgcagagctgtgatggttgttgcatcatgcaaggagacagtcctttagctgtagggtctagttgttgactgtaataccctacaagtctgctttgtctccatgtttttgagtcagaacgacaacaaacgttttacttgccaacaattctgcaacctgagctggacccaggcccgacgggctttgcagacagtcacgtgtgtggctggcctcagctgggatgttgggatagctgggttgtcctccctcttccatttcataggatctcgggatctctttccatcatttttccttaggaagttggccttttaacatggtagctcacggctcccaagcgtgcacccatgtgtaagctttaacgattgcactgaagttggcttggtgtaattgtctgcttatcgatctttttctcggcaggtttcct

SEQ ID NO: 24598 - DNA, 1107 bp, Artificial sequence
  DNA replication origin
agttaaggtgaggtcacactgaagtagggtgagcttggatgcaaccaccagtgagtgtccttaaaggaaggaaattgggccgggtgcagtgcctgtaatcccagcactttgggaggccaaggcaggtggatcacctgagttaaggagttcgagaccagcctggccaacatggtgaaaccccatctctactaaaaatacaaaacttagcctggtgtggtggcaggcgcctgtgatcccagctactgaggaggctgaggcacaagaatggcttaaacccaggaagcggaggttgcagtgagctgagatggtgccaccgcattccagcctgggtgacagagcgagagtccatatcaaaaaaaaaagaagaaggaaatctgaacacagacacacacacacacacacacacacacacacacacacacacacacacacgggagaccagcaagtgacgttcaaggcagaggctggagcgatgtgtccaccaaccagaggacaccgaggatggcgaggatggcgaggacagtgaggatggtgaggatggcgaggacaccgaggacggcgaggacaccgaggacggcgaggacggcgaggacggcgaggatggcgaggatggcgaggacactgaggatggcgaggatggcgaggacggtgaggacggcgaggacggcgaggatggcgaggacacagaggacggtgagcatggcgaggacggcgaggatggcgaggacggcgaggacggcgaggacggcgaggacaccgaggatggcgaggacggcgaggacggtgaggacggcgaggatggcgaggatggcaaggatggctggcagccagcaggggctgggagaggggtgaagggtcttccccagagcctgccaagggggcatgtttctgcctacactttgaccttgggcattcggtccccagaacggtgagagaacgcacttctgttgtgtatactatgcagtgtgtgacactttgttacggcagtcctaggacatgaactcaggaggcgtcagtgactggccagggtgtcctttccaagaaggttttaaagcaggacagtgtctcagctcaggaggaaacatctaaaatggtgaaggcgtcgga

SEQ ID NO: 24599 - DNA, 1951 bp, Artificial sequence
  DNA replication origin
gtggcttctgcatcacaggcttcccctgtgattctcctccagtgtctactgctgagttaagagaagaaatgtttctcaattctttcttcccaggtttaatgtttcttcctgatgtttgcagtttaccagctgccctggtcagatgaagcaagtatcacggcactaataaaagggttgtgctttatccttaaaaatataattacaagtcccacatattttctttttcagcctttaccaagtaagtaagctttccccgtatgcccaccattcgatgctccagttcttccctagtggcagatgtaacccaggtatcatctgtggtctccctgccctttgaaattgctgagaaaactgggctcaaccccctttctatcttgctgtttccttctccagattcagaaaaactctgacagctgagtaaagcaaggcagcttgtgtatgtgggtgcgagaggaagcgtgtgagtgaatgcaggcctgtgtgcaagtgcactcatgagtgtgtgtgtaaggatgtgtgtgtccgtgtgtgtaagggtgtgtgtgtaaggatgtgtgtgtccatgtgtgtgtaaggatgtgtgtccgtgtgcataaggatgtgtgtgtccattgtgagtgtgtgggagtgcgtaaggatatgtgtgtccatgtgagtgtgcgggagtgtgtaaggatgtgtgtgcatgtgtgagtgtgcgggagtgtgtaagaatgtgtgtccatgtgagtgtgtgggagtgtaaggatgtgtgtgtccatgtgtgagtgtgtgggaggcataaggatatgtgtgtccctgtttgagtgtctgggagtgcataaggatgtgtgtgtccatgtgagtgtgtgggagtgtgtaaggctgtgtgtgtccatgtgtgtgtgtgggagtgtgtaaggatgtgtgtgcctgtgtgtgggagtgtgtaaggatgtgtgtctatgtgtgagtctgggagtgtgtaaggctgtgtgtgtccatgtgtgagtgtgcgggagtgcgtaaggatgtgtgtgtccatgtgtgagtgtgcgggagtgtgtaaggatgtgtgtccatgtgtgagtgtgcgggagtgcgtaaggatgtgtatgtccgtgtgtgtgtgggagtgcataagaatgtgtgtgtgtccatgtgtgagtgtgcaggagtgcataaggctgtgtgtgtttccatgtgtgggtgtgcgggagtgtgtaaagatgtgtgtgtccgtgtgtgtgggagtgtaaggatgtgtgtgtccatgtgtgagtgtgtgggagtgcataaggatatgtgtgtccctgtgtgtctgggagtgcataaagatgtgtgtgtccatgtgagtgtgtgggagtgtgtaaggatgtgtgtccgtgtgtgtgggaataaggatgtgtgtgcaggagtgtgtaaggatgtctgtgtccatgtgtgagtgtgtgggagtaaggatatgtgtgtgtccatgtgtgagtgtgcgggagtgcataaggatgtgtatgtccatgtgtgagtgtgcgggagtgcataaggatgtgtatgtccatgtgtgagtgtgcgggagtgcataaggatgtgtatgtccgtgtgtgtgtgtgggagtgcataaggatgtgtgtgtgtccatgtgtgagtgtgcaggagtgcataaggctgtgtgtgtgtccatgtgtgggtttgtgggagtgtataaggatgtgtgtgtccgtgtgagtgtgtgggagcacgtgaggatgtgtgtgtccgtgtgtgagtgtgtgggagcacgtgaggatgtctgtgtccgtgtgtgtgtaaggatgtgtctgcgtctatgtgtgagtgtgtgggagtgcatgaggatgtgtgtatgtccagagctgtccagacctctgttctgggggggaaagtgctgagatcagaagcaaatcaagcaggatagagacactaagagcaaaggaaaggaaagcccagaccacag

SEQ ID NO: 24600 - DNA, 938 bp, Artificial sequence
  DNA replication origin
cttgagattagggattggtgatgactcttaacgagcatgctgccttcaagcatctgtttaacaaagcacatcttgcaccgcccttaagccatttaaccctgagtggacacagcacatgtttcagagagcacagggttgggggtaaggtcacagatcaacaggatcccacggcagaagaatttttcttagtacagaacaaaatggagtctcctatgtctacttctttctacacagacacagtaacaatctgatctctctttcttttccccacatttcccccttttctattcgacaaaaccgccatcgtcatcatggcccgttctcaatgagctgttgggtacacctcccagacggggtggcggccgggcagaggggctcctcacttcccagacggggaggccgggcggaggggctcctcacttctgggacagggtggccgggcagagacactcctcacctcccagacggggtggcagttgggcagagacactcctcagatcccagacggggtcgcggccgggcagagacgctcctcacttcccagacggggtggcggccgggcagaggctgcaatctcggcactttgggaggccaaggcaggcggctgggaggtggaggttgtagcgagccgagatcacgccactgcactccagcctgggcaccattgagcactgagtgaacgagactccgtctgcaatcccggcacttcgggaggccgaggcggcagatcactcgcggtcaggagctggagaccggcccggccaacacggcgaaatcccgtctccaccaaaaatacaaaaaccagtcaggcgtggcggcggcgcctgcaatcccaggcactcggcaggctgaggcaggagaatcaggcagggaggttgccgtgagccgagatggcggcagtacagtccagcctcggctcagcatcagagggagactgt

SEQ ID NO: 24601 - DNA, 1809 bp, Artificial sequence
  DNA replication origin
ctcatgcccggcccggccggcgaatgctgggtccgcggccccgcgcgtcggcagctgctccactggcggcaaggctgctgctcggggccgcgcgcgcgcgctctggcgccttctctctccccgtcggtccgcccgctcggttgggctcggctggagcaccccggccgcggcggagcctgcgctctgctcctcccgagtctcctcctcccctgcccgccgccctctggagcctccgggccccgctggctcctgcccctgctccgggcgcgcacgtcaccggcgcaagtgagcatgcgccccgcggccgcagcccccgccggccccgcgcccacacccgcgctcgcacccgcgcgccggccctgccccctcgcgcctccgcccgggccccagaccctgggggcagagggcagagggcagaggtcagaggccgcggggaggaacccccctgttgcttccgcctcccggggcgcaggcgctgggcgcggcggggaagggactcggcactggggaaacccggagtttcagccagggtcccagggcttccttcccgggttcctgccggaaaacttttctcctccgcccggaagcctcgatggggcagtgagatcgcggggcgaggtgggagtgtgggagggggccgcgggcagagagcgggagtccggctgggtgggagatctcctgagccgaagctgggtctcgccccagcgtggcgccaccgacccgcaggcttttcctgctctgcagatggagagacacagggacgctcctcaggtggctgccctgggctgccagcctgtcagtgggaggggagggtgcagacaagaggcccctgtttccgaaacccctctgtccccaaagctgcgacagcagaagacacttaggcggcctgaggggttggtgaaccacagaggagctcagcttcgcctggtctccagctcccggtggcggtggcgtgtccttaatgctgctggctttgaactggactgagaactatttaccacacaaacaccaccatttcaatcccggagaatgcctgttttccctagggtgacctggccggggtaacaaacacttgttctctaattccacggtcagccttgacttaattgaggtacttgatttccaacttcctgtcttgctgccacagataatcactgatgaaaccaaacaggcaacaccttttggtggcctgtggagagcgctgccccgtctgggtcttaggaaggcaattgaatatgaatgttctcccgagtgcttgtggaaaagagatggtgttggccactttttagacgaagagaaatgagtactagtgaacactaatcatagtgactaaacagtaaacggctcccatttgttgtcggctaaagcactgattcttcattttccatcccagcctgtcctgctctggcctgccctgtgctcaggaagctggcggtccccctcagtggatcttcacccacagggacaacctgctgcagaccgggtaggagggaggcaggggcctcttcccctctccttcctggcctggccccacacccaccagtgttggtttcactctgtggctacgattcttcctgggtgccctttccattgcacaactcctctaggctctacgaacagaacttctccccgcccccaagcctcttagggtgagacatgttgtcggtctgccattgttgctggtccctaaatagcagcaccctttgaaggatccttgaaccatgaccacaccgcaacaaagagtccttcatcaaactcgcttccaaatcccctcccaagaacaccttcagtttcctgcaagaaccctga

SEQ ID NO: 24602 - DNA, 1786 bp, Artificial sequence
  DNA replication origin
ctagtaccccggagcccatgggcgcgccgagccgggcgcgggggcgctgaacggcggagcgggagcggccggaggagccatggactgcagcctcgtgcggacgctcgtgcacagatacgtgagtgctcccggcgcgggctgggggacccggggaccagacagacgcgggccggccccgcagcccggaccctgtggccggtccagccccggggtcccgggaggtctccgatgtctgggactcggaccgcccccggggacgagcgggatgctggggaggggcctcggagttgacaccctggggcttccgacggggtctaggtgggcacagcgcggggccccagccccgggcggccacctgctccctggccgcggccgcctggcgcccccttcccgcccgcagcgccctgggggtccctcggagaggctggctggggttcgagctgtcccggcggaccgggcgcccggagggagccaacttcgaccccgccggggcccgggtctggggaggaaccttcagatgcggcttccgcgcagccgtgtctgtaagattaagggattgggaggaagcgttacacttctgcagaaaaaggtagcaattgtgtttgttctttaacacccctgggggattcagaagcggagtttggaatctttttattttttaccttaaagtaaccaattagatcagaagtccggggtcttcttgggttcctctggaatttgccccttcagtgataagcaagtgaagagctcaggagggaagactcggaaggggaaaagttgattttgttttacaccagaggaggggaaaccggaatccctggcgttaggtgtaaaaaggggtgtgtggccgggcgcggtggctcacgcctgtaatcccagcacttttggaggccgaggcgggcggatcacgaggtcaggagtttgagaccagccggaccgacatggtgaaaccccgtctctgctaaaaaatacgaaaattagccgggcgtggtggtaggcgcctgggatcccagctactcaggaggctgaggcaggagaatcgcttgaacccgggaggcggtggttgcaatgagccgagatcgagccactgcactccaacctgggtgacagagcgagactctgtatcaaaaaaaaaaaaaaaaaagggtgtgtgtgtgtgtgtgtgtgtgtaggagaggaagaaaactgtcccaagcacagcgtttcctgccactgtcttgcacaagaggcttcattgttccatagaggctggcggtcactggtcaatcacaggttcgagaagtcgcatgcaccgggtttgatactagagagggcagtattatgggaactttgttctttcccggcataggaattacctcaggcagcctttcatatttatgagccttctttaaataggagaccttggccaaagatagataggtttcttttcagtgggggatgccagatcaatgctttcccccggatttatttattaaccaaaaacctcggagagtcaaggagacttgagtgcaccttacatcgtttcctgatctcggggaagccttaggaaggtcagcctgacttacttaagtggagagaactcacccctggtgattctgatgattccgatgctagatcttgaaaggcttggctccaggagccttgtgttactccctcactggtgctcgagcccccagttcaaatcctaatgtgagtggtaaacctgtgtttcactgtggtaacgttatagaagacccaatcacagtgactataggtaacctgcagtgtaagagaaatgctttattgg

SEQ ID NO: 24603 - DNA, 1141 bp, Artificial sequence
  DNA replication origin
tttgctgtattattacgcttatggcatcacattttcttttaatctaagcggtaaatattctttagtgaacttttccagcatatacattattggataacgtctcgggaatacgagttgtgggataatattatttctgtttttctcattccacctgtgttttttgcagtgtattcatctggctacctcacccatatttacacacagagccattcatctctatcattttaagttcatgtctatggtattaaactaatttgactttttccagaaacagtcatgatctgttttcttgtaattgcgttatcgtccactatgtaggactaaattatatttccttttgctacagaaaaaagagtctgggattgaatactcatatttcctcatggtttccttatgtgacttactttattaaaaaggatagataaatagaccctgttccttcttggtgttcacatagtcagaattcctgggacaaagaaagctttccagctccttctgatgtgtgagggtggctaaaagataaagaagtccttggaaaacattgctgtaggcattttattgtggattaaccctggagagatagcagaggcaaatgagtgagagaacagatgaaggttaggccagggtagccaggtactccacactgtgtgttactggtggtttgggtgtttggatggaccggagccatgcagagatactttgtatttgtaaatggtgccgtgtttgtataccatgaggagtgcttgtgcttatggggtagtgtatgctccctggggtgatgtatgtgctctggggggcgtggggaaaagcgtgtgtgccgtggggtagtgtatgtgctgtggggtagtgtatgctccctagggtgatgtatgtgctgtcgggggcgtgaggtggtgtatgctctctggggtgatgtatgagctgtgggtacggggagaggggacggggtggagagtgtgtgtgccgtggggtggtgtatgtgctgtgggagccatggggtagcgtgtgtgccgtggactggcgtatgtgttgtggagtagtgtatgtgctatggggtagcatatgagccatggggtagtgcatgtgccatgaggtagtttgacctccatgacgtaacactttaaaagcacttctaggccag

SEQ ID NO: 24604 - DNA, 1180 bp, Artificial sequence
  DNA replication origin
ctggggtctcggtgttggcccagcagctgttttctgcgtggcttttctgtgccaggaacgttctaggcacacgggtgacactggaacacggaaatgaacacggctgggtggcgtgtagcaggcagtggacgcctcttcctgggacaaggatgttgatggagagggaagaaaggccactaggagcccaccgtggccctggggaaggcagaggccagcaccggagcccaccgaggggcggccagcccgcaggacgccacaggaagcagcccacggaaggccccagggctcccagaggctgctgcgtgggccgcccctcaggctggacacgcaggcacccacctggccaggccctcacctcgtccaccccgccacccactgcgcgcaagcactgcgccccacgcatcctccacccgcctcgcccacccgccagcctgcgcacgcactgcccccaaccccactctctttttctcagcaccgtcgcctgcggggcaccccaacactcactgtggtggtttcctgttcgcctcccccattccaagggggccccagagggatgggacttgggtctctgtccttcccggctcactggcgtgtctctgagcacacaggggcgctcgctaactgcagctgggatcacaaaagccccacggagtcgctgaggtggagggcaagggcagagaggggcccgagggaggtgggcctgggggtgatggagaccttggtaagggaaccccccgcggtaggcacagaagagacaggagaaggaaggacgggccagctacgcggggtaacctaagaaaaacggtagctggaagccaaaaatgagcacggtgaccgctgggaaatatggggtctaaagcggtgccaacagcgggacggcaagcagcagggcagacagtgtcactcagagagggagagagacggggccgcagcacacacgggactggacttcggcagaacgggtcactcgctccaaccggaggaggcaagcgcagaggcagaaaggctgctgggcgtggcaggggcgttcccaccagtgaccaccgctctccccgggagagcagggcaaggtcacccactctccacgtgaagaggagtgcggggagaaggttccggaaagcccaaggtgagaggcggtctccttaagaagcccagaagcatggacggtgatgcagccgca

SEQ ID NO: 24605 - DNA, 3006 bp, Artificial sequence
  DNA replication origin
cccggccccatcgacgtgcccaagacatgggtgagagtcaggacctggctcagtgcaaacccagccccgagccaggctctggccctgcatgaagaccggcacagtggaaggtggggaacgccccagtcccaggaggcctccttgccccctctgtcccggctcccgtcctcccagaggcggaggggatgcctaccaggagactagaggtggtggcccccacaggcccccagagccaccacagaccactgggttggtggttccttctgagtgtctgggccacgtgaagtgaaaaactaggaagtgaatctggggagacgccaggccacacgcacctaggtgggcattcccacgggttcccacagctgtcggagcagagctcaccaggaggggcagagagagatgcgacttgctaaagcccccacttcccaccagatggggaatgcctggggcctagggacttggccccaccacggtggatgcttctcatgggagctctggcaaaaggtctatcacagggtgctgtggctcccagcatctgcagaaggccagaggaccaggctcagaagacggagcagccaccgggaactccactgagaatgagctccaagcctctccaattctcaaagtccaggcaggagccacccccaggcccccacagagccagcctgcccagagctgctggggagagaaagcaaagcaaaacccaattccacacccagccactaccatccctcagagagcccttagtgggagaaggggaaaggaatgggatcggatttctaaggagaaggtgccctcaaggccatacactctgtctctctggcaaacaccttccccggcccccagaggtgtgagcaacagggctccaagcccaagccacttgggaatgatcacagagcaacacagaaacaggtgcgaattcgtcctgcaaaatagcacaactgctgaaaaggcacaggttagggttgtctttggaagaagattaatctgtaaagaattcccagagaaagtaagattttaatcaactgtaaatacagaggggcaaccctctggggaggaggggcagtgtgaccaggtggggggatcagccaggtagggaggatcagccaggtggggaggatcaggcaggtgggggggggcctcagccaagtgaagggtggggatcggccaggtgcaggggatgggccaggtacggggatgggccaggtgtgggggatgggccaggtgtggggaggtgggccaggtgtggggaggtgggccaggtgtggggaggtgggccaggtgtggggggatcggccaggtgtggggaggtgggccaggtgtaggggattggccaggtaccggggatgggccaggacactacaaagccaagagtgcacatgtcaccccaggttggtgcctctctgtagaagcaggcaggtgacaacacagtcttctgcaatcgagtttggggcacctgagggggctagtccttttgagaagctttcggtcaggaaaagctgccgcaggaaacaacccaagtgtccttcaacaggtgaatgtgtgagcaaaacgtggtatatccatgcaaaggaacggcggagtcatacaggctacaacacagggacccttgtggactttgtgctgagtgaaatgagctggtcacaaaaggacaaatcctgtgtgagtcactcatttgagctgacaaatacctagagacagaaagttgaatggggctgccagggtctacgggaagggggaaggaggagagaatttaagcgggacggagtttcagtttgggaagaagcggaagttctgcgggggggcagtggtgatggtgacacaaggtgaacgtgctaaagcactgaactgtgcacataaatctagacaagatgttgcatgtttgttatgtgtgttttcccatgatcttaaaagcctgatccacagtggcctcactgacctgccagaagccgaggtggcaaggggctctcggtgctctcagcaccccacccgctccagcccaaggtcgagaagcttcaccttcacattctcttgcgtctccataacagtctcatcacgcagaacgcgtattccatcacagacacacaaagaaggcagcagagggggctggagccagaagccagacgggcctccaggtcaggagtggagacgccacctctcctcagccctggggaggcccagagctgggcagggttcggggagtgaggagggagaaagggaaggggaagggctgtccttcaggtctcctccacaccgctccctgacgagccagccacacacataggaaagtcaccgtaaacatttccctgcagagacgtgggttcccacagtggggtcctgtggctgcagcggaacaccccagaccaggagatggagaacacagctggagcggcagcgggaggtgctaatcggggaaggaaaatcggtgctaattgggaaggaaaagagaaaacaaggggaaagagagcgggtgcaagacagctgggaggagtggaattccagtagacgtggggccaggaaaggaagccgggtgggaggagtggaagggagttgtgggatcaggggtgcggggagtggaagggaggctgggaccaggggtcgggggagtggaagggaggcgtgggatcaggggtcgggggagtgaaagggaggtgtgggatcaggggtgggggggagtggaagggagactggggccaggaatggaagctgggtgggaagggaggcgtgggatctggggtgggaagaatggaagggaggctgggatcaggggtgggaggagtggaagggaggctggggccaggaatggaagctacaccctctgaactgctactccccatcctaaataggttgcctgcctgcgtcctgacagcatcctcggcctttttcccctcaactggacacatgcaaaccgatgtctggtttcattttatccttatcaacagttagctgtctgtcatcagaagattaaacggccagaatgtgatcttcccgcaaattaaaccgcga

SEQ ID NO: 24606 - DNA, 1477 bp, Artificial sequence
  DNA replication origin
gagcaaaaagaaggagaccacataggagccaggatgtgagggcgaccaggaggttcaccaggccgtcagcaccgcagccgctggaggcgccaagtgcaggccgtggcagacaaggggaggccggcacactgcccaccatgggagctgctgggtcattttaacttaaatatcctggggccacataaccctgcaatctgaaggacgctacagtttgcaaaaaccaaactctgtatcagtgaagggtccaactcacaatatttgaggagatttattctgagccaaatatgagtgaccatggcctgtcacacagtcctcaggaggtcctaagaacaggtgccaaagtggtcggggcacagcttggttttatacattttagggagacatgagacatcaatcattgtacaatggttttgcccagaaatgcaggacagctgtaagtgggccggcggggggtagggggaccggggaggagggtgggcccggggagaggggggcggccaggggagagggtttccaggttataggtagatttaaattttttctaatggacagttggttgaaagacttatcagtagaaaggaatgtctgggttggggtaaagaggttgtggagacagggctttatcagggtagcgagtttcagggagaatgaatagattgtaaatgtttctcagtggacttcaggtctgtgccagcgtttgtgctggtcagcctttcctgaattccaaaaggaaggagggggtgaggaggcatccgagtcccatcagggccggaagcaggttttcaggataactttggagtgcccttggcggagaggagggctccattcagatgggtgagggcccttcaaatttacttttggtttacatacgtaaaatactttagaaagatttattctgagacaatatgagtggccgtggcttggaaaaacacaaacctgagaaccatcgaggaagtggtccaaggtggtggggctggttggatgttacacatttcagggaggcaggagtcataggaaagacgtaaatcaatgagtggaaggtcgacgtggctcagccggaaaggcaggatgacttgaagtaaagtaggcggattcagaaatgctttacttttttctttttaagtattttttttcagagattctttaatttgcagttgattaaaggagtaaggttctatctaaaacttggagtcaacagaaaggaatgtttaagataaggaggccctgtcagagtcagccacagggtcaaagagccctgtttagcaggtctgacgcccgcaggcgggacttaaccctcatctgtaatggcactgggccctgtttataatttggcatcttagtgccacagagtctggttttttttcttcgatcctgtgagcgtgggttgaggtaaagaggttgtggagaccagggctttatcacgcagatgatgtcttattggtgtcttattgccacagagttccccacctccccccgc

SEQ ID NO: 24607 - DNA, 958 bp, Artificial sequence
  DNA replication origin
cagccagtgagtgtgtggctacagctgtggctgcaaagtccccatccctggagttccttggacaggagaagcttctatttgtggaggatgactaaggacaacgtccctgagggtggcctgttggttacaggaagctgaggtttggaacagatccctgcgtgcaggtgagaacgatagaaatgggtgaaggaggctgagagagactcaggagcccctccccggcagctgaggtgacgagggtgcccctgaaggacgccctcagagcaaggtgctggggagggggcgggaagcggtggccctggggcctgctcaccgcacctctgtgccaagcaagctttgtgcttttagttttcaccgactctgcttctgtaaacgcagctggtgtctagggagtcacaatcggtccttgaaaagaggaggcttctctgaagggaatagtgtgtgtcaccaggaggtgtatgccggggatggggcacggcgtgcgtgcagggagaggggccagggggcacagtgtgcatgcaaagagaaggcccagggggcactgcatgcgtgcagggagaggagccagggaggaagcacgtgcgtgcagggagaggggccagagggcacagtctgtgtgcagggagaggggctgggggcacagcgtgcatgcaaagagaaggcctggggggcactgcatgcgtgcagggagaggggctgtggggaaacacagtctgcatgcagggagaggggccatggggcaccatctgtgtgcagggagaatggccgggggcagttgataggtgctgggggacaggcctaaaggcagttgtacttccgagagcttttcccggcagattcccagatctgcaggtgaatgaggtgaaggagcccaaaggggccgtctggatggcagctcctgaccttctccatctgtgctgctgccatgtcctctctaatgctccagccgggggtgctg

SEQ ID NO: 24608 - DNA, 1117 bp, Artificial sequence
  DNA replication origin
aggatgtaggggtgttgggggccactgtgggaaggtggggaggatgtgggggcgttgggggcccctgtgggaaggtggggagatgtgggggtgttgggggcccctgtgggaaggtggggagggtgtgggagtgctgggagcccccgtggaaaggtggggaggatgtaggggtatcgggggcccctgtaggaaggtagggaggatgtgggggtgttgggggcccctgtgggaaggtggggagatgtgggggtgttgggggcccctgtgggaaggtggggagatgtgggggtgttgggggcccctgtgggaaggtggggaggatgtgggggcgttgggggcccctgtgggaaggtggggaggatgtgggggcgttgggggcccctgtgggaaggtggggaggatgtgggggcgttgggggcccctgtgggaaggtggggagatgtgggggtgttgggggcccctgtgggaaggtggggagggtgtgggagtgctgggagcccccgtggaaaggtggggaggatgtaggggtatcgggggcccctgtgggaaggtagggaggatgtgggggtgctgttgggagcctggctatttgcctaaccacagaatatctgtgactgtctgatcatctgcacataattggcttttgaaaggggtgtgtgactcttttactctgaagagaggacattcttctgatacccagtctcacaataaaaagttgctacctttactttccccacttggccaatgatatcagtagccacactgcaaactctgaagtctctcagagctctagtctaggactccagagcgtgagtgcgtctgtggtggtgggcttgacctgaggctcatccttgtcacctgctcggtggcagtgcctgcgtgcagacccctcgcagcactcaggtgtggcccgtggacttgtggtttcgctgctggctggggaaccccctccggctcctcacttccccaccaagcgctggtcacagaaacgcccttctctggtcactgctctctggcctggcttggtggtggctttggtggcagccccgtcacccctgggatccgtgtcctcctgtttctttcgtttctcctgaaggttttccaagtgcctgtttgc

SEQ ID NO: 24609 - DNA, 1748 bp, Artificial sequence
  DNA replication origin
caggcggctggtttgtgcctgggcgcaggtgctcccgacacacagagctccctctgcacctgaagcatccctggtccgcgaagccacgtggcactctgccaggcggctggtttgtgcctgggtgcagggaaacgccgtgctacggcgcggtgacggcagggtgggagaaacaccacagcagcctgagcggcacgcgtaggaagctccatgcccagctcctggcggggcagagccctgagacccccagacactgagggccctcgggaagtctactggggaccaaatccagagggccccagagtgggcaggcagtggtccccagggtggtggtgggagggacatggggaggggacgctctcgggctgacgacccggatccaaggcctggagcttggacgaggactcaggagtaggaacaggggtccgccttgccttccttcctggatgccaggaagcactaactcctgagacaccaacagggaagctgtgggaacatggctacacttgacgctcatgtggctgaggtggctgccaacctgcagccagagaggatggcacctggtgacacaggtgttgccaatacatgcagcaaaccagtgccgagcaaaggctggagggcatgggggaggacggaggctgaggctggaggggacaggagagtagggaggctgaggctggggggggatgagaaagtggggaggctgaggctggaggggacaggagagtagggaggctgaggctggggggggatgagagaatggggaggctgaggctggaggggacaggagagtaaggaggctgaggcaggggggatgagagaatggggaggctgaggctggaaggcacgggagagtggggaggctgagtctggagggcacgggagagtggggaggctgaggctggagggcacgggagagtggggaggctgaggctggagggcacgggagagtggggaggctgaggctggagggcacgggagagtggggaggctgaggctggacggcacgggagagtggggaggctgaggctgggggggatgggagagtggggaggctgaggctggagggcacgggagagtggggaggctgaggctggagggcacgggagtgagcaggctgaggctgggagttggaccctggaggatctctgcagaactgcagaggtgtgaccacagagtctcagttgcttagcatagaaaagcagggcccgggggttaaactacccaatcgatgtcagagccgtttcccgactcccatggtttccagccaacgctgttgtttcatcagatacagttcagaatgagaactgtggtccaaatgacataatgatgcattcttgaacaacagcacattttttactagaaaattcatgtttcatggctcacaactcatgccaagagcatgtgaatggcttaactttcccactgtctcagcttgtgaattccactgtaagacacaggacaccttcagcctgaagacttggtgaggaacagccttggaataaaaaaacccagaggacagagcaaaagttaatctacaatgagcaactgaagaccgtgcacacacaggtgacataaccgaacacacaggatcctgtccccaagacagctgggttgtgtcgcaggtgcagccgtggttggtggctgtcccctctgggaccaagaagggcttactgccatttggagaagagaaagggctatagaaccacagtttgagcccatggtggggggtctttcactgtgtctcacag

SEQ ID NO: 24610 - DNA, 1773 bp, Artificial sequence
  DNA replication origin
ggcatagtggctcacacctgtagttccaacactttgggaggccaaggtggatggatcacctgaggtcagcagttcgagaccagcctggccaacatggcaaaaccccatctttactaaaaacacaaaaagtagccgggcatggtggcacgcgcctgtaatcccagctacttgggaggctgaggcacgagaatcgcttgaacccgggaggtggaggttgcagtgagccaagatcgcaccactgcactccagcctgggcgacagagcgagactgtctcaaaaaaattttaagaagtaactttcttcagtagagacataaagaacaccttaatctgaatgactttcttcggtgacgatataaacaacaccttggtctgtggcccgcatgctgccatctgggaaatacatccatggctcccttacctaggacccagggctgtggcgtccccacattcttcctctccactcacactgtgaggtgtggctttgtcttcctgagcagtgtgaggtgtggctttgtcttcctgagcagtgtgagctgtggctttgtctcccgaacggtgtgaggtgtggctttgtcttcctgagcggtgtgaggtgtggctttgtcttcctgagcggtgtgaggtgtggctttgtcttcctgagcggtgtgaggtgtggctttgtcttcctgagcggtgtgaggtgtggctttgtcttctggagcggtgtgaggtgtggctttgtcttcctgagtggtgtgaggtgtggctttgtctccttaatggtgtgaggtgtggctttgtcttcctgaacggtgtgaggtgtggctttgtcttcctgagtggtgtgaggtgtggctttgtcttcctgagcggtgtgaggtgtggctttgtcttcctgagtggtgtgaggtgtggctttgtctccttaatggtgtgaggtgtggctttgtcttcctgagcggtgtgaggtgtggctttgtcttcctgaacagtgtgaggtgtggctttgtcttcctgagcggtgtgaggtgtggctttgtcttcctgagcggtgtgaggtgtggctttgtcttcctgagcggtgtgaggtgtggctttgtcttcctgagccgtgttttgcaggcattgagtcgtcattgctgggtcttgcgtttggtttagtttctcgtcaccccccggctctctgtcctgcccatcacgatcattctcactgctcagatgacaccgttaactgcccttttttttttccttttagcttgcattggacacacactactggacttggatcaaccattttgtcatctgggggtcgctgctgttctacgttgtcttttcgcttctctggggaggagtgatctggtaaatatctgataagtagctgataatctgataaatatcatgtggttgttatttttttatcaagggttgaagacacattttccgtgcggccctgttggttggggcaagtgtttgttgaatggctgctgtgtgctgggtgtcgtggggtcctgggatacagtcgggggcaagacaccggggggttcctgctccggtgacttgcatcttccgggggagaaagacgctaactgataacagcttgtgacgagttatacggaggaacagaccaggattccgcaccaggggacccatgtcagattgaaaggccagaggtgacttttcagaaacagtcatttgaaacctggaagaagagcgccatcatcacagcaagtcccagctggtaaccgcctcccacaacgaggcactggccaggcattcgacaggtcctgtc

SEQ ID NO: 24611 - DNA, 1771 bp, Artificial sequence
  DNA replication origin
gaggggacgtggggacgaggtgacaggacaaggggacatgaggacgaggtgacggggcaaggggatgtggggacgaggtgacgggatgaggggacgtggggatgggacgaggggacgtggggacgcagagcccggcgggcggagctgcagtgcgggaggcgggcagaggtgcggtgctgcctgttgggatccacccgtgtcctgtgtgccacccccgtcagcccgagacaggttctggtgcacgaacaccaccttggtgttgacccctccacggggacagaggatgtctgctcatcacagccaagtatctgtctcccggccctcgcacccgcgaaatcaacattctcccgtaacagtggactgacggctccgtgccctggcgagtggctgatggacatcctggcacttctgcggcagggctggaagctgccggcgtggccttgtcctcccacgtggcactgccttctccacgaggcggccggtgatggggagaccgaaactcagccagccccaacacacagggcaggcgggcttggacgtaaccgcagggaaaccactcccagatgagcagggtacggcggtgcatccgcagggatgatggtatccgagtgacccggcccttcccacagcatccggattggagggttgttgagtaaaggacgcaccaccatggctccacctcaccctatggagggcatgggtggtggccgggcaagcaggaaacagcagcatgtggcatccacatgtgggccaccatgggtccctggacggctcttctctcccagtgacagcaaaggccaatgatggcaggtgggtgaagacacaggcctgggggaatggcctctgcatgacagcgcgcagggtgggccagcagaatgtccctcctgcgttgagccgaatgcccagaggccactggtgtggctcaacaaccacagtgctgggtccaggcggccagggtgccatgctcgagggcaaggcctgtgacccccctccttgcctgctgggggccaggaagaggcacgtgcacagtctccacaggcttaggaccatccatcacacgagcattcccacacgggacctagggcagctgtgacttgggatggaactgcagtggtgatgggaaccgccgaggatgggtgggggctccgtggacaccttctccttccaggccgcgagtgtcacctgctgagagtgggagctgtaccaggcggccgagggacaggtgctctggtagcctgggctctgcagagaggcaagaggggtgaattctgagtcgcggtcccgaggctgtgcgcacccattctgctgagagaacgagacacatggtcagtctcagggatacccacggggctgcctggggtgacctgagccactctgggatgcactcactaccatcgcctcctgcaggaactgctagactcaactcaggacacaccctcgtcctgagggcaggccgggcgggatccaccccaccagagaagccatatggaggcgaggggtctctgtctaggaatgagggcctctccttttcagtaccaacagagtgaccgtccccctgtcccaccatcccagggaagaacccaggggccccagggatacaggccatggacgggaaacctacgagcttcctccctgtagctggcttcctgtgcagtgagctcgaacgccataccggtacccagagacccttgaacaaaaggcgaactcactgccccagggaaggcaggccccaccccacagggaccgggttgatttagtactggacgtgccc

SEQ ID NO: 24612 - DNA, 822 bp, Artificial sequence
  DNA replication origin
attaaatgatatttaattcagcctgtctgacagtctgacagaatgtgctatgttaccagagggtcttatgccaacatgagaaagggggcgttggtctccaaaaagacaaacaaacaaaaaacaggtaagaaacaccatgtgggcccactctgacctttttaactgaggcacctttgagaaggaaagcctgttccactccgattctcaaagctcctgaacgcattgctagtgacaatcctgtctccgtggctaattatgtgaagaaacgttactgggttgagggagttcccttgggtttaatttcctgtccctctcaaatcatccctcctccttccctgagcccagcctccccctttcctgcccatgctggcaggttctggcccttcctggacccctctcctgtcccctgcacaggtctctgcagggtttctgcacgctggggagggcaggttccccagtggagccactccctgcgggtctgagtggggcccggggtctctgcacggtcaccgatgctgctgctgctccagggagcgggcttgcaggagcaaggatccagtccctgaacgcacgtgctccccccgggagaaattctgcagccaggcttggtccacgcaccgtcctcccggcccacacaccctcctcccggacctcagtctgtctctgtgtatcacatgcctgttcccagtgttctgacctcaggtgggcacggcgcggtggactgcacttcccgctgcttgcttggttaatgtttacctccctcctgccagagctttgttttcatttcattcaaacaggcttcctctttttacccactaaatg

SEQ ID NO: 24613 - DNA, 1139 bp, Artificial sequence
  DNA replication origin
cagccaggctaagggggacgcgggggagacggccccgctccgggagcgaccgcgacgcttcctgcccggctccgccccgcgccccctcccgtcacccccgcgccccctccaggcccccgccccgcgcgcacctgccgcccgtggtgctgccctcccgcgtccgccgagctccgcgccccgcaggtgtccgcgcgtcctgacgcctcctcccagggctgcgccgacactgggcggggagagagaaggggcggggcggggcgggggcgggccggagggggaggggcggagaggggcccgggggcgggggcggggcgggggccagagcccagagcggagggggaagggcggcgaggcggggcgatgggaacagcctgcccctctccccctctccccctctcccacccattgctctcctcacccatccccctcttccccctcctccccgccgtgcccgaggcgggggagggggcgacagggggaggtgtgaccggggcgggcagcggggcggggtcgtgcctaatgggtgcagttcctgccacctggggtcaccctcggccccttccagaggggagagggctggacaaggggacgggtcggaggtcttctggggcccaggcctcacttccttgggctcacatgtaaaacggggtcccacctgcccccctggatccgagccagctggcagggaagttgtgtccactctgaagccccacagggacccagctgggatcgccctagctgggatcgccctagctggacccttccctgcagcttcccaggagaaagctggggcacgtgggacagggctggggccgctggaatgtggcccagctgagctgaccagcctgtgacatcagagaagtcactaacaaacccttctggcctgtgttctcatctgtgcagccgtcccagagcgtcctggggtccacgggttagtgcacacagagctcccagcatgccaaagagcagacagattaccagttaactaggttagcagcagaaatcagggctgcccctgttacgtatcagaagggctagggtttcccatgtttaggtcctagggtaaaaagggacaagaacccacctcactcctcagtactggagtgggtaaggagccgctggtctgtgggtcgcggtac

SEQ ID NO: 24614 - DNA, 1058 bp, Artificial sequence
  DNA replication origin
ggagagggggagaggggcaggctgttcccatcgccccgcctcgccgcccttccccctccgctctgggctctggcccccgccccgcccccgcccccgggcccctctccgcccctccccctccggcccgcccccgccccgccccgccccttctctctccccgcccagtgtcggcgcagccctgggaggaggcgtcaggacgcgcggacacctgcggggcgcggagctcggcggacgcgggagggcagcaccacgggcggcaggtgcgcgcggggcgggggcctggagggggcgcgggggtgacgggagggggcgcggggcggagccgggcaggaagcgtcgcggtcgctcccggagcggggccgtctcccccgcgtcccccttagcctggctggggacaggcgctgggacccggctcgcggtcagggcggcctgggatcggcccccgcggcccctgcccagcgtcctgcgctgggaacttcgaggcgcctggggggctcgaaatggcagtggaggagaccccgcgagtgtccaggcgcccagggcccctccgcattgtcacgggggccctcacaccccggcaggtgtcaccccctggacgggcttctgccgacgatcccttgggcacctcgtaggaccaccccgggagctctgcccaccccttcctgccagagcgatggggggccagtgtccaggacagcgcctagggacagggctggagggaagggtagcctggggtccggctggggtcgggcccacacctggtggctggggacagtgctggaggggagggtagcctggggtcgggcccacatctgcatctttcatctgcctgcttgtcccgggccagggtccccttggccacaggtccccaaacagacagcgggaaggccgtggagcgcgggctgggcggactcctcctgggagctccttttgacctggcttggttgccgtgggccctctgtggctcttctcccagctgtgggcccctggccttgcttcagacccttatataggatgctgcgggagggctgggccagagggggctctggagcccaggc

SEQ ID NO: 24615 - DNA, 1990 bp, Artificial sequence
  DNA replication origin
ggacagggctggagggaagggtagcctggggtccggctggggtcgggcccacacctggtggctggggacagtgctggaggggagggtagcctggggtcgggcccacatctgcatctttcatctgcctgcttgtcccgggccagggtccccttggccacaggtccccaaacagacagcgggaaggccgtggagcgcgggctgggcggactcctcctgggagctccttttgacctggcttggttgccgtgggccctctgtggctcttctcccagctgtgggcccctggccttgcttcagacccttatataggatgctgcgggagggctgggccagagggggctctggagcccaggcaggctcactccctggagactcccgcccaggggcgtggcccgcatgaccctcacagagccgggaccccgaaggggttaaggtggcccgggccgcccaggcaggatgtgccggcatggctgtaggaggccccaggatgtgtggccacggggaccgacacggctgaccacaaaaatagaaatgcagtccccagggctgcaggctgcagagtgtcggtgtggtcccctccctggcaagcaggagacccacatggccaggtgggtgctggatgctgggactgaggaggagcctctagcccccaggactcctaacatgcgaactgtggagcgaggggtccagggctggtcgtgagaacggagtgcacacccaggcattgcctgagttctgcagcctccgtgggtagctggggggacgggaccccgggagcctgtggagccctcagtcccaggggggcagtgaggactctggggcaagctgacagctaggtgggcaggagacccgggttttaaggctccctcaggactctccttcagctcttccccatcctgtggggccggctccgccctcccaggtcccaacttcaccgggctgtgcaggggcccaggcgtccccgatttcaccgggctgtgcagcggtcccggtgtccccgatttcaccgggctgtgtaggggcccaggtgtccgtggctcaaacttccacattgggtatccccaagaaccccccacacgtctgtgaaatgaggggggcccctcccctgggggcctgacagaattgctgtgaaacctgagattgtgggaaactgctggaatccgtgaagggtctgcaacgttagacggtgggcttaggaacctgcagactttggcagggaccccgtggcaccacctcccccatcactgtgctgacttcagggcctgcaggcacagccaggtgcagaggggaaggggcacagtcatcatcctcaccaaggtgatggattcgctgcaagatgaaaggtctgtgtgcagcttcacatctgtccttctctggaattcaggtctcttcaccgcccccccgaggcctcctcctgaggtttccctttacctggtccccaaatgggtggtcccagtcacctctgctgtggagatgcacccttgctcacatcgaggaccccagggaagactttgactggaatctgaacgtttattttggaaaggcagcctcttggtgactccaggtcacttcagaagagaggccccccctgtctttacagccatgtaatttgcatttgtaacgtggtgggagaaggcctgggattggcagagggcatggaggagatgagtcgtgtagatagactggccaggaacgccaccggttggcagccttttgtcaccagttgagatgatttgggatcatttttggaggctcctggagcagccacagttagcactgtgaccagaaggatggagttgtaaggttctgggtgcagctcacctttctgttcagcccaccccgcttcactgtctgcaatggctcccaaggacgctgtgagactctcatgtggcaggtgcacggctctgggctgcatcttggtgacagcatccctctggcatcccaatgcaggttcctgagtcccaccacagagcttcccgcctcacagatg

SEQ ID NO: 24616 - DNA, 1340 bp, Artificial sequence
  DNA replication origin
gtctgttctcttcaaaatcccaagaccggcctgaccacaaggcacccaacaggcgccgccacccttggagcgtctgctttcccctgggcaaaaccttgagaagccgtcagcagtgaaggccgaaggctggaccgagagccaggccccctgggctttgtggtcctgggctgagcgaggcgcctcgcacacacacacacacaattaaatctgtctacagatgcagacacggtcacaggcggctagaactcggcccagccccacggaagcaccaagtcagcacggctttgtgactcgtttgctcggtcctcgtttatgacgcaggtgccgaggacacaaatgtcagggaagctcctgtccccgaggagctcggatcccagggagagccagcttctccgcaggttcagcagccaccaccaagcgggggcagacccggcatggggggagggggccctgcccggtgctccctgggagggggcacagggtggggtggtgggatggggtggtggtgggtgcagggcctgaagcaggtggcgagaagtcaggcaggataggggcagaagctcagggccaagagtggcacctggggcctgagagcagctgatgctgaccggtggggagggatcccgaggagagaagcgggaggcagaggtgtgatggacaaggagagtctggagatgatggcagctggggactcagggacttggggggcagggaggccgtctgggcttctagcctgaatagctggtgaagtgacacaggcagccgaatagcaaatggaggaggggaggcaagtgctgacggtcccaggggtgggagtaccaccggggagggaagggcgctggggcaggaggagcagggcctgcatggccgtgggcgttacccctgctgctgccgtgtctggcaggatgggcctgagggaggctgcgagtggccagtggtgaaaggctggacctggactcagttccggcacctgccgagctcggttcacggggatggtgcctttacccagcagcagcgtgggcagcctcctccgcacacaggttccaagcgaacaaaacaaacacgcgcccacctcacgccccgcaaccagctcgggtagagcgcggagaggcccagaggccgtggagcacctgtccgtgctgggggaagctgctgaggactgggtggactttacgtcggccacacatgcgggggaagcagtgagctggcggtcacacagtgtgtctcatcccaggcactgggcactaaagataggaaggtccccgccgctgccacacggcttccactcacgacaccgtgtcatccactgtaaatcgccagtattaataataacgtggagt

SEQ ID NO: 24617 - DNA, 836 bp, Artificial sequence
  DNA replication origin
aggagagggtcccacccagagggaggaaggaaggcacgaagggccaggtgggccaccggagggggctgtgtttaccctgctgaactgaggatttcagcagagaagggcccgcactcaccttcgagaggtcaccgcttgctgttctgcgagacggcggtggggagggacaggcgcagaggcagcgcgacctcaaagtgggagacagggcggtagcctggctggattctggatctgttctggaggcacagccaacaggatttcccgggaggtcggatacgggcatgagtgaaaacacagatgaggacgatggggtttctggccaaaggaactggacggagaggtgcagtgaactatggtggatggagctgcagtggatgacgcggctctgggagacctgtaggatgcgggtggaggctctgcggaggcagggcggtgcagtgcccgggggaggggtccggactggagctgtggactaggaatcatcacactcaggtgggtcacaagccaggggactgagatcgccgaggggctgagtacagatggagagatcaggcaggtttagacaggagaaacgacagcacctttgagttgacaggaatccggggagaactcagacttggcgatgagggaggatgactgccctggagtgggaagagggatggggacacagaccagtgtggggagagcgtgcaggaccctcagaggtccggcaggaaggcagggatgtggtgcagagcagaggttcagggacaggcaggggacaggcagggatgctcttccaactggttcagctctgtcaagcaggaatccagtccacccattagaagtgaggatgg

SEQ ID NO: 24618 - DNA, 1771 bp, Artificial sequence
  DNA replication origin
cgctcttcccggcgcggtgccttccagggaggctgcgcctgcagcaccgcagccagagccgagactccgcgcctttcaaggaggaggccccgtgcaggcgcccaggcgcagaggaggcgcggggggcgggacctgccggccagtcccttacccggggacagacggggaaggcgggagcgctcgcagttccctcctggagggaccacaccgccgggagcccgagcagcctgcggtggctcggctcgggccggcggagatctgggagcattttctggaagcctccacagacttcaggcggaccggaaggacctggcgggaggcgtagtaggcggggtgaggggatctcggtggcagcggggacagcgcggccccgagaactgagaactgagagggagacgctctcgggcctctcagaccagcattgaggagctgagccctgcgggccaggggcgcagagagggtcccgggccgtgaggggagggtcccgggtgaggggagggtcccgggccttgaggggaggggaggatcctaggccgtgaggggagggtccctggctgtggggggagcgtcttggctgagggaagggttccggaccatgagggaagggtcccgggccgtgaggggaggggaagatcctaggccgtgaagggagggtcctggactatgaagggaggctcctgggctgtgaggggagagtcccgggccgtgagaggagggtcctgggctgtgaggggagggtcccgggccatgaagggagggtcccgggtgaagagcaagctcatgaccctcatttactgggaatccattgctctggccccgtcatgagtggggttcgcagactgggccaatccctacagcgtatgtgtgctctggtgtctcggggcagcacagacgttgttactgctccatctggcctgggtgaacacctgggtctctctgtggagttgggggatgccgcctgctcaagggtcgcgttcctagtatgcgttccaggaatgctatgcaccaccagtgctaagccgcagaagagctgtcaatctgtcagtcctgtcccgctaaacctgaacttttttttttttttttttttgagacggagtctcgctctgtcgcccaggctggagtgcagtggcgcaacctcggctcacggctaattttttgtatttttagtagagatggggtttcactgtgttagccaggatggtctcgatctcctgacctcgtgatccgcccgcctcggcctcccaaagtgctgggattacaggcgtgagccaccgcgcccggccaaacctgaacttctgaaagagccagcctcttagggaaggccctccaccctacttgcctgggctttctctgcaagctctgtgcagaagggagcaaggtctgcctgatgccaccaccgtgggcccagtgttcatggtgtcctaatggaagctttgaaatcactttgtgttagtcctggctcttaagaaaatcgatgcaatgccaattaggcaccactattttttttttttttttgtataaaacatttgaggaagatggtgcagggtgggccctgaagggagtggggtcctgcctggagctgctgtttaggctcagtcttggtgctctatatacatatctaccattgcagtgtcatacagaatgttccattgcctttttgattttaaaaagtgtttatcacacaggggagttttagggcagtgcaactattctgcatgatccatgacattatgcacttctcaagacctaaaactgcataacaggaagcatg

SEQ ID NO: 24619 - DNA, 1104 bp, Artificial sequence
  DNA replication origin
gcacttgtgcggcacccgcggggctcccaggggacctcggcggtgacacgaatttctaggtgaccttggcggtgacacgaatttctaggtgacctgtgtgatacactaggtgacctagtgacacaggtgacacttccaggtgaccgcggcggtgacccgcggggctcccaggtgacctcgttggtgagccccggggctccccgacgaccgcggcggtgacacgcggggctcccaggtgaccccggcggtgcactcacaggactcccaggtgacccgcggtggtgacacaccggggcgggcgcgcgccgcttccgcttccgccgagccgccccccgccccccgcggcgcagcgcgcgcccccctcccggtggcgcggaaccaatcctgggcagggaggcggcggctggaggctgaaagcgctgccgtggccccctccccgcctccgccgcgccccctccgcactcgcacggccccacccgcaggcgccccccgtgcggaggaagcggatctgccaggatcatttttgttgtgtcggaggatgaggttttggctgaggactgaagagatggccttggaagaaatggtgcagagattaaatgcggtttccaagcacacgggtaggaggagctgctggccgtcagtgatctgtgcttaagcttgacatcatgggctgaaatgtggggaaatgcgtctgatttttgtaagccgccctcgtgttcctttctagccgtggtagctgtgacatggggggcactggttggcagctggtgtgttttcagaggctgtcggcgatcgtatgctgcccgggatagtcaaaatgactgcacgttggtgacactggctctctcagggttgctgggtctgcatgcggagccatttgtgtgtctgaagtctgcccatcaacctgcctgtccgcagccctcgcaatggagaatgcattgcgaatggagaatgatctgagccaagggctttcagagcttggggtttcagagccaggggtagggatggtgaagctacctggaagctcgttttgaggatgaaaaaacctggactaatcaggtggttcttttcttcattaaatgcaatttaaacctaagacagatg

SEQ ID NO: 24620 - DNA, 1246 bp, Artificial sequence
  DNA replication origin
gcccaccctcagagtttctgattcaggaagtctggggtagggtctgataattgacatttcttaagttcttgatgaagttcttcaggaatcaaacttggggaactactgtggtagaagaatctttaaatctagccccaccttttccattagttgacctaatactaactcttgtcatagacagatgatgatagatggataatgcatggataaatgagtggatggatggatgaatgggtagatgggtgggtgggtggatggatgggtgggtggatgaatgtaggggtggatgaatggatgtgtgggtgggtggatggatggatggatggatgatgatggatggatggatgtgtaagtgggtggatggatggatggatggatggatggatggataaatgagttagtagatagtggataagtgggtggatggatgggtgggtggatgaatgtaagggtggatgagtgggtgtgtgggtggatggatggatggatgatgatggatggatggatgtgtgagtggatggatggatgtgtgggtggatggatggataaatagataaatggaggatgatgaatgggtagatggatggatgagtggatgcttggacggatgagtggatggatggatggatgaatgagttggtagatagatggatgagtggatatatgtatgtaaggtagatggaggggtaggtggatgggtgtatggatggatggatgactggatgactggatagatgaatgggtgggtggatggatggagggagggagggatggatgcatagatgagtggatgcatggagtggaggagtggatggatggatggaaggtggatggatggatgaatggatggatggatggatgagcaaaagctgtgtgctgcctcctgtccttaagctcttcctgggaagggcctgtggcctgagcaatgggctgagggacacagcagcacggaggggctttgggggatgagggggcttcccaggaccaccacacaggcacagctgttcggcaccccccagttgcaggtctcagaggaaaagctctggggggacgcgcccaggaggcaggggcacgcatttctgtgtggaattgaagagctctcagtggagtaggtgcggctccctggcaaaatgccacctgcttattagccagcccagcggtttctgacggacgccttagcactcccctctcacgcctctgccttcggcctcagtgattggcgtctcctcaaggagccatgatttct

SEQ ID NO: 24621 - DNA, 804 bp, Artificial sequence
  DNA replication origin
ctagtccctgaaggtctaattctggagtgcaccctctggtattcagctggtattgatgatcaacaaatgtgattttccccagaacgtctgcaaaatgagtggaacccctaaaatccatgcactttccacacccaaggggccaggcttatgaaaagcagcagaacagcagcatgccaggggtgcaaaagtccaagcaaactcatccaatgaggttggccacgccgggggcttcatggactcagaggctggccatgccaggggctttgcagactcagaggttggccacgccgggggcccttgcagacctggaagtcagccacgcaaggggctttgcagactcagaggttagccatgcccgggtgcctttgcggaactggtgcccctagttctgagggggagtttgcaccactatagaaggtggtcttacccttagggaagccaaatgcagggaactccaaacgtaagactaaaggaggaggaagccagcaggtgatgtggagcggcaggtgatgaaatgccagataaggaagtgccgggcaatgaggcaccaggtgaggaagcgccaggatgggagctgatgaaacagtgggggatggggtcagagggggcagtggaagagtcaggagcggctttgaagacggagatcaggaagacgctggaaggcggccaccatcccaaggcacaggtgcagcgtgaaaaggggccagtgactcaggaggcggtggccaacacaagtccccatgaaactcggaacacacctcgcaggcatccccttctcaggtgctgcctggcatcactcactcc

SEQ ID NO: 24622 - DNA, 781 bp, Artificial sequence
  DNA replication origin
ctttggaaagaggtctaggggcctagtgggctccaaggagggcagagaagccccacgtactcctagtaatggaggccgtgcccacctcgtgaaggggatttctgagctggggccgaaggcacaggatgtggtggcgtaggaagagcagtgatggaggctttctccaagatgttggccgtgccgtggagaggactggacgctgggccaagggtggccgcatccatggggcctggagcctgcggactgcaggaagccacagagtgggtggcagcaggggacctagggatggagcgagcccaggctccgtggcaggtggccgggggcatctccccaaggctctgcccctctgcccatcaggtgggaggtgcggcagatggggagtctggggggcctcctgcggaggagggtgtgcgccacggaaggctgctgagccctcattgtgtctggtgggaggcgggcgtcacagctgtgccgagaggcctgctctcgcgtgctgtgggaggggggagacgtggtgagggagagctgggcagggaccatgccgcttaccctcaggacagggtgagctgtcccagcagtggctgagcccgtgctgcataagggacttggcgtgatgtctgtgatcgtgtctgtggttggaagtgacgtctgggctggagctgacacccagctggagctgtgacaaaggacaggatgatcagggaaattgcagagaacaagggcgaggatggaagcttgaggggcgccgaggtgtggagggggtgtcggtggaagaaccctc

SEQ ID NO: 24623 - DNA, 810 bp, Artificial sequence
  DNA replication origin
agtaaggtggcttttaagccagagattaccacgcgctgccgcggagggagaggtagcgcggggcatggggaggccacagagaggctgtactgacagaggctgggggaggatctggtgatggagacacgatggcacagccccggtgaagccacgtgatgtcttcgtgtgaacatggtggcgggggagcgccgggcacacaacatggtgggtgttcctgggcagaggcttggtgggcagtaggggccgacctgagggctctggggtcaacaccggtccaggaatttgactgttagccacagagaccgccaggagggcttttaggagatatgtgaaatgagactcagctttcagcaaggaaatcagggagcaggtggcagtcgggagggactgcatggaaacaagtggcttaggaccaccctagtcgttcaggcgtgggatgaggctccaggatcgcagccacagaagtggcagtgggaggggagggggagggtgcctggagagaggtttcagggcaggagggacggggcttagggatgtttcttggagagagggagcgagaagtcatcgtcaatggccccacgatgtcaggcttggaatttggggtggacggtggtgccatcagtcaagagagacttcagagggagaggttaggtgatcccatcccattttagcaccagaagtggctgtgtgagctgggaatggggtcctgggtgaagatgacaccacagataccttggagatctgcctccagttaagagacgtgtttgcctcctgggtgggtaggattttcccctcccttagatcggaagg

SEQ ID NO: 24624 - DNA, 1289 bp, Artificial sequence
  DNA replication origin
ggatgggactttggcggagtgtggggcccctgcagggagggtctagacaagcaacaccaggaacctgaagcctccctggccggggctcagctgtcgccaggatcgcaacagttaagctgcctgcagcaggataagtgagccgatgctgctccttaatcagggacatcgaatcggaggccctgggaggagcagccggctggctgccctgcagaggccaggtctgcccagcaaacccaggaaggtgtggcgtccccgcttcgcggccaagatggtgctggtgctgcgccatcctttgtgtgcccgggaagggcgttccgggagccgggtcgggggctcctgactcgcactgggcagcatgacggtgcgccggctgtcactgctgtgccgggacctctgggcgctgtggctgctgctgaaggccggcgcaggtgcgtggggcgcgggcgggtcctcgcctccccggaaggtgttgtggggcgacagtgcggggacgccgggcgggggtggacgttctgggcccagccctgtcctcagaggctgctggggcagaagcccggggctgggggatgccggggatggatgttggggtgggtgcctccgagaccagaggagccctgttccttggcagggaaggtgtgcacgggccttgcccgatggatggtttagggccatggccctggggtccctggtgagcagtggggccgcctctgcccttggcctgtgagggactgtctgtgctggtcccagaaggctgggatcacctttccactggctcctttgttcgaggtttttcatagacaggctatgtggacaaatgagggcagcgcccacgtctggctggtggaggggctgcggctcctccttggaggggacgcctggccactgctgtccccacaatggggccacccgtggtgcaaggcgtgacaagctgccctctctaggtaagcaggacttgggaggcccctggccaagcctgtggacccggctgggcggcctctgtggtctcaggtttgggtgtgtttggtctggtcagggctcaggggctgctggtccacactggccccatcctgacaattggagctttggggcaaggtccctggagaaggggtcacgtggggaggaaacagcctgggttttgttgatgcttttctaagaatggagtactcgttttcaagagatttgtcctaattatattttccagcgggtacttatgccaagtattgatgaataattcataaaataagcatctttgtgaattttagtgaatcagaccttaactatcaacggca

SEQ ID NO: 24625 - DNA, 876 bp, Artificial sequence
  DNA replication origin
gggaggaaacagcctgggttttgttgatgcttttctaagaatggagtactcgttttcaagagatttgtcctaattatattttccagcgggtacttatgccaagtattgatgaataattcataaaataagcatctttgtgaattttagtgaatcagaccttaactatcaacggcaatgaatgaacatctaaagtttccaattttaaagtaaagaactggctgggtacagcagttcacgcctgtaatcccagcactttgggaggccaaggctagaggatcgcttgagcccaggagtttgagatcagcctgggcaacataccaagacctcatctgttaaaaaaaaaaaaaaaaaattaataggctgggtgtggtggcgtgtgcctgtagtcccagccacctggggggctgagaggggagaatcatttgagcccaggaggtcaaggctacaataaggtatgattgcacaactgtactctagcctgggtgagggcgtgagcaggtgcaggtggccaccccaggttatggggttggctgtggagcactggggaaggctccagggtaagcaggggtaggtggcccccgtgggttttggggttggctttggggcaccatggaaggcttcggggtgagtaggggcaggtggccccctgggttatggggttggctgtggagtaccgtggaaggctttggggtgagtaggggcaggtgaccccctgggttatggggttggctgtggagcaccgtggaaggctctgggttgagtaggggcaggtggccccctgggttttggggttggctgtggggcaccgtggaaggctccggtgtgagcaggggtaggtggctgctttaagagaggttgtgtcccctgggtgccccc

SEQ ID NO: 24626 - DNA, 937 bp, Artificial sequence
  DNA replication origin
ttgcggaggcatggcagcccgtgcatgctgttggtgggcacgtaagttggtgcaggtatcacggaaaacagtgtggggtatggaggttcctcaagtaattgaaaagagcactgtcgttggagccaggagtccccactgtgggtgggtatcggggaaaggagtgagcgtgttaaagagccacccgccctccagagctcaccagcccacacgtggaatcgaccccagtggccgttagtggatgggcgcgtgaagatgatgtggggcacacacaatagagtgctgctgggtctttgttagaaaggaaagcctgtcattcgagacagcacggatgagcctggaggacagtgctgagcaaaatcagccacaggcaaagccacggcctgctgagtaaaaccagctgcaggcacagaaaggcaaagccacggccccactcgtgtggggtgtcagagacgccgacaagcacggtggctactgggggctggggtggggaagcctggggagatgctggccggaggacacagagtttccgttgtgccaaatgaatgaagtctgggggtctgttcgtggtgggccatggactattcgtggtgactgactgtggtctgtttgtggtggccgtggcgtgtttgttgtggccatggttggtttgtggtggccgtggtctgtttgtggtggccgtggttggttctgggtggctgtggtctgtttgtggtggccgtggtctgtttgtggtgaccatggttggttctgggtggctgtggtcagttcatggtggctgtgacctgttcaaggtggccgtggcctgtttgtggtgactgtggttaacgctgtatttgtacctgaggtttgctgggagtggatgttgggtattctaactgtaaaaggaaatggcagctgtgggaggtgacagtcagtcaccagtgagtttggtggtggc

SEQ ID NO: 24627 - DNA, 2239 bp, Artificial sequence
  DNA replication origin
ctctggggacctgtctcctgaactgagtggccactattgttcctccgtgcgcttcttagtcttatggctgcaaaattaagtagactggaacttttaaagaaactatgatcataagggcagattttcccatcattcttgagtgggttcaaaaaatcaagaagaatgaaaacttacacacataaatggaagaaacgcccagcgccctgaaaatcccagggccccgcctgcagaaggcctccatgaagaacggaagaaggccaacactctggtgtgggtcagagagcatccacaggcctcttcaggttcacagagtggccagtgaccacttcagatgtagcgatattttagagtttatttgtatgagggcttagctgtgtgcagtttctgatcacacacagggggatccctgcttttcatacccaaaatgaggcatttgatctgagggacaatatttagagtttgtcctggcccagagagtccagaggcactgcgggctgccagcaggtagacagtgcagtgcagatgatggacaggtggtgtggacggtggacaggtggtgtggatggtggacactgcagtgcagatggtggacaggcggtgtggatggtggacaggtggtgtggacggtggacaggctgggtggatggtggacactgcgatgaggacggtggacactgcgatgaggacagtggacaggtggtgtggacggtggacactgcagtgtggatggtggacaggtggtgtggacggtggacaggcagtgtggacggtggacactgtgatgcagacggtggacaggcggtgtggacggtggacaccgtgatgcggacggtggacaggcggtgtggacggtggacaccgtgatgaggacggtggacaggcggtgtggacggtggacactgtgatgcggacggtggacaggcggtgtggacggtggacactgtgatgcggacggtggacaggcggtgtggacggtggacactgtgatgcggacggtggacaggcggtgtggacggtggacactgtgatgcggacggtggacaggcggtgtggatggtggacaggcggtgtggacggtggacaggctgggtggatggtggacactgcgatgaggacggtggacactgcgatgaggacagtggacaggtggtgtggacggtggacactgcagtgtgaatggtggacaggtggtgtggacagtggacactgcagtgtggatggtggacaggtggtgtggacggtggacaggcagtgtggacggtggacactgtgatgcggacggtggacaggcagtgtggatggtggacaggcggtgtggacggtggacaggctgggtggatggtggacactgcgatgaggacggtggacactgcgatgaggacagtggacaggtggtgtagacagtggacactgcagtgtggatggtggacaggtggtgtggacggtggacaggcagtgtggacggtggacactgtgatgcggacggtggacaggcagtgtggacggtggacactgtgatgcggacggtggacaggcagtgtggacggtggacactgcagtgcggatggtggacaggtggtgtggatggtggacaggcggtgtggacggtggacaggctgggtggatggtggacactgcaatgaggacggtggacactgcgatgaggacagtggacaggtggtgtggacggtggacactgcagtgtggactgtggacactgtgatgcggacggtggacaggcggtgtggacggtggacactgtgatgcggacggtggacaggcggtgtggacggtggacactgcagtgtggatggtggacaggtggtgtggacggtggacaggcagtgtggacggtggacactgtgatgcggacggtggacaggcggtgtggacggtggacactgtgatgcggacggtggacaggcggtgtggacggtggacactgtgatgcggacggtggacaggcggtgtggacggtggacactgagatgcggacggtggacaggcggtgtggacggtggacactgtgatgcggacggtggacaggcggtgtggacggtggacactgtgatgcggacggtggacaggcggtgtggacggtggacactgtgatgcggacggtgcccccacggtctgtgaggcaggcaggggattgaggacagtgcctcctggtttcctctcaggtcacagtcgctcctggtgagagagaaaaacttaccgtaaaatctgaacatccaac

SEQ ID NO: 24628 - DNA, 775 bp, Artificial sequence
  DNA replication origin
gacggggcgattggcaacgcacacacccgaggctgccacaggcttcctccaaatccgcgcacatctgcaggagaagcgccagccgacactgatccttctcagacgtggtactgctgctacgacctggatcctgagaacagcgtggtgtgccagggtcccaccccagatgggcccatggctgagccctcagtacatggctctgaggctgggtgcacctctagaagccgggaggcagctgtgaacaaacccagccctcaggagggacccacgccacacacgggaggacgtgaggtggtgtaacgaagggggcggagcagagcgcaggcgaggagggagagggcatgtacgagggcgtgcctctgagcaaggcctgaggggccgggccagccacaagccccgcggaagaaattcgctgcatggagagggccggctgtgcaaaggccccgaggttggcgggaggcagggggatggggaggcagcctgcctccagggggtgggcaggatacgacgcgggggcagcatatgacgcgggggcagcagtaccacaggggactccatcttatattccaggagggagaggagccgacggaggctttggtgtggttcccaagaccattgacgctcaggcacttatcagcttgcgggtctctgctcagggtctctgggcccacgtggaggggttgccgggctgtgatcctgagcccagtctctccagctcccccaggggcttggcagagctgtgcccccagctgcagtgttgaggccccgggttcct

SEQ ID NO: 24629 - DNA, 1171 bp, Artificial sequence
  DNA replication origin
ggtttggggcacctgttaatataaaccaagtttttggtccttggaaagacgactcatcagggcgaagggggtgagctcgtgctttgctgactcaggtgtctgccgacgcccggtgtggactctcaggtgtccgctgacgcaggtgtggaccctcgggtgtccactgatgcaggtgtgggccctcgggtgtccgccgacgcccggtgtggaccctcaggtgtctgccgacgcccggtgtggactctcaggtgtccgctgacgcaggtgtgggccctcgggtgtccgccgacgcagatgtgggccctcgggtgtccgccgacgcccggtgtggactctcaggtgtccgctgacgcaggtgtgggccctcgggtgtccgccgacgcccggtgtggactctcaggtgtccgctgatgcaggtgtgggccctcgggtgtccaccgacgcagatgtgggccctcgggtgtccgccgacgcaggtgtggactctcaggtgtccgctgatgcaggtgtgggccctcgggtgtctgccgacacaggtgtgggccctcgttcgtcagagggcaggttcggatctctgaaaaccctatagcccttcctactcctaatggagctccatttaaccaacatcggccaggccttgataggagccaaggtctcagagaggcgatagagaccagcgacaagcagattccagaccctgtatggcccccttagaaccacatggccggggaggagatgcacaggtagacggtcagacctgtgtgtccaggcactgcttgctgagaagtctcagtggtcagcacacactgggaacacaacagcaaataaacagagaaaattgtggcgctgagacaatatgtcagctatggagggcgtacagggcagcagggctgtgggaaaacaatgtgagaaagaaagagagacagagagacagagacagacagatacagacagagagacagagacagacagatacagacagagacagagacagagagagacagagacagagagtgacagagagacagacagagacagagagagacagagagaagagacagagagtgacagacagagacagagagacagagacagacagagacagagacagagagagacagagagaagagacagagagtgacagagatagagacagacagacagagacacg

SEQ ID NO: 24630 - DNA, 1075 bp, Artificial sequence
  DNA replication origin
ggcctccgcgacttgtccccagtgctcagaagcagcagactccatgaacaaaatgctgatgtggagacgggaaacacacctgagaggtggcttcccacccagcacagcgcacagacacctgggccgcgtgatgtctcctggttcctcctaacgaggctggctgtgggtggcagagcttccactcagggcttcagaccatggagggcgaccggggccagcacagcctcaggccagccagagatggcagacaagggtagccctgaaactgccaactccgttggggtgggggggggaaatcacccagctggagcatttgagaactgccagaaacagggcacaatctcacagacagaacaccatggcggggcgaccctttacagcagtgaccccaacagggaaacagtggggaccacgaaatgcccgcgaacaggcccaagtgagcacacggggtcactcacgccacgggggccactcacatcacgggggccactcacatcatgggggccactcacgccacggggtccactcacatcacgggggccactcacgtcacgggggccactcacgccacggggtccactaatgtcacgggggccactcacgccacaggggccactcacgccacggggtccactaatgtcacaggggccactcacgccacggggtccactaatgtcacgggggccactcacgtcacgggggccactcatgtcacgggggccactcacgtcacggggtccactcacgtcatgggggccactcacgccacggggtccactaatgtcacgggggccactcacatcacgggggccactcacgtcatggcagccactcatgccacggggtccactaatgtcacaggggccactcacgtcatgggggccactcacgccacggggtccactaatgtcacgggggccactcacatcacgggggccactcacatcacagggtccactcacatcacggggtccactcacgtcacgggggccagcccaagtgagcacaccaggtccgcttacatcacaggggccaggaagcctttaaaaggaaggcacaggcgggcacgatggct

SEQ ID NO: 24631 - DNA, 1305 bp, Artificial sequence
  DNA replication origin
acaccataaaaatatggctttttctgtccttcctttaattctcagaattgaccaacattggtttggaagtaacagaagccagcattttccagcaaaatcacccagaattctctctgaacaccagtgctttcttgctataataatttacggtctttttttttttttttttttttgagacggagtctcattctttcgcccaggccggactgcagtggcgcgatctcagctcactgcaagctctgcctccccgggttcacgccattctcctgcctcagcctcccaagtagctgggactacaggcacctgccaccacgcccggctaattttttatatttttagtagagacggggtttcacccacgttagccaggatggtctcaatctcctgacctcgtgatccgcctgcctcggcctcccaaagtgctgggattacaggtgtgagccaccgcgcccggcttatggtcatattaatacacagactctgtgtagttagcacgtcctgaggcttttctctgtcccaggcactgcctgggcatcacggatgtgagggaggaagtgagcaaggctcaccgccagctgggtgaggacagttgaggggcatcacaatggggtcacaggcaggggcagcagggagcagccaggagggtggctgagccatggggagggggcagagttaggccccacatgccaggccccatccacctgggctgtgaccctggagagggcgtcttcctgtccccaggcccctgctacccaggagcccgccgcctccagaagggtttggtgcaggaggggcatgagaaaccggcaggagatgatgatggtggacattggatgggccaggagacatggagctcacagccctggtttcatgaaggagaagtgggccacaaggccaaggaggcaggaggcgggcagtggtggcactgtcataggagctggttgtgcatgtgctgaggcttagagggtcactggtcaagggagtgagggcagctgtggacccagccaagcctaggtcctgggcagaccaggaggggtgagggtctctgcagtggggaaggggtgggtggtggggctggcggggaggccccaggctctgtccatgagccacgcactccttggagagggcagaccagggatgaccccttgggcatcttgattcagttttttggaaatggtgcagttgacctgacgtggggacaccaagtagtggctgcagcggggcacctggacgccaacccctgggctccaggccttgacagcgagctttggctggcctaggcttccacctaaagtggctttggga

SEQ ID NO: 24632 - DNA, 1227 bp, Artificial sequence
  DNA replication origin
ggggtgggtggtggggctggcggggaggccccaggctctgtccatgagccacgcactccttggagagggcagaccagggatgaccccttgggcatcttgattcagttttttggaaatggtgcagttgacctgacgtggggacaccaagtagtggctgcagcggggcacctggacgccaacccctgggctccaggccttgacagcgagctttggctggcctaggcttccacctaaagtggctttgggaaaactagcacttagcaacagtccaggccagccgagccctcaagcaggtttccaaacaggcacaggctccagctgcccgaccccaccagggtgcccagctcatggtgctgcgggcgccacaaagcaagcccgtggcagagacttgcctccaagcgctcggccaccgaggaggacgcagcgcttacataatgtgccgggatccggggctatttttagccaccatatgtgctgtcttaagagctgagctctccctaatttggggtgttcttttttcttttctggatgccttcagcatggcttggaatagaaaaattagacattggaagagccaaaatccagtgttcctaaaaccaggctcccaatcgagagcaagacccatgtgatgctgagggcgtgtgggagaaggataggttcacagctacccacccagggggcagaaagatgagatcctctgagaactcacgtctcttctcccttaggcagttgtgcggtcctcagatagaagcatcttttataaaatgctgttgcaacatctaaccctcttccactgtactgcatgtgtgagtgtgtgagtgtgagtgtgtgactgtgtgtgtgtgcgagcgagtgggagtgtaagtgaatgtgagactgtgtgagtgtgtgagtgtgtgcgcgagtgggagtgtaagtgaatgtgtgtgagactgtgagtgtgagagtgtgtgtgtgtgagagtgagtgtgtgtgtgcgtgttcacattttgggaatttgtaatagagtatatatattcatgtttagagctagcctaaatcaaactaaatctagatcctcaagtaggtggctggagaaagtgaatctgatttttagactgcatggggccacaactctctttcctgtaacgccggtgcagtctgtgtgtgcaggaaaggtagaaaacaaggtgtctgagggaccccggacttctaggtcgtccagcaaatctttcacatttgcaaagt

SEQ ID NO: 24633 - DNA, 1712 bp, Artificial sequence
  DNA replication origin
tagagctagcctaaatcaaactaaatctagatcctcaagtaggtggctggagaaagtgaatctgatttttagactgcatggggccacaactctctttcctgtaacgccggtgcagtctgtgtgtgcaggaaaggtagaaaacaaggtgtctgagggaccccggacttctaggtcgtccagcaaatctttcacatttgcaaagtacgattgtatgcggcccccctgtgccagctactggggctctggggaggagctcaccgtgggggcggtgggggcggtgggagccgtgggggccggggcggtggaggggggggtggctgggggagcggggaggcgggaggagcagggggggcgggggcggggggggcggggggagcgggggggtgcggggggcggtggcggggggaggggggcggcagggggcggtgggagcggtgctaactccaggaggacttcccggcggaggtgatgcttggtgagagcctgacgggaggaggagttgtccagatggaggggggcgaggagcttcccctgggaacacaaagcagctggctgccgagggagagagggccaggtccgtgtgcccctctcggaagaggcgagaccgtcccccagggcagggaactgaaatgcgcgctgcataactgcggcgacacgggggtgggggacccagctcttcccggtgtggctgagctttctcagaacaccgctgctgtgtgcagcaagcacctgcccaggtgagcacagtccccccgtggtggacagaaggggaccaggatctgcaggctgtctcctccgcaccagctgctgtggcaaatgcgtttcagcgcaccctgcgcgttcaccaaccgccgattacaggggaggagctgggcttcggggcgacgagggaagctgccgatggggtggggcggctctgggggcggcctgggcctttctgtctctgaagcccgagctctctccctactccggtggtcccagggccacggcggtgggcggtgccggtcatgcagaatattgcagggggaggcagcccgtgaggcttccacgacgctgagagcgtctatttaaacgactgtccttcatccgagggttcgctcctcccacctaagggtggatttgacagccttggggtatccagcaggggtgggagatccagaggccccaagcccttcttcactgtgtatttcctggaacatggaatccaagggtccaataacgggcggcacgagccactttgctctctctaaagacctcggaggcgacacagtgaataacaaggttgtcttagtccgggtctgctgcttatatgtcaagagtatctgaaactgggcactttacaacgaaaaagaattcatgccttacagttgaggagcctcacctggtgagatccctcttgctggtgggtcctgaggcgacgcgggacctcacctggcgaggggagagtgagccagcccagggctgcccccgctgcttacaaagccaccaggcccccacccacccccacgacagcccgttaatccgagaatccgtgaatggatgaatccattcatgagggtggggccgtcctgacccagtcacctctgaaaggtactgcctctcaatgctgccatgagtttcgaagtttggtagggacgaacattccaaccacaccaaatgtatatttcagaattgctaaaagaatccattttaaatgttctcagcacagaaaa

SEQ ID NO: 24634 - DNA, 2387 bp, Artificial sequence
  DNA replication origin
tgttttggcgctgagtgagtgctgagtgtttgggtgctgtgtgtttgggtgctgagtggttgggtgctgtgtgggtgcggagtgtttgggtgctgagtgtttaggtgctgtgtgtttgggtgctgagtgggtgctgagtgtttcggcgctgagtgggtgctgtgtgtttgggtgctgagtgttttggcactgagtgtttgggtgctgtgtgtttgggtgctgagtgtttaggtgctgtgtgtttgggtgctgagtgtttcggcgctgagtgggtgctgagtgggtgctgtgtgtttgggtgctgagtgggtgctgagtgtttcggcgctgagtgggtgctgagtgggtgctgtgtgtttgggtgctgagtgtttgggtgctgagtgtttcggcgctgagtgggtgctgtgtgtttgggtgctgagtgggcactgagtgggcgctgagtgtttgggtgctgtgtgtttgggtgctgagtgttttggtgctgagtgtttgggtgctgtgtgtttgggtgctgagtgcttgggtgctgtgtgtttgggtgctgagtgggtgctgaatgtttgggtgctgagtaggtgctgtgtgttttggtgctgagtgtttaggtgctgtgtgtttgggtactgagtgggtgctgtgtttaggtgctgtgtgtttgggtgctgagtgggtgctgtgtttgggtgctgtgggtgctgaatgggtgctgttttggcactgagtgggtgctgagtgggtgctgtgtgggcgctgagtgtttgggggctgtttgggcactgagtgtttgggtgctgagtgtttaggtgctgtgtgtttgggtgctgagtgttgggcactgagtgggtgctgagtgttttggcactgggtgctgagtgttgggtgctgagtgggcgctgagtgtttgggtgctgagtgtttgggtgctgagtgtttagtagctgcgtgtttgctgtgtgtttgggtgctgtgtgtttgagtggtgtgtgtttgggtgctgtgtgtttgagtgctgtgtgtttgggtgctgagtgtttgggtgctgagtgtttaggtgctgtgtgtttgggtgctgagtgttgggtgctgagtgtttgggtgctgagtgttttggcactgtttgggtgctgagtgttgggtgctgagtgggcactgagtgtttgggtgctgagtgtttagtagctgcgtgtttgctgtgtgtttgggtgctgagtgtttgggcactgtgtgggcgctgagtgtttgggcgctgtgtgtttgggcactgagtgtttggatgctgagtgtttgggtgctgagtgggtgctgtgtgtttgggtgctgagtgttgggtgctgagtgtttgggtgctgagtgttttggcactgtttgggtgctgagtgttgggtgctgagtgtttgggctctgagtgtttggacactgaatgggtgctgagtgtttaggtgctgagtgtttgggtgctgagtgtttcggtgctgtttgggtgctgagtgtttgggcgctgagtgtttgggtgctgagtgtttaggtgctgagtgggcgctgtgtgtttgggcgctgagtgtttaggcactgagtgggcactatgtgggcattgagtttttgggcgctgtgtgtttgggcgctgagtgtttgggtgctgagtgtgtgggcgctgagtgggcattgagtgggtgctgagtgtttgggcactgagtgggcgttgagtgttcgggcactttgtgtttgggtgctgagtgggtgctgtgtgtttggtcactgagtgggcgctaagtgggtgctgagtgttttggtgctgagtatttgggtgctgagtgggtgctgtgtgtttgagtgctgtgtgtttgggtgctgagtgggtgctgagtgcttaggtgctgtgtgtttgggtgctgagtggtgggagctgagtgtttggatgctgagtgttttggcgctgtgtgggtgctgagtgtttagtagctgtgtgtttgctgtgtggttgctgagtgtttgggtgctgagtgtttagttgctgtgtgtttgctgtgtgtttgggtgctgagtgtttgggcactgagtgggcgctgtgtgtttgggcgctgagtgggcactgaatgggcgctgtttgggcactgagtgggtgctgtgtgggcgctgagtgggcgctgtgtgtttgggggctgagtatttgggggctgagtggacactgtgtatttgggcactgagtgggcgctgtgtgtttgggcgctgagtgtttgggtgctgagtgtttgggtgatgtgtgggcgctgtgtatttgggcgctgagtgggcgctgagtgtttaggtgctgagtgtttgggtgctgagtgtttcggcactgtttgggtgctgagtgtttcagcgctgtttgggtgctgagt

SEQ ID NO: 24635 - DNA, 895 bp, Artificial sequence
  DNA replication origin
ggaggaaggggaggaggagggggagggggaaaagaggggaggggaggaggagggagggggaggggagagaaaagaggggaagggggagagggaagggaggggaagggggagagggaggggaggggaagggggagagggaagggaggggaaagggaagagggaggggagggcaagggggaggggagggcaagggggaggggaggggaggggaagggggcagtacatggggaaaggccccaggccgttttcttccctgtcagagaagggctcttgcacctttggcattgaggctgtagcgcaacgagggtggggagggagggctggtgccacctgattcccagcgcacagggagtagcttcacagtgagcgacctgcaccccagattgcctggtttccagtagcatctggctggtgccatggggtgctctgcggtgcctggtgctggcccatatgtctctgttctctttgtggcagagaagatgtgagctcgccaaggcagctgaccagggctctccgggggagctacacagctcgggctggtgaccgggctccacaggctctaagggactttgtgaagcctttgttctttaaaggacagcagatcaggactgaaggtgctttctcagtgggcagtgttgggagatgctgccctgtgccgggatagtgtggtggcgatggggcaggggtcaccctgttggctgctccaggacaggtccggcccatccctgtcagcagtgggtgctccctcccaggtccagagatgcttacagccccctccccagcccttctctcatccctggggtgcaggcagggcctgggctgagttcctcgcgggtgggccaggcggactctcagcccttagggtctcaagttctgtagttctcctgggggtatg

SEQ ID NO: 24636 - DNA, 1036 bp, Artificial sequence
  DNA replication origin
gcatgaagtcccctctgaccctctggagaggggaagtgcacccagcgggaaaaggccccgaggagagggtaggactcggcctctgaggccacaggtggtggcgtgggcaggacttggcctctgaggccacagggggtggcatgggcaggacttggcctctggggccacaggtggtggcgtgggcaggacttggcctctgaggccacaggtggtggcgtgggcaggacttggcctctgaggccacaggtggtggcgtgggcaggacttggcctttgaggccacaggtggtggtgcgggaagggggaggacggtggggcctcactgccctgagtcaccccacgttcccacagcccacggggacacagcgcctgtgggctccgacctgggagagctcccaacaggcagaaaataaggtcgcctgggacccagcacaggaaggcaagagcctggcccccggggcccctgagattgacagctgactttcgccaaagctggggcagcagctcgcctggtgggttcgtgtgtgagaaaccagcaaggatgggaagagggttcgttttgagacacagaggtggcgggaaagtctctgggaaatggcgccgtgcctggctcggcatagagggcgggtttgggaccagcaatgcgcgccggactgaggtgcgcggacgtggctcttcagggctcctggagcccagggtctgggccgtgtgtgaggaatgttgtttggcaatagcaccgggaaaggacagaccgtggagaggctggagctgggaaggccggagatggttcctctgtgggagctctgtgtttccagttttgggccacgtgggcttcactgagaccactgaaccctgccagcctcatggaaaagcagccacaacgatgcctacaagatgtgcgtggcacaggatgggcgtggccgggtcctgacaaaactccatttataaacatgggtgaggggtggcgggaaccggccctcaggccctgaactggggcccggaggtggaaggggaggaggcgtgtggagacagttttc

SEQ ID NO: 24637 - DNA, 1382 bp, Artificial sequence
  DNA replication origin
cagctgctcagggctcagtgtggcaggcagtggtgccaggcagctggtgtgtgggagggcatcgtctccagccctccttttcccctgggattcctggaccctcaaactcagggagtgttgtgcaaacaaaagcagttctctttcctccttcacctttaagaaagaaagacctcactggtgcagggccagggaatgcaggtccccagagcaaaactgggaaggagccaaacacccatgaggcacacgcggctccctcccagaggccctcgaggaagaggaggaggccacacaccgaccaggcacccgccactggcttcacactttgcactgtctccgtttttagtatttgcactgaatatgtttgcaagagacgcttggaaccacgtctccccctttcaccatcaaaactccaaaatcaggaaagaagaaaaggctcttcctgatgtgttgacaagcaggtgtccgcaggcagcgccagtgtgaccctgcagggttgggagacggcgcaaaattgggaattacaggaaactgagcttggtgtgaaagctgagtctgtcacttccggcttctgatggaagctggtgaaacaggatgggaaggaagaggggcttgccaagaagcgtccaggcagaggattgtccacacggaggagggtccaagcagaggggcgtctgcacggaggagggtccaggcagaggaatgtctgaatggaggagggtccaggcagaggagagtccatacggaagagggtccaggcagaggggcatccgcacagaggagggtccaggcaggggagtgttcgtatggaggagagtccaggcagaggagtgtccataccgaggagagtccaggcagaggaacgtctgaatggaggagggtccaggcagaggagagtccatacggaagagggtccaggcaggggggcatccgcacagaggagggtccaggcaggagagtgttcgtatggaggagagtccaggcagaggagtgtccataccgaggagagtccaggcagaggaacgtctgaatggaggagggtccaggcagaggagagtccatacggaagagggtccaggcaggggggcatccgcacagaggagggtccaggcaggagagtgttcgtatggaggagggtccaggcagaggagtgtctgtacggaggagggtccaggcagaggagtgtccatacggaggagggtctaggcagaggggcgtccgcagggaggagcagcaagtgctcggccctgagacgcagaaggagtggccctcggctggcagttcctgggttgtgagagggagtccagagccctcttgctccccagtcctctcccctgtgccgagtccggggcctctgcgggccgacagctgtcttagaacaagct

SEQ ID NO: 24638 - DNA, 825 bp, Artificial sequence
  DNA replication origin
ctaagttaaacccggacggactggatgagagcagacgcccaccctcctgcttctgaggggccacacacttctaagttaaacccggacgggctggatgagagcagacgcccaccctcctgcttctgaggggccacacacttctaagttaaacccagacgggctggatgagagcagatgcccaccctcctgcttctgaggggccacacacttctaagttaaacccggacgggctggatgagaacagacgcccaccctacttgctctgaagtatgaggctttttttttcggggggcgggggggggggcgggggagtgtttcttttttaaaactactgttctacggattatttatttaggccatatcctgttccatgaatgattaaaggtagcttatataagaaacaggataaagtgaaaaaaataagtggatgaacaaaataaagaaaaaacaagggcagaagagacacgacgaagccacggtcagggtcggagtctgaaacgtgcccacgtgtgtgctgggccatcagtgccggctcccagctgagccccgactgtctgaggagtgctggggcgtggctgtgatctggacaggccatgtgcgcactgccgtgctgtggaacagcccaccccgggaagagctggagagggactgggcattgtcggaggcacacatctgtgaagtacaccctctgggacggacccgtcagcacataaacaccaggggcctcaaggaaaaccccaataaccacagggtcccactgacagaggccgaggaccctggcgtgcaaatggcctgctcgggactgctccagaaacgcaggcctgc

SEQ ID NO: 24639 - DNA, 1844 bp, Artificial sequence
  DNA replication origin
tgtgggcacttggggtgggggctgccctccggggattaggggtgcttctggcaggtccacccaggcttgggtcttaggacacagccccagctcctcctaaccctggaaggtccacatgggcctgggtcttacgggcagtgccagctcctcctaactctctctggaaggtccacccagacctgggtcttggggcacagccccagctcctcctaactctctctggaaggtccacctgggcctgggtcttaggatgcagccccagctcctcctagctcctctgtctcagcagcactttgtgtttctgggttaatttccaggtgcccacccagcctcctgtagagcccactcgtgggtgcaccttcctcagaggagacagtccccacccccctaccctttatgtcatagaatgctgtcactgagccttcctaactatacatacaattctcattttgtaagaaaatggaactgctaagcatggatttgcatttgaaaaaacattcattgttaatgtcagaagcaagaaaaagctgccatgtgttaatcattccagtgagggttacaccaagaagtgtctgctgcaccttctgtgctgtgcgtggtccatgccccaaggctggaggtgcaaaggggacaggtcccggaggctctggaagggcagagaagccaggcgtggaagggtagggagagccctcggggcctctggcctctcccacagagacagcatgaaggaaggcctgggcgtgagaacagatgtgggggacacagaggcggaggccacgtggcaggaggggaaacaggctggtggaacagggtgcacggggcctggggagggatttggatctcattctttgtggggtgtggggagtgatcctggctactctgggcaccacagaggcaggagccagtacaggccatcacgtgagggcaggcagcccagtcaccgtcctcttgctccaggccatcatgtgagagcaggtggcccagtcaccgtcctcctgctccaggccatcacgtgagggcaggtggcccagtcaccgtcctcctgctccaggccctgcagccggcagcacccctccgcagcccaccacacgcagcaccaggaggctgtgaatctccccactctgtaggaacagctgccgcttcctgggtccccattccccaacggaacgtgttccatgacatctgtgcagcatccgctgtgtgccaggcacagttctaggccccggagacaaagcgggaacagcacagacaggaacctccactcttacagtgaggagagaaagaggagtgaggcttggggaggttgggcaggacagctgcagggagagggagggcagaggacgggcgagtcggggagtaccaaggaaggcctcagcaaagcagcatggaaataagacctgaaagcacggaagggccctccgggaggcgggtatgcaggcgcaaaggccctggggccgagagctgtgtgtggagaccagcgtgaggggctggggcagctgggcccaaagacagattcacagacgccttccatcgccgctgcggtagtcatgccctgcggcgtagcctcctcccaaggctggagcccttccccggagctggtcgtggccaggagctcccaccggggcagggcgctaaggcccggcactccgcctggctgctgtggggctgctgccggggcgggtgctgacgctgtctgtgcccctgcccgtctcccaccaggttccaggtaaatacacggtcgtggcggaccacgagaagggaggccccgatgcgctgcgcgtgaggagcggggacgtggtggagctggtgcaggagggcgacgagggcctctggtaagaccccgc

SEQ ID NO: 24640 - DNA, 1295 bp, Artificial sequence
  DNA replication origin
cctggctgcaggtgcgtccggggaggttttctccataaacttggtggaagggcagtgggcaaatccaggagccagcccgggcttcccaaaccccgcccttgctccggacacccccatccaccaggagggttttctggcggctcctgttcaatttctttccttctagaaaccagcatccaggcacaggaggggaggcccttcttggtggcccaggctttggcgggattatttttcaaagaactttaggagtgggtggtgctttcctggcccccatgggcccctgcctgtgaggtcggacaagcgcagggagtctggggcctctcagagtgcaggaagtgcgcacagggtgctcccaggctggggagcacaggtaggggacggtgcgtgggggatggcgcctggggcatgggggatggggtgtgggaaacggcatgtggggcgtaggggatggggtgtggaggatcgggggtggggatggcgtgtggggtgtgggggatgggccgtgggggggtggggcctgggaaacagcatgtggggcatggggtgtgggggtgaggtgtgggaaagtgtgtggggtgtgggggatggggcatggaaagggcgtgtggggtgcaggggatggggcatggaggtgtgggggatggggtgtgtggggtgtcggggatggggcatgtggggtgtgggggatggggcatggaaagggcgtgtggggtgcagaggatggggcatgggggggtggggatggcgagtggggctggggcctgggaatggtgagtggggcatggggatggcgagtagggggtgtggcgtgaggatggctagtggggcgtggggatggcgtgtggggatggcgagtggggggtgggctgtgagggacagtgcctgggatgtggggctgcagccctagctcacagcatggccttatgaccccggccaccttcctgccccaggcggggtcgctaaggcctcaggaggagaaacacgggacatgccgtggaagccggggcctcacagaggtgagcagggactgccactggttttgtcctggggcccagtgggggccaacatcacctccttcccctcccatggcaaagagccagcccgcggggtggctactgcagtgccccccaaggagggtgttccctgctcgagaggaagtgaccgctccagcttggccttccctgggactggggtgcaggcgattttatcttctttgctccattctgttccttccagataatcgtgtgttcttcatcaggttttcctcagttcttgagagcttttctgatgcaaat

SEQ ID NO: 24641 - DNA, 1621 bp, Artificial sequence
  DNA replication origin
gggggcgtgggtgtcccgggagtgtgggtgtcccgggggcgtgggtgtcccgggagtgtgggtgtcccggaggcgagggtgtcccgggagtgtgggtgtcccgggggagtgggtgtcccgggagtgtgggtgtcccggaggcgagggtgtcccgggagtgtgggtgtcccgggggcgtgggtgtcccgggagtgtgggtgtcccgggggagtgggtgtcccgggagtgtgggtgtcccggaggcgagggtgtcccgggagtgtgggtgtcccgggggagtgggtgtcccgggagtgtgggtgtcccggaggcgagggtgtcccgggagtgtgggtgtcccgggggcgtgggtgtcccgggagcgtgggtgtcccgggggcgtgggtgtcccgggagtgtgggtgtcccgggggcgtgggtgtcccgggagtgtgggtgtcccgggggcgtgggtgtcccgggagtgtgggtgtcccgggagtgtgggtgttccggaggcgagggtgtcccgggagtgtgcgtgtcccgggggcgtgggtgtcccgggggcgtgggtgtcccgggggcgtgggtgttccggaggcgagggtatcccagaagtgtgagtgtcccaggggcgtgggtgtcccgggggtgtgggtgtcccgggggcgtgggtgtcccgggagtgtgggtgttccggaggtgagggtgtcccgggagtgtgggtgttccggaggcgagggtgtcccgggagtgtgggtgtcccgggggcgtgggtgtcccgggagtgtgggtgttccggaggtgagggtgtcccgggagtgtgggtgttccggaggcgagggtgtcccgggagtgtgggtgtcccaggggcgtgggtgtcccgggagtgtgggtgttccggaggcgagggtgtcccgggagtgtgggtgttccggaggcgagggtgtcccgggagtgtgggtgtcccgggggcgtgggtgtcccgggggttgtgggtgtcccgggagtgtgggtgttccggaggcgagggtgtcccgggagtgtgggtgttccggaggcgagggtgtcccgggagtgtgggtgtcccgggggtgtgggtgtcccgggggtgtgggtgtcccgggagtgtgggtgtcccgggggagtgggtgtcccgggagtgtgggtgttccggaggcgagggtgtcccaggagcgtgggtgtcccggaggcgagggtgtcccgggagcgtgggtgtcccgggggcgtgggtgtcccgggagtgtgggtgtcccgggggagtgggtgtcccgggagtgtgggtgtcccggaggcgagggtgtcccaggagtgtgggtgtcccgggggcgtgggtgtcccgggagtgtgggtgttccagaggcgagggtatcccagaagtgtgagtgtcccgggggtgtgggtgtcccgggggtcgtgggtgtcccgggagtgtgggtgttccagaggcgagggtgtcccgggagtgtgggtgtcccaggggtgtgggtgtcccgggggcgtgggtgtcccgggagtgtgggtgtcccgggggagtgggtgtcccgggagtgtgggtgttccggaggcgagggtgtcccgggagtgtgggtgttccggaggcgagggtgtcccggga

SEQ ID NO: 24642 - DNA, 1111 bp, Artificial sequence
  DNA replication origin
cgggggagtgggtgtcccgggagtgtgggtgtcccggaggcgagggtgtcccaggagtgtgggtgtcccgggggcgtgggtgtcccgggagtgtgggtgttccagaggcgagggtatcccagaagtgtgagtgtcccgggggtgtgggtgtcccgggggtcgtgggtgtcccgggagtgtgggtgttccagaggcgagggtgtcccgggagtgtgggtgtcccaggggtgtgggtgtcccgggggcgtgggtgtcccgggagtgtgggtgtcccgggggagtgggtgtcccgggagtgtgggtgttccggaggcgagggtgtcccgggagtgtgggtgttccggaggcgagggtgtcccgggagcgtgggtgtcccgggggcgtgggtgtcccgggagcgtgggtgtcccaggggtgtgggtgtcccgggggcgtgggtgtcccgggagtgtgggtgtcccgggggagtggatgtcccgggagtgtgggtgttccggaggcgagggtgtcccgggagtgtgggtgttccggaggcgagggtgtcccgggagtgtgggtgtcccgggggcgtgggtgtcccgggagtgtgggtgtcccgggggcgtgggtatcccagaagtgtgagtgtcccaggggcgtgggtgtccggggggcgtgggtgtcccgggggtgtgggtgtcccgggggtcgtgggtgtcccgggagcgtgggtgtcggggactgcagggacatgggcctcccctcccactcctgccgcccagggcacctcctgtgaggactcggagtccgtgagttcccacctccttgagcccgattctttggtgtccccgcctgcatcctcagcctccttccaaaccagaccagttctctaggggcgtcgacgtgtgaaactgattttaaagaaaacaggcagtggcctttctctcggccccacgtggcccagtagcgctcaccttccgtcccttcttccgcgctcagtaaccaatttaggccgctcctgcagaactcgggctcctgcccaccggcccacagcgtccacctgaggcctcgtcctcccagcaaaggtcgtccctccggaacgcgcctcctgcggcctctccagagcccctcc

SEQ ID NO: 24643 - DNA, 2299 bp, Artificial sequence
  DNA replication origin
atctggaactatgggtgaccacacatttcctgctcccaagtcagaacacccgaggttcaaccctgactcttctgtcgctgagctgtggacctgggacgaggtacacaggctctgagccacagctccacctctgacagggtggccacacatacggggagagggtgcagtagcagatgcaaaatattccacaaacagcaaaagcactccacagaaaaaagtgattgctgaagaaactgttggccacctgaacttaaactcacggggtgctgtgagaatacaacagatgagaaatgctttcaaaactaggtgtataaaaatgctaggcatgaccatcctcaatttgtctggaaagggtcatgttagcctttgcctcagacagctggacctcctgtgagtgtgaggcttctttgagcatgaggtgtcctgagtgtgaggtgtcttgtgcatatgagatgtggttctgtgagtgtgaggcatcctgtgagtgtgaggtgtggcgacctgtgagtgtgagatgagtgtaaggtgacctgtgagagggaggtgtcctgtgagaatgagatgatctgtgtgaggtgtgacctgtgagtgtgaagtgtgccctgagtgtgaggtatcctgtgagaatgaagtgatctgtgagtatgaggtgatctgtgtgaggtatggtgacctgtgggagtgaagtgtgccctgtgtgaggtgtcctgtgagagtaaggtgacctgtgagtgtgaggtgtcctgtgagagtaaggtgacctgtgagtgtgagttgtcctgtaagactgaggtgacctatgagtgtgaggtgtcctgtgggtgtgaggtgacctttgtgaggtgtcctgtgtgaggtgacctctgtgagttgtcctgtgggtgtgaggtgacctctgtgaggtgtcctgtgggtgtgaggtgacctgagtgtgaagtgtgccccgtgtgaggtgacctctgtgaggtgtcctgtgggtgtgaggtgacctctgtgaggtgtcctgtgagtgtgaggtgacctgtgagagggaggtgtcctgtgagaatgagatgatctgtgtgaggtgtgacctgtgagtgtgaagtgtgccctgagtgtgaggtatcctgtgagaatgaagtgatctgtgagtatgaggtgatctgtgtgaggtatggtgacctgtgggagtgaagtgtgccctgtgtgaggtgtcctgtgagagtgaggtgtcctgtgagagtaaggtgacctgtgagtgtgaggtgtcctgtgagagtaaggtgacctgtgagtgtgagttgtcctgtaagactgaggtgacctatgagtgtgaggtgtcctgtgggtgtgaggtgacctctgtgaggtgtcctgtgtgaggtgtcctgtgggtgtgaggtgacctctgtgaggtgtcctgtgggtgtgaggtgacctgtgagtgtgaagtgtgccccgtgtgaggtgacctctgtgaggtgtcctgtgagtgtgaggtgacctgtgagtgtgaagtgtgccccgtgtggtatcttgtgtgaggtgtcctgtgagtgtgaggtgaaatgacctgtgggtttgaagtgcaccctgagtgtgaggtgtcctgtgtgaggtgacctctgtgaggtgtcctgtgggtgtgaggtgacccgtgagtgtgaagtgcgccctgagtgtgaggtgtcctgtgagtgtgaggtgacccgtgagtgtgaagtgtgccctgtgtgaggtgtcctgtgggtgtgaggtgacctgtgagtgtgaagtgtgccccgtgtgaggtgtcttgtgtgaggtgtcctgtgagtgtgaggtgacccgtgagtgtgaagtgtgccctgtgtgaggtgtcctgtgggtgtgaggtgacctgtgagtgtgaagtgtgccccgtgtgaggtgtcttgtgtgaggtgtcctgtgagtgtgaggtgacccgtgagtgtgaagtgtgccctgtgtgaggtgtcctctttgaggtgatcttggagtgtgaggtgacccgtgagtgtgaagtgtgccctgtgagtgtgaggtgtcctgtgagtgtgaggtgacctgtgagtgtgaagtgtgccctgtgtgaggtgtcctctttgaggtgatcttggagtgtgaggtgacccgtgagtgtgaagtgtgccctgtgagtgtgaggtgtcctgtgagtgtgaggtgacctgtgagtgtgaagtgtgccctgtgtgaggtgtcctctttgaggtgatcttggagtgtgaggtgacccgtgagcgtgagctggagaaagtcccaggtccctaagtgttgtttctccccgacacgtgcc

SEQ ID NO: 24644 - DNA, 1321 bp, Artificial sequence
  DNA replication origin
gggaaaataattacaattgaaaccccccatcgccatcactgtctgcaccctggttcctgccgcactgggtgtctggtgcccgtgcccgtctcaggatagaaaggaaactggaggctgcagagagaaggacctgatgggtcgtagctcagcatctgccgaagccccatctagaaataggttctcgtcctgggaggtgtgggagggagcctcgggagggagacagcaggaggagaggccccagtcctggacacgcgctgggggttgaagtctcggctctgcaggctcctgtgctgcgtggcagggattttctctctgcctaaatatcgtcttcataagtaaaggcaagtgggctaaacctatgtcatctccgtgttaactcagaatagtctaggcctgggccaggggacactttgtgatctgagacccccagaattccctgagggaggcccagctctgtttcgggaaataactgaagcggctgtttgtgcgaggtgagaccctgaggaccgagagcagcaggaggtcatggtggggagcaaaaacgggaaaagtgattccgcctgagactgagggagagagaacccaggtgagaccctgaggactgtgagcagcaggaggtcacggtggggagtaaagatgggaaaagtgattccgcctgagagtgagggagagagaacagaggtgagaccctgaggaccgagagcagcaggaggtcacggtggggagtaaagatgggaaaagtgattccgcctgagagtgagggagagagaacagaggtgagaccctgaggaccgagagcagcaggaggtcacggtggggagtaaagatgggaaaagtgattccgcctgagagtgagggagagagaacagaggtgagaccctgaggaccgagagcagcaggaggtcacggtggggagcgaaggtgggagaagtgattccgcctgagagtgagggagagagaacctgcagcagccccatcgcctcccccagtgacacctcccctccccctgagcaggaaggggagctttggggcgtccacctctggaggacgaaggtgagagcgggtgtcgggggcctggtggggcagggaggcccttgtgggtgctgggagaccagcctgtgtgggtccagagctgcgcttggatggggagatgggcctgccgtctgggaacacgcagcccaggctgtgaggaagaggaagcaggaatgagagcttcagccaggacagctggtggacggcagacctcggccccaccatcactgtcatggagccatctcagcagggctgggggttaagctcccgtttagaaggaccccactcc

SEQ ID NO: 24645 - DNA, 1329 bp, Artificial sequence
  DNA replication origin
acggcagacctcggccccaccatcactgtcatggagccatctcagcagggctgggggttaagctcccgtttagaaggaccccactccacagccacggggtagccactgatgtgggcaagcgcccgccatgaagaccccaccttggtggaagggcactgagaaactggacaccctcgagactcagaggatcacctcagaactggcctgttaactatgccaggaaagcatgcctttagcgtggcaaaacctggggacccagcctcctcctgagccgaaggcagggggctgccaaaacactgtctaagcagagcccgatcctgagtcaggcaagtccagatggaggaaaccatagactcttaaaaaacgtcagcgtcagcaaagaccagaaacagccagtgactctgcagtcagtgagaccagaggagtctgcaggctgccaggagagcgagggagactgctgggggttcccgtcagacagcgctcagcgggggcgaggggagagggagagaggcagagccagagagacaaaaagaaagagagacagagacagagagaaagagagagacagagacagagagaaagagagagacagagacagagagaaagagagagacagagacagagagaaagagagagacagagacaaagagaaagagagagacagagaaagagaaacagaggggagggagtaagtccaggtaaaaaacaaacaaaaaaattgagaatagaacaagagagaaacagagacatggagacacagagaaagacacagtgagacacaggagacagagacagagagagatgctgagagacagacagggagagggagagagagaggagacaccaagacacaaagagggcggagagacagacacagaaagagggagacagcggggctggatggacgtgtggccgggccagtggggaggagagacgagtccgcagacagcgttcagaggccgcgctgcctgggtgctgagccgtcccggggttcacggtcgcagtttgtccttacaaaacgcccagccgccccgacctgtggtgcttagggaggacctacctggctgtgccggtctgagaaggggccagtgaggcccggtgcgggtacgggcgggtgcagatgcagccaggaggacgggcgggagcgggggcctgtcccacacgggggcctcggcagcaccggcatggctggaggccagtacggccaggtgtggcgggagggagcgccgtctggcttgggtcgtccatcctgacaggacgctgcaagggcaggagccccgcgccccgtgtcctgcgcccccgctcgaggacaagccccagccgccggtc

SEQ ID NO: 24646 - DNA, 885 bp, Artificial sequence
  DNA replication origin
tccgcagacagcgttcagaggccgcgctgcctgggtgctgagccgtcccggggttcacggtcgcagtttgtccttacaaaacgcccagccgccccgacctgtggtgcttagggaggacctacctggctgtgccggtctgagaaggggccagtgaggcccggtgcgggtacgggcgggtgcagatgcagccaggaggacgggcgggagcgggggcctgtcccacacgggggcctcggcagcaccggcatggctggaggccagtacggccaggtgtggcgggagggagcgccgtctggcttgggtcgtccatcctgacaggacgctgcaagggcaggagccccgcgccccgtgtcctgcgcccccgctcgaggacaagccccagccgccggtctccgctgggttccgacaggccttgctgggaggccttgctgggagctgggggtcgaggctcacagactgcgctgaccccagcaggcacagctgggtccagggactcgggaactcgcagcctgacgcgggccggacccccggggtgggtgctgagggcctcggatgccctccctggctggacgttgtggctgtgctgatactgagcggtaaccctaggaaggagagtcccctgggctcagctacccgggacaaggtcaacagggacaccggccccagttccaggagaaaaacaagcacggccagcggcgagtgtgggcgacagcagctcagggagaagcagattatcaacagcgaattcactcagggtcagccaactgtacgcttaaaaaaagattcctgcggtaaactgtatgtctattttaccacaataaaaaacttattgtttttaattaccaatgacttctaaaaaatgtttttaaaacccagatcacaaat

SEQ ID NO: 24647 - DNA, 1679 bp, Artificial sequence
  DNA replication origin
cgcggggggcggggcgtgggggaggcggggcgtgggggcggggcgtggggggcggggcgtgggggagggcaggggcacgtgacgcagggcgtgggggaggcggggcgcgggggaggcggggcgcgggggaggaggggcgtgggggggcgggccgtgggggaggaggggcgtgggggggcgggccgtgggggaggaggggcgtggggggcggggcgtcggggagggcaggggcacgtgacgcagggcgcgggggaggcggggcgcgggggaggcggggcgcgggggaggcggggcgcgggggaggcggggcgcgggggaggcggggcgcgggggaggcggggcgcgggggaggaggaggaagggttctgagtggacgcggggactccatgccacgcggagggcagccgctcatgaggcggggtgtgggggaggaggaggaagggttctggagtggcttttctactccagaagtctccccgatcctgaaagaaaatctagacaggtggaaaaaagagaaacatgtccagatagtgtcttccacattaatggtctcccaagctctgaggaagcccaatgagttgaacagtttctcataagcttgcgggtccctgtcagtgcttctgagatgctaaaaacgccaggctgtgggctgcgtcaccatgtgtctcctctttaatttcttcaggagctccaggtgataagctgccacctccatccacaatgtggacatcagaggatgcagcatgctgtggtttgaatgtgtccctatagtgcacgtgttggaaacttaatcccaaggcaacagtgttgagaggtgggacctttaagacgcattcattgtcagagcccacgtgaatgaattgataccactattgtaggagtgggttcgttattttggaataaaaggatgagtttggcccccttcctctctcccctttctctctctctctctctctctctctctctctctcacgcgcatccaccttccaccatgggatgacgcagcaagaaggccctcgccagatgggggcccctggacctttgatgtcccagcctccagaactgtaagaaataaatttctgttctttataaattacccagtctcagatatcctgttacagcaccacaaagtggactagaccacactctactctgtgaatctaagacgcaccattattgatgaacctgaaagaaagagcatatacccaaattagctgtgggtcagctcagcctggaggcaagagggggaagctcagataatctaaaccacaggccagccaggaaccagctttgcaatacatttacactattcacatgggctcccaaaactcacacaaaaaaatgtatttaaagggattgcaaagtggcagtgcccccagggggcaacataaagcacaacccctttcaggaagaactcggccttgtccaggctgacattagaacattggctgtagggaacaggccaattcagagatgttgaaatctaaaacataggtcccagagttgattgaacaggtatttaaatagggactgcggcaagatctaagtattcaatgaccaggttctccataggctgctcatttcaggttccacacaaagttgtggggtcagttgatttaagctggggacccccacagaggacaccccaacatctgaaggacacgacaaagaccccaaag

SEQ ID NO: 24648 - DNA, 3197 bp, Artificial sequence
  DNA replication origin
cgctctgggtgacattcatttttagctgaaaaggaaaaaaaaaaaaggaaatgctagcttggaaatagtcattttatcacagccttgcacacagttctgtgtgttggtccatgttcattttatcacagccttgcacacaagagttctggtgtgttggtccatgtgttctcattctcttcagatcgttgtcctctgtgtcagtgtttcccacatgtccgtatttcaggaatgtgcatgtagaacaaagactccgtgagtgaggccgggcgcggtggctcatgcctgtaatcccagcactttgggaggccgaggtgggcggatcacgaggtcaggagatcaagaccagcctggccaacatggtgaaaccccatctctactaaaaatacaaaaattagccaggcgtggtggcgcgtgcctgtagtcccagttactcgggaggctgaggcaggagaatcacttgaacccaggaggcaaaaggttgcagtgagctgacatcgcgtcactgcactccagcctggcgacagagcgagactccatctcaaaaataaaataaaaattaaaaaaaaaaaaagactccatgagtgatgacacttctatttgtcctttttccacatggactaatccacgcgcctgttttgtctgccggcttgcattggctattccctttaaattgctgcttcttcaaggaggggacgtgggatgggagggggttagtgtgacatcggtggtggctgagcagctgggatgggggctttccaccaagagggagaagattaagaaaggggcacatggtgggtgaaggtcaaagccccctttggtacgtggtaaatttggggtgtctgtgaaggcattagctggggcatcaaggaggcagatggagcagaaatctggacttcggaggagagggctcggctgggaggaaggttttccccagagaaacgggctccaagttgaccagtggtgctgagagcggagcacgcttgttgctgtagttggcgatgatggacactgacatttggcgggtatttaaggatatttgtttacgtgctttgcgtcttccctgtctgcagtctcccactgggagtctggcactgaggacgcctgtgtgtgacccccccagcctgtgagcagattgtgaatggttgaggtggtggggggaggagaggggcccctgctatgaaaagtatgggggcctgtctggaaggggcagctcagaatgcagccagcccccggcgtggtttctggaggagaatctggttgggatgagaggaatcccctggggtgagccaaatcgcggttcacacaggcaccttcatggctacacctcaggaggggcccattgggactctggccgaggatgtgaggcccacctgcccagggaggcccttgggggaaggggacggccggggcctcacccagctcgcagttgctgccctcatagccgggggagcaggtgcaggtgtagccccagatgctgtcctggcaagagccgttgtggaggcagggctgggagatgcacggggagccgcctgcaggaggaggatgggggttggggtggtggtgacaggaacggggacctgagcaggaggagggtgggggtggtgacaggaatggggacctgagcaggaggaggatggagtggggggtggcagcagggacggggacctgagcacctgagcaggaggagggtggggtgacaggaacagggaccagagcaggaggaggacagagtggagcagggacggggacctgagcaggaggaggatggggggacgtggcagggacggggacctgagcaggaggaggatgtggggaggtggcagggacggggacctgagcaggaggaggatgtggggaggtggcagggacggggacctgagcaggaggaggatgtgaggaggtggcagggacggggacctgagcaggaggaggatgaggggacgtggcagggacggggacctgagcaggaggaggatgtggggaggtggcagggacggggacctgagcaggaggaggatgtggggaggtggcagggacggggacctgagcaggaggaggatgtggggaggtggcagggacggggacctgagcaggaggaggatgtggggaggtggcagggacggggacctgagcaggaggaggatgaggggacgtggcagggacggggacctgagcaggaggaggatgtggggaggtggcagggacggggacctgagcaggaggaggatgtggggaggtggcagggacggggacctgagcaggaggaggatgtggggaggtggcagggacggggacctgagcaggaggaggatggggggacgtggcagggacggggacctgagcaggaggaggatgtggggacgtggcagggacggggacctgagcaggaggaggatgtggggacgtggcagggacggggacctgagcaggaggaggatggggggaggtggcagggacgaggacctgagcaggaggaggatgtggggacgtggcagggacggggacctgagcaggaggaggatgtgaggaggtggcagggacgaggacctgagcaggaggaggatgtggggaggtggcagggacggggacctgagcaggaggaggatggggggaggtggcagggacggggacctgagcaggaggaggatgtggggacgtggcagggacggggacctgagcaggaggaggatggggggacgtggcagggacggggacctgagcaggaggaggatgtgaggaggtggcagggacggggacctgagcaggaggaggacgggggggcagggggtggcaggaatggggactgagcctgctcatgctgctccccatgccatcgcctggcccccaggacgctccccgctccggatgtaaggcctggctgccagtgcctcccactctgctgggtgccctttcttcgtccgcacgcggtcccctctgtcccgccccatcagcccttctccggccttccctgcctctcccgcttccttctgtgcccagttgtccccgtgcttgtctggtggtggctgcagctctttgcttactcattcccaggtgggtccttaccctggcctcccccagccccgtgggtctccatctgtgttacttctgtcccatgctcttctgcagttgcccacctagagctcctcccttgggaggagtctcctaaccaaagtctccatcggggccatgactttcca

SEQ ID NO: 24649 - DNA, 1084 bp, Artificial sequence
  DNA replication origin
gggccgggggcgccaggacccagacggaccgagggccggaagtgacgccagctggcccgcttgaggcgtagggggtggcgctctccgttcggcggcgctcccatggcgcacattaccattaaccagtacctgcagcaggtgggtcctagccggggagcgcgcggcggcgtggttggccctcggcgtgttccgtgtgtcccctcctgccttggaccctcaggccttttcctttcccgcctcgccacccttcttccgttcgggtccccggcgggcagccgcgcgagccgaacagcggcggccgggactcgggaaggcggcccgagttctcccctgcagggccgccgtgggggccgggcggtgtccgtggatcgcggagtcgtcgcggtgtaagtagacgcggcggtcccaggtcgctgccctcacttgctggcacgtgtggccgcgctcccaggcggtccgaagggcctgcgggccacgccgagggcccgctgtgggcggtgctgtgtcggatggacgctgtttcccagcaggatgcgggatgaattcggggactccaggaggcgatggaggagtaagcgcgaggctgtggccgtgctgcaggccgggctcgtgcccctcgtcctcgctgtcgtttaacgcccttcactctccgagcacaatgcacacttcatatcgctcggtacatgcgtctgacagatgttgttcaacagcttgtaagtagcagaagcacagttaaaagatggacacttgtaaagattcaacgcatattctttccactaaactatgcctgtcttcagaaccagcactgtggtaacagggataggaaatatagggaatggatttttaaaatatttgaaggaaacattaccaagacgtggtgaataagaatgggtgggctgagggacacggaggagttaagaatgattcccaggcttgtaatctgggaaaaagatgaatagagtggatttggagggagaaataaagttttgggcatgttgagtttgaggtgtctgttgacaactgggtaaagatacgtacttgatagctgaaaagtctgacatgattgggcccagcagttgcttgg

SEQ ID NO: 24650 - DNA, 1765 bp, Artificial sequence
  DNA replication origin
ttgttgctaaatgagacaacagaaaactgaagactgcatttctagaaaggtttcagagaaaggctgtgttttgatttagaactggtttttttgttttttgttgcacaaaaacaaacctctcaggccctttaaaaaaaaagagagagagaggtgtggcctccctatgttgtccaggctccttgggaactcctggactcaaacagtcctcctgccttggcctcccgaagtgctgggattccaggcgtgagccattgcacccggctgacatgcaagttctgaggaaagccaggctgtctttcttgagtcacggagtagttgtcttcatgacatgttgataccaggtgataatggtcagtgaaagagagaggttagtcctttgtattaggtggcatccttccctcacacccaagctgcaggcccagcgtaggaatgggacctccacagccacacaggtctcatcctgtgtggctgtgaaggtcgctatatgactctggaggtagctatgtgactatggaggtctcgtcccgtgtggctgtggaggtcgctgtgtgactgtggaggtcacgtcccatgtggctgtggacatcttgtctgtgtggctgtggaggttgctgtgtgactatggaggtctcgtcctttgtggctgtggacgtcttgtctatgtgactgtggaggttgctgtgtgactgtggaggtcgcgtcccgtgtggctgtggaggtcactgtgtgaccatggaagtcgcgttccgtgtggctgtggaggtcgctgtgtgactatggaggtctctctcgtccgtgtggctatggaggtctgtgtgggagtatggaggtcacatcccgtgtggctgtggaggtcgctgtgtgactgtggaggttgctgtgtgactatggaggtcgctatgtgactatggaggtcgctgtgtgactatggaggtctcatccatgtggctgtggaggtctctgtgaccatggaggtcacgtcgcatgtggccgtggaggtcgctgtgtgactatggaggtcacgtcccatgtggctgtggaggtcgctgtgtgaccatggaggttactgtgtgcctatggaggtcgctatgtgactatggaggttgttgtgtgactatggaggtctcgtccatgtggctgtggaggtctctttgtgactatggaggtcacgtcccatgtggccgtggaggtctctgcgtgactgtggaggtcacgtcccgtgtggctgtggagatctctgtgtgactatggaggtttcatccatgtggctctgaaggtctctgtgtgactatggaggtcgcgtcccatgtggctgtggaggtcgctgtgtggctatggaggtcgcgtcccgtgtggctgtagaggtcgctgtgtgactatggaggtctcgtctgtgtggctgtggaggtcgctgtgtgactatggaggtcgcgtcccatgtggctgtggaggtcgctgtgtgactatggaggtctcgtccgtgtggctgtggaggtcgcgtgtgtgactatggaggtctcgtccatgtggctgtggcggtctctgtgtgactatggaggtctcgtctgtgtggctgtggaggtctttgggtgactatggtggtcacgtcccatggtcccatgtggctgtggaggtcgtgtgtgactatggaggtctcgtccacgtggctgtggaggtctttgtgtgactatggaggtcacgtcccatgtggctgtggaggtcgctgtgtgactatggaggtctcatctgtgtggctgtggaggtc

SEQ ID NO: 24651 - DNA, 1704 bp, Artificial sequence
  DNA replication origin
taggtcatgcatgccactgacagtaaaactggtatcacacaagctgctggcagaagcccggggtcctcgccaccttcctgctgagcgacgggagacactcaggcagttgggcaccacgaccctgcctgccccacctgcccctcccgccaccgtctccaacagccctcagggtacactctcttcccagtgtcctctgctgagcacgtcccagcagcttcccttctccaagccctgggagctctcctaccaaatgtttgctgctttcccctgagaagagaaggtgatgcacagctttcagagttcatcgcagtcctcagctcatggcctgaggaatgttaggaagatggttcagctgccagtggctgtccacaaaacccatcttgtgggctctgtgctttgcttcaacactcctactgtccccagtggccaagtacgccattaaggaggggccaaaaatacagatgctgggctccagccagaaatccggaattggcacatcagggcaggagtggtgctggtggtggcagtaatagtaatagtggtggtggtggcagcagtaatatagtggtggacaggtggtggtggcagtagtaatagcggtggtggcggtgacagtaatactggtggtggcagcagcagtaatagtggtgggcgggtagtggtggcagcagtaatagtggtgggcgggtagtggtggcagcagtaatggtggtgggcgggtagtggtggcagcagtaatggtggtgggcgggtagtggtggcagcagtaatggtggtgggcgggtagtggtggcagcagtaatggtggtgggcgggtagtggtgacagtaatggtggtgggcgggtagtggtgacagtaatggtggtgggcgggtagtggtgacagtaatggtggtgggcgggtagtggtggcagcagtaatggtggtggtggtggtggcagtagtaacagtggtaggcgggtggtggtggtagtattattaataatattatggtggcagtggtggcagcagccgcagtggtgggtgccacacaggtgtgcagagggccctgggagccacctcaatggtggagacgtgcacctcccttgactgcccacatcaccatgggcctctcctgttgctcccgcgtgtgctgcacaccaggtcttctgtgcacttcaccacagttggagcaggaaggtgcagtggccagacttgtgggctcgaggcagctgcctgggtttgaatcctggccctactacttgctagctgtgtgaccctgggtgagaagcttaatgtctctgtgcctttccttcctgaactgttaaaatggggatcaaatgttattagttcctgcctctgaagcccttggggcagtgccaggcaggtagccagtgcttaggaaggcttaggtctccacttgtgtgactctctaccctgccactgggatcttctctttaaaacatcaacctcagctgaaaaacccttcagggccctcatcagctctatccctccccacctcccactccccacacaggcttcttctggtcatgctgccgtcctagccatcactagcaggagatactcggctttgaacttactgcttccttctactctttctttcttagctgcctgaccacctttgctcattcttcaaagcacaggccaaggttcaccctcagccctcctccccatcccagagatggacaaagtatctcctcacc

SEQ ID NO: 24652 - DNA, 818 bp, Artificial sequence
  DNA replication origin
gcccaacgtggcggcaggcgtctgtagtcccagttgctggggaggctgaggcaggagaatggcgtgaacccgggaggcggagcttacagtgagctgagatcacgccactgctctccagcctggatgacagagcaaaactccatctcaaaaaaaaaaaaaaactggaaccatcttggataaaatgtacgacaaagtactgatgagtttaatgttaacagaactagaagtcagcaagaagaccagcaacaagccttcggataagtgagttcttcattagctttaagagagtgggagcagaggaaacgggtaccgtgagggcagacctgctttcaagaacagatgaacagcggctgagaatgactccaagaggtcgcaggagcagagctgcatttcagtggcaggtgactgggcattgtcctgcagcaaggccctaatatcccaggagagggcaggatcgagggcacagggagtgggggcaggtgagggctggccataggtgtggtgccgggggagacattggttgtgacggtgaccatggccctaggctggagggtgggggggtcatgtaacatgaagatttaggaggtaagcttggagggcgcagctgttggcaatgatggtctgggtgaggacagacggggaactggggccagagcatgggagacaagacctgatggtcgtccagcagtcagggacggtgacaggagccagtgatggaggccctgagtgcaggacagccctgaggcctggaggtgggccagccagtgagaagggcgcacccccgccggggtgtccagcagcatggaaggagcatggcc

SEQ ID NO: 24653 - DNA, 1743 bp, Artificial sequence
  DNA replication origin
ttcaaacacctctcctactttctaaaccctacttctagcctccttaagaagcagtggatcagaggagtccccgaatttaaacctccagagtttcgcgtaattgtctcattccactgcaggggagaaaatataatttctcttctttctctctttattagttgagacattctcctgaaaacaaaattcagagcaacaggagaaacaagcagaagtttattagcacttgctgtacccatcgtgtgagaggcctcagttcagaagtatttctctctcaaggcatgttgtgaacagcacaaggtcagacataaccaggtccacacacgtttatgtctttccacagggtgggaatatattgatgctatttcaattataaaagccacgagctacgaggagttgcctcgagacaattcccttcagtactacttgttaacttggtagagccatgggcaaaggctcaagccagtccacgtgtcagtcaatactgcaaactatacatcatagtgtacttaaaatacaaacgctatggtttaaacattccccatcaaacaaagtaacattggacatcaagagaaagaggataggaaaaggggttaatggatcaatccaaggaaagcaatgacgggaacaaggagtgtattccagcctgatccagacagaagtcattgtcttccaaggaagtccttgatgtgagcagatccttaggcagcagatgcagggtgctaagcacaagtgacagcaaggtggggtctatcaaaatgccagtgttgaattggtcaaatcccgccctttttaaggtcacagtcctctggtgaggactgatagtgagtgcctggtcctgtctttatctggctgagtgctgtctctattaactaggtgcacatccagtccccgttgctatgatgccttttgaaatgtaagattaaatctttttctaagatgtaggtacttatgcgacgggtgctttatacaaagcagtagcgtaggggccttaattaaatagtattttaacaaaaggccataaatcctatatgatgacaagccaaaaaacagagcatcttcagacttctaaaatgcaggagccaggcgccgtggctcagggctgtaatctcagcactttgggaggccgaggcgggtggattgcttgaggtcaggagttcgagaccagcctggccaactggtgaaaccccgtctctactcaacatacaaaatcagccgggcgtggtggcgcacgcctgtaatcccagctacttgggaggctgaggcaagagaatcgcttgaacccgggaggcggaggttacagcgagccgagatcgcgccactgcactccagcctgggcgacagagcgagactccgtctcaaaaaaaaaaacaaagtgctcgacaggaactttctgtaagccaaagagtatcgccatcgcaccttcaccttcaccttgggcagcctggtgccgtcttccctcagcccgcgattaacgagcggaaggccgcactgacccatttcagatcccttatttccttcctaaaaccactcaagagtttgggcacagtggcctccctgtgtgaggaacttgcttcccactcaccaaaagacaaacccttcgcccatccctggccgcgcacccggccggtcacccgcgctgccacccacaccaccctcctgtccataaagagcccgcgtttgggacgcctcgcaggctgaagggaggcctgggcgtccgcgatccgtctgccctttctcccctcg

SEQ ID NO: 24654 - DNA, 1840 bp, Artificial sequence
  DNA replication origin
cgcgcggtgctggaagctgccgcacctgcggggagccgagccgccggcgctcgacgcgcgcgctctcgcgagacccgcgggatcacgtgacgcccgggcgcggcgcagctcacgtgacaagcgctgccggccgcggtgtcttcttcgtgccggcgtcgcagtggccgggcctcttgcgtctggtaacgccgctgtctctaacgccagcccttggcgcccgcgccccgccaccgcagcgcccggcagtccgcggcccaaccgccgcccgcgcccccgctccccgcaccgtacccggccgcctcgcgccatggcggcccccggcagcgcccggcgacccctgctgctgctactgctgttgctgctgctcggtgagggggtcgaggcggggcctgggagcggcgggaccgggcggagccgaggtccctgggtcttgagggcgggggactgccgggtcgttgtcccgcgggtcgccccgcacccactgctcctggtcccggccggctctgcccgcgggcgggtgtttctctcggggtcgtagggtcggagcggagctcaatggcaggtgcttgggggaccaggaggtctcatcccaggacctggctcctctaaggtctgtctcactgaactcagtttttctgtggtggtgagtgcgaaagggaacttccgatggcttgctcggcggtctggtgctttcaggtcgttaagtttcctggcaagttgaggcggtgagatctagacgaggctgcgccgccgaaggtggcagggacgtctgtggtctcagctcccgggtgggtgacctagatcaagctcttcccaacatggatttcacccaggacagggagaagccggtgcgagcattccccacctttgtacttgaacctttctcctctttcagcggtgtggaggagatgcgagtgtatttatgttattgtgaattcacatgtatgttaaaataatttttaaagttatctttgggatttcacaagattccgtagtagacaagatgagggaaagctggcctcagactcacggtggcaatgttcatgtctagtaagtagtttaaagagcgccgttcctgtaggccgaaatgcgggaccagggaacacgtggggaagcacccttctcttctgtcagtttatagagctcagatgggcagtaggtgctcaatattgtattgactagtgaatttcgttctcatttattgtcttaataagaggatgtgtgctgtctctttaagacagtccggattgccccccgccaacactattctttcacctcctccccccgccgccctcccccgtaatatgagaagattatcttaaatgccaggatctgaaaggtgatgtagaatcaagctgggggagtgtgtgtgagttaagtagatatagaaatacactcctgtacacatctgccttgacttctttaaatccctcagtcccatccagctgtaaaactctgttactgtgagtgaatggatcttggcttcccttttttgttttgcctgttgtgtaaaatgaattctttgaactgcctgaatagccacagagatgaacttattccaatagtaagcctgaagccttgctcagctcctgcgacagggtcaggtgtagttaatgaaaggagttgcagaaacaagttttgtcatgtcacagcaactgcattgttctttgttacagatgctcacaagcctcataactttgatgttttgtttcatgttttaaaaactcacttcaggccgggagcagtggctcacgcctttaatcccaacactttgggtggccgaggcagatggatcatggcgtcaggagttcgagaccagcctggccaatatggcgaaacc

SEQ ID NO: 24655 - DNA, 1694 bp, Artificial sequence
  DNA replication origin
ccgcaccagctccccgaggacctcctggtcggtcttcaggcccagcatggccgggctgtagtaatctgccaggcaatgtggagaaaagaccccgagacactcccgtcacctccacaagccccattcccctcagagccagacaaagacaacagggccaccctgggaggacccctcccaagagggagggacaaagttggagaggaagagtcggggtgaggcctgcagacacagggctcatggggagcgacccccacagccaggcctttcaggacgtccctgaggctggagggataggctggatgccgcctggctgggcatcagttaaaatctgcaggtggagggtggcgcggtggggggggggggggcgggagcgtggctcacacctgtaatcccagcactttgggaggccgaggcgggtggatcacctaaagtcaggagttcaagaccagcctggctgacatggctgaaaccccgtctctactaaaaatacaaaaattagccaggtgtggtggtgggcacctgtaaccccagctattcaggaggctgaggcaggagaatcgcttgaacctgggaggtggaggttgcagtgggccgagatcacaccactgcactccagtctgggccacagagcgagactctgtctcaaaaaaacaaacaaacaaaaatctgcaggtggaaaagagagtcccaaggaggtgcaggcacccccgtgttcctagcagaactatttacaacagccaagagatggaggcaacccacgtgtccgtcggcagacaagtggataaccaacatgtgaatgtccacacgacggaatattattcagccttagaaagggaggaagtcaggccacagcagcgggagggagggagtgacaggaccgagttcagtctgggaagatgaaacagctctggagagggcggcggcaatggttacacagagaggtaagcggcccttgtgccactgaactgcacaggggaaagacatgggtaagatggtacattctatgttctgtgtattttaccacagtagaaataaaacgtactcagataaatacttccaacagcttgcccttcttttgaatggacatttgtcttaccaaagcacttttgtgtttacctacgtaattttttaacttgttcatgtaatgagttatagtacatttttttttgagacggagtctcgctctgtcaccgaggctggaatgtagtggcatgatcttagctcactggaacctctctgcctcctgggttcaagcaattctcctgccttagcctcctgagtagctgggactacaggtgctcaccaccacgcccaagctaatttttgtattttcagtagagacaaagtttcaccatatttgccaggctggtctcgaactcctgacctcatgatctgcccgcctcggcctccaaaagtgctgggattacaggcgtgagccactgcgcccagtctgttcttgttaattcaatatcttggttaaaatagaaccatcacaaacactgacgcaacatcacggtcctgtcactgcttttcagagtgagcacacagtgaagtcggtttaatagtaaatactaacgcctctgaaggtgatttagccagagccaattcagtgagcaagcgccaaggattaaaaacgcctcccttccatatccttgttctgcacctgccactggggttctgagcgctttgctcat

SEQ ID NO: 24656 - DNA, 1084 bp, Artificial sequence
  DNA replication origin
gcacctctttctcttcctgtccaagcacttgggtaagccaaccctccgagctcggcgcctcaggctttcctgatgaggataccccagcgccctccggctgggcccctctcctcgaaatttcctgcagactggtggctgaatcaagacctgatgtcatgagtccattagaagaggcgggataaatgctggtcccttggctttatgtccccgccctcaaaataataaattggcgtctggtcactagaaggcggttggtcagtgctgtgtgtccatgtcaactgtggactcctgggctgcacacactggagggtttttatccttcttgaagctcaggttggcccatctgtggccagcgggagcctcttctggttggcccctgagtcctgtggatgtgaatgtggcgccgacggcttcctcgagtctgcaggacaggctactctgggctcaccccatgggccttctgccccagacctggacccgcctgtttctccaggaaactctggcgtaatgtgtgtcactgggcctttgtcagtgtggctcctgaagcttgttcttgggtggattcctcgggatgtgtttgtgggaactgtccttacggagtgcttgaagaccgtcgggtgggatctgggaactgggaggtggtgtcggtgttgactagtgtcgaggtggccatactgttgtttggggaagcacgccctggagtatttggtgcgatggggcagtgagtgtgcagctctgcctcacacagtccaggggatggaggcaggtgtgcgtgtgcacgtgtgtgcctgtgtggtgtgcgtgtgcacgtgtgtacctgtgtgtggcgtgcgtgtgcgtgtgtggtgtgcgtgtgcacgtgtgtacctgtgtgtggcgtgcgtgtgcacgtgtgtacctgtgtgtggcgtgcgtgtgcacgtgtggtgtgtgtgtgcacgtgtgtacctgtgtgtggtgtgcgtgtgcacgtgtgtacctgtgtgtggtgtgcgtgcagatagggaggtgacgggggagcaaatgtgctgaaatgttcacagtcagggaatctgatggggatgtgggggttctttgtgcagtt

SEQ ID NO: 24657 - DNA, 994 bp, Artificial sequence
  DNA replication origin
atgccgggcgcggtggctcacgcctgtaatcccagcgctttgggaggccgaggcgggcggatcacgaggtcaggagtttgagaccagcctgaccaacatggtgaaaccccgtctctactaaaaatacaaaattagccgggcgtggtggctcctgcctgtagtcccagctactctggaggctgaggcaggagaatcgcttgaacccagtaggcggaggttgcagtgagccgagattgcgccattgcactccagcctgggcgacagagcgagactccgtccttgtgacgggacccacagggccctgctcgacctgccgctcctccgcgaccccaggcctcctactgctgcggtgagcaccggcctgaccgcccgcccgcctcggggttagctgcagggccccctcctccggggcgccccaggcttccctgtgcggagggcacctcctcatttctgcctttcccagcacagcccctgctggagtcaaaaacccttcctccctgcaacggatttttcattcactgctcagtcctcagaacctggggcagtgccaggcgacttccctgtgtgttcagtgaatgaatgaagtgtctgcctggggtgagggcttggtgggagtgtgccctggagctaggaactcagagaagtggggtcaaaggggagtcctgggggcttcctgagaagggggatgtgaatggcagctgggcttccagggaccgagcagtagggacctggtggggaaggacagagatgaaaccaggggccctgcacctgggcggagggtcggaggtgtgtggtgaccacggccaggcacagagaagccaactgttaaaggttttccaggcagggggtgacaagatcaacttttgcttttatttatttatttgagacagggtatccctctgagtgcagtggcacaatcaccactcactgtagccttgacctcctgggctccagccatcctcccctctcagcctcccgcatagctgggaccact

SEQ ID NO: 24658 - DNA, 1457 bp, Artificial sequence
  DNA replication origin
aaaaaagcaacaagacggctgaattcctgaagggaggaggggcatcatgggtggtgaccccacagaggccccctggtgtggcccctgaggcccctcagactgaagagggcctcctgcaagggagctgggtcccccgggggagggtgaattctgagtccctgaactgcagggcaagctgacccagagctccagcactgcaaagcctcccccggaaagggctgtctggagcggctgtggccagcacagtcactcctggggtgggtgtgcacctggcttttgcatcatggctgactgtgctggtggcttcacagaaagggagtttgtgtgaggatgctcgggtgcctgctgggtgcttggcactggggtcgggggggcggtgaatggaggcacctgagggacacagtcccaggtgggagctgtcccaggtgggagctgttccagataggagctgctgtctcccagtcaggtcccaggttggggcttggccaggcctgggctggagcgggagacctttctagctgcctcggtctggctgcccaccctgcacagagcctggggctctggcctctctgtatctctcctctccactcttcctggagggcaccgctcttatctgacctgctcccccacagtctccctacatctggcccaaaaatacacttggtggcagtcccgccatcacactcaggctcgggagctggcggcccctggtccgtgctgcctgccacgctgctttccacggcagtggtgggaaagggaggttagaaccccatctccatggccagaaggcaggaattagggaaaaggggagccgtgaggcttccaggcctggggttggaacagaagctgcgcggtgtggggcgatttgggcgcaggaccccgggtgctgggaagtggggagcaggactgtgtctgttgctccagaaagcgcgagggatgcgatataggaaattcgggcgtcagttagagcccgagaggggttcagggagtcactgacttaggcagagaggagcccagacggggttcgaagaccctggggacggacgcccacctgtcagtcctggactgtggggcacccgtaggccgaggggcaggaggctatggccctgtctcctggcttgggtctaaacatcccaaggaggtcagaccgtagagtgggggctgtgtgatctttcaaatgagggacgccgcgtgttaccaaaggccagtgctgaggagctgggctgaaagcttggggagttcccagaaccagcagactaggaacgggaggaaccgtgtcgggggctctgctccgctgggcactgacccccaccccgccccccggtcttgcaagggctggagaagggtgaaaggcagaggcgggagtccgcacttagggaccggtccgttccacacgctgctgaccaggctcctgggtggcgctcgcatggaacattccggaaacacccatgggaagg

SEQ ID NO: 24659 - DNA, 2407 bp, Artificial sequence
  DNA replication origin
ctcctctctttgtgcccttccagggttccgggtggcctgggcacctccaggtggtcctcagggtctcgccatcatggtcacacccctggggccaaggggtatctgagggctggtcatgacccacctggggtcagtggtggctgtcagctgtcactcagctgtgccatcactgggtcacccacccacgcttgtctgcaacgcctacacactgcctggaggctgggcttggagagctggtgtgctagatggacaagaggaaactgtgtcaccatgttgcttctgccaagtcacagccacccagagtcaggagcagaaacacagacccctctcctccatagaggagccagtcacagcctacgaggagtggggctgccatgagcactttggaaaataggacctgcgactcctaaacacagcaggtgctcacccagggcctgctggattcacaggcgaatgtgaggaaaagaagagctggggtttgtgtgatgtcatcctccatgacgtgctcagaaagttctgatgcatctgatggggactgatggggactcatgggaactgacagagactgatggggctgatgggtctgatggggatgatggagtctgatggggactaatggggtgtgatggggtctgatggggtctgatggggactcatggggtctgctggggactgatggagtctgatggggactgatggggactaatggggtgcgatggggtctgatggggactcatggggtctgctggggactgatggagtctgatggggactgatggggactaatggggtgcgatggggtctgatggggactcatggggtctgctggggactgatggagtctgatggggactgacaggaactaatggggtgtgatggggtctgatggggactcatggggtctgctggggactgatggagtctgatggggactgacaggaactaatggggtgtgatggggtctgatggggactcatggggtctgctggggactgatggagtctgatggggactgacagggactaatggggtgtgatggggtctgatggggactcatggggtctgctggggactgatggagtctgatggggactgacaggaactaatggggtgtgatggggtctgatggggactcatggggtctgctggggactgatggagtctgatggggactgacagggactaatggggtgtgatggggtctgatggggactcatggggtctgctggggactgatggagtctgatggggactgacggggactaatggggtgtgatggagtctggtggggactgatggggtctgttggggtctgatggagtctgatggggactgatggggtctgatggggactgacggggactaatggggtgtgatggggtctgatggggactcatggggtctgctggggactgatggaatctgatggggactgacggggactaatggggtgtgatggagtctggtggggactgatggggtctgttggggtctgatggagtctgatggggactgatggggtctgatggggatgacggggtctggtggtgactgaaggagtctgatggggactcatggggactcatggggtctgctggggactgatggagtctgatgggtctgatggggtctgatgagggtgatggggtctgatggggactgattgggactaatggggtgtgatggcatctggtggtgactgatggggtctgttggggtctgatggagtctgatggggatgaaggggtccgatggggactaatggggtgtgatggggatgatcggcactggtgggctggcccatgggctgcggccacatttccatgctgaagagcctgatgtggtctgatttatttttttaaaaagtatttccccagttattctgtagcttgctgtctgacaagagtggaggcaggggccagtgagaagggttagagaggacagtggcctggaggaggagcagatggagaggaggggtcgcctctggattctttgctgaggtgggtgcagcaggagctgcttctggggtggattcgtccagatttgttaattgccttcattcttctctacttcatctgcctcaggaaagaagggagtacgcatctggaaggcttaattcagactatttttactgttgaaaaataatgacattgtctaggttagaatttaggagcagtaatataaagattcgtgagatgaaagttgtacgtccagagaaacctacttacacctggaatagcgttactggatttagcaaataaaaatgcaaatacaggacacccagagtgagacatacttttactaatatagaggaagaagtcaaagcaaaacaaaacacttcctctaatctattgcttgagggacctgggaattccttggacctgggaatcaacgtgatcaggcagat

SEQ ID NO: 24660 - DNA, 1222 bp, Artificial sequence
  DNA replication origin
cccattgtctccaggcttctccaggactcggcttcccgcctctcctttggggaccgcacgagtcactgggggaggctccgcgggcagcaggtctctgggaggggttgtcgccccctcggtgcgcaggggagcgacgggtccctcctgcacctgcagggacaggcctcgggctgcaccgtcccgcgcccgcctaccccgcgcccgcctcgccggacgcctcctgcctgagtccgccagggggcgctgccggcctcccgggcggcggctgctgcaagaggaagccccggcccgcgagctgctgccacatccggacgccgccgggagccgccgggagccgccggggtgggcgggagtcggggcggcgcgcaggttcccggccccctaagggacggttgccttccccagagccggggacacaggcgtacgtgcggggacctcggcgctggcctccgggcttctggagcccctccctggtgcggagcggggacggtgacctcctcgtggattctgggaggggcagccttggcatcaggacctggaagccggagaggctgcagggcttccagccatggccttgccaccggaggtcacgtagtgtttccacatttccttagtgtgtacatgtgtgggtccctgtgttgtggagggctgtgtctgcttggtgtgtgtgcacacgcgtgtgtgcatgggtgggtccctgtgttgtgtaggggccgtgtctgcttggtgtgtgtgcacacgcgtgtgtgcatgggtgggtccctgtgttgtggagggctgtgtctgggcaggctgtgtacacacccatgtgcatgtgtgatgcgcactggggcacttgtctgggtagtagaggtggaggcctgtgtggccatatgtgcaactgtgtgtccgggtgcgtgtaccacagtcttccctaaaatagtaatactgggacctacgtcatggggctgttgtgaccgcgtgtggcactccatgtggggtggcacagccaggcgctgatccggccactttgccagtcggactgactgcgtgtcctctccttaggggtgagaagcttcctggcatcgggcctgggctcctgagcccctgagccaaccgactgatggtccctgggagacagcccccgccctgctcctgccccccacacctgaaaggctcattgtgtgggtttgctgtgctccacagggatgtaaaccgcccctccttttccctgttctgtctg

SEQ ID NO: 24661 - DNA, 1206 bp, Artificial sequence
  DNA replication origin
gttaattcggggttggcagggatgccaaagcttttctgggtcactgtttcctgttaaatggcaggaacttctgacacacgctcctcctaagggcattgaggagttgacattgaacagtttagtgaaagcgtttggaaaaccactttgcatatgcaacatattaaaagaaaattttaacaaacatactttgcttgtacagtaggtaaaaaagcacatataaagaagtgtctattctctgtgtggactgtgtatgtctctacctttaagtatgaaagataaaattaacagcatatttaaattctgccatgatcccagggacctgggtccctacagcagagactgaagattcagcaaaccgctcaggcttggggtgggcggagaaggcagaaagagtttcctcacaagctcctgggcaggaaccagcactgcagtgggcagtgcccaccaggagcaggggaggagggggctgcagagaggaagggaggagggggctgcagagaggagggaaagatggggctactgaaaggaggggaggagcgggttgcagagaggaggggaggttgcagagagggaggaaagagggggctgcagagaggagggaggagggctgggatcacttggctgggtctccggaacccctttcaaaatggcttagaggagccactgaggctgggggctgccgccctttcccagtgagatgtttttctgcaggttcaccagggattccttcccaccagcccagctttcaaagagacgggaccaaatgggtcttggctggagagacagggtctttgtgatttgatggtgttttctgagcctgggtccggggtaagttctgctcctgagcagccgtgaccacaggagcaaagctggaaggtctccccatctgtggcagggggtggagccgtctctgacctccccagatgataattttgggtagacgcacccagaatcttagctgtcacacctgttagtcattcattctaaggagatcatcagggatgaggaacaaagactcgagtattacaggaaaagtcgccttcatggtgccgtttataatgttgaaaaatctagagcatcctcgatgtccaactccagggcggccgcacaatggcacgtccacatttgtgggagaagagtcggtggccggatgcggctggtgacgtggtgccaagtgaaaagctcactctaacccgattgttttta

SEQ ID NO: 24662 - DNA, 1852 bp, Artificial sequence
  DNA replication origin
ggcgctgttggcggtgggtgaaccgagctccgcggggcactgttggcggtgggtgaactgagcctccggggcactgttggcggtgggtgaaccgagcctccacgggggctgttcgccacccacgggtcttctgccagcccgcccggctgtgcccaacgctgctctggactcgggaaagtagagaccagaaccaacaggggtcccgcccatgcaggggctctgctctagtggggagctgggcagaaacaggggtgacttgttgaaaagtgcactcggatcttagaaaattatagagctgtggctgggcgcggtggctcacgcctgtcatcccagcactttgggaggccgaggcaggcggatcacgaggtcaggagatcgagaccatcctggctaacatggtgaaaccccgtctctactaaaaaatacaaaaaattagccgggcgtggtggcgggcgcctgtagtcccagctactcgggaggctgaggcaggagaatgctgtgaacctgggaggcggagcttgcagtgagtcgagatcgcgccactgcagtccagcctgggcgacagagcaagactccgtcccaaaaaaaaagcaaattatagtgctgtgacagtagtcacccgggatgtgccagcagcagcagcacacgctgagctgggggctcccagaatcccccaaccagtgaaacccagagcacagaacatgctgagccgggagtagaccccggaagaaggaaccacccgcaggttcaaggaacccaaagacagcagcacctctggggctaccacgaggggcggggaccagagagggtgagcgcaatagtgggcggtgggcgcaggactttgtgacgagaaggggcagcccaggggaatggcaggacagcagggagcaggggagtggccaggccagacccagggaggaacttggttaatgatgattgcaaaacacaaaggctctgtgaagggggctgtggaaacccctctcgctcccgccaagggcgtcatcctgaaccgcggacgcctccgacagccacaggtccatggctgaggacacctcagcaaggcggggctcaccccaaagaggactttgtagctctggccgaatcccctaatcctcagccaataaacccagaagagcatcctgatctctgtgagtgaaaacgtgtctcagatgatcacgctgcggggtgaaagccggctgtgacagctgaagagctggaccgggtggccaagtacgtcctccacgctcaccgctggttgctggccaggtcttgatgacacgctgacctcataagtggttacagacttagatgtgcggtggaagagctaaactggattttgagccactatgactcataaggaggacatgcagctagtccaacctatgaggatccactgacatggccccaccacccagaacagacgctcagcctcgacaaggggctccgagtgtggggagtggtcccgtcaccaagctgcccaccacctgaggccagggcaatgggaatttagaaatcagcctggagctccattactctcttcatccaagctcgcctcctaacaaggcaggaggatgagctggtttaattccagctctgtttttcatctttctatttggacggtggggctcagaagccatcagcgagggatgtgggaaggggcggattgacgtcacacgtggctgagcctggtggcctttattcagatgatcagaatgtccccaccacaagcagtcagcatggttcagtcatccgaatgactcacctgcaaagtcattaagacaactgaaatgcccagagcggggacaaaacgtgtgacaggctctgagaagttcagcctcctggggtgaaggga

SEQ ID NO: 24663 - DNA, 1731 bp, Artificial sequence
  DNA replication origin
gacagttgcaggcccagctgccacgtgaaaccggccctgcccttctctcagaggaggaaactgcggctgagggtgttccctgccgcagggccaggctcgggtgagcccagcacagccactgactgggcagaacagtgacctccaggccctgctggccagaaagtccccagcaaagaacctgccaacaggggctgctgtccatatcatggtgggcccgggtgtgtctcctgcgctgtgatggcctctagtctcattgtattttcaaacgacctctctggctggccagagccaccaacaactaaattaggaaagccgggcaccctgctgtttatattggcccctgggaggaagacattccattccctgtgggttctgcagcttgtccaagtgctgaggggacgctgagggaggcccggtctcgccccgcactgctgggcgggcagcggtcacacagggcagcccagactccgccagcgcagctctgaccgggggccttttcaggaggctttgaggggtggggctgacggcccaaggggcagcactggctccagcgcatgaggacgcgttcactcagcagcaaggtgtgcagcaggggtgggaaagggcgagaggcccaccttcacagcaagtgaaggccccgatcacagggcgcctcgggagacacgcagagccccacgcgggagtcgccgaaagtcctgggcccccctctcagtccatgacttgggggcgttcctggcgtccacgctgttcccctttgtggggacatagaggtctgtgtgggtcaccgtggggctcacagagctgggcctctgggaaaggctccctgaggtgggggcatctgagccgggttgtgaaggatgaataggagctcgtcagggaggcagcgaggctgttccaggctgaagggcacagcgaggttgggcgtggagtggacaaacagggtggaggctggagctggcagaaaagggggtggccaggagagaaacagggttgtgcagtgggtgaaccgagttctgcgaggcgctgttggcggtgggtgaaccgagctctgcgaggagctgttggcggtgggtgaaccgagctctgcggggcgctgttggcggtgggtgaaccgagctctgcggggcgctgttggcggtgggtgaaccgagctctgcggggcgctgttggcggtgggtgaaccgagctctgcggggcgctgttggcggtgggtgaaccgagctctgcggggcactgttggcggtgggtgaaccgagttctgcggggtgctgttggcggtgggtgaaccgagctctgcggggcgctgttggcggtgggtgaaccgagctctgcggggcgctgttggcggtgggtgaaccgagttctgcggggtgctgttggcggtgggtgaaccgagttctgcggggcgctgttggcggtgggtgaaccgagctccgcggggcactgttggcggtgggtgaactgagcctccggggcactgttggcggtgggtgaaccgagcctccacgggggctgttcgccacccacgggtcttctgccagcccgcccggctgtgcccaacgctgctctggactcgggaaagtagagaccagaaccaacaggggtcccgcccatgcaggggctctgctctagtggggagctgggcagaaacaggggtgacttgttgaaaagtgcactcggatcttagaaaattatagagctgtggctgggcgcggtggctcacgcctgtca

SEQ ID NO: 24664 - DNA, 1318 bp, Artificial sequence
  DNA replication origin
tagtaatctctcctcagcctttgggctaagatcaagtatagatttatttgtaaaatgttaggagcctcaaattaaagggatctgtgttatttaaaaccaattttaaaaaaactactaaggaggcgagcttgcttctctctctctctctttttttttttttttttttttgagatggagtctcactctgtcacccaggctggagtgaagtggcacgatctcagctcactgcaacctctgcttcctgggttcaagtgattctcctgccttagcctcctgagtagctgggactacaggtacacaccactgtgcccagctaatttttgtgtttttagtagagttgcggtttcaccctgttggccagactggcctcgaactcctgacctcgtgatccgcctgcctcggcctcccaaagtgctgggattacaggcatgagccaccgcacccagcccttctctttttataacactaattcggtggaccctgcctggtcgcctggagccggccactgagcccacgcctggctggcctctgggcagaacatttcctgtcatcagtagagcagctgggccatggaggccacttattcaatgcctttggttaaaccctttccaggtccacactctgcttggggaccacatcgcgggcaggcgtttctcaccctgccccacccggacacgggcaggtccgcgtctccagaagggctctcgtccctctaggctgaccagcaagaaccccaggagcccaaaggtgcagccccagtgtctctgtccatgagctgtggaagggactctgccaccgcagctgccaaacggcccctcccctctcctcacctgccccagggggttgctgggcgctggctacctagggaggtgtcgccctccctgatcttcatggcttcaggggaaaatgggcacagaacaagcagccataaaaacagaagaggctgagctgggcatggtggctcatgcctgtaatcccagcactttgggaggctgaggggcatggatcatgaggtcaggagttcgaaaccagcctagccaacatggtgaaacctcatctctaaaaaaatacaaaaattagctgggcgtggtggcgggcccctgtaatcccagctacttgggaggctgaggcaggagaatggcttgaacccgggaggcggagcttgcagtgagccgagatcacgccattgcactccagcctgagtgacagagaaagactccatctaaaaaaaaaaaaaaacagaaaacagaagacccctgctcagcacactcagggagatgtgcagaggcacgtggccctgcccctggaagaggagcat

SEQ ID NO: 24665 - DNA, 1909 bp, Artificial sequence
  DNA replication origin
ggcgtgtcccaggggtagaggtgtcccgggagtgggcgtgtcccgggggtgggcgtgtcccggggtgggcgtgtcccgggagtgggcgtgtcccgggggtagaggtgtcccggggtgggcgtgtccctggggtgggcgtgtcccgggggtagaggtgtcctgggggtgggcgtgtcccgggggtaggggtgtcccaggggtaggcgtgtcctgggggtgggtctgtcctggggatgtgcgtgtcccgggggtgggtctgtcctggggataggcatgtcctgggggtagggatgtcctggggataggcatgtcctgggggtagggatgtcccagggtaggcatgttggcggggggtaggggtgtcccaggggtaggcatgtcccaggggttggcggtcctggggggtgggcgtgtcccagggcgtgtcggggggggtagggttgtcccaggggtgggcatgtcccaggggtagtggtgtcccggggtgagcgggtcccgggggtgggcgggtcctggggctaggtgtgtcccaggggtagaggtgtcccagggatagggacacgctttgctttttccatagagatgccccgttcgttttgtgggaagtgtagtccatgctgatggaggaatccgtggccttctatgctgcagcaatgtggctccgtgctgagcttccgaataactggactaactgtgctgctactggtgctttaagtcagaagaaccagagagacaggcacacgggggcgaagggcctcacgtcacacacgtccatggagtgtggtcccagcacccgtgggtgtggggaaattaactgagaattacctttcaggaaaagaaacccaattaaggtaagtcggaactgttgctagcataagtaacacggtcgtagtacctgttttgcccgcttaccggaaagtgggcttccctctccaccctgctgtatggaagagaaggccagctcgcatgagcagggcgcggctgcattcaaacagggtggactcggtctccatccgcaaatcaaacccctccgtgagaatcagaaagtgagtctatttacaaactgattatagattaaaacacacaaacacaaaatccacaagcatcgtaaacaaaagctggcagtgccttgcttcactttcctgttacagagacacccaaaagttgaaaagaaaaagccaaagaaagcactgaggggacactgagccaactctgctgtttaaaacggcaccggcaggtttcatttttgcgataaaaatgacgtgtgcacagcttcgcgaatccaaatgctgttaaaggcggcgtgtggggaaagctgcttccaaccacccagataacacggtcacggtcgcctaagcctccttccaggagcctcctcacacaccccccgagctgtgtgcctgtgtgagacacacctgcttatgtgagataacaaggccatgctctcctcccaggagcctcctccacacacacaccctggctgtccacctgtatgtgagacacacctgcatgtgtgtgctatgccacacacactatttctttccccaaacaggaagcatggtatatgtcatggtttgcttttggctgttttcattaaactaggttttaaaatattatctgtatcaccatacatagaccaatctgcgcctttttaactgctgcctagtattccattgtactcctgtgccataattcaaataccccatggatgtggctctcagtggtttccatcgcgtgagtggcatttgcaaacacctgctcttatggcgacttccagtgttgctccccagctcttctgaaaaggacttagtctctccctacagcgcagcgatgctgtatttcattctaggattcatttttgtatttaatttttctgaaattgtggtgcatcttatattttatggtgtcc

SEQ ID NO: 24666 - DNA, 1070 bp, Artificial sequence
  DNA replication origin
tccccacccccaactccctgcacccgccccactccatggatgccattgtgttcagctccccttgttctttatgtttagaataccaggagcactggttttactttgaagctaaatggcaattttatttggaggagaggaaaatcagtaaagactcagaaaataaagccatcttccccgacaattatgatgcagaagagagggaaaaggtaagccttgtcctggcactggggcaatgtctggcacaccagtggtgctcaataagtgcatagcaagtggatggatgggtgggtgggtaggtgaatggatggatggatagatggatggatagatggattttggatgatgggtgggtggaagggtgcgtgaatggatgggtaagtaaatgggtgggtgaatggatgaatagatgggtggatggatgggtggacaggtgaatggatgggtgcatgggtgggtgggtgggtatatggatgggtggttgggtaggtggatggaagggcaggtaggtagaagcgtgggtgaatggatgggtaggtaaatgtgtgggtaaatggatgaatggatgggtggatagatgaatggatggtgaatggatgggtgggtggctaaccccatctctactaaaaatacaaaaaattagccacgtgtgctggtgtacgcctgtaatcccaactactcgggaggctgaggcaggagaatcgcttgaacccgggaggtggaggttgcagtgagctgagattgtatcattgcactccaacctgggggacagagccagattcatctcaaaaagaaaagggtggatggatgaaatggcagttcactaggaggggcccagaaagcttgtgctgtaatatacccagaagtggctccacttgggcacacgccccgacccacggctctcttgtcagacctacaggaagtggagctcggaaggtcgagggggaagacgaggccacgatgcccccatgatagcctatgacgccctccttgcagcaggaaacagctggactgagctgtgtcaccgggccatgtttcatggaggtgagatgttccttaatggccgtggcttc

SEQ ID NO: 24667 - DNA, 1743 bp, Artificial sequence
  DNA replication origin
ggcccccgggcggcgctgagcatgccgggagtgggagtccccgcggccggctcccggcactgccccggagccgagggccgcggccgtccgaggacgagggcggagccgccgccgcgcctgcgcagaaggccggggccggccagaagcgggcggcgcgggggagatggtaggtggcccggcgtcgcctctgcccgtcggggtcggggtcggggtcgggccccaaggtcggcgcaggcggcgcgctggatgtgggaggccgagcccagcgagctgcgcggggcgttccgcgtggatccgagggaggaacgcgccgcgggcccgcgagccggagcggtggcgtcggaggcgcgggaccgcggggagcgcgggtttgacccggagccgcgagggacgaccgggagtgagcggagggcgggggccgggaggaactgtaggggccttggggcaggggccggggccgagcgggaacccaggccgggggcttcccagggcggcttcgaaacgggcagtcgaggcgggcgagggctcggctgctcctgcgggcgtctgtgcagatgctgaggctgttgaccaaaacagcgcaaggaaggaatccgcgagaagctcagattcgcgggggaggccctgctgccgggaggggagggagaggcacagcggggccctagcgcgggctctagccgggagctgtagcgtggctgtaggtgtgcatctgtggagctggtagagttccgcagcgcaggagggaggctgctggaggtgcacatcagttactttgaaatgtggtggaaatggtgatggatgggatttattcagtccacatcggttcagaggccagcaaggtgctgctgggtgtgactggtgctgggccaggcatgatcttggcgttgagggagttgatgccccagcaggggagacaggcaccagatgcacaattgtttgaccacagttgggacaaaggctaaggcacgggttccaggaacttgtaggatgcggctgtgggagtggtgtcagatgctgagggtgtgagttgaactgtggagaatttctctggaaattagccagagaaaaagtgaggttccggggcagccagccgtgtgcggctccaggcagaagaaacagaatgcacagacccttagtggtaggcgatgatgacgtataggagctgaaagattgtcctggctaaggcacagagagccaccggagaagggacacggtaacgtgtagaggggagtggagggtgaggacaagcttcaggatgggagaagagccacaaaggagactgagagggggctggtaggagaaaccaggacactagaatgtgtcgaaaccaagaggatggagtttaaaggaggagggagccatcagcagtgctgaacaaaagagcagctgaaaagatcccactgaccgcagcagccgagcttttgtgacctttaggggtcactgcggaggccgggctggagccaggtagcctgagttaggatgcacacctgggcaggtagagatagcttgctccagcttttaggaggacaggggcagagtggacaggaacttagtttggggaaaacttgaacatgttcaggatgctggagaggagcgttccactgctgccgaggttggagatccaagagcagggatgaatttaactccccctccctctagcgtgctgtataccgaaacagagtgaaagtgatccataaacttacgtagtttattcgatcaacatgattggcccgccagccccgg

SEQ ID NO: 24668 - DNA, 1473 bp, Artificial sequence
  DNA replication origin
ccaggccccacgccggccaggaagtgctcgccgcccgcggccgacgggacccgcccacgccccgcctcttaaagggggcagtgactgcggctgggcgggagtccgggtcggcttggctgagcgggggcggtgctgggcagggcggcggccgctccctcccggactcccggcctcccggcctccctggtcccgcctgggaagggatgcaaggaagccctccggcgctgcgctccgaggcgggagacagcgtccccctccgcccctcgggtcctggcgcctcagagcccggcccaggccgcggaacggtgatgctcgggccggacgggcgggcgcggatccctgcgtcccggtgagcaccaggcccgtccatccggggctctttcccggggtccccttccttccctccctccctggggctcccctcccctctctccctccccggggctcaccttcccttcttcccttcccaagggtccccttccttccttccctccctccctggggctcccctctctccctccccggggctcccattcccttcttcccttcccaggggtccccttccttccttccctccctccctggggctcccctcctctctctccctccctggggctcacctcccctctctctctcctcggggctccccttttcttgcaggtattgtctcccggggtcgggtggtctgtgtggcctggggtcccgctcctccaggccttgcctaggcgctcttcgctgaggcccacgttctaacctggaatggaacctgcgttcccaccctggccgcccgggtggactcggggcctccagggccggccgcagagatgcagccctgtccctggcccccctcctgtgactcctaacggctcctcacggtgtccatgacccagggtgtggacgcctgcgcgggggaagcaagaccgctgcgtatcgggtccctattcactgcctgtttttctgattattctgtcttccaaatttatcttatttaccggctttttcaaaaggagtgtcttaatgattggattacttgtgaaatatttgtagtttttttctcctacaggcttgacttaaatattctaaagcttttttgtggttgttgagacagagttttgctgtcgcccaggctggagtgcagtggctggtcaaggctcaagcgattctcccgcctcagcctccccaggagctggggccacagggagcatcacgcccggctaattatttcatttttaatagagacagggtcttgctgtgttgcccaggatgatctccaactcctgacctcaagcagttcgcccacctcagcctcccagagcgctgggaatacagataattgtgtcgtaatacagcagtggcattaaccaccgcacctggtcttaggtagaatttgaaaacctttttattttgagatggttgtagatcacatgaagttgtaaggagtaatacagagaaatcctacagagtgcctttgcc

SEQ ID NO: 24669 - DNA, 872 bp, Artificial sequence
  DNA replication origin
ttttctttatactctcttcccatttgcttcctcagttcatcctcttacctagaactttttgttttctttatctttctgtttttccactaaaagctccgtttttccatcttcccattactctccctttcctgtgtacactcctgaagacaggcatcctcataaggtgttctgaattaactttagggtgttctccaggtactttgcatctttttatatttcttgtaaattgttaatttctaagctccatgattaaagagaattcaccactctcctgggtcctaatgaaaagctgtgtcatccttgccgttaatcctgtggaggagactgttgtgggtggggagggtaagggagcgtgggccgcgtggctgcctggcctgtggaggaaggagcctgttacgggtggggagggtaagggggcgtgggccacgtggctgcctggcctgtggaggaaggagcctgttatgggtggggagggtaagggggagtgggccgcgtgctgcctggcctgtggaggaagaggctgttatgggtggggagggtaagggggtgtcagccagtggctgcctggcctgtggaggaagaagctgttatgggtggggagggtaagggggagtgggccgcgtggctgcctggcctgtggaggagcctgttatagggggtttggggatgtggctgtccagtgccctgtctcaccagtgtcccacgagactccgtaaaaacacaaggcctccattccatggtgcagcatgggcgtgtgtgtgtgagtgtgtgtgtgtgtgtgtgtgtaatttagagaggtttgcagcaaagggcaatttagggccaacccgtaggggaggtgggagggatgaagttctggctgtgcagcagag

SEQ ID NO: 24670 - DNA, 882 bp, Artificial sequence
  DNA replication origin
ggggagggtaagggggtgtcagccagtggctgcctggcctgtggaggaagaagctgttatgggtggggagggtaagggggagtgggccgcgtggctgcctggcctgtggaggagcctgttatagggggtttggggatgtggctgtccagtgccctgtctcaccagtgtcccacgagactccgtaaaaacacaaggcctccattccatggtgcagcatgggcgtgtgtgtgtgagtgtgtgtgtgtgtgtgtgtgtaatttagagaggtttgcagcaaagggcaatttagggccaacccgtaggggaggtgggagggatgaagttctggctgtgcagcagagcgtcaacaaggcactgatctgcctggacctgtgttcctctcctgtacagtgaggaatctagaaggctccagtgtcttctggctctgcattttcatagtttgtatttttctccactatagtattcacagttaaataaaaaataatgttgtataacgtaaggtggaggtaattgtgagcagcgtgagcatgtgcttcatcaggcctgctgtcgtctaatggtgcttccgagggtttgcacccggttctgaagtgcctgcttggtggtgtagactcgggggcttggcaagaggctggcgttctctgttagtaagttgtgctcagctgccctgcgtggtgacagagtcagatgcgtggaaggacactggattgggactcaggagacgtctgtgaaactccttgctgacatctgattgagtggggctgggcagggttccttctgtgtctgggatgtgcgggtgtcttggcgctgacgagggtctcccggtcccaactcctctcacccgttgccgagcctgtgctgctgtccccggagggagccgtc

SEQ ID NO: 24671 - DNA, 948 bp, Artificial sequence
  DNA replication origin
ggcacggcgccccgtacgtgcagatcaagagcagcacgcgtgtggacctgcaggtgacacggcgccccgtacatgcagatcaagagcagcacgcacgtggacctgccggtggcacggcggcaagccggaatcctgagaaacttgtcacggtgattgtctttcaaagaggtcagagttgagcgcactgtggcttctgattggcatctttctgagccctcatcactgtgcatttaatggacactgtgggagtcttctgggaattagacctaaatccaaaccctggggatggtggctgtggagagcttgtgtagccgttaggggcttggtcctggagccagatacctgagttgtccccagctctctgcactgggcgtgtggcctggagcagatcacctggtctctgcccctgttctcatctgtgacgtagcagtggggatcgtacagctcttaccaggctgccataataggtggcacacagtgctctgcacacagtgctctaggggctcaggatgcaagggtgagctcagcagaggacgttccccatgtggggagctgctgttgtgttttggagaggcaatgaatgaatgatgcacaaatgagtggtagacaagacatccgcagcagggaaccgccctgcgaatgattcaaacaggaagaggagctggtgagcagccgtgagcccccagacgcacaggctctacctttggagatgtggctggaatttgaggaatgcagctaagcctgttgggagaagagtctagggtagggacctcccaggcaaggggctctgtggcctgtgtgggtgggctggggcagtggaagggcatggcagggcagagaagcctgggttccatcccagcgtccaggagctgattgagggtcctgatgagctgtctgggcctctgtgtggagagcagatggatcaggaggaggccactggagctgtgg

SEQ ID NO: 24672 - DNA, 2654 bp, Artificial sequence
  DNA replication origin
accgtggcaacaccaggctgggcccaggcaattcggaaccgccctgcatggcataatgtcctcaggacactgaccagaaaccggaccgcaaaaagaaagaaagtcgcactcaacagggaattcgggttccctctggcctgcaccttttccttctttccgtcttctggttattaaaggggtgaattacctacgtcgggcagggctgtggcggtggctccgagccccgctgtcgcccgccccggccccagacctagaacctcacgctggcttctgagcgccagggccctgcaggtctctgtgatgcacccagagagcaaatgtccacgccagctcagaccagacagactgaggacaaaacaggctctgctgacaagcgcacacgaggctcagggaccacgggtgctttcagtcaggcctgagccgcgaagggctgagcagtgcgcaccggaagaggtgagggccctgccggaaagccacggacagaaagacgccctcggaagaccaggacgacagcagtgccgcgcgggaagacggcaccatgatctacactggcagaagctctgcccacctgagtatgagggtctgaggggaaagtgtgaggggacggtctgagggtctgaggggagggtctgagaggacagactgagggtctgagaagaaggtctgagggtctgagggaagggttggggggtctgagaggagggtctctgcgtctgaggggaggctctgtgtgtctgaggggacggtctgtgggtctgagaggagcgtccaagggtctgaggggagcatctgaggggagggtctgcgggtgtcttgggagggtctgagggaagggtctcagggtctgagggtctgaggggggcggtctgagggtctgggaggagggtcgttgggtctgagaggaagattgagggtctgaagggagagtctgagggtgtgagcggaggctctgagggtgtagaagaggatctgtgggtctgagccgagggtctgagggtacgagggttggagaggagggtctataggtctgaggggaatgtcagaggggagggtcggagggtctgtgaggagggtctgagggtctgagcggagcatctgtgggtctgaggggagagagtctgcgggtctgagaggaaggggagggtctgaggggcgggtctgtgttctgagaggagggtctgtgtgtctgaggggacggtctgtgggtctgaggggagggtctgtgggtctgaggggagtgtctgagggtctgagcggagcatctgtgggtctgagcggagcatctgtgggtctgaggggagagagtctgcgggtctgagaggaaggggagggtctgaggggcgggtctgtgttctgagaggagggtctcagggtctgagtgtggggtttgagggtctaagaagagggtccaaggctctgagcagagagtctatgggtctgaggagaggttacgagggcctgagaagagggtctgagcgtccgaggggagggtctgagggtgtgaggatctgatgggaaggtgtgtgggtctgaaaggagggtccatgggtctgaggggcgggtctgtgggtttgagtggagggtgtggggtttggagaagaggggctgagggcccgaggggagggtctgaggggtgtatctgggggtctgttgggagggtcccttcatctgaggggatggtctgaggctcgaggggagcggctgcaggtctgacgggagggtccgtgggtctgagaggagggtctgacagaaaggtctgtgggtatgaagggagggcctgaggatagtttgaggggagcatctgaaggaagaggagggtttgaagggaggggagggtctgtggatctatgggaagtggctgtgggttggggagggtctgcgggtctgaggggagggtctgaaggtagggatagtccgtgggtctgtggggaaggtctgtggggtggggaggttatgggtctgaggggaaggtctccgagtctgtgggaagggtctgtgggtctgaggggacggcttcgggtctgtggatatgttgggggggtctgtgggaagtgtctctcggtctgtggaaagggtctgtggggccgagggaagcacttgtgggtctttgcggatgatctgaggggtggatctctcaggctctgagttaactgcagacgtggtaagtgctgcggaggaggtgttaggagctacaaaaatgccacagagagagacctcgcaatgttgttgtcgggaaagttgatccaagaaagtgtcgtggatttaagatctcagggatgagtggagagagacagctggggtcgtgtggaccggagggaattggcgagaagttctttaagtttgatggaggactctgaaatttatcttcagagtgagtgggagctgaggaagagtttggggcaagtggatggctctttgttgttgttgtttttaactttttgttttgaatgaatttgagacttactaaaaagttgcagaaatagtacccagagttcccacataatcctccctggcttccctcatatccgtgtccagcatggccacgacacagatattaaacccagcacccagtgtgacaccgtggcccatgcctgtaatcccacaattttgggagagcaaggcaggaggatcacttgagcccaggagttcaagac

SEQ ID NO: 24673 - DNA, 1691 bp, Artificial sequence
  DNA replication origin
cccgcccgcacccccggctcccgcccgcggctcccgcggcatcccctgcccacccgcacctggctgcccggtccggccgcgcgggcggggacgcggagagggcgcggtgcggagcgcggggcggcgcggagaggcgcgggctggggccgggccgggcggtcccggccgtggcggggtccctgccctgggccgagtggcgccgggacgcggggctcaccctggccgagcgtcgggccggcgtgacgtgcgcgcggcgcggtgacgtgggcggcggcgggcccgctccgcgcagcgcgcctgcgcgccttttcgcgccttcggcgccctcctcctcctcttctgctgctcctcggtctcccgctcctcccgccagtgctgcgcgccctgggagagcggggaggggctgtgcgcgcgtgtccgtgtgtgcgcgtgcgcgtgcggagatgtagctggggcctgcgccgggacgggcagtgcgcgcgcgcggcgtgcgctcggcggccaagggactgtgtttgtgcgcgcctctgactgtgtgtgtccggagagagaggtggccggctgtgtgcaagagtgtgtgtgcacatgggggagcggggccggctatgtgcacgagtgtgtgtgcatgtgggggagcgggagctggtgtgtgcacgtgggggagcggggccggctgtgtgcaagagtgtgtgtgcacgtgggggagcagggactagtgtgtgcactagtgcatgtgcacgtgagggagcggggactggtgtgtgcactagtgtgtgtgcatgtgagggagcggggactggtgtgtgcactcgtgtgtgtgcatgtgagggagcggggactggtgtgtgcactcgtgtgtgtgcatgtgagggagcggggactggtgtgtgcactcgtgtgtgtgcatgtgagggagcggggactggtgtgtgcactcgtgtgtgtgcatgtgagggagcggggactggtgtgtgcactcgtgtgtgtgcatgtgagggagcggggactggtgtgtgcactagtgtgtgcatgtgagggagcggggactggtgtgtgcactagtgtgtgcatgtgagggagcggggactggtgtgtgcactagtgtgtgcatgtgagggagcggggactggtgtgtgcactcgtgtgtgtgcatgtgagggagcggggactggtgtgtgcactagtgtgtgtgcatgtgagggagcggggactggtgtgtgcactagtgtgtgtgcatgtgagggagcggggactggtgtgtgcactagtgtgtgtgcacatggggcagcaggtagggggccgggtatgtcaggatgtgtgtttgtgtgcagggagcagagagtgccggctgtgtgcgcgagtgtgggggggggagcagggactagtgtgtgcaggagtgtgtgtgcacttggaagagcggggccgggtgtgtgcttgagtgtgtgtgctcaaagaggagagccagctgtgtgtgcgcctgtatgcacggaggagagggggccgcttgtgtgcacgagtgtgtgtgcacataaagggccgactgtgtgtggggctgtgcatgtatggagagcaggtgtgtgcatagacgtgtgtatgtggacacacggaggagagcaggtgtgtgtgcgtgcgtggcacagaggcctctgcctctgctggacccggtggcctccaagcccacgacgggcctc

SEQ ID NO: 24674 - DNA, 1244 bp, Artificial sequence
  DNA replication origin
ctctgtcgcccaggctggagtgcagtggcgccgtctcggctcactgcaacctctgcctcccggattcaagcgattctcctgcctcagcctccagagtagctgggattagaggtgcccaccaccatatccagctaattttgtatttttagtagagatggggtttcaccatgttggtcagactggtttcgaactcctgacatcatgatccgcccaccttggcctcccaaagtgctgggattacaggcgggagccactgcacccggccacacgtggttattttaaatttgcttttgaatcagtgacacgttcatgtttttaaattttgaagtatgaaaaggtgcagagaggtttccttttttcctcttctgtccatgcaggtgagcaccaatgttcacttccggtgttcgttccagagaattctgtttaacaaatagaatggtttgttggtgtttgcatgtgtctgtgtcaatatgtgtgcatgagtgtgtgtgaggaatgtgtgtgtcactgagtgtgcatacgagtgtgtgtgtgcatgagtgtgtgtgtgtatgcgtgaatgcgtgggtatgtgaggagtgtgtgtgcatgtgtgtctgcgtgaatgcgtgggtatgagtgtgtgtgtgcatgagtgtgtgtgtgtatgcgtgaatgcgtgggtatgtgaggagtgtgtgcatgagtgtgtctgtgtgtatgcgtgaatgcgtgggtgtgtgaggagtgcttatcagtgcattgtgcgtgtggagtgtctgtgcgtgtctgttcatgggttgcatatgtgttgagtgtgcatgtgtgttgagtgtgcatgagttgtgtgagtggatgtgagtgtacctgtgagtttgcgtgtgtgtgcatgcgtgtgagttgtgtgcgtgtgtgtgcatgtgaattgtgaggagtgcatatggagtgcatgtgttgtgagtgtgcatgagttcacgtgagttgtgtcagttgtgtgcgtgcgtttgtgagttgtgtgtgagatgtgtgttgtgtgcatgagttgtgtgcatgagatgtatgtgagttgtgtgcatatgcacgtgtgagttgagttgtgtgcatggagtgttatgtgcgtgtgcatgtgtgtgtgttgtgtgcatgagttgaatgagttgtatgtgtgtgttgtgtgcgagttgagtatgatgtgtgtgcgtgtgtgagttgagtgtgagttctgattgtgcgtgtgtgtgagttgtgtgtgtgtaagcgtgcag

SEQ ID NO: 24675 - DNA, 1228 bp, Artificial sequence
  DNA replication origin
aatcctgcgacccgaggcagttgcacccagctgccttcactccagccgctgtttgagatgtggccgaggatgcgccaccaccccagctccagcaggaaccgagggccctctgaggggggagttatggttcccccatcacaggaagggaaactgaggcagagaggtggggtcctgcccatggtgacccatagtgcagcctggaagtgcatggccggtcctgcttccacaaagacatcaggaagagaaagggaggaagggaagccctggagatggctcttctcagaagcaagggtgtccataggcaccggcaactcagggtgcagcttcatctcatctgcttctgagaccctcctgtgagcttcccctgcagcgtcagaacctaacggaagccaccgtccccgtggccatgggcggctcctggacacaggcgactgcctgtgtgctgtcttcgtctctgtaaattagcttgtgtggatcgcaggaggcatttgcagggagacaccggcaggaagaggacggttttgtgtttgctacggcttttgtctttctggaaagtctgtaatgaactgggcctcctgctcctcctctccgctgatgtggcatggattctgcttagtgagccgttctccagtgacccaaaacacaaccaaagggcaggaccaagtcagagaagcaagggagtgcagggccaagaggccagagccctgagctgtgatgagaggctgtggcctgtggactgcctgccctcttctgtgagctgggacagcacagatctctgagccaggtcccttcagcaccagctgggctcagggctgggtcttgctcacctggcatccactttgagtccctcctttccccgccgggcgtccctggtgacggcgttcttgtgtggccacagcagcttggcttcagcctccggttttgagtttccagcttcagcagtgtggggcccgcagtggtggagggtttctgtcctgtcactggatcacgcctggtgcctccctggtgctggccctgcaggtcctgcctcagtgtccccaggtcactcctgatgtggcttctatttgacttggccgcctgtcccccggggacctacgctcgtgacggcaggggtctctgttcccccgctgtgggtcctgtgggtctgctctggggcccgtggtgcacagtggagatgtgggcggtgcgtgtctccccagtggctgctgacccactctgtggcgagtct

SEQ ID NO: 24676 - DNA, 1037 bp, Artificial sequence
  DNA replication origin
ggagccgcgcgccctcttctacacggcgcagatcatctgcggcctggagcacctgcaccagaggcggatcgtctaccgcgacctcaagcccgagaacgtgctgctggacaatgacggtaggaggtgccctcggctgggagggatgagggctacgaggagggcggggcgcagcttccttgggggtctctgcacaacctcacgagggctgacggctgtgtggacggtgggggttcatgagggctgacggcttcgtggacggtggaggtgtcatcgggcaccaggagtcacaggagtgagtgcaggggtctgtggtgcagaaccagctgggaacggcgagtctgttacgcccagtccccaccttccttctgcctgaatgaggcgtcacacagggattcttctcagaaataaacacgagggtttaggctcccgacagcggcaggtcaggcaagtgcgagacacgtgccagggccctgagagagtgcgtggggggcggggcgagagccgaggtgggaggatctcggtgggcaacactcacgctcagctgtggcacggccggccctcttccctacaccctgcgccctccaccgtcagccagggagccactgtcagtgtgcgtggtgtgtgctgtgtgcgcgtatgtggtttgtggggtgtgtgtgtgtgttgtgtgtggtgtgtgtgtggcatatggtgtgtatgtgtgtgcagtgtgtggtgtgtgattgtgtggtgtgtgcggtgtgtgtaagtctgactggggtgctggggcctcgtggtcacttggtatgtgtatgtgtggtgtgtggtacctgtatggtgtggtatctggtgtggtacgtggtatgtgtggtattgtgtgtggtatgtggaatgtggtgtgttcgtggtgtggtgtgtgtggtatgtgtggtattgtgtgtggcgtatgtgtgtggtatctgtatggtgtggtacatggtatgtgtggtaaattgtgtggtgtgtgtgtgtgaggtgtgtatgtagtctttggttgtttttgtacagtatatatcaat

SEQ ID NO: 24677 - DNA, 1171 bp, Artificial sequence
  DNA replication origin
tctgtgcacacacgtgtgtctgtgtgcctgcatgtgtgcctgtgtgcccatgcctgtgtctctgtgcacacgtgtctgtgtgcctgtgtgtgcatgcccgtgtctgtgcacacacgtgtccgtgtacctgtatgtgcatgcctgcatctttgtgcacacatgtgtatccgtgtgcctgtgtctgtgtgcatgtgttcctgtgtatgcatgcccgggtctctgtgcacacgtgtgtccgtgtgcctgtatgtgagtgcacatgcacggtgcatcctactgcctcccccatcccgtgtcactcatctcctctcacctccccccaggcagggaggctcgcagcacctgtggaggagaggagacccccacagtcaagcagagcggggtccgtgttctgggcccagcacctgctggcgtgtggcctgtgtgctttacttaacctccgagcctcctgctagcactcggtgcacaggcttgctgaggagacctcacacgccacgtgcccggcgcctgtgtacagcagccacaccgtgaatttgagttcttcctctctcctccgcagtcttgagggtccgcgtgtcgggctcacttctgctgggatttccagagaatgtcgcttccccgtggttgttttggctgtggggaggcagtgctgtcgcctgatggggtttgtgtgcggtggtgttttgggtcctcccatgctggtgtttaggcactgggcgtatttgtgccgtggccacgggggggacatcctcgctccagctggacttaggggaaggtgcatctcggggtgggggctaaggactgtttccccaaagttctgacgaagggcagttctgtgcccacacccctcatggctgggttgccatctggatgtgggattccgtagccactgagtgctcagggccagtggtcgaaggtctcaaaactttctggaaggcagctcatcctgggggatcccatggctcaaggaagcctcgggtggcacctgcttttcgtgagatgatccaagcctctttctgggtgggtagaaacggttggcgctgcggccctcgagtctttgggacccttgccaagcctgggtgtgagcgcgtgggtggaagccccctcacgcatttcggggagatccaggtggactccgaggccaggactggaagagttaacctcacggatg

SEQ ID NO: 24678 - DNA, 2496 bp, Artificial sequence
  DNA replication origin
gacttaggggaaggtgcatctcggggtgggggctaaggactgtttccccaaagttctgacgaagggcagttctgtgcccacacccctcatggctgggttgccatctggatgtgggattccgtagccactgagtgctcagggccagtggtcgaaggtctcaaaactttctggaaggcagctcatcctgggggatcccatggctcaaggaagcctcgggtggcacctgcttttcgtgagatgatccaagcctctttctgggtgggtagaaacggttggcgctgcggccctcgagtctttgggacccttgccaagcctgggtgtgagcgcgtgggtggaagccccctcacgcatttcggggagatccaggtggactccgaggccaggactggaagagttaacctcacggatggaaagggcccagcttccaggccgagggtgagggcccgactggccgccagggggccccaagccttcgccggcgcccgttcctcggagccccaggtgctcacagcagggctgggctcaggctgtgacccctgcacagtgacctggagatgctgccgtcagggtgcaggctgggaggccggtgtcagttcagcaaagccgcagggtccgcatccttcttcctggcaccctcgcgccctcccacgcgccccccacgcagcgagagacaccacagccataagaagcctgtcgggggactcccccttgccagtgcggtgcggacccaggggcgtgcacagggcggggccggtcatgcgcggtcctagtttgaggtcaggggcgggatccaggggcgtgcacagggcggggccggtcatgcgcggtcctagtttgagttcaggggcgggatccaggggcgtgcacagggcggggccggtcatgcgcggccctagtttgaggtcaggggcgggatccaggggcgtgcacagggcggggccggtcatgcgcggtcctagtttgagttcaggggcgggatccaggggcgtgcacagggcggggccgctcatgcgcggccctagtttgagttcaggggcgggatccaggggcgtgcacagggcggggccggtcatgcgcggtcctagtttgagttcaggggcgggatccaggggcgtgcacagggcggggccggtcatgcgcggccctagtttgaggtcaggggcgggatccaggggcgtgcacagggcggggccggtcatgcgcggtcctagtttgagttcaggggcgggatccaggggcgtgcacagggcggggccggtcatgcgcggccctagtttgaggtcaggggcgggatccaggggcgtgcacagggcggggccggtcatgcgcggtcctagtttgaggtcaggggcgggacccaggggcgtgcacagggcggggccggtcatgcgcggtcctagtttgaggtcaggggcgggatccaggggcgtgcacagggcggggccggttatgcgcggtcctagtttgaggtcaggggcgggatccaggggcgtgcacagggcggggccggttatgcgcggtcctagtttgaggtcaggggcgggatccaggggcgtgcacagggcggggccggtcatgcgcggtcgtagtttgaggtcaggggcgggatccaggggcgtgcacagggcggggccggtcatgcgcggtcgtagtttgaggtcaggggcgggatccaggggcgtgcacagggcggggccggtcatgcgcggccctagtttgaggtcaggggcgggatccaggggcgtgcacagggcggggccggtcatgcgcggccctagtttgaggtcaggggcgggatccaggggcgtgcacagggcggggccggtcatgcgcggccctagtttgaggtcaggggcgggatccaggggcgtgcacagggcggggccggtcatgcgcggccctagtttgaggtcaggggcgggatccaggggcgtgcacagggcggggccggtcatgcgcggtcctagtttgagttcaggggcgggagaatttgtgaacagagcaggtagagctgtctccctcacgctttctgtcaatatttactggccgctgcgtggctgcaggtccctcaggaggcctggggcacaaacaggtgcgccgtccgggctgcatcatgggggtcaggccaggagggctgggggctccttggcccaggaactgacaggagcctgcggtctggtgggccttgctcgtgcccggcctgggagctgagaaggctctgggtgggtctagaggctgtgatcgtgtgagcagttcctccccggagtctgggcagaattctgacgtccgtgtaatcctggaccagtagggcatattcagggcctgtggttctgtgaggcagggttcctgcaactcttttggggaaaaaggattctgtggccacatcagcctggccctcaggcacggtgaaggaccaggaaggaccttgactcagaagtgtcaaaactgaccagccccagcagcccccatgccccagcctgcggcctctctgcctgg

SEQ ID NO: 24679 - DNA, 1540 bp, Artificial sequence
  DNA replication origin
tggggccagaaaatcctttgtggaggggctgccctgtgtgttactgggtgccaagcagcaccccagactctgcctgtggggtgacagcagcacccccaggctgtgacaaccaaaaatgacaaccaaaaatgccccatgcccactctagtgctgggcacagggcgggacttgttgactgtagctgcactgaggcagccttcctggactcttttactggggagaatccaacatcattctcttttgaattttcctcttgagctggtcagatcatgccaaggcgggtcttccacattctgggaaccacgttggagaggaggcctggggagcctcaaccaacggtcactctccttttcctcagctgtcggcctgttctccagttgtccggtgacccaggagtgctatggctgtgtcctctccagagaggtggtccggtcccagtcttctgccaagaaggcccttaaccacaggactgtggcaggatggagggacggctctgggcgcagccacggggactcaggatggagggagggctctgggcgcagccgcagaggctgtcacgggatggggggatggctctgggctcagccccggggactgtctcgggatggagggacggctctgggtgcagccgcggagactgcctcaggatgggatgatgggtctggtctcagctgcagagactgtgtcaggatagaggggcaggtctgggctcagccgcggggactgtctcgggatggaggggcgggtctgggctcagctgcggggactgggggactgtcgggatggagggacgggtctgggtgcagccgcagggactgggggactgtgtcgggatggaggggcgggtctgggctcagccacggggactgggggactgtgtcgggatggagggacgggtctgggtgcagccgcggggactgggggactgcgtcgggatggagggacgggtctgggtgcagccgcggggactgggggactgcgtcgggatggaggggcgggtctgggctcagccacggggactgggggactgtgtcgggatggagggacgggtctgggtgcagccacggggactgtgtcaggatgaagggacgggtctgggctcagccgtggggactgtctccagatggaggggcgggtttgggcgcagccgcggggactgtcttgggatggagggatgggtctgggtgcagccgcggggactgtctccggatggagggacgggtctgggcgcatccatggggactgtctcgggatggaaggacgggtctgggctcagccgtggcaactgtctcgggatggaggggtgggtctgggcacagccgcagggactgtctcagatggagggacgggtctgggcacagctgtggggaccgtcacaggacagagggcggagggacagctctgtgtgcagctgctctcatgcagtcattcatctgccaaggtcacctttgcacggacaccaggcactgggcactgacagttctgtgcagcttcagggctctggcagcagcttagcattctgcttccttgtgtcagctgc

SEQ ID NO: 24680 - DNA, 1023 bp, Artificial sequence
  DNA replication origin
ggcaacagtgggataagtcgccctccctcctccggtctgcaccagagggaccggcccccacagggccctcagaggctgagtggtggcgtgctgtctggtgggagggtctgcttgctctggggcacagggtgactgggaatccctcagcccctccacctgcaggcctcaggggctgggggcgtcacccactgagacagaacagcatggcccaggagcaagaccccagcacgtgaatctgtgccctccccaccccagggcccacagaacaactcccaggtctgccccagtaacgatcccatcactgccccgtccccatcgagagccagggcgccaaggtggctgcagagacacctgccggccgcctcctaccttctctccacgggctcggaagggtcctctggccgcaatcatctcatacagggtgacccccagggcaaagtagtccacggagaagtcgtactcctcgccctgcaggagctcgggggccatgaaacctgccagcaagggacattgcgggttcagaggtggtcacctccatggtgggcacgcactccaggaatcgcaggactgatgctctggggatgcatcccccccggggcctcagcactctccacatttggggccagaaaatcctttgtggaggggctgccctgtgtgttactgggtgccaagcagcaccccagactctgcctgtggggtgacagcagcacccccaggctgtgacaaccaaaaatgacaaccaaaaatgccccatgcccactctagtgctgggcacagggcgggacttgttgactgtagctgcactgaggcagccttcctggactcttttactggggagaatccaacatcattctcttttgaattttcctcttgagctggtcagatcatgccaaggcgggtcttccacattctgggaaccacgttggagaggaggcctggggagcctcaaccaacggtcactctccttttcctcagctgtcggcctgttctccagttgtccggtgacccaggagtgctatggct

SEQ ID NO: 24681 - DNA, 935 bp, Artificial sequence
  DNA replication origin
cacatcggcctgagccgccagacgcacatgctggtgccgtgagcccccgactgcatatttcacgtcttttgctccatctcactgagaagacataagatgctctccagagggagtaagccaaaaatctacaaactcttagggagcctcctgcattggtgattgaccaaccgtgtggtcaggggcagagactcggttttggcctcccaagaccttagccattggcttcccagagccacgctcctcagcgggaggtgcacggtggccaggtcaggggtcagtgaaccctggccgcagcccctggccccactggggagggctggacctcgccccccccaggtccctctgtgcaggctcctgacttccagggtgcccgggccctgtgctggtggcctgcacgccacatggtcccctgcaccctgcggcgccgtggtcctctgcacactggggcaccatggtcccctgcactccggggtgccatggtccacatctgccaggcgcaggctctgttgggctgttgggaggaggggagcgggtgtggagtctgggggtctcagtgcatcttggggtctccttatctcagggtgtccagctgacggcagctggtgcaaagttcccacccctgagctggggagctgaaaatgttttctgtcttgaccctgagtcccggaagcacctcagctgctcttggcgggcaaagccaggaccgtttgctctctgaccctcctccccactggggctggtccgtctcatctcccaggggacacttcaggccacgggccttgtgcatagggacagagctccttgctgcaacccctctctgtgttcccagtagcagcagcactggagtcctaaagccatagcccgggaagacactcacagcccaccttctcatacagctcggccccacccacaatgcacctggcatttccaactgc

SEQ ID NO: 24682 - DNA, 781 bp, Artificial sequence
  DNA replication origin
gaaggggattcacaggcctgcgcagaaaactaggaagggcttccctggggaggacgggacggagagagggtggcagagctggagcaggtgatctcagcggctccccagccaggcctcactgcagacttgggggcgcaagcaccggaccacacagcacgcccaccctcactgtggccggaagatcagaggcatgctggccgtgaaaggctgcctgagccccacagtggacactgtggcaagtgtggaccaatggccgatgtctcagccccacccactccggccaccacgacactgcacagcctggacccaggccagtccctgtgtgagcgtgtgtgcttggtggcgtgtgtgtgcaggccttgtgtgtgtgagcatgtgcactctcagtagtgcgtgtgtgagcgtgtgcatatgtgtgggggcgcctgtgtgtgtgagggaggcccacgaggttggcaggcagacaggggtgggggtgggaggagaggcactgtgccctaagaccagccttgggagggtgggaggagaggcgctgtgccctggtgtctggggcctgggcctgcccctcctggagcttggggtgggtactggacgggttctgggacagggcgtcttcctggtactcatgctggagaatctactgtgggccgcaggaggaagaggagctgcgatgaggtgttgccagggccaggattagggttaaggttagggtttgccccagagcctcctggaattctacccactcagcaccatcctccaaggcctgacaaatgcagcctct

SEQ ID NO: 24683 - DNA, 1295 bp, Artificial sequence
  DNA replication origin
aagcatgagagacaggcctcaatccattgagaggttcatttgccaaggttaagggcacacatgggagagagctctgtgactttctccaaagatgattttgagggtttcagtattttaaaggggaaatgcaggctggaggggaaagagggaggtttggttgcgagactgaacccatgcattgcaggagaaaggaacaggcaggacaatggtgaatgatgcatttgtcctgggctcagaaagtcggactttgcactaggccaggggaacgcagagcagctgctggtgaagacgctgagcctttgctgggcagctccctgctcaggaacacaaggaaaggcctctcctcacagggctcagcttccagctttaagggtttcctttggcggtgaattggagtccccagattttattttcctttcacagccccgatgttgccccagaaacaacagagactcctgaaagtttcccacacccttcagaaggctttgggcaaattggggtgtgggagacgggatgagcatggatggagcacctactgtgcacctcacgctgtggctggtctgggagacgggacgagcgtggatggagtgcctactgtatgcctcaccctatggctggtttggggatgggacgagcgtggatggagtgcctactgtatgcctcaccctgtggctggtttggggacaggacgagcgtggatggagtgcctactatatgcctcacgctgtggctggtttggggacaggacgagcatggatggagcgcctactgtatgcctcaccctgtggctggtttggggacaggacgagcgtggatggagcgcctactgtatgcctcaccctatggctggtctggggacgggacaagcgtggatggagcgcctactgtatgcctcacgctgtggctggtctgggagatgggatgagcgtggatggagcgcctactgtatgcctcaccctatggctggtctgggagatgggatgagcgtggatggagcgcctactgtatgcctcaccctgtggctggtctgggagatgggatgagcgtggatggagcgcctactgtatgcctcaccctgtggctggtctgggagatgggatgagcgtggatggagcgcctactgtatgcctcaccctgtggctggtctgggagatgggatgagcgtggatggagcacctactgtatgcctcaccctgtggctggtttgggagacgggatgagcgtggatggagcgcctactgtatgcctcacgctgtggctgccactttcactttctgcctcatcccagccttgcc

SEQ ID NO: 24684 - DNA, 1751 bp, Artificial sequence
  DNA replication origin
ggagggagggatggagtggtgtctagggggctctgccgctccctcagaaataatccaacacaaacttctggggattaacctcacaacccttttactgcggcatcgttcggaaccggacgaattactgttacttaaaataatcaaataatttggcttctttctaaaagaaaccactatatgccttccaatctaaagcaaaatgctctatggtcaaatgtattaatgtggattagtctattggtgtttaataatgataactattattattatttattaactagttttatcattattagaatgccttaatgtttaaaaatagcatctgacttagattttcttctgacaaagaactttaaaccttaaaacaatacttggagctggtctttttagtatatgaaacattggtgtatctgggtaggattatgggtctttttgtttggagctggtcttttactaaaatgtataaagcattggtgtgtctggggttggattatggtctttctgctttggtgtgtcggggtggattatggtctttctgctttggggtatctgggggtgggttatggtctttctgctttggggtatctgggggtggattatggtctttctgctttggggtatctgggggtggattatggtctttctgctttggtgtgtctgggggtggattatggtctttctgctttggggtatcgggggtgggttatggtctttctgctttggggtatctgggggtggattatggtctttctgctttggtgtgcctgggggtggattatggtctttctgctttggtgtgtctgggggtgggttatggtctttctgctttggtgtgtctggaggtagattgtgggtttttctgctttggggtatctgggggtggaccatagtctttctgctttggggtacctgggggtaggattatgggtttttctgctttgcccttctttgttcactaccctgggcatgtgtaaaatcaggacgaaagaggaattgacggctgagtgattacagttttacctgggattgttacttggacaccatgactggtgtccccacatgattaaatggaactcactcttctttttgggcgttccaggtccggctggcaggaaggccggatcttagaacccttccaagcagtgccacctcccatgctttgtgacattccccttcctggctctgtggagtagaggaaatgggtctgaggggcaggaagaacctgacctccagcctcgcgtgtcttccaggtaggacctggcgtgggcacaggctcatgtggttcagctcctccagctaaggctggggaaggagccaggaaggggagagcaggtgggatgggagaagtgggggctggtggggagtgacaaggtgatattctgagatatcctagatgggctgcacctggggaagactagaattagaaaaatcagcgcacttgatagcagagaggtagctgttggccccttcagcttcacatctcagaactcctccttgcaactccagtgggagaaatgctggttaagaatagccgctacgccgtcttaaagttcacaccaccctgatgattagcatatgcattccatttacaaaaacctatatgagagcccacgtatcgtgtctcactggacgcttatcacaatctcaagaggtgggtgagcaggtggttctcatgatttccatcctacaggtcaggagactgaagtgccttcattcattccgtaccaggagatgtgtctatgtcctcatct

SEQ ID NO: 24685 - DNA, 1393 bp, Artificial sequence
  DNA replication origin
ttcagggaaagaggcctcggtggtgaggctgtgggcccggcaggaccaaccccgagctgggtgcccagcgagtgtggccgcctgtgcccatgctccgcctgtgctccactccctcagttattcccccgctgtgggtgaggtcgtgggatccagggttggatggcaagtggatggggcccactcaacgcctgtcctccagaacacccggcccttgtgggacctactcggggccgtggggccttggcacgggctcttgccctgggcagctcacagtgtcctcaccggtgacccgcagagccgcccaacactgccatccagggatcccagaaaccactctccaccagccccacccaaaggggcggagaccctcacagcttccacaggagaaggtgcggggcccgacgccccaggaaggctgatggggctcccacgacagcgaggccctgagcagaagctaagcagggcgcaaggaaggcggccgagacctcaccctccagcacttagaggaatggagaaaacgggctcagtccagaccaaagacttctgtgtgtggtgtgtatagtatgtgtggtgtgtgtggtgttgtagtatgtgtggtgtgtggtttgtgtagtgtatgtggtgtgcattgtgtagtgtgtgtgtcatatatgtggtgtgtgtagtgtattgtgtggagtgtgtgttgtgtgctgtgtgtggtgtatgtggtgtgtgtggagtgtgtggtgtgtggtgtgttgtgtgtgcaatgtgtgtcatgtgtggtgtgtgttgtgtattgtgtggagtgtgtggtgtgtggtgtgtgtgatgtgcattgtgtggtgtgtgtcgtgtgttgtgtgcagtgtgtgtggtgtgagtagtgtattgtgtggagtgtgtgttgtatattgtgtcttgtgtgtggtgtgcgttgtgtggtgtatgtggtgtgcattgtgtgttgtgtgtgtcgtgtgtgttgtaggtggtgtgtgtagtgtattgtgtggagcgtgtattgtgtattgtgtgttgtgtgtggtgtgtggtgtgtgtagtgtgtgtggtgtcgtgtgtgtagtgtatgtggtgtgtattgtgtggtgtgtgtgtcatgtgtggtgtgtgtgtcatatgtgtggtgtgtgttgtgtatagtgtgtgtggtgtgtggtatatgtggtgtgtattgtgtggtgtgtgtcatttgtgtgttgtgtggtgtgtgtgtcatgtgtgttgtgtgtgtgtggtgtgtggcatgcatgtgttttgtactgtgtggagtgtgtcgtgtgtgtctgtgcatgtgcacatacgtggggcacaggagaattgccagttaacactgttttatgcccttccctttcccatccctgtgggacctatgggactgtgccaggtt

SEQ ID NO: 24686 - DNA, 1138 bp, Artificial sequence
  DNA replication origin
ggctcactagttacacatgtgacatgcatggggcatgccttcacacaggagaccacattactcctggcaatgggccccgtaaggcacttctgagaggttctagttgttcgttgtttcatacctggactctgacactttaatgaacagaacatgtgaaaatatgtcataattaaataattttaaaattttgtctctaatagagaaaacttacagtaggccttgtgcaaacctgctagctccacagtcagccacgtgcacgcgcaggggtgttttcggaagagctacattgggcatctcccagagccaacggtctggattttaatttggttgctctcctttatcacttatttattagcatttgaaaaacatgtattctagactaaaataatgcctgattggtttaagttggaaaacagtttttaaacgttctaagaatttcttcagtgtgtggggaaggcttaaaaggacagaggctgcctgttgctgacctgagtggtgcggcttctcttctccgtttgctcacagaaaccgatgataggtgaaatgagcaggtcaaagttcagggtctttggagggtgtggatggtgcgagtgtagggtgtagacagtggcgaccatgtggggagcccctgagttttgtggttctgggacacccgcatggcaggtgtgcaggtcagacgtgaagaagggaagctggagaggaaattgttaatgagctgaaattgtacatggcttagaactgtgagcagggacctgcttgtgaagtgaattaggttgtgcctgggaaagcagtggggaggggagtgtgagagccgtgaatgtgtcaaatgctcatggtgaatcgcgtcagctggggctgagggtgacccctggattgatggcaggcagggcatggtgaccttgggaggggcagatttgggcttggtgacccaggaaggaggaaccagctgcaggtgccgtccactctctccaggaggtttactctaaaggaagcgaggcggaggagagggcatggacggggaggaggtgttgagaagacatctgtggttaagacgggatgggcagctccaggtgtcggccaggggcaccatgccgcagaggggaaggcggagggagtggggatgggcagaggggaaggc

SEQ ID NO: 24687 - DNA, 881 bp, Artificial sequence
  DNA replication origin
ggatgggcagctccaggtgtcggccaggggcaccatgccgcagaggggaaggcggagggagtggggatgggcagaggggaaggcggagggggtggggatgggcagaggggaaggcggagggggtggggatgggcagaggggaaggcggagggggtggggatgggcagaggggaaggcggagggggtggggatgggcagaggggaaggcggagggggtggggatgggcagaggggaaggcggagggggtggggatgggcagaggggaaggcggagggggtggggatgggcagaggggaaggcggagggggtggggatgggcagaggggaaggcggagggggtggggatgggcagaggggaaggcggagggggtggggatgggcagaggggaaggcggagggggtggggatgggcagcagaggctgcatcaggtgcctctcgcaggtggagctgctggcctgggtgggggctcaggggttgcactgcctgcgtggcctggcactggcgcagcagaggctcctctctgccctcggctggtggctccctgtgtctcctcctgccacacgtggccatcctagtgctggatttatggcgtacacagccatcttagccgtcatcgtgtgggtgataacagacctgtgagatggaagtggctgctcttgcccatccgggccctggctctgtgccgtcatcagcacggtgtcaccgtgtggccgccctccacccgtttgtctctgcacactcgacctgtgtactccactcgcgcttctggccctcaccatcgccgtcacctcctgcctgggccctgccgctgccctcaccccagccagagttctgggaaaccccagggaagctggctcccctcccactgaccactgcacc

SEQ ID NO: 24688 - DNA, 1753 bp, Artificial sequence
  DNA replication origin
cctcggcggggccacggccacgggcgcctggagcacagtggaaaccaccgtctggaagccatagaatagcaagtcacccagccacccgctgagaaagctcccatgacgcacctccgtgggagtgtgtgtgtgcgcgcgagtgtgagcatgtgggccgtggtgtgtgcatgcgtgcgcacgcacgtgtgttttgtgaatgtgctcccacacttgccttcatataatgaaaccgttggggcagacaaaggcctaacaccaaccttcagtgcctttcagtgtgatttatggaaaaagagggagaaacaatcacaggtttggtctgagagttcatgacaagcaattcggctgctcccggggaccagctgacgcccagatggcgagagcccacccaggagcccagccagggaggaggggggatggcgcagcccaccggaggctgaggacgcacctcaggaggacacagaaacgattccttggcctgcgactttagagaaaacctgttcatttagaggtgaaaagagcgtggtgtggtgtgtatgtgtgtgtggtgtgtgctctgtgtggtgtgtgtgctgtgtgctctgtgtggtgtgtgtagtgtgtgtggtgtgtgctctctgtggtgtgtgtggtgtgtactctgtgtggtgtgtgctctgtgtggtgtgtgctctgtgtggtgtgtgaggtgtgtgctctgtgtggtgtgaggtgtgtactctgtgtggtgtgaggtgtgtactctgtgtggtatgtgctctgtgtggtgtgtgaggtgtgtactctgtgtggtgtgtgaggcgtgtgctctgtgtggtgtgtgaggtgtgtactctgtggtgtgtgctatgtgctctgttgtgtgtgtgctgtgtgctctgtgtgttgtgtgctgtgtgctctgtgtgttgtgtggtgtgtgctatgtgctctgttgtgtgtgtgctgtgtgctctgtgtgttgtgtgctgtgtgctctgtgtgttgtgtggtgtgtgctgtgtgctctgttgtgtgtgtgctgtgtgctctgtgtgttgtgtgctgtgtgctctgttatggtgtgtgtgctgtgtgctctgtgtgttgtgtgctgtgtgctctgttgtgtgtgtgctgtgtgctctgttgtgtatgtgctgtgtgctctgtgtgttgtgtggtgtgtgctgtgtgctgtgttgtgtgtgtgctgtgtgctctgtgtgttgtgtgctgtgtactcttatggtgtgtgtgctgtgtgctctgtgtgttgtgtggtgtgtgctatgtgctctgttttggtgtgtgtgctgtgtgctctgttgtgtgtgtgctgtgtgctctgttgtgtgtgtgctgtgtgctctgtgtgttgtgtggtgtgtgctatgtgctctgttttggtgtgtgtgctgtgtgctctgtgtgttgtgtgctgtgtgctctgttgtgtgtgtgctgtgtgctctgtgtgttgtgtggtgtgtggtgtgtgctgtgtgctctgttgtggtgtgtgtgctgtgtgctctgtgtgttgtgtggtgtgtgctgtgttgtgtgtgtgctgtgtgctctgtgtgttgtgtgctgtgtgctctgttgtggtgtgtgtgctctgtgctctgttgtggtgtgtgctgtgtgctctgtgtgttgtgtggtgtgtgtagtctgtgtggagagggaagttcgttgtgtaggaaatgagacttactgagaggagagacagtcactggcaacccccagcgtggagactgacggtgaa

SEQ ID NO: 24689 - DNA, 1804 bp, Artificial sequence
  DNA replication origin
tttcagagatggcaaatcagatgaggctcatgtgctcctcagaagaacaatggaggaggggccctgcttccacagagatggagagaaaatattcagggtgttccatggaagtcgttagcagcagaaaatactcccacttgagacagtgggggatggggaacagtgacttggtgggggaggttttgagcagttaataaaaaggacaatttaaagagatcaccttccttgcacccagcagctttgccaggcatgaagtgcaggggaggacgtggcatcacagcagaagatgagttcctgccccgttactaagaaacatgccctcccttcccctgtgagattactcgtgggcagggcttgtccctaggggggccctgtcattcagtggttaaccccgtggtcccagggtttactctgtggttcctgggggtttattccatggttcctggcggtttactccatgttcctgggggtttactttgtggtcctggggggtttactccatggttcctggggtgtttactccgtggttcctgggagtttactccatggttccaggggtatttattccgtggttcctgggtggttactctgtgattcctgagggtttaactctgtggttactgggggtttacttcgtggctcctaggggtttgttctgtggttcctgggggtttactccgtggttctttggggtttaactctgtggtttctggcggtgtaactctgtggttcctggggggggggttactccatgtttcctgggggtttactccgtggttcctgggggtttactccttggttcttggggatttatgctgtggttcctgggggtttgctccatggttcctgggggtttactctgtggttcttggggatttatgctgtggtttctgggggtttacctctgtggttcctggggagattactctggttcctggggctttactccatggttcctcggggtttactctgtggtttttggggggaggttatgctgtgtttcctgggggtttactctgtggttcctgggggtttactccatggttcccgggggcttaactctgtggttcctggggggaggggttactctgtggttcctgggagtttactctgtggttcctggatgtttactccatggtcctgggggtttactccatggttcttggggatttatgctgtggttcctgggggtttactctgtggttcctgggggtttaactctggttcctgggggtttactctgtggttcctgggggtttactccatggttcccgggggtttaactctgtggttcctggggggaggggttactctgtggttcctgggagtttactctgtggttcctggatgtttactccatggttcttggggatttatgctgtggttcctgggggtttactctgtggttcctgggggtttaactctggttcctgggggtttactctgtggttcctgggggtttactccatggttcccgggggtttaactctgtggttcctggggggaggggttactctgtggttcctggggggaggggtttactccgtggttcctgagagtttactccatggttcctgggggtttactccgtggttcctgagttttactccgtggttcctgggggtttactccgtggttcctgagttttactccatggttcactcggtggttcctagggagttactccatgggttcctggggtttatctgtggtcctggggtttaccccttagtttccttaactgctcatctgctgtgaagaagagtgggtgctacagagttggaagttgggagctcccagcaga

SEQ ID NO: 24690 - DNA, 1071 bp, Artificial sequence
  DNA replication origin
gtccaggggctgaggcactgtacgcaagggtgtcaatcacacctgaagatgcctccacggcaacacccagatgcgtgtgtgagccgctgagtcagccacggtgacactgaaccagccacacgctgctggacgtgtggacgtgtggggttcatacgtggggcctttcccaaatatgaagagttgggtgagcccaggggccccaggcctggtggaccctaactgttggttttggagtcaggtcagaggctcgctggctgtgaggaagtgggatgtggtctgaggacacccttcctggggcgtccaccccctgccccatgcagctgtggaggccaaggttgtgccagtgaggccccggccaccctctcctgttctgccccgggctggggctgctccttctggtggccctgggtctgtggggtgggggcccgtgagagtggtcctgggtctgtggggtgggggccagtgagagaggtcctggatctgtggggggggccggtgagagaggtcctgggtctgtggggtgggggcccgtgacagtggtcctgggtctgtgggggcccgtgagagtgggcctgggcctgtgggggggccggtgagagtggtcctgggtctgtggggtgggggccggtgagagaggtcctgggtctgcggtgggggagggggacgtaagagtggccctgggtctccgggggaggggaggggcgtgagagtggccctgggtctgtgggagcccgtgtgaatagccctgggtctgtggggggcccgtgtgaatagccctgggtctgcggggggccctgtgtgagtggccctaggtctgagggggcctgtgtgaatagccctgggtctgcggggggcccatgtgaatggccctgagtctgcgggtggccctgggttggcggggtgggtggggagcgtgtgagtggccctggtatatgtcaggcttccctgtggtccggcacggggtggtctcacctgctaacccagggccctctctgtttattgcagccctgcagccgcttcccagttgcgccctcctctgccctggcttcgtctgaggacctgcagccccct

SEQ ID NO: 24691 - DNA, 861 bp, Artificial sequence
  DNA replication origin
ccgcagcactccctgtggaaaccagcttagctccccgcgggcccagcatgcacctgccgggcacacctggggagacgggtgagcacgcctgggaagcagcaggtcccgggtgggtcacaggccccgggtgggtcacaggacaggtctcaggtgggtcacaggtcctgagtgggtcacaggtcccgggtgggtcacaggcatcccgggtgggtcacaggtcccgagtgggtcacaggccccgggtgagtcacaggccccgggtgagtcacgggtcccgggtgggtcacgggtcccgggtgggtcacgggccccgggtgggtcacgggtcccgggtgggtcacgggtcccgagtgggtcacgggtcccgggtgggtcacaggcgccccagtgacaggagttcaggatgcgccaccccaaagtagccgaagtctcttgaaaagtgttggatgtggggagaggctttctctgaactcctgaagtcagatcctcagggaaccagggactcccagggcgggagggcgggcgagaggtgatcccattgctccccagacgtgccacaagacaccaagtcgccgtctctgctctgtgggccgctcacggttccccagtcactccctctcccctcggaagctggcgcctccaggcctcaccgctctcagggcctcacgtccctccctgcaaagccccccgtgcctacgataaacaagtaccgctcttctcccgtgtgggtctgaggtctccagcttacttcacggaacagtgcccacctgggaggtggagcggggactttctcccctgcccagtcctggatctgggagaaaaaagataaggtggaggggagccacactcgtgcagacacag

SEQ ID NO: 24692 - DNA, 860 bp, Artificial sequence
  DNA replication origin
ccccggggcagggggtgctggggggtttggggtgctgtggccccacctgcactccctgcctcactgggacagcacaggagacaggcttctcctgcagctcagaggtgggggcctagtgtagctgcaggttgtgactgaggagggcagggtcagagcattgccctgggcaggggtccgttgagactggccccaccttattagcttgggaccttgggttacagggagtctcctcctgcctcagtttctacatttcacacagcagcactgctcacaagagctcccaagcagaggcaactactgagtgggggagggacacagtccgtccacatggggccaacggccacaaagagaggaagggacatgggtgacggtccgtccacgtggggtcaccggccacggagagaggaagggacatgggtgacggtccgtccacgtggggtcaccggccacggagagaggaagggacatgggtgacggtccgtccacatggggtcaccggccacggagagaggaagggacatgggtgatatggttttgctgtgtccccacccaaatctcaacttgaattgtatttcccagaattcctgcgcgttgtgggagggacccagcgggaggtaattgaatcatggtggctggtctttcccgtgctattctcgtgatagtgagtaagtctcacgagatctgactggttgatcaggatttccgcttttgcttcttcctcattttctcttgctcctgccgtgtaagaagtgccttttgcctcccaccgtgattctgaggcctccccaaccatgtgcaattgtaagtcccgttaaacctctttttttcccagtctcgggtatgtccttattagcagtgtg

SEQ ID NO: 24693 - DNA, 1091 bp, Artificial sequence
  DNA replication origin
gggacccagcgggaggtaattgaatcatggtggctggtctttcccgtgctattctcgtgatagtgagtaagtctcacgagatctgactggttgatcaggatttccgcttttgcttcttcctcattttctcttgctcctgccgtgtaagaagtgccttttgcctcccaccgtgattctgaggcctccccaaccatgtgcaattgtaagtcccgttaaacctctttttttcccagtctcgggtatgtccttattagcagtgtgaaaacagaatactacagtggtccatccacacgcgggtctcacccagccacagagagggagaggacgtggcccatccacacgcgggtcacccggccacggagaggaaggaagctctaacgggtgctgaggctgtaacacacagtgctcagggaaggacaccagacatgaagactgtgttctgtttatatgcagtgtccagagaaggcgtgtccacagacagaagccgactgggaaaggaggtgcagtcactgctcagggacacgggttcttttcggggaggcaagcgtgttcgcagcgtgttctgtatggggagagatgcagtcactgctcagggacacgggttcttttcggggaggcaagcgtgtttgcagcgtgttctggatggggagaggtgcagttactggtcagggacacgagttcttttcggggaggcaagcgtgtttgcagcgtgttctggatggggagaggtgcagtcactggtcagggatacgagttcttttcggggaggcaagtgtgttctaagcgtgttctggatggggagaggtgcagtcactggtcagggacacgagttcttgtgggaagaggagtgtccgggagccagatggcagtgatgggtggacggccccgtggatggactgaccaccgacccatgctctgcactcatgaggcgtggctattgctgtgtgaatcacatctccatggaaacgggagtgggagaaacgggccccaaggatgttgtgaagatggccttatggggctgcactggtgacttggacagtgctggccaccggccctgctcagtgaacaagagccatggtcatcaccctcgc

SEQ ID NO: 24694 - DNA, 1017 bp, Artificial sequence
  DNA replication origin
ttggcacacaaatgcaggctgctggggcagcggcctctgagccaacctgggagggaccccgagctgggaccgagggccggaagacaccgaggcagcgcctgcacccctgtgccattcccgtccccaccctcctgcacagatccacttgcttccgggcctcaagtgtgttctgttgagaaagggaaactgctttctctgtgtcggtctggggtagagcttgccaggagcaaagccagccctgcttcccgcgtccccactggcagggtccccatgtccctcagcctcagcttccttgtctgcaaggggtggagcggtcactggtgctctctgaccccagcaggccacaagtctgcagggaaggtcagggcagccggaacgcggccaggcaggtgcctgaaatgcagtcgggaccctgcctgcctcctggaaggatgtcggagccgcagctggtgggggccacggagtcactgcttctccttggtcccaaggggacgaccaagactcatggcttgacgctcccgtgggacgcggccacctgtgctcgagcctctgggccaaacatgggtccccagggtggatgcggtcactgcaggggccacacgggggatcagggagggtttcagctctgaggcccaaaccaggattccactttaagaccaaacccccacccgtgctcggagctccctgggcaggagtgagacggggcagctcggagcagccccacctcccaccagtcagtcccagagctgcgcccaccgggcaggacaggctgtgcgtcggggcatctttgcctctgcctggctggggtcagcacttgacctagagaaaagtcgggtggagaagaaggatagaatccatgagaacccatccagggataaatcgccacaaatgaactgcaaagaggtttctagaaagaggcctgtggctttgaaggccacaggggaggccccgctggctggactgacaaggtggcatcggccgagtgggctcctgaggggcagcctcgggccgggaagg

SEQ ID NO: 24695 - DNA, 1315 bp, Artificial sequence
  DNA replication origin
accccagttcctggtcaagtgcagcctcggtcttgtgtgtgcctggtgcctggggctggggttgaccctctcacacccaacctgggggccacacttgttcccccacagcctcccaggctggcccctggctttacgtgcagagaagctgagccccaggtggggtgggggtgtcatccacagtcagcgagcatccagacccagggctgcagggaaccctggacggagacaggcgtgcggcgtaggggtggccagcagctgtgaggaccagcttggacctaacagctcacgtaggggtggccggcaggccctgaccacacctcggtctcctgcagctggtggtcctggccgtggagcatacggccttggccctaatggagatcaaggtctgcgacggccaagagcacgtggtcaccgtctcgctgagggacggtgaggccaccctggaggtggacggcaccaggggccagagcgaggtgagcgccgcgcagctgcaggagaggctggccgtgctcgagaggcacctgcggagccccgtgctcacctttgctggcggcctgccaggtaggtgctccctgctccgctcaacccgggtgaagagctccagggaggcccagcttggtcaccccagatctaacctggacaggctggggtttctggtagtgaatgcggaagaggacttgtgttttaagaggaaggagaagtccaggtgggtcgttagtggctattatggtgtctcggtgctggtcaggtcattggctgagactgagaaacacgtacgggggccggcattggcctgagtcaggccccacgaacctgcatcttcagggagcattcgtccacacccatcagaccagccccgggggagagggctgggcagacctcgggccaggctgcagttgggacccgcggctgtcaccgcagctgttagcagcgaacagagtgaccgccagcccctcccatgtccagcagggcgtcctgccgtgtcccatgggctacacagcacagaggctgggaccggggatgtccttgccatgagctgggagggtcagcggaaaggcacgtgggagccggcaagtcctcggctgcccgcaggttttcacttgcggcaaacggcaggatttctctcttggctgccagacacagactccacttagttttaataaacagagctttgaagaggatgagagcgagccaggaggcctgcagcctgaatgactcactgggcacagaagaagatcacgtttaaccgatgggactgtctgtgctcccagcggggaagggagggctggcgtctgcagagcccaggctggcagat

SEQ ID NO: 24696 - DNA, 1250 bp, Artificial sequence
  DNA replication origin
tcgtggggcctgactcaggccaatgccggcccccgtacgtgtttctcagtctcagccaatgacctgaccagcaccgagacaccataatagccactaacgacccacctggacttctccttcctcttaaaacacaagtcctcttccgcattcactaccagaaaccccagcctgtccaggttagatctggggtgaccaagctgggcctccctggagctcttcacccgggttgagcggagcagggagcacctacctggcaggccgccagcaaaggtgagcacggggctccgcaggtgcctctcgagcacggccagcctctcctgcagctgcgcggcgctcacctcgctctggcccctggtgccgtccacctccagggtggcctcaccgtccctcagcgagacggtgaccacgtgctcttggccgtcgcagaccttgatctccattagggccaaggccgtatgctccacggccaggaccaccagctgcaggagaccgaggtgtggtcagggcctgccggccacccctacgtgagctgttaggtccaagctggtcctcacagctgctggccacccctacgccgcacgcctgtctccgtccagggttccctgcagccctgggtctggatgctcgctgactgtggatgacacccccaccccacctggggctcagcttctctgcacgtaaagccaggggccagcctgggaggctgtgggggaacaagtgtggcccccaggttgggtgtgagagggtcaaccccagccccaggcaccaggcacacacaagaccgaggctgcacttgaccaggaactggggtggccctgatggggacccaggacccagccctgcggtggcggcctcccagcccggtgggcactcacgctggcaccacagcccagcagcccaggggtcggctgttgctacataacagcagctgtttattccagatgctgagattgggtctggccctggtaacgagcatttgcatgaaccaagcctgtctgtcgtatcccagcaagcgggagggctctgtggccccggggtgggcagacttggagaacgtgagcctctctggtttgacccatgtctccctccttagcacacgagcgagagaataaaagctgtttctgtcacctcttgattgttctgtggggaaaacagcatgagtcccccagcccaggacagctgacttattgtgaggaccgggggtggggggaccttgtccaaggggcagctgcactcagctccacccggtg

SEQ ID NO: 24697 - DNA, 1360 bp, Artificial sequence
  DNA replication origin
gtggtatgcacggtggagaggccacagtgaggtcggagcagggcctcgagagatgcagtcccagccggggtgggaagctgtgcagacagccccggatctgggacgtgatggaaaactcaacagactggttcagatcttggcccggagcccagaggcaccggggacccccaggctgtttctccctggccacaccagtaccccacttccaaatgccctgtaggtgaccaccaggccacacaggcccgtctgaggggccacaggctgtgcaccatgggacgcaggcctgtccctgcctccctccgatgtcctcttgtttcaggagcgcctgacagctccttcctcagagcgtgcgtggcctcgtgcctcgcatctcacctgcagctttcaggtagcagcacagggcccagtgggggctgagagtttaagatagcatgcggacaggagctgtcatgagcacggtggtctggggtctgagctgtcaggagcacgcgcggtctggggtctgagctgtcaggagcacccgcggtctgagttctgagctgtcaggagcaccgtggtctggggtctgagctgtcgggagcacgcgtggtctggggtctgagctgtcaggagcacccgcggtctggggtctgagctgtcgggagcacgcgcggtctggggtctgagctgtcaggagcacccgcggtctggggtctgagctgtcgggagcacgcgcggtctggggtctgagctgtcaggagcacccgcggtctggggtctgagctgtcgggagcacctgcggtctggggtctgagctgtcaggagcacgcgcggtctggggtctgagctgtcaggagcacatgcggtctggggtctgagctgtcgggaacatgtgtggtctcccagggagaatgccacggcatatcctctccacgctgagccctccgtggactaagaagccagaagaaaaaacttccgccctgttttcagtgtttctatctcacccagaattccaaagtcctgataaagaagctgttttaggaaaaaggaccccaaatcactgtgtgtacacatttgtgactgggcgcctcgcactgcaggccaaggttggggtcagagtgaattgtgctggtttccctgtctctttcccacggggctgtgtacgcctgaaacccacatcgcctgtcctgcctgtccctagctggtacccgccacatcagttctcaacaaccatttatggcaccgaaacacacaaaatcagaaaaagtaacaaaaatattgcaacagaatcaaaaagtaacaacaaaaagtctcctgtttgccggtcttcccataacctgtgaagggagagatgatggtgttctttaaaatggaagctccc

SEQ ID NO: 24698 - DNA, 1418 bp, Artificial sequence
  DNA replication origin
ctcagatggcagcgtcaggacaagctgaggctcctccggttccggggcagggatgggtgggcggggtgggcggaggtgcgggcagaggcccacctctcaggatggccatgcaggtcactcagttcagagtcagccagtgaagaagaaatgagagagatgtgccgagaaggtgcctgcgaagccagtgccaggaggccggggagagaaggtgcctgcgaggccggcgccaggaggcgggggagagaaggtgcctgcgaggccggcgccaggaggccggggagagaaggtgcctgcgaggccggcgccgggaggccggggagagaaggtgcctgcgaggccagcgccgggaggccggggagagaaggtgcctgcgaggccggcgccgggaggccggggagagaaggtgcctgcgaggccggcgccgggaggccggggagagaaggtgcctgcgaggccggcgccgggaggctggggagagaaggtgcctgcgaggccagcgccgggaggccggggagagaaggtgcctgcgaggccggggaggctgggagccttacagggtcctttgcagaaagtccggagacagcacagccttaggactcgtccaggggcacagagaagctctcggtaacatggtggacaccgtggtcaccgatgacccggtgagacagctacaatgggaggtgtgtaaaaacagccgtgaagctgcctgggggacagtgaacctaggcctgaaaaagggaggacagggtggatgtgagctgctggcccagtcctgtgacgccacgctgccgccctccccagtgcaggctccgggggtgctgctgtgaggatagtgttactgctcggccccaccctgcctcacattcccaccccacgtgggccccactggggcaccacagccctgccctattcctggacaccgagccgtttatggtgaagcccccacacgcacagagggcaggcagcgccccctccgtcagatctcagggctgccggccctcaagcacccagcaggaaccccaggttcaaggggatccacgcggagcaaaggggagggtcctgccccgtcctgagccagatccagtgtcaccgtctccccccgggtgtcaaaagcgtgaccgtgtcaggaaaggcatctgagaaaagcgccatctgccactggctggactgactgtgcacacgcgttctccctcagtcttgatttttggacttccaaatctagagcatcataatgtttgacacgaaatcatgtcatatgaaatgcttaaatcctttttccacttaatatcatacacatttctcaggggtaaccttatgcaggcatcacaggggccatttccagtgactgccggccgcgtctgccggccctttttggtctatccggacagaagcagttacagctccatgcatttccagtg

SEQ ID NO: 24699 - DNA, 1902 bp, Artificial sequence
  DNA replication origin
ctgcctcatgtactcatgcagagggtgtcggacccctgcgagatgtccagctcaccctggctgcccacggtgggcagggcaggcctggctcagccccagcccctccatcttccaggggtgtcagctcacaccggctttggttctgtcccccttcgggcagcgtggagaaaccacagcccagaacagggaactttccaggacagccatcttcaaggcatccatatctatttcataatagtgtatactttttaatgattctctgtaatttttgtatgcttgaaatatttcataatttaaaaataaagggtcaagggaaatgagcagggaaggagatgacggggacccccgagaagccctgtgggaagcggctgctgcaagcccgcccttcacctgggagtcccagtggggcaggtgtgacagcctctggggtctcagcagctagaggcggggtggccactcccgaggcacaggagggacagtggacccgctgcgcggccggggcgtggggctcaggggagcaggagtgaaggccacatccccgaccggcgtggcccccgtccgtggcaggacatcttgccgtgcgtgcccttcagcgtggccaagagtgtgaagtccttgtacctgggccggatgttcagtgggacccccgtgatccgactgcgcttcaagaggctgcagcccaccaggtgaggaggtgtccacaggaggcaacacaacttagaatggccaagacactggcttcacagggcccgggccagggttcggccagcagggaggggccgggcatctgcctgtgcccagtgctgactcatttctcctgtgggtgcccaggctggtagctgagtttgacttccggacctttgaccccgagggcatcctcctctttgccggaggccaccaggacagcacctggatcgtgctggccctgagagccggccggctggagctgcagctgcgctacaacggtgtcggccgtgtcaccagcagcggcccggtcatcaaccatggcatgtggcagacagtgagtgtgcggcagccaccccttccaggcctcacggggttctccctgagccagactcagctgtcactcgcttatgcaaccgttaggagatgagctctggggcctgcatctgctgcgtgccggcaggacggggacccctgccccgtttagttcatgctccgggagacggggacccctgccccgtttagttcatgctccgggggacggggacccctgccccgtttagttcatgctccgggggacggggacccctgccccgtttagttcatgctccgggggacggggacccctgccccgtttagttcatgctccgggggacggggacccctgccccgtttagttcatgctccgggggacggggacccctgccccgtttagttcatgctccgggggacggggacccctgccccgtttagttcatgctccgggggacggggacccctgccccgtttagttcatgctccgggggacggggacccctgccccgtttagttcatgctccgggggacggggacccctgccccgtttagttcatgctccgggggacggggacccctgccccgtttagttcatgctctgggggctcactgtggtgctctaggcctctctgctatttcatcacgtttcagcctggctccctcagaaaggggccttgagtgcaacctgtcagtttggtctccctgagtttggtcaccctggctcaggtagaacccgtggttctcagccccaggggaccctgggctgtgtctggaggccatgctgtttatcccgagcagagtggggaacagaagccagggctgcttgacgctacacgcagggtgccccaccaggggaggaggccgccactgaacccgcaccacagcccagagctcccgccgtac

SEQ ID NO: 24700 - DNA, 1300 bp, Artificial sequence
  DNA replication origin
gacatccctccatggtgggggcctctgaggaggtcaggttctggtgccggagggttgggccctgcacaggccgcctgccctgcacgtgtctgactccctcctgcccccagagcctcttcatctgaggccagggtggagaagcggatacgcccctcatttctctagttcaggccagacctccccgttccaggccctgctatgaccacatcgacgtctccagacgccccgcggacacagcacccaggtacagccgggcgacagcagtgtcagggatggggccccggccggctcctggcggctgtgctgatgcagaatccctggtcctggtcctcgtttcctcgtaactccgaaggccagccccagcccctgtgtgcttcagagtagaaagcgtttatagtgacctgctgaaaatagcatcttagaaacacttcgagacgcgagctccgtccacacccacaagtgttctgttgtcagtcatttgtgcaaaacaagcaaacggaggtgtagggaggaaactgtggggtgtactgaggaaactgaggcttatagaggaaactgtgaggcagacggaggaaactgaggtgtatggaggaaactgaagcatacagaggaaattgaggcgtatggaggaaactggggcgtatggaggaaactggggcgtatggaggaaactggggcgtacaaaggaaattgaggcgtatggaggaaactggggcgtatggaggaaactgaggcatatggaggaaactgtggggcgtacagagaaaattgaggcgtatggaggaaactgtggggtgtatggaagaaactggggggcgtatggaggaaattgaggcatatggaggaaactgtggggtgtatggaggaaactgggcatatggaggaaactgtggggcgtatggaagaaactgtggggcgtatggaggaaactgtggggcgtatggaggaaactgtggggcgtatggaggaaactggggggcgtatggaggaaactgggcatatggaggaaactgtggggtgtatggaggaaactgggcatatggaggaaactgtggggtgtatggaagaaactggggggcgtatggaggaaattgaggcatatggaggaaactgtggggtgtatggaggaaactgggcatatggaggaaactgtggggcgtatggaggaaactgtggggtgtatggaggaaaccggggcgtatggaggaaactggggcatacggaggaaactgtggggcgtatggaggaaattgaggcatatggaggaaactggggcatacggaggaaacgcgggtgtacg

SEQ ID NO: 24701 - DNA, 861 bp, Artificial sequence
  DNA replication origin
ctgcctgggccgcaggaactgcgtggcctcgcgcgccggcaacagcgcggctgcccggagggagagagggggacgcgtcaagccgcgcccggagcctcctcccgccgcccggggacggggtctcgggcccgcgggactcaccaagcgcgcactccgcggccagcagcagcagcagcagctgcggcgcgcggcgcagggcggcgggcccgggcgagagcgaaggggccatggcgggccggggacgcgcggtcagagcgcccgggaggccgaggcgagccgcgggcgccgcggggcggaggctccggtcatcccgtcctggcggccctgaaggtcacatcgcggcggcggcggcggcggcggctgcggcacctcaagcgctcggtctgggcgtgttcgggcggctgcgcgcggggaggcggcgggggcgggaccagcgcgcgggcggggcgcgggttcccgggaggatccgggcgcggggaaagcggagcgtccgggacgcggcgggactcgagtgtttcggaaaaggagcgtctccccaggcggtggttgtcttcactagcgatggggtaaaaggaggacgcaatacctggttcaacttgagcaggtacattttgaccatattccaggtgtcatgtgaagatttaagcctctttccaacccccactccccccgaatctactgcatcctttttggagtcttcattcttaggcacattttgtcaagacttaaaacctaccaaagaaaagatacactgaggtcagatccaatcccactgggggccagcgagtgaaatgcgacggtttccttttataatctctgtttttcataatgatgacattaaaaatcttgaggtttcccagt

SEQ ID NO: 24702 - DNA, 1325 bp, Artificial sequence
  DNA replication origin
cggaagcaactggaaggtctggcaaaattctggtccagtgaggcctccctttcacagagatgggaggtggccatgtggctggccctgctgccgctgccagggctgcatcaggggcacccgagcaaggctcctccagcaggacaccgggagccagggccacagcaacacccaagcaaccgtgtgccctctccttggggtgggaaaccagccagctccacctgaaatctagagtgcccagagccttgaggcacttggttcctgacacctagaagttcagctcttgggacgtcggaagtgaggtgttgctttcaaggacaggaagcccgtacactggccaggagcaggaagacgcagcaaagctcagccccagatggcttggctggatctttccatgaagctgctgaggaaacagtactgtcatgcctctgcagcttctgatgacgccctgaggccagtcctcagcctggggcctgggagtgacttcagggctgcagaagaaaaggggtgtgggtgtcactgtggtgtgggtatcactgaggtgtgggtgttgctgcagcatggatgtccctgtggtgtgggtgtccttgtggtgtgggtgtccctgtggtgtgggtgtcgctgctgcatgggtgtcactgaggcgtgggtgtcactgaggtgtgggtgtcgccgtggtgtgggtgtcgctgaggtgtgggtgtcgctgctgtgtgggtgtcgctgaggtgtgggtgtcgctgaggtgtgggtgtcgctgtggtgtgggtgtcgctgaggtgtgggtgtcgctgaggtgtgggtgtccctgtggtgggggtgtcactgaggtgtgggtgtcgctgaggtgtgggtgtcgctgtggtgtgggtgtccctgtgatgtgggtgtcactgtggtgtgggtgtcactgctgcatgggtgtcactaccatgtgggtgtccctgtggtgtgggtgtccctgtggtgtgggtgtccctgtggtgtgggtgtcgctgctgcgtgggtgtcactgaggcgtgggtgtcactgaggcgtgggtgtccctgtggtgtgggtgtcaccgtggtgtgggtgtcgctgctgcgtgggtgtcactgaggtgtgggtgtcactgtggtgtgggtgtccctgtggtgtgggtgtcactgtggtgtgggtgtcactgctgcatgggtgtcactaccatgtgggtgttgctgctgtgtgggtgtcactgcagcgtgggtatcactgagatgtgggtgtcgttgccacatcggtgtcgctgcagtgtcagtgtcactgccgtgtgggtgtcactaggtgtcatgtaggtgccattgtgg

SEQ ID NO: 24703 - DNA, 1523 bp, Artificial sequence
  DNA replication origin
gcaagacggggcgctgtccaggaagaaaccctgtggagggaggggagcgcacctcaacgtttcttccttccactcttgcaggaaaatctgggggaaacgttattaaggcagaaagagtgaccctgttcctttttttggtaactccattcactccacttcaaccataagaatcccaagcaggaaacttaccaagcatcacaaaccacctcgaaaagcaacaccacacaacctacatgctggaccgctgaggggacatacacccggccactgagcggacgcacgcagggcccctgagtgacgtggggacgcacgcgggggcgctgagggacgtggggttgctgagggatgcacgcagggccgctgaggggcgtacgcgggactcgagtgacgtgagcacgcacgtaggacctgttagtgacgtggggacgcacgacggggcactgaggggacgcacgcggggacgctgggggacgtgggggcgccgagggacttggagggcgccgagggacgtgggggcgctgagggacgttgggggtgctgaggggacgcccgcaggggccgctgagggacgtgggagtgttgaggtaacgcaggcgggggacgctgaggggactcatgcggcgggtgctgaaggacgtggggcgctgaggggatgcatgcgcggggcagtgagggacatggggacgctgaggcagcgcacgcgggccaccatcggccaaggatgagaccattagaacatctgcaatgggttgaaacgcctcgaatgcagtaagatccaggagttataacgatactaaaaatagcaacaatgacccaagtcacctttggacatgctaaaaaccagcggtacctcaggatgaccaaatagttgatgagaaaaaatccctcttcagaaaagtattacagctcacaggtgaagaaaggagacacagaatcggagcatcttccctccgaagccccacaatggaatcaccggtgcagggagatggccaggcctgcggcacccgagagaggccgtctgacccgggtcctctgtgcaggcagagccccctccggtgttgtgttcccgccaaaactggccgcgaatcgcagatgatgatgccgggatccgcgcccttgcaggagagacgggggtgtggggaggatgccggcagctcagggcacagtccagacctggggacaccacgggacaaaagacaagtcacgagaggaagaagcggagagaaccaaggattttttcctggttggaaaaaacagagtcttaaaaatcctgtgggatgccagggagtcctgggcgctgatatctggtggcattaaggagtcaccatcaattattttaggcataaatacagaactggggttgggtggggtgtttggttcttatctttgagaatactttctgaagtgtttatggataaaataatatgatgtctggaactgttttaaaatagcccagtgaggaagcgggtggggtgctggccttggcaggaacacggggccattgtgctggtctctcgcgttgt

SEQ ID NO: 24704 - DNA, 1261 bp, Artificial sequence
  DNA replication origin
gatcacagctgggaagctaagtcctgactgcactggccggaaccaatgggctccagtagccggatgctctgccaagtcaggaggtaataaccgccacggcctgggagagaagctggcacagccgtgggcccctgccctgcggtctggcctcgcaggtccccaggccgtgtacagacactgtgcggcagggaagcagaggcagccatggggagcaaccctgtttctcagtgctacatgcctactctccctgagctgatgtctggaagacagtaaaggagacctgaggcagtgctgcccctccttccgtctgccacctcctcagggctggcccaggccctgcagagcaggtggtggtggctgctggtggtaaagcccgtccatccagagcctcgctctgctcccaaaccacccacctcccgctgcacatgtggcagcttcaggagcctggcggggctaagaggagatgacagaccccagcaaggacaggctcagcttcttggggaccgagtcattgcctgttgcttctcctgggggcctcgactgtccgagtgtgttcaggcacacggtgccctgtctgtttcccaggcacttgggccaaggctggacagggaggtgccatgtgggacgaaagcccaggctgtgcagtgctggtcaccgggagtgaccatgggtgaagtcgcgctgtgagtgactgcctgttatcactgaccacgcagggccatcctgggtgacccgctgtgccacaagcaactggttcacattggagcccccctctggagccctgggcaacccgctgccagtgggcctttctcctgaggcccctggagtcccggagcatcccgtgagttcatctgccatacctgtgattgccatgtgggcccagcgccctccaatggaaaagctgcattcagttctgcccgaggatcccaggcctacgacactgtcctcaggctgccagggagcaggaggctgtggggatctgcgttcttgccaggcctgggagcagcagccaaaaagtggacttacgtggacaaaatgttgggccagggaggagccctcggctctggacggatgtctctggtgcttttatgccacgtgcatttctgcagatttgatgcccggcagccagcactgggctgtggccatggtggtgaggcagccttgggtctgcacgaggctcggaggcctccaggaacctcccaggaatgtgactgtgcctggagagaagcgccatctgcacggcgcagtccagatgcttctc

SEQ ID NO: 24705 - DNA, 844 bp, Artificial sequence
  DNA replication origin
ctcaggctgccagggagcaggaggctgtggggatctgcgttcttgccaggcctgggagcagcagccaaaaagtggacttacgtggacaaaatgttgggccagggaggagccctcggctctggacggatgtctctggtgcttttatgccacgtgcatttctgcagatttgatgcccggcagccagcactgggctgtggccatggtggtgaggcagccttgggtctgcacgaggctcggaggcctccaggaacctcccaggaatgtgactgtgcctggagagaagcgccatctgcacggcgcagtccagatgcttctctcctacaagcccatcatcaaacacacagctgcccagacttcagcaggatttgtgcacaagaaacgcaaaggcacagtccatcgggtgaggcagaggtggaaggagcaccggggtgggagtggaggagcaccgaggtgggggcgcaggagcaccgaggcgggggcgcaggagcaccgaggcgggggcgcaggagcaccgaggcgggggcgcgggagcactgaggctgagctgtctctagtgatctctcaagcctcagtgcagtggccacagggcaaggtgcctcctggtgtgtcctcgcctccaaatcaggctgctccacttcccaggtcagagtcctggggggttgtgttgaccctgagcccccacgagcatccaatccagcagagctggaaggacccaagaacctgcattcctcatggctcccatcatgcttccggtccaggagccaccatccagaccacactcccattcatcccctggccacggaagctgaagccttggtttccccacctgtaaagtgggagtatc

SEQ ID NO: 24706 - DNA, 1377 bp, Artificial sequence
  DNA replication origin
aggaaccccctgtagatgcacagccctgagctcagcaaatcagctgtggtgacatccagggaggggtggaagcccaggctccccctagaaggacgctgcccttggccttcagtcctatggggcacagatgccgcctgggctttctagggccggccagtggtcctggggtggtggcccccgttgccccaggcccagtctgcctcagttttatcctcagtccccactggcccctgacctgtgcagattccagtaagtgagcgaggctgtcagagccctcccaggctgggggagatggcccagccccacatggtgcctgcacctccgaggtggcccccttggaacccagccctgagcaggcgggagcggcggccacacagcggccctgggcaggcgggagcggcagccacacagcggccctgggcaggcgggagcggcggccacacagcggccctgggcaggcggaggggtggccacacagcggccctgggcaggcgggagcggcggccacacagcagcacagaccctgagccggcgcagttcctccagccacgccagctacaccttggctgtgtccctgccgggctccaaacacctgtgtccgtgccactggccacctcttccctgccgtgtcacccccacccctgccaagtgttctgtgtgttttcactgcaggtgatgtgggaaagggcgagtctcagttcaacgttctggttccttgggggctgtcggaacaatcgtgtgttctttccagagttttctctgtctgggtttagatgcccacacacgggaccatgtattcaatccctgtgcatatagatggtgccatatacggagagaggcataggttgtcttacgagagtggggtcgcgttgcactgtggcccctgccaggccctgtccggagtgctgaacacagagcagcaggtgccgccggtccccagcctcttggagccccgttccctctgggcgtcgtagacagtcgagttcagcacatctctacgtggagtttcgcaaaaaaggcaaccactttgaaatgggagggccgcagcgccatggcctggcgacgcctgtgagtgactacagtggggcctggaggaggagcagggggatgaatgcagccttggggcaggcgctggggcctggaggaggcttggggagcagggcatggggggcggggagcgagtgcagccttggggcaggcgctggggcctgggcctggctgggcccctctatgcctttcagtcttgaggtctggaaacccggccgggatctcccccgagtgggcagtgctgttggtggcggcgggggggagtggtgctggcactgtgtggccgggcagagccgaggccaaagcagttccatccacacgcagtccacg

SEQ ID NO: 24707 - DNA, 1292 bp, Artificial sequence
  DNA replication origin
gcacggtggacgcagctgagccccggctgtgactgcgagagcaacagagactgtggtgctggcactaggatctgtccctggagggaagccacatgctccccactcagaggaggagagggagtcttcctaggggtgtggggggctccaggacatgcctgtaagacgagtttcaccagaatccacccagagccctctcgttcagacacgcacacgtgcatattcatatgtacacagcacatacatgctcgtacataccacacatgtgcacaggagggcacgggcaggtgacctgcagcatctctgatccgggtgtctctaaggcagtcagaggccacaggcggagatgctgtgtgcactgtctattcccgtggagacacatgggggccgtccctgtggtgcacatgataatgcagaggctcccagagggtgagctctgcccatcactcagccagggagggaggggcccttttcagggagccgcatgccacgcagagcttgtcccactgggtagtttcctctgatcaaagtggggcaccatccaggctgcagagagaaaggggaccccccaaagccagcacccacccttgactgaaagacaccacagaagataagtgcccatcggccccagagtcatcatttcccagacaaccggaaatgggccctggacgggctgtcctggacaggctgccgggcagttgggtgtgactcagttgcggcctccaactgtgccaaccagaaaggcacccagagaagcttccggaaatacggttggtttgtccccttggtggggcaggaggcggcagctctgccgggtggctcccagcaccctcccccacagagcaaacatcggcatgagtctgtccacccgtgtattcgtcctgtcgccgcgtgtggctggcctcattctgggtatgctggcggcagccacctctaggacagggaggtcccatggctctgcagacacaggagcttggcagtggcttagctgttagaatgtgagccttccagagtcagacgcgcctttgccttctgttgggctctgagctcatttcctcaaacccagggtaattctgttcctccttcactgtctggtggggtgggggtcacagtgtccgggggaagagctgatcagggccagtgctggggtgggaagggctgactcctgggaccccggagaggtgattgttgccacggggggtaaagttccacgtgctgctcctctgagccttgattctgggcactccagggcggccaggcctggctcacaccttcctacctcagggagatttccg

SEQ ID NO: 24708 - DNA, 1146 bp, Artificial sequence
  DNA replication origin
ggttcagcctggccggcctccttagtccatgctgaggtgtggggtctgccccagtccaggagtggctatgggtggtggacaaacccttgcaggtgggggcatcctccccgggaggccagcccgtcctcctggagccacacttcccggcagggcctcaggcagtgtcgggagccagggggctccgttcacactctgggcacagctgtgctggggtcagcccaggagggccaaggtcagcccctccaagaggaagtagaagggcaaggaggacgaggccccagggaacgtggagaatggaagccccttctggaacagccaggagagtcctacagggcagtgggaggtgggagtgtatgggggccggaagcccctgcgcgtctccactgatatggtttggctgtgtccccacccaaacctcatcttcagttgcagctcccataattcccatgtgtggtgggtgggacccagtgggaggtgattgaatctgtgtggtgggaggtgattgaatctatgtggtgggaggtgattgaatctgtgttgtgggcgggacccggtgggaggtgattgaatctgtgtggtgggcgggacccggtgggaggtgattgaatctgtgtggtgggaggtgattgaatctgtgtggtgggaggtgattgaatctgtgtggtgggaggtgattgaatctgtgttgtgggcgggacccggtgggaggtgattgaatctgtgtggtgggcgggacccggtgggaggtgattgaatctgtgtggtgggcgggacccggtgggaggtgattgaatctgtgtggtgggcgggacccagtgggaggtgattgaatctgtgtggtgggcgggacccggtgggaggtgattgaatctgtgtggtgggtgggacttggtgggaggtgattgaatcatggggcggttcccccatactgttctcgtggtataagtcccacgagatccgatgtgaaagttttatgagggtttctccttttgcttggtctcattctctcctgctgctgccatgtaagacgtgcctttcaccttccaccatgatcgcagggcctccccagccatgtggaactgaatccattcaacctcttctttataaattacccagtctcaggtatgtctttatcagcagcatgga

SEQ ID NO: 24709 - DNA, 1417 bp, Artificial sequence
  DNA replication origin
aaccaagccgctcccacagcattttgcttagaaatctcctcaattgcgtgtctgatgtcatcactcgcgagttccaccctcccagaacacgagggcatgaacacaggtccactttgtcacgaggatggctttttctccacggtccagtagcatggccgtcctttctgtctgagatgttgttagaacagccttgccacccatgctcatgccaccattctgttcagggttacttagatatcccctaagacaggacttctctgcagctctcctctcccgagcccccagcattgtcctttaaggacattcatggcagccatgccttttccgctctgcacccccaaaccccttcagccttcgcccagcacccagttccaaagccagtccacatttgaaggtacagcagcagccacttctcagtaccaagttcttggtgagtttgggctgccgtaaaaattgtaccataggctgggtggttacagacagcaggaattcggatggacagatgggtgagtgatggatggatggacagggtgagtgatgagaggatggactggggtgagtgatgggtggatagacagatggatgagtgatgggtggatggaaggatgggtgagtgatggtggatggacggatgggtgagtgatgggtggatggacagatgggtgagagatgggtggatggaaggatgggtgagtgatgggtggatgaacagatgggtgagtgatgggtggaggacagggtgagtgatgagaggatggaccgagggttgagtgatgggtggatggacagatgggtgagtgatggtgatggacagatgggtgagtgatcggtggactggagcaatggacgagtgatgggtggattaacagatggttgagtgatgggtggatgggcagatgggtgagtgttaggttcatggaccaaagggtgagtgatgggtggatggatggatgggtgggtcagtgatgggtggatggatggatgggtgagtaatgggtggatggacggatgggtgagtgatgggtggatggacggatgggtgagtgatgggtggatggacagatggatgagtgttgagttcatggacaaaggggtgagtgatgggtggattgacagatgggtgagtgatgaatgggtggacggatgggtgagtgatgggtggatggacagatgggtgagtaatggatggatggacagatgggtgagtgatggatggacagatgggtgagtgatggatggactgaggggtgagtgatgggtggatggaccgaggagtgagtgatgatgggtggatcgacagatgggtgagtcatgggtggatggatggatgggtgagtgatgggtggagggatggatgggtgagtaatgggtagatggacagatgggtggatggacggatgggtgagtgatggctggg

SEQ ID NO: 24710 - DNA, 2262 bp, Artificial sequence
  DNA replication origin
cctccaggcgcttcccaacctcaccatccccatagcctggtgtattagttctcatgttgctataaagaaaagaagattgattgactcacagttctgcaggctgtacaggaagcatggttggggaggcctcaggaaactttcgatcatggtgggagggcaaagaggaaggaaggaggcacctcctacatgcaggagcaagagagagagatgggggtagatgccacacacgtccaaacaaccagacctcgtgagaactcactatcacgagaacagcaatggggaagtctgtccccatgatcccctctccttcctccaggcccctcctccaacactagggattacagtctgacctgagatttgggtggggacacaaatccaaaccacatcacctgggctcacctgtgtcaccaaagtcacaaccatctcccatctcctcagcttccatatgcagtgaccttcctgggcctggcacagaggaagtgcctagcacctggatgggtgtgctggacagatggcggggcaggcagctgagtgggtgggtagatgggtggatggacggttgggtgagagatgggtggatggaaggatgggtgagtgacgggtggatggatggatggatgggtagatgggtggatggacagatgggtgagtgatggatggatggacagggtgagtgatgagaggatggactggggtgagtgatgggtggatagatggatgagtgatgggtggatggaaggatgggtgagtgatggtggatggacggatgggtgagtgatgggtggatggaagcatgggtgagtgatggtggatggacagatgggtgagtgacgggtggatggacggatgggtgagagatgggtggatggaaggatgggtgagtgatggatggacggatgggtgagtgatgggtggatggacagatggtgagagatgggtggatggaaggatgggtgagtgatgggtggatgaacagatgggtgagtaatgggtggatggacggatgggtgagtgatgggtggatggacagatgggtgagagatgggtggatggatggatgggtagatgggtggatgaacagatgggtgagtgatgggtggaggacagggtgagtgatgagaggatggaccgagggttgagtgatgggtggatggacagatgggtgagtgatggtgatggacagatgggtgagtgatcggtggactgacagatgggtgagtgatggtgatggacagatgggtgagtgatgggtggactgacagatgggtgagtgatgggtggatgggccgatgggtgagtgatgggtgtacggacagggtgagtgatgggtgtacggacagggtgagtgatgggtggatggacagatgggcgagtgatgggtggatggacagatgggtgagtgatgggcagatggaccaatgggtgactgatgggtggatggagcaatggacgagtgatgggtggattaacagatggttgagtgatgggtggatgggcagatgggtgagtgttaggttcatggaccaaagggtgagtgatgggtggatggatggatgggtgggtcagtgatgggtggatggatggatgggtgagtaatgggtggatggacagatgggtgagtgatggatggatggacagggtgagtgatgagaggatggactggggtgagtgatgggtggatagacagatggatgagtgatgggtggatggaaggatgggtgagtgatggtggatggatggatgggtgagtgataggtggatggacagatgggtgagtgttaggttcatggaccaaagggtgagtgatgggtggatggatggatgggtgggtgagtgatgggtggatggatggatgggtgagtaatgggtggatggacggatgggtgagtgatgggtggatggacggatgggtgagtgatgggtggatggacagatggatgagtgttgagttcatggacaaaggggtgagtgatgggtggattgacagatgggtgagtgatgaatgggtggacggatgggtgagtgatgggtggatggacagatgggtgagtaatggatggatggacagatgggtgagtgatggatggacagatgggtgagtgatggatggactgaggggtgagtgatgggtggatggaccgaggagtgagtgatgatgggtggatcgacagatgggtgagtcatgggtggatggatggatgggtgagtgatgggtggagggatggatgggtgagtaatgggtagatggacagatgggtggat

SEQ ID NO: 24711 - DNA, 1060 bp, Artificial sequence
  DNA replication origin
ttaaacatctaaataaataatgaaatgcatttatcataaaaaaaagaagaaagaagatgaagtgaccaacattaaaacacatccctggccagtcagggagttcatgtgggtaatcccagcactctgggaggccgaggcaagaaggatcgcttgagcccaggagtttgagcaacaccaccctgggcaacatggagagaccctcacagtgagacctggcaacatagtgagaccccgtctctacaaaaaaccaaaatttaatgagctgggctggtggcatcagcctgtaatcccagctacttgggagagtgaagtgggaggactgcttgagcccagaagtttgagaccagtctgggcaacgtggtgaaaccccgtttctacaaaaaaccttaaaacaattagcctggaatggtggagcacacctgtagtcccaggtacctgggaggctgaggtgggaggatggcttgagcctaggaggtcgaggctgcagtgagctgagattgcaccactgtactccagcccgggtgacagaacgagatcccatctcaaagacataaaactaaaaaagcatccccgagctgggagaactgaggctggctgtgggtgtgcgggataggggaggctcccgagctgtccggcctcagcggctggagcctcttgggacccacagatctgccaaggcagtgagcaaactcggcagacgtgttctcatggagataaatggcctggaaggaagcctcctgggactgtgttccctgcacggtcggctgcgggtggggacaggccaggttttctctcctcgtcaggctgcaatgcttcccgctgtcctgggatgcgaggacatgggagagcgctggcctctcctgggggattctggggcggtggccacgcatgcctgagcagcagccaggcccccttcctgagcttcagcctctgtgtccacgaagcaggatctaaggtcccacctctgaggctgtgggaggattaaacggtggcccagcatggagcacagctcatcccctgcagggcccttatgcgaaagcatcacgtggccacaacaaca

SEQ ID NO: 24712 - DNA, 688 bp, Artificial sequence
  DNA replication origin
gggggccctgctgatggggggcctgacagggggcccagctgacggggggcccagctgacggaggacccagctgatgggggcccggctgatggggggctggctgacggaggacccagctgatggggggcccggctgacgggggcccggctgacgggggcccggctgacggggggcccggctgacggggggtccggctgatgggggtccggctgacggggggcccggctgacggggggcccggctgacggggggcccggctgatggggaggcccggctgatggggaggcccggctgatgggggacccggctgatggggggcccggctaatgggggggcccggctaatggggggcccggctgatgggggacccggctgatggggaggcccggctgatggggaggcccggctgatgggggacccggctgatgggggggcccggctgatgggggggcccggctgatggggggcccggctgatggggggcccggctgatggggacccggctgatggggggccgggaagacaacgggctgctgcgtcatgtggaatcaaggtgggtgtcctgggccagacgaagctttcagggaggggcttgctcccagcctcctcctagagaagcaggatggccacggcctggggagtcccccttcaccctgacctcccgctcccccggggcagggcctcagga

SEQ ID NO: 24713 - DNA, 1214 bp, Artificial sequence
  DNA replication origin
gcccggctgatggggaggcccggctgatggggaggcccggctgatgggggacccggctgatggggggcccggctaatgggggggcccggctaatggggggcccggctgatgggggacccggctgatggggaggcccggctgatggggaggcccggctgatgggggacccggctgatgggggggcccggctgatgggggggcccggctgatggggggcccggctgatggggggcccggctgatggggacccggctgatggggggccgggaagacaacgggctgctgcgtcatgtggaatcaaggtgggtgtcctgggccagacgaagctttcagggaggggcttgctcccagcctcctcctagagaagcaggatggccacggcctggggagtcccccttcaccctgacctcccgctcccccggggcagggcctcaggaagaccctcgaaggcctgtggcaccctggagtctgcgcagagccttccagaggctgggccccagatgctccctcgagggaggacccctcgggtgggaggctcctgggaggaggcgagggcagccctgtttatgtgcagcttacaggcaggcatgcactgtctgctggtccctccctactcagccccttggccacatttcctgcacagtgcacgagctgggcaccgaggcacagacctacccagtgcagggcgagcagcccggagccgagtcggatggcgccctacagcacagccagtggccgctcaggtaggcggacgggtggtagacggtgaggcgcttctggttgcactggctcactttggtgagaatgtcgatccagtccttggcctccacgcagttgttggcctggatgtacagcgcacgctctggctggatgacctggaacatctgaggacacaggtgggctcaggacagcgcacatgaggtctcgtggctgagcacgtgcaagagtccaccaggcacctggccgtcctcgccggagtcgtaagaggggacgctgagggtgcacaggcccaaaagtcctggagctctaagccccagaagaggccaaggccagggggtgcatggagctctctgccaccctaaaacctgacagctggggccgtggggaatggaggtgagaactggtgcagctggagatgtggccaggtggccaggaacagcttggccaaggccctttatgtcctggagccttggaggtctccattcaagacaaaa

SEQ ID NO: 24714 - DNA, 1219 bp, Artificial sequence
  DNA replication origin
agcgcacgctctggctggatgacctggaacatctgaggacacaggtgggctcaggacagcgcacatgaggtctcgtggctgagcacgtgcaagagtccaccaggcacctggccgtcctcgccggagtcgtaagaggggacgctgagggtgcacaggcccaaaagtcctggagctctaagccccagaagaggccaaggccagggggtgcatggagctctctgccaccctaaaacctgacagctggggccgtggggaatggaggtgagaactggtgcagctggagatgtggccaggtggccaggaacagcttggccaaggccctttatgtcctggagccttggaggtctccattcaagacaaaagaggggccctgtggcctccccacaaggccctcctgcagctgactgcaggcatcccatccacgtggtgctcgtgctgtgtcagcccaggtggcccggcctgctcagctccttccccaactgaccagcccaggattcttcctcctcctcccagctggggttagggggctgcttcctcttgaagcgtctcggggcagcaacaacctttaccatttattactcattcaacaaacatgactgagcaccagcactctcctatgtcccggagacaaagcctggcatagagtttctactgaacctgcagccaccaagaaagactaaacgagggcaggtgtcagcagaagctggaagtgagcagtcctggtgctgtagtcggcgttgactcaaagttagttaagcagggggtgggggcaaagggtgtcaaaggcagaagaaatgggaggcacaaaggtcctggggcaggtgggacaggggtcctgtgattggagggacaggtctcccggggcaggagtgacagaagccttaggattagagggacgggggtgctggggcaggggggacagatatcctaggattggaggtcagaagctcccagaaggagccggctctgttgcacacagaagacaggttttctgagtaggagactgactggaggttgggagggctctcatgtgggacttgcccttaagtcaggagtcagggggacagtggccttctctaggggacgggccttctgcactcatctggggaggatttgggctccaggtttctggtgaacagctgaggtcttatttacagaggccaggagcctcccgccttgcacccggcacatgtgtataggtctcggactggacgccccc

SEQ ID NO: 24715 - DNA, 775 bp, Artificial sequence
  DNA replication origin
ggggtctctgtcaggggatctctaccggggggtctctgctggagggtctctgctagagggtctctgctggggggttctctgctgggggggggtctctgccaggagggtctctgctgggcggtctctgttggggtggtctctgccaggagggtctctgctggggggggtctctgttgggggtgtctctgctgggggtctctgccagctgggggtctctgctggggtgccctgggccggaggaggtgccccatgttcatctccttggggatgatggctgaatcactgacaggctgcaggtgcgggggctgaggaagcctgggacccacctggccctgccatgcacccaggctgggcccaatgctcgcatcctcacagctgccgtggcctcaggctctgtccccagaacatgttcccgttctgggacatgaacatgggagaaactgctagatatttcctaatctagatctgagccagcagatctgacagcgaggggcaggaggtggtgggaagccccgtctacctcggcggagcggcaccctggccatgacgaggcgaccagaggaggaagggacgtggacagaaaagcaccttactgatgtggtcagctctgcgtttactggttctctggggaagcagatttccctcactttccagcagcaggtctgaaagaccccttcagggatctttgaagggagaaccagaagcagagggctctgggtcaccgcggccccgggctctgcccgcagcactgaatccttcctcccctcagctctcc

SEQ ID NO: 24716 - DNA, 1070 bp, Artificial sequence
  DNA replication origin
ggcgggcagtggatgcccacacaacacggaggacctgcggccgtgggctcggggtcagggcaggcagcggacgctcacacacggaggacctgcggccgcgggctcggggtcagagcgggcagcagacgcccatactcagaggacctgcagccacaggcttggggccggggcaggcagcagacgcccacaaaacccacacctgtgttgtgcgggagtcacgcaccagcgcctctgccagaccaaacctgccccctcagggccagccctgctgtggtagaaggcgccactgggccacgtcctcaggaaacgtggggagcaggagacaggatggccaccgaggatgcaaggcctcagcgaggaggacctcaagccttgccctgggcagggtcctcgaacaccctcccggcagcccagggccctctgaggctcggccttcattgccgggcaggggtccctgaccagaaccggcggccgagctggaggagaagaaagtggccagacagagtgactggaggacagaggtggaagctgaggacgagaagccaagctggagagacagagtggggaggtgggcgggggagacgcacctcgacaagcgcactcagaaatcggaaagaggggctttgagcagcaacacagccagatgtggccagagagctgtggacgcacaccggagggtgtggaagctgctgggagctgttcaagagagaaaagggcggggcgctgggagccgccaggacagcgcagttcacaaccagtggatgccgaacgccgttcattccagggattcacaggcaggaagtcagcccaggaggctgttgaggaccagcaggacccagtgggatgcgcagggcggggcctacacagacgggggttggggggggactgggagctccacgacatgccggcctccttgagggcaacagggcgcctctgagaagactctggaccatgtagcagttagatttgagtagcagtcttgttataaatgttttcggctttaggatttttttaagaaccccaactttctgagggccttcagtggatgaggctgcatgtgaattttatgt

SEQ ID NO: 24717 - DNA, 2593 bp, Artificial sequence
  DNA replication origin
cgcggtgcgtgggggcaacctccaggccccagggctctgctcctccccacagtcaggaacgcggtgcgtggggggaatatccaggccccagggctctgctcctccccacagtcaggaacgcggtgcgtgggggcaacctccaggccccagggctctgctcctccccacagtcaggaacgcggtgcgtggggggaatatccaggccccagggctctgctcctccccacagtcaggaacgcggtgcgtgggggcaacctccaggccccagggctctgctcctccccacagtcagggatgcctgagcctcctcactaccgggacccagattccctgcttagagtcacccctgggtggcctctggagatgcaggttgatccccaggtgttgcctgagcccggcctctcacctgagatctctgtggcagtgccggggctggggtggcacagtggggagcagaggccccacagccctcggggaaggactcacttgcccagattctgtctccactggtattacaaaggaggcagtagccgccgacgctgttgttatacagagagccgtgcacgtcagatgtgtggcttcctcccggtgacctgatttcttccaactttagttcttggatctgatttcgtcctcggggagaagagaccccaagagtgttgagcagcccatcgtgcttaaagaagggtaaggagggtaaggtggcgtctggcagggcaggaggggagaagggtaaggtggtgtccagcagggcaggaggggagaagggtaaggtggtgtccggcagggcaggaggggagaagggtaaggtggcgtccagcagggcaggaggggagaagggtaaggtggcgtccggcagggcaggaggggggagaagggtaaggtggcgtccggcagggcaggaggggagaagggtaaggtggtgtccggcagggcaggaggggggcggcagggcaggaggggggagaagggtaaggtggcgtccggcagggcaggaggggagaagggtaaggtggcgtccggcagggcaggaggggagaagggtaaggtggtgtccggcagggcaggagtggggagaagggtaaggtggtgtccagcagggcaggaggggagaagggtaaggtggcatccggcagggcaggagtggggagaagggtaaggtggtgtccggcagggcaggagtggggagaagggtaaggtggtgtccagcagggcaggaggggagaagggtaaggtggcatccggcagggcaggagtggggagaagggtaaggtggcgtccggcagggcaggaggggagaagggtaaggtggtgtccagcagggcaggaggggagaagggtaaggtggcatccggcagggcaggagtggggagaagggtaaggtggcgtccggcagggcaggaggggagaagggtaaggtggtgtccagcagggcaggaggggagaagggtaaggtggcatccagcagggcaggagtggggagaagggtaaggtggcgtccggcagggcaggaggggggagaagggtaaggtggcgtccggcagggcaggaggggagaagggtaaggtggtgtccagcagggcaggaggggagaagggtaaggtggcatccggcagggcaggagtggggagaagggtaaggtggcgtccagcagggcaggagtggggagaagggtaaggtggcgtccggcagggcaggaggggggagaagggtaaggtggcgtccggcagggcaggaggggagaagggtaaggtggtgtccagcagggcaggaggggagaagggtaaggtggcatccggcagggcaggagtggggagaagggtaaggtggcgtccggcagggcaggagtggggagaagggtaaggtggcgtccggcagggcaggaggggggagaagggtaaggtggcgtccggcagggcaggaggggagaagggtaaggtggtgtccagcagggcaggaggggagaagggtaaggtggcatccggcagggcaggagtggggagaagggtaaggtggcgtccggcagggcaggaggggagaagggtaaggtggtgtccagcagggcaggaggggagaagggtaaggtggcatccagcagggcaggagtggggagaagggtaaggtggcgtccggcagggcaggaggggagaagggtaaggtggcgtccggcagggcaggaggggggagaagggtaaggtggcgtccggcagggcaggaggggagaagggtaaggtggcgtccggcagggcaggaggggagaagggtaaggtggcatccagcagggcaggagtggggagaagggtaaggtggcgtccggcagggcaggaggggggagaagggtaaggtggtgtccggcagggcaggaggggagaagggtaaggtggcgtccggcagggcaggaggggagaagggtaaggtggtgtccggcagggcaggaggggggagaagggtaaggtggcatccggcagggccggaggggagaaagggatgggggcccccagtccccagagcacccagcacattccagaagattccctagtcgggggcagcctcctcccttgctggccagcagccttgtgatttctgtaccact

SEQ ID NO: 24718 - DNA, 1016 bp, Artificial sequence
  DNA replication origin
tctgctcattgaagaattcataaaatgtagccatgtaggactccttaaaactcgcctaaaatgaaacggagatcactcgaggacagcccgaagtacctcggctcacggcccaaatctgaaaaagctagaggcaagaactgtccaagcctaaatgacgataaacaggcaaagaacccggtgttaccgggcaagtgagagcccgcagggctgcccggaggacgaatcacataaatcgctcaggcgccaacgaagaccatcagacctgccagtgcccgtgaggtctccaagcaccctttggcatcagtgactccgtcctggccccgggctgtccctcacacctgggtcccaggctcatgaagaggtacgttggggcccagatgtggctgcctgggaacctggagtcataggccagggtcccagagcccccacgcccatctctcgcccgtggggcataagggccgctctgaggtgggaagagggggcagggacctccatcacacggggaagtggaggcacccagggattcgggggggcctttgcagccaccattcctgaggctcgaccccaagttcctgttgtttccacactgaggtcactgcacagttccctggctgtgaaatgaggtgggtttggtgcagacctcggaggaggctcaagtgcctgttatggagtttccagcccacagcgcagggcctggctggtgggaaagagcggtcggtgcacctcggcctgcctgcgagtgtggcacatcttttactcactcggactcagagaaacccaacgtttgccccaagcgggctgctcctccagtgggggcctctgctccccaaagccctcatttctacctgggccccaccaagaacagggaaccaggaggcctgggcatctgtgcaccacagcccagccctctccagacggagccccgagggggcccgaaggcatcgaactgccctggcctggcccctgcagagacagccttgggcctcaccaggagcactgcccccgggacgcctcaa

SEQ ID NO: 24719 - DNA, 1155 bp, Artificial sequence
  DNA replication origin
cctcaaacacacaaggtgctcttagggggaaatggggcagatgcctgagggactcctgacctggtggcaccagatccagtctgaagggacgaggatggaggacggaggttcatatccacagggagagaggggccctgggaggagggggccgcgtggggaggggagcgccacgttgggaggaggcggccgcttggggaggaagcgccacgtggggaggaggcggctgcgtggggagggaagtggggaggagggggctgcatggggaggtagtgcagcatggggaggagggggccatgtgaggaggagggggccgcgtggggaggtggggaggagggggccgcgtggggaggagggggccgcgaggggagtagggggctgcgtgacgaggagcctccagcaccgcaacgcccaggaggcgccaggttaggccatctgcctggcctgttcagccgcttcccacacctgacaggtcagatgctgctcctgccacggggccggcgacgagccacaggctcccgaaaaaggcaaggggttcactttaggaggggagaggtgagcgggacggggacgctcaggtcctgggtttcaagagaggatgtggtgccggctttgattcttgatctttatcttacgactctctcaaatgtgggaggtttttcacgtgtattttctgaagagagaaaagaatcagttgtccctaaaaagagaaaatgaagaagagggactcacagatttggacttggacaggctgccgagggtctgaacggtcttggagatcaatgtcagcgtcctggacgtctgggggtcctggggaggcgggagcaagaaaggtctatgtcagcatcacagaaatgctgtgactgtcccagatcgaggggacgaaatgcaggagtcacctcagagctgctgtggcttgtgcatgagctacggagaaacaggggtagcgacgcagatgggactggagggggtgggcgtcccacagtctcaggagctgctgagaccatcccgcaggcaacatccgacggcaccgcggtgacccactctctcggcccagcgtgcagggtgcatctcaaagtcgaaagcatcaggtggggtcatggctctggggcgctgagtctcggggtgctgagtctcctggccctgcctggggctcat

SEQ ID NO: 24720 - DNA, 2186 bp, Artificial sequence
  DNA replication origin
cagggttctgggggaggcagttcccaagcacatcccagccccagacccactttgaacaaggtggaagtgaagagataaaacacatcctctcacccagatgagcacagaccactgtggaatgagacaccaaaggggctgcgctgtgtggtggtgatgagagatggagagaaacagggagagatggagagagaggcagagacagaaggagagagacagagagagacaaggagagagagagagagacagggagagacggagagagaggcagagacagacggagagagaggcagagacagacggagagagagatagagacggagagagagagatggagagagacagagacagacggagagagatggagagagagatcgagacggagagagagagagagagacagagagatagagacagggagagagagacggagagagagagacagagaaagagagaaaaagagagagacagagatagggagagagacagggagagagacagagagatggagagagagacagacggagagaaagagacggggagagagagatggagttagggagagagacagagagggagagagacagagagatggagagagagagagagagccagagacagacggacggagagagagagggggagagagagagagagacagagatagggagagagacagggagagggacaaagagggagagagacaaagagatggagagagagagagacagatggagggggggagagagccagagacggagagagagagagagagacagagatagggagagagacagagggacaaagagagggagagagacagagagatgagagagagacaaatagagggagagagagagagacagagatacggagagagacagggagagagacaaagggggagagacagagagatggagagagagagggaaacagagagagggagagagggaaacagagagagggagagagacagacacaggtggagatagagccaggactgtggctggacttccctgcggaccctcagggggccggggcatggtgtccccacgaggccattgtgcccgaggaaaacggtcaccctgcttctctctcccgcagatgacccggacgtcaggtacactgcagtgagcagcttcatcttcctgaggttctttgcgcccgccattctctcccccaacctcttccagctcacgccgcaccacacggtgagtgaccggctgagggaccgaggctttctgagctgtcctgcgacgccggcctgggttggggcatctgcgtggctgtagggggccgaccgtgtggagtgtggaatgcgtggggagtgtgtgaggaatcaggagtgagtggggagtgtgtgtggaatgaggagtgagtggggagtgtgtgtggaatggggagtgtttgtggaatgaggagtgtgtggagtgcgtggactgcgtggggagtgtggaaggcatgtggaatggggagtgtgtgtggaatgaggagtgagtggggagtgtgtgtggaatggggagtgtttgtggaatgaggagtgtgtggagtgcgtggactgcgtggggagtgtggaaggcatgtggaatggggagtgtgtgtggaatgagtgagtggggagtgtgtgtggaatggggagtgtgtgtggaatgaggagtgtgtggagtgcgtggacagtgtgtggggagtgtggaaggcgtgtggaatggggagtgtgtgtggaatgaggagtgagtggggagtgtgcgtggaatgaggagtgtgtgtggaatggggagtgtgtgtggaatgcatggggagtgtgcatggaatgaggagtgtgtgtggaatgcgtggggagtgtgtgtaatgagtgagtggggagtgcgtttggaatggggagtgtgtgtggacggtgcatggggagtggggagtgtggaagacgtgtggaatggggagtgtgtgtggagtgtgtggacggtgcacggggagtgtggaaggtgtgtggaatggggagtgcgtgtggagtgtgtgtggagtgtgtggacggtgcgtggggagtgctggtggatgcgctgggtcctggaacgtcctcgttgcaggtggttcaccgacctatttaagctgtgtacgttctgggggagtcgagacagtgtcacaaaagcagtggacggtttgtccagggttttagctgctggtcaccgccctgc

SEQ ID NO: 24721 - DNA, 2262 bp, Artificial sequence
  DNA replication origin
cggcatttgagaacggggatgaagcagtggggattcttggttattcttgggtcaggcactttctcctgtctttggtggtcaggccactcctttagcccgtggatagccacggatagcaggcccagtgcccggctggtgttcagggcactcctttagcccgtggatagccacggatagcaggcccactgcccggctggtgttcagggcactcctttagcccatggatagccacggatagcaggcccgctgccaggcggtgaggaccacaggcgatactccgctcagccctgagctctgatgggtgtgggaagaggagctgtggtcttggtggggtctttgttgtcattttaggcacctgttttccccgcccacagtgctggcgtggggttcatgcccaccttcccggcccaacatccttgtggcccctcaggacctgctctggggctgcagccacagggcgggaaggccacacccaacctccagaccccagagtctcaggacagcagcggaggccccacctcccacacctgcctgggcagcacagacccagttccattccccctgtgagcgctgggtcaagtgtgggggtgccgtggggcgtggtgtcagtgtgggggtgccgtggaacgtggtgtcaagtgtgggggttccgtggggcgtggtgtcaagtgtgggggtgccgtggaacgtggtatgaagtgtggggtgccgtggaacgtggtgtcagtgcgggggtgccgtggggcgtggtgtcagtgtgggggtgccgtggggcgtggtgtcagtgtgggggtgccgtggggcgtggtgtcagtgtgggggtgccgtggggcgtggtgtcagtgtgggggtgccgtggaacatggtatgaagtgtgggggtgccatggaacgtggtgtcaagtgtaggggtgctgtggggtgtggtgtcagtgtgggggtgccgtggaacgtggtatcaagtgtgggggtgccgtggggcgtgttgtcagtgtgggggtgccatggaacgtggtgtcaagtgtgggggtgccgtggaacgtggtgtcaagtgtgggggtgctgtggggcgtggtgtcagtgtgggggtgccgtggggcgtggtgtcagtgtgggggtgccgtggggtgtggtgtcagtgcgggggttccgtggaacgtggtgtcaagtgtgggggtgctgtggggcatggtatcaagtgtgggggtgctgtggggtgtggtgtcagtgtgggggtgccgtggaacgtggtatcaagtgtgggggtgccgtggaacatggtatcaagtgtgggggtgctttggggtgtggtgtcagtgtgggggtgccgtggaacgtggtgtcaagtgtgggggtgctgtggggcatggtatcaagtgtgggggtgctgtggggtgtggtgtcagtgtgggggtgccgtggaacgtggtatcaagtgtgggggtgccgtggggcgtggtgtcagtgtgggggtgccgtggggcgtggtgtcagtgtgggggtgccgtggggcgtggtgtcagtgtgggggtgccatggaacgtggtgtcaagtgtaggggtgccgtgggacgtgttgtcagtgtgggggtgccgtggaacgtggtgccaagtgtgggggtgccgtggggcatagtatcaagtgtgggggtgccgtggggctgcaccgacgcggtgtcaagtgagggctgaagggctttatgttccactccctgaccaggggcttcggggtgtgcaccctggcagggcaggctgcgcccacgacccaggcaccccgagggttcacaggcaagggtttcagaaggtggggaggctgaggttgtggcaaagtcataaatcagtacatggaggccgtatgtcagtttgacctgagaaggcagacatcacgacgtgtggcccatgggtcggatatagagcgtttttgatttgtgattggttaaggaggagaagctttgtccaaacaattgagatcagcagaaaagaatgttggctctggcccacaggcatgacccctcctggcccctgaggaagaaattcagaatagagccgggttcagggttcgggcctgtgatcccccctgcatttgtggtctgtgttggtagatctgtttggtgagggtctcggtttttgaaaaacaatttagggacatatgttaagatgctatttttaacttgtatagggaataaatatctcctgactaattttttggctattattttattatttattttgcttgttaggtgatttaccactcaaggctggct

SEQ ID NO: 24722 - DNA, 1105 bp, Artificial sequence
  DNA replication origin
gagtgaggcggggcgggggggctcagcgagtgaggcgggggggggagctcagcgagtgaggcgggggggggagctcagcgagtgaggcggggcggggggctcagcgagtgaggcggggggggctcagcgagtgaggcggggcgggggggctcagcgagtgaggcggggcggggggctcagcgagtgaggcggggcgggggggctcagcgagtgaggcggggggggagctcagcgagtgaggcgggggggggagctcagcgagtgaggcggggcggggggctcagcgagtgaggcggggggggctcagcgagtgaggcggggcgggggggctcagcgagtgaggcgggggggagctcagcgagtgaggcggggcgggggggctcagagagtgaggcggggcgggggggctcagcgagtgaggcggggcgggggggctcagcgagtgaggcggggcggggggctcagcgagtgaggtgggccaggcggaggtgtcctggctgtcgtccaccctcgtggtctgcgccattagaggccattggagggagtccacgtggtgtgtcactggatttctctctgagcctccctggtgttccttctcccacatgtgctggggcctgtttcctgtgccggcccccttggttcttgatttggctctcgcctgccctcagtggtggtttcagcgtcccgtgcagctccagatggcctgtgtatgtctgtgtggcaagagctgagccgatgaggtcaccaggctgatcttaggaacccatgagtgcctgtgtgctgtatctacgtccgggtagctgtggaactggccggccctggctgtgagcgggggtcccggagctgggaaggggctttttccagggctgttcccagggctgctttgctttgcagagtggatggtgtgaggtgcagccggctcccctgaggacatcagatgaagatgctgacgtgcatggcaggtgtcagcagcactggaggcaaactgtcctgattccgtctctctcctttgggcacttggaaagcgtctttgtgcctctttccaccttccgcacctcccaccatgtcctgtggccatgtggtgctccatcatgtggccgacctt

SEQ ID NO: 24723 - DNA, 1503 bp, Artificial sequence
  DNA replication origin
ttccaaaatagtcccacaggaattttgactgggattacattgatctatagattaatttggggagaattaatatcttaacaaaactgagtcttcaaatccatggacatggtatatctttacacgcttgggtctttccaatttctctcatcagtgttttgtgatgtgttttcagcctacacattttgcacatttaaaaacatttatttccctgtgttttatgtgtttagtggagtggttaaagatttctgaggtagtccaccaaaagcacaaacctaaaagcataattttgtgaaaggtgctgtttttgtgtaattttcatggtcattgcttgtatgtacaaacgcagtcgacgtctccacactgactttgtgttctctgttcttgctgaacacaccaattagttctattagctttgcctgtagatttttttttgtacattctatgaataaaggcttttatttcttcctttgggatctgtatggcctttgttttttcctcgtggccctggctgggacacaggtggggtcagagggaggcgcgcgcatttcagccgcattccctgtctcgggcagctcttgctcagttgtgtcctgtggctgtttcccctttttctggtccctctgcagctggtcccccgtctgatgccctccagacccctggctcctcctttctgaacgggcctggccagcacagatgcagcagaagaaagtgacccttccggcctctcgtggtgagaaggcagccgcctttgcccaagtgagaaagggaggcccagagtgttcggtaaacttttcggtgtgactcaaatagatggggacaaccctgtggattaggcacatcagagaaatttaagtagacgccgtggcttttagatcaggcattctctcaggtcagcatctggagatacgaacacgcatgcttcaaatgtccacggtccccattgttgaatgtggctggcttctagaaggaaaggttgggggctggtgacagaagtgaccccacgtcgggaatgaggtggcaggggcagggatcccttctcgaagggattttaaatccttttgaatgttgtggattttgttctgtttctgtgttacctattaaaaaattaagtgaagtacttctaaaattaaagacttgtaatcatgtgccagttacaagatttttatccacgtaaatatgtgacttctcccgtcccagtttcagctcataaaaatgtgaagacacagtgacattgcaagtatttaaaacttcagacttcaaaactgaccctcctgtccagctgaaggcgtcttggagtctgaagatttatcccttttcactgaaatatattgcccaactcagttttaagaagtttttgctttcatgtggctttattcctgtgagactcaaaactgaggttcgtgttgtgggggaaaggggaggttatgcaagagccacgcagcggtcgtcagaggagaggacagagcccccactccggacccttgaagtcaaaggcgcccgccc

SEQ ID NO: 24724 - DNA, 1998 bp, Artificial sequence
  DNA replication origin
ccacccttgctgggacagcatctccttccctctcagagcaatgccactgatgcccagaccagcaaccatgcccgtcctcgcctgcccgacaatgcccttcccaggccctgctcctcggaggactggtcatgggcaccctggactatgccgacccgcagtccccagggaccaagtcctgctgctgtggacacaggtgaccctgcccctcgcaggggagctgctcttctcctgagcccaggagtgctctgaaacttatatcccaatgagaaccaaaatcaggagtagaagtgggagttgaaggccagagcctttttcgaagaacttccctaagctcttttaaatacctgcatccaggccagatgcagtggctcacgcctgtaatcccagcactttgggaggccatgccagaagcgccacttgagcccaggagttagagatcaacctgggcaacatagcaagaccccaactcaacagaaaatttaaaaattagatgggtttggtggcgcacgtctgcagcgaagcggaggattgcttgagcccggggttccaggctgcagtgagctgtgatcacagcactgcactcctgcctgagtgacagggcgagatcctgtctcaaaaaaccaaacacctgcatctcctgcatcttcagagcacagtcccgcctggaggagccgccgtcaggccctcctgcatcttcacagcacagtccccaggtgcagctgctccccccaacctaattcaggccctggtaagcttcacaaggccaaggggacgttggtctccaccaggaagactatatggcacgtctaaatgtaagaatctgtgacagacgtcgctgaagccaatgcgaggaggcgcaggtacccaggaggcacaggtacccaggaggcacaggtgcccacacgggccttgccgggggaagcacgactttgaagatggggacgtccacgtttcaacgctgccttgccagaggccagttccctcatctctcagcctcaggacaccgccctctccacagtgcagcctgcgggcacagagggcgctcggctggggaagggcagtggctctgcccccaaagcggcctccccaggacacaccactgcctggcttggaggtttcttcctctgccctgcacagtgagacaagcacatggcagggcctcccacacaccaggaccaaacaacggggagcactttcgatgtctttggcccccgccaggcgtggctcactggacccagaaaccacagcgctctctctctccatgactgtttcagctgcccatccccgttctagactgtgggaatagcagccaatgaagcaaagtcctggccccatggagccagccaaagagcacacagaaccacgaatgtccaacgcgggcaaggctggcgggggcagcactgtggcctcgctcgggggacagggaggcttacggacgagtgagcgcttgaacagcgctgtggacggtgaggagacccgcaggaggacaagggaacgcatgaatgaggccatggacggcgcggagagcgcaggaggggtctaggcagagggacaccaggtgcgaaggcctcgaggcagcagggcttgtgtgtggtaaagacgtaggagcaaggagaaggctgacgtggcctgggcagggcacggcaggaccggagcatgctgggagccgaggtcagaggtcagggtgcagccgaggtcacgtggtgcagagcagacatttcaccacagcagctgggaatatgcaggcccgtgcaagacactggatggacggatgcacggatggggcagtgggcatgcagggaggaatcacctgtctcaggtcagcagccaggagctgcccagacctggcacagtggaccaggaagggaaggtcacccaagcctccacaggtggggctttctgcaagcaaggtgcagcggtcagcccgagaggccacggtgccgagcaaatcctggttgtcctcatggggacgacaggaattcagttctggcagagcca

SEQ ID NO: 24725 - DNA, 1164 bp, Artificial sequence
  DNA replication origin
gtcatctccttgttttagggtcgtgggtgccggcccaggggaggtccagggcgggaagctggttcccaagccccagccctgccaacccaatttcagggagccttttagtttaagtaaataaggaaacaaatagtggctgccctttaaatgattaaaaatgattgctctaaaaggtatggattgtgaacacagttcactctcaacctcagaaaattatttttctagtaggacagaaactgccaaaatcacttccttggagaagggccaaggccagagagaaagggcttgttctctgaaatgtgtccacttcgatgcgttctgaagttaaacctgtgacagacactgcccttcaacctccaccttgaaaaatacagaaaaaagggaagacagaggacgctctccccagacgtcggctcagcactcgataaagaggccccacagactccagggcctcggacgcgcggcccaggggcccgggccacacgcagggaggaggcgtgggggacacaggcctgaggtggagctgggtcggtgacctccttagtgggaaagagggaagaagagaagctgagttccgcctttccttcctcacacattccatttgcagcttcctgctaagtcagacggcgatattgggcaacagcaaatcaaacttgacccaagtgcttctccccagggaatgtgagaaggggctcctgcccggctgcagacccagcggccagagagcaccctggggcccttctgagctcagagatgcagacgtgggcttttttctttccacagcgactttgccaaatgaaccatcagaccttaaaggtgacactgaccttggaggaagcacacggggggctgggagactcagggaccgggagacttggggggctgggagactcgggggccgggagactcgggggaccaggagactcagggggccaggagacacaggggccaggagactcaggggtcgggagactcgggggttgggagacttgggggtcgggagactggggggtgggagactgggggaatgggagattcggggaccgggagactcggggagccgggagactcggggagccgggaaactgagggggccgggaaactggggggccaggagactcggggggccaggagacttggggggctgggaggctcgggggctgg

SEQ ID NO: 24726 - DNA, 829 bp, Artificial sequence
  DNA replication origin
gctgggagacttggggggctgggagactcgggggccgggagacttggggggccgggagactcgggggctgagagactcaggggaccacttggggggccaggagactcgggggccgggagacttggggggccaggagactcaggggccgggagactcaggggtcaggagactggggggtgggagactgggggggtgggagactcggggactgggagactcagggagccgggagacttgggggaaccgggaaactggggggccgggagactcgggggccgggagactggggggtgggagactggggggtgggagacttggggactgggagactcggggagccgggagacttggggggaccgggaaactggggggccaggagactcgggggctgggagactcaggcggccgggagactcgggggttgggagactcggggggccgggagacttgggggctgggagactggggggtgggagactcgggggatgggagactcggggaccaggagacttgggggaccggccccaaagtgggtgccaccatggagcaaggagggggcggtggccaggactaaactccccagcatgtggggcagccctgcctgacacctgcctctcaggtggatgtcgaccaatgactaatacaggactctgttaatgcatgtgcaccgatggagggcttccgaccacagatgtagcgtggattccagctgcaagtttatgagagagccagcttttgggttcaagtacctttcctgccaactttttgtatggggtgggttgatttgcgttttgccctcacactacaggggcggccagcccgcacagcc

SEQ ID NO: 24727 - DNA, 2293 bp, Artificial sequence
  DNA replication origin
accagaaaaaaaagagaaaacgtgtttcctctaagagagacagaacaggcacctttggtgaaggtaactgaatgaactgtttggggtgcggtggagaagaaacagttgcttgggagctggggcagcccccgtcccgctcagctgtggggctgcagggagaggctcggtcctggtgcatgtggcacacacggcgaggccccggggcgacgtggccaggccgtgctgcagcagccccagccctcctggtctgagcagctcattggatgttggtgcgtccagcaggctccctggtgttgctgtcgtcatagcaaccaggatgtttctcaggagttttttttttttttttctgtttcaatgctttattaacagttggaaacaaaaccagtgccttggaggtgatggcatcagaagcctgaggcagggaaatgggcttgcattttgtccccccacttttttttttattaaatgcatcatagcaaaagtagattaaaaagaaagagtctcagccccagatgacagtgagcaaggagaaggaggtaaagacggggccatcgggcggggagggaggaacctggtgtgttttggggccaggggactgggcatcatcgggcagggagggaggaacccggtgccttggtgccagtgcgggggaactgggcatcgttgggcagggagggagggagggatgaatccggtgcgttggtgccagtgtggggggactgggcattgtcgggcagggaggaaggatgaatccggtgcattggtgccagtgcggtgggactgggcatcgtcgggcagggagggagggatgaatccggtgcgttggtgccagtgtggggggactgggcatcattgagtggggagggaggaagggatgaatccggtgtgttggtgccagtgtggggggactgggcatcgtcaggcagggacggagggatgaattgggtgcgttggtgccagtgcggtaggactgggcatcgtcaggcagggatggaggaacctggtgcgttggtgccagtgcggtgggactgggcatcatcaggcagggagggatgaatctggtgtgttggcgccagcgcagggggatccggccttttcatgtcgtacggcgtctgtcttacagggactccacagaaagcttgtgtgtttccgtcctgcagtgtccgccttcggaagacccagctgttactgctgtgatttgaggccctgtgggaacaaatctcagttccgtattatccacaaacaccatctcccacaggactttcaaaagcttttttctctctccttttaagaaacacaggaacttacagctaaatatctacactcatttgttgcaaaaaacaaagaaatcccagaaaacaaaacaaaaacaaaaaactcccaaagacaaaaacaaaaaacccagtaaaatcccaagggaaatatggtcagcgtcaggtcacactgtaaaggtgtcagaaggaaagtcagcaaagtcaagctgtgtttgagggtaaggacttctatctgctgcagaagccgtcagttccaaaacagggccgggaggctggaggggcccctgtccgacttgctgggtgtgctgcggctgccctcaaattcaggggcagccgcggccaccaggaaggctgcgtctgctccgggaacctcaactgccatcccccaggctcccttccctctctggagaagctcgccggccatgttctccccttcgtgcctgtgaactcatcacacaccctgcctgcgtgtgccgcgtgtgtgtgcgtgtgctgcctgcgtgtgctgcgtgtgtgtgcggtgctgcctgcgtgcgtgtgctgcgtgtgtgcgctgcgtgtgtgcgtgtgctgcgtgtgggatcttcacatcggtgggagccttcggaaagcctgtcttctgacatgggatgaccgacctgaggcctggcctggagccaggtgcctcgtagcagcctagctgtgttctcccatgcagcgggtgaagaaggcgcatcccgggagagtcgccgtgttgaggtgttctgagggtccagtgcctatcaggaaatactcattttttcccaccaaccgattatcattgatgcttccttaatgattcccaaaataaaaatttccagaaccttttgaattagaggcgtctcagagccggaggagccttcgagagctgctgtgtctcttgcttttgcagttcaggactttgaggcccagagaggtagactgtgtgttgggggcactggcgggaaacggccgcaagcagtgagaccctgagagctgctccgtgtgggcagcagcgggtg

SEQ ID NO: 24728 - DNA, 857 bp, Artificial sequence
  DNA replication origin
cggccggggccccaccacagggggtccagggagaccaccagcgagagagtggatacccctgggaacaaagcgggcccagatggagacctcagacaaaggcagctctcagccctcagctgagcacgccgaggggctacagcccccatccaggcccaggccggctgccagcacagagaggcccaagtggaccccagggccaaaaccccaagtctgggggctgcaggggagcacggcacctggctaaagacacagcacacagggctacagcgggcagcctgtggtcaacagctcatcagcgacgagccaggcccagccaagacagcaggaaaaaaaatcaaacgggaggccatgccctctaccctgggggcagagctgagaggacagagaacaggcggacaaggcaacagggacccaggtgcgggtcagcaggcgctaaggatcccagggtctgcgtgcccagccaggcctcacaccagcgacatccaggggtctgcaccagagccatgggggaacagagacacgaacaggtgaaagttcagcagggctgcaggcgcccaggccagccctgaggcagagacgtgaacaggcgaaagtgcagcagggctgcagccctgagacctggtgggctggggtcaggacgttaagggtgtgtgtgtgtggaatggggctggccggccccctcccaacaagatgtaggaaaccccatggccgggatgaggggaggcaggaagggcaaggggcatggaggccggctgagagtccagaggagagaccagcccagacccagggaagaaggaaccccgtgggatgtcccagacagcaaggagagaggcagtggaaggcacaagggcgggaga

SEQ ID NO: 24729 - DNA, 3547 bp, Artificial sequence
  DNA replication origin
cctgcctctgcttgctggtcacacggctgcccagtgagcacccctcagtgcagggtccatggcaccctggcatctcagagggctggcggctgctggggatgaggctggagcccaagggcagggtgggggcttgcgtgggggtcgtcctcccagtcccggacctgccctcctcctggggagagccccacccacccttctgaggtgacggcttggccctggagactacctgccctgactgggggccaggcgtgctctccatctccagggattctggggcttggggaggtcatagtctgttggaggagggtgcgccaattggccaaagggtgtttatggcccgagatggaagctgggctcggggggccgagagcctgggggccacccttcctgtgagggctgctgacgctggtgtgggcaatgctcaggtgaacgtgtgtggggaggggagggggcgaacgtgtgtggggaggggagtgggtagcgtgtgtggggagggtgtgaacgtgtgtgtggggagggaggggtgagcatgtgtgggctggggaggcggtagccccccctccagaacagacactgcactgcagcctgcacttggagtctgctgctctctcaggcagtcttgtcctgagtcgtaaataaggaacggaaaaccaaagtttcgatttgctattttctcctattctgaaggtgccattgagacgccaaatcttgtgcggttcaggcttttggctgtggttctccacggggtggctgatgagaggctttgtggccggcccactaggagggcatcggatgctcgccctgtaattgcgctgggtgtgcccgccaccggagttcccgcccctgatgacagggtcaggcagaggccggttcttgctagctgcaggttttgtgggtacaggtcatggggtatgggctgtggactgagcctctggccagggtgtggtggcatctcaggccgcatcaccagtgggtgtctgtggctggggcagtgtggacgcatcgggggtgggtgtccgtggccggcggcagtgtggacgcatcgggggtgggtgtccgtggccggggacagcgtggacgcatcaggggtgggtgtccgtggccgtggcagtgtggacgcatcaggggtgggtgtccgtggccgtggcagcgtggacgcatcgggggtgggtgtctgtggccagggcagtgtggacgcatcaggggtgggtgtccgtggccgtggcagtgtggacgcatcaggggtgggtgtccgtggccgtgacagcgtggacgcatcgggggtgggtgtccgtggccgtggcagcatggacgcatcgggggtgggtgtctgtggccgggggcagtgtgaacgcatcaggggtgggtgtctgtggccggcggcagtgtggacgcatcgggggtgggtgtccgtggctgtggcagcgtggacgcatcgggggtgggtgtccgtggccggggcagtgtggacgcatcaggggtgggtgtctgtggccgggggcagtgtgaacgcatcaggggtgggtgtctgtggtcggcggcagtgtggacgcatcgggggtgggtgtccgtggctgtggcagcatggacgcatcgggggtgggtgtctgtggccgtggcagtgtggacgcatcgggggtggtggtgctgagccgagactcgggctccggtgtcatcaggggtgggtgtctgtggccgggggcagtgtgaacgcatcaggggtgggtgtctgtggtcggcggcagtgtggacgcatcgggggtgggtgtccgtggctgtggcagcatggacgcatcgggggtgggtgtctgtggccgtggcagtgtggacgcatcgggggtggtggtgctgagccgagactcgggctccggtgtcaggtgctcctcggcggcttggttctgtgtcccccgtccccccgtcccccgtctgggagccgcccgaccttccctttggatgtagtgtgtgtctggggctcttggtgttctctgtgctttgcaagggtgagagctaccccagagagaatgccaggctcttcccagacaccccgaagggccagggcagccttcactgtgctgaggctggctgtggtctcttgggcatctctcccgacttgggccaggtacacagtggggtagggcgaatgtgcacacatttccggtggacttgggggagaccctctaggtctccttgaagcacagagccagtgcacctggcttctctgccagacacagcaacagtcacggccattggccacagccacctccacgacagccacagctgcatttctccccctggggccggctgcaccggagctgcccacgtgagtgtccttggctgacagcatcgcagcctcactcttaggggtgagcgagcagcaggggtggtttggttcagggaccccaactctgggagcccacctgcctggggctggactcaggccccgtgttgccttgtgggtgggtgggtggcactgccggctgcgcccacggcgattatacagacgacttggtcttcccgtcgtccccagcccacaggactccagcctccacaggctttgccgccctccccaggggtcaggaagccccggagaccataggacagaggtggtttagtcgggagcgtcgccctgggggtaggtgaggcaggacaggcagtgacgccgcagccttggctgtgacaccacctggtgggctgcagtcccacttctgcccctgccaccggccatgtggcctgctcaccgccctgggcctcagcatcttctcctgcaaaatggggtcgtgatggttcctgagagtttgtgtgtagagggcagtgctggcacaaaacgtcagagacagggcccctcgcacctcctgcccgtcccacgcagctgcaccaggctctgggggagggtgggacctgagcttggttcttcttgtgggaagcgctctcactccctctctgtccctctccctctcaccgtctctctgtctccgtctctcttcctccttcactctcgctctcccccagcacaggtccgacagtctggttcggtgcccgctgctctgccgccctctgggctcctggctggggctctgctctgcttctcagcccgctgcctgcccactgcccgcctaccgcccacctgctgcccgcctaccacccgcccgctgtggatcctgtgcttcacagcccccgtctctctgttttctggcactggaagaagacactctttttaagacagtcctgtgactcacaaccaaagggaggtcaagtgcatttgcacagttgtatgcagtctgggggtctccgctcaaggctggggactgtgtgtcgggcaggtccttcggtgctgggcacggggtctttcaccctgtagacgtcgcttgtggggtccttggaaactgagacccccgctccccactttctgatgagagggccccgtctgtctttatgccatggtccagggtgagttgatttccttgtgccgtggtccagggtgaatgatgtgccacatttcctgggaatgacattttccgtatgttttccagacggcattggcatggcc

SEQ ID NO: 24730 - DNA, 1394 bp, Artificial sequence
  DNA replication origin
aggctgtgaacaggagggtttggactgggaaccacgcagcacaaacgagctgagttcgaggaaggcctcagtgccttgaaaggcagctgctgtttacacttttctcaagacagaggcttcacgtggtcgccgttcacacaagtgccaagcaagaccctggcaccagaggcgtggactgaaaatgaagccacctgaacgtcctgtgacggtcacggagccggtcgtgttcgggggcccgtgtgtgtttgtcaggccaggaccctgccgcctgccctctggcttaaggaatccagttggggagaaacactccctctgagtacccctggggttttgacccagcttgaggttgtaaacaggtggagggggccgagtggagaggccttgctgtgatagagacctgggcctgccctgccaccgtccgccgggagcccacggcagcctcgccctccgacacctgcacgctgcatgcagtggactgaactgcaggatgcctgtgttgctgccagttctgctgtttgggaaaaactctctgtgttaagttggatcttccttgtgactgattcagaggagccacgttgttacggaagggctgggacccagacacagggtccagagtgtcctcgaggtatcagaagaactcctggagagcaagctgagggctgtgtcgtcgccacaccctccgtgggtccctgctcctgagttaggctgtgcccagccgcccagtgactcagaagctgtgcacacaaggtgtgaatcccaccttgctctagcaccaagaaaacagcacctggtgatgggatgtggatggcggacgcggggtgacagacaggggataatggacatggggtgatggacgtggggtgatggacatggggtgatggatgcggggtgacggacgggggatcatggacgtggggtgatggacggaggatgacggacggggggtgatggatgggggatgatggacgcggggtgatggatggggtgacggacatggggtgacggatgggggtgatggacgcggggtgatggacacgggatgacggatgtggggtgacagatggggtgatggtttcagggtgacagacatggggtgacggacggggatgacagacacggggtgacggatgcagggtgacagacatggggtgacagacgcggggtgacagacacggggtgatgggggatgacagctgcggggtgacggacaggggatgacggaggatgatgggttgtgggatgataggacttctcagcactggtcgctcctgcctgggggtgggagtgaatgggaaggagaaaggctcggagaggtccttacccagtggccaggagtggggctcaggtttttcgtagtgttcaggggatcccgcagagcccctaggggatggcag

SEQ ID NO: 24731 - DNA, 1878 bp, Artificial sequence
  DNA replication origin
ttaacctagagacccccatccctacccctccctatgaatgctttttcataaacatgccgcattctgaggaatccgaaagactccagcgtaggacagaccgctgttccaagccactgggaaaggggaaactggtgactgagcggcgcccgtcagagccattaaaacgtgagggaaaactgcaccttacggcacacgaacccttagaagaggcaaaacactactgagttaatgcttaatttatttgtaatgataaaagtttttatcactttaaataaagttatttgaaaaaagttattcaatggcagcctaataattttgcttaatgaaaaattaactctgcaaatacagtttccactattcacatggagcctgcaggtttggagaatcctctgcatcagtgtgggtgagcacgtgtgtgaggggtgcacgtgtgtgaggggtgcacgtgtgtgaagggtgcacgtgtgtgaggggtgcatgtgtgtgaagagagcacgtgtgtgaggggtgcatcagtgtgggtgtgcacgtgtgtgaggggtgcacatgtatgaggggtgcacgtgtgtgaggggtgcacgtgtgtgaggggtgagcacgtgtgtgaggggagcacgtgtgtgaggggtgcacgtgtgtgaggggagcacgtgtgtgagggatgcacatgtgtgaggggtgcacgtgtgtgaggggtgcacgtgtgagaggggtgcacgtgtgtgaggggtgcatgtgtgtgggggtgcacgtgtgtgagggatgcatgtgtgtgaggagagcacgtgtgtgagggatgcatgtgtgtgaggagagcacgtgtgtgaggggtgcacgtgtgtgacagatgcatgtgtgtgaggagagcacgtgtgtgaggggtgcacgtgtgtgaggggtgcatgtgtgtgaggggtgcacgtgtgtgagggatgcacgtgtgtgaggggtgcatgtgtgtgaggagagcacgtgtgtgaggggtgcacgtgtgtgacagatgcatgtgtgtgaggagagcacgtgtgtgaggggtgcacgtgtgtgaggggagcacgtgtgtgaggggagcacgtctgtgaggggtgcatgcaatgctcctgtatgcacatctgtgggtgagcacgtgcgtgaggggtgcacatctgtgggtgagcacgtgcgtgaggggtgcacatctgtgggtgagcatgtgcgtgaggggtgcacatgtgtgaggggagcacgtgtgtgaggggtgcatgcaatgcttctgtatgcacatctgtgggtgagcacgtgtgtgaggggtgcacgtgtctgaggggtgcatgtgtgtgaggggtgcacgtgtgtgagggatgcacgtgtgtgaggggtgcatgtgtgtgaggggtgcacgtgtgtgagggatgcatgtgtgtgaggagagcacgtgtgtgagggatgcacgtgtgtgagagcacgtgtgtgaggagagcacgtgtgtgaggggtgcatgtgtgtgaggggtgcacgtgtgtgaggggtgcatgcaatgctcctgtatgcacatctgtgggtgagcacgtgtgtgaggggtgcacgtgtgtgaggggtgcatgcacacacacctgtaagcatgtgtgtgaggggtgcacgtgtgaggggtgcatgcacacgcacctgtgtgcacatgtggatgttgccgtgtgcacgtgtgcacaccaagtgtccgtgagtgcacgggaacagccgtttagaagtgccttaatcttcccgagcacaatagtagctcacctctgcaaggaggctgaaaattctcattatgagtctcataaatacgtggccacgttcatgggtttgtcttatttatcccttactctataataacttggaaggcacagccaatatttccct

SEQ ID NO: 24732 - DNA, 849 bp, Artificial sequence
  DNA replication origin
ggctggagagagggaggggccctgaccgacgtctggctggagagaggagggggggccctgatcgacgcctggctggagagagggaggggccctgatggacgcctggctggagagaggagggagggccctgatcgacgcctggctggagaggggaggggggccctgatcgacgcctggctggagagagggaggggccctgatcgacgcctggctggagagaagggggggacttgatcgacgcctggctggagagagggaggggccctgatcgacgcctggctggagaggggaggggggcgctgatcgacgcctggctggagagagggagggggggccctgatcgacgcctggctggagagagggagggggggccctgatcgacgcctggctggagagaagggggggacttgatcgacgcctggctggagagagggaggggccctgatcgacgcctggctggagagaaggtgaggacttgatcgacacctggctggagagagggaggggccctgatcgacgcctggctggagaggggaggggggcactgatcgacgcctggctggagaggggaggggggccctgctggttctctcgctgctgctgggggatcctgagcgatcggcccctcagaggcgtgagcagttgtctccgggacctccgtaccgcttcctgaattccccagctggtcccatccgtctggaatcagtggcattcctttctctctccatcatttcctgctccatttagcgctcctccagtatttagagaaagagtttctcagcatttggacccaagaatgtgtttatggaaatgctgagtgaaaatgaaagactggaaaggaaaaaacac

SEQ ID NO: 24733 - DNA, 980 bp, Artificial sequence
  DNA replication origin
ttgaggggcccagataagttagctggaggggccagtgggacgtgtggatgggcctctggccgatgggttgacagaaggggccacacggggtcccgtggggatgtggtgtcatgccccgcaggtgccggtacctctggagggtgcgaggttggacagcaggtgccggtacctctggagggtgcgaggttggacagcaggtgccggtacctctggagggtgcgaggttggacagcaggtgccggtacctctggagggtgcgaggttggacagcaggtgccggtacctctggagggtgcgaggttgggcagcaggtgccggtacctctggagggtgcgaggttgggcagcaggtgccggtacctctggagggtgcgaggttgggcagcaggtgccggtacctctggagggtgcgaggttgggcagcaggtgccggtacctctggagggtgcgaggttgggcagcaggtgccggtacctctggagggtgcgaggttggacagccgttgtggaactgtggtgggggtcggggaggcagctcactgagcgcgtctcgtcttacgcagccgcgggtcagagcaggggtctgtgttcacgcaggaaaggaggggcttgccgtgcaaccagagcttctagctttgaaccataggtgaaggcgatgaacagacgtgtctactgcagcagcacctgtggccagtggctgagtgagcaaatagcaaacagtagaagcaatgttgaggagttggggtctccccaccaatctcctgtcgaactgtcaccccgtcgttggaagtggggcctggtgggaagcgactggatcttgagggtggatttatatgaacagctcagcgctatccccttggtgctgttctcacgatagtgagtgagttctcgtgagatccggtggcacacctcccacctcgcgctcttgcccccgctctcgccgtgtgagacacctgctcccccttcaccttctgccatgact

SEQ ID NO: 24734 - DNA, 741 bp, Artificial sequence
  DNA replication origin
ctgtcctctcccgcgcccgcctcccctccgcagatccttgctggggaccccggcggagacgccctccaggcgcggcgcgctccccggagaacggctggtccggctccgcggcccctccccacctccccgcctccccgggcctcgggctgggtcgagtcggctccggggtaacgcggctccctgcgcctcctctgcgcccggagcggccccggtccctggtagcggcggaggaggtggggtccctgcgccgagggacgtctgtccgcgtgtgcgcccgagcgtgtgccccgcgtgtttgcaggagtgcgcgcgcctgaggctgtctgggcgcctgcacttcaggtgtcaaatccactgacgtcggggtctcggcatctccctttctccgctgcgcccagaaacttcctttccggggaatgtggaggctccttcacgcttctccccaggggcgtgaggccccggcgcgctgctgctgctgtgcgcgcgcgtctgtgcctgcgtgcgcgcgtgtttgtgtgtgcttgtgtttgtgtgtccatgtgtgggcggtgtgtgtgcgcgtgcgtttgtgggtgcatgtgtgggtgcgtatttgtgtgtggatgcatgtgtgcgcgcgtgtgtatttgtgtgtgggcgcgtgtgtgtgcgcgcgtttgtgtgtgtgcatgtgtgcgtgtgtgctggtggggcgttctggctgagggctcccgcggggcggggagaccccggacccatcgg

SEQ ID NO: 24735 - DNA, 2662 bp, Artificial sequence
  DNA replication origin
ggtaaatgctcaatgaatgtttgttgaatgaatgtagtaaaaatataacattaaatcataattctcgcataaaatttatgtaggcacttagaagtcaaagaaagtagctttctagtgacctgatgagctgcgaaagaacacatttggagaatctagagagatgaataaatagccaccgaagagtctttctcaaacattagttgagccacacaactgagagaagcagacaggtccactccaagattcctgtggatgccgaggcctggtggtctgtgttgttgatggacaggagacgcaatgctgtgctgggtttatcaactacagtcggaggctcaggtgggccttaccacggagcatcatggtctcgctctcatcttcttgaaatgcagagagagaggaaagaagcagcctagacccccgagtcatgaagcagacagcagtgggtgtagacacggtggcggtgggtgtagacacggtggaggtgggtgtagacacggtggaagtgggtgtagacacggtggtgggtgtagacatggtggaggtgggtgtagacacggtggaggtgggtgtagacacggtggtgggtgtagacacggcggtgggtgtagacacggtggaggtgggtgtagacacggtggtgggtgtagacacggtggtggtgggtgtagacacggtggaggtgggtttagacacggtggtgggtgtagacacggtggtgggtgtagacacggtggaggtgggtgtagacacggtggtgggtgtagacacggtggcggtgggtgtagacacggtggaggtgggtttagacacggtggtgggtgtagacacggtggtgggtgtagacacggtggaggtgggtgtagacacggtggtgggtgtagacacggtggcggtgggtgtagacgcggtggaggtgggtgtagacacggtggtgggtttagacacggtggtgggtgtagacacagtggtggtgggtgtagacacggtggaggtgggtgtagacacggcggtgggtgtagacacggtggcggtgggtgtagacgcggtggaggtgggtgtagacacggtggtgggtttagacacggtggtgggtgtagacacggcggtggtgggtgtagacacggtggtggtgggtgtagacacggcggaggtgggtgtagacacggcggaggtgggtgtagacacggtggtgggtgtagacacagcggtggtgggtgtagacacggcggaggtgggtgtagacacggtggtgggtgtagacacagtggtggtgggtgtagacacggtggaggtgggtttagacacggcggtgggtgtagacacggtggaggtgggtgtagacatggaggtgggtttagacacggtggaggtgggtgtagacacggtggtgggtgtagacacggtggcggtgggtgtagacacggtggcggtgggtgtagacacggtggtgggtgtagacacggtggtggtgggtgtagacacggtggaggtggatgtagacagggtggtgggtgtagacaaggtggagttgggtgtagacacggtggtggtgggtgtagacacggtggtggtgggtgtagacacggtggtgggtgtagacacggtggtggtgggtgtagacacggtggaggtggatgtagacagggtggtgggtgtagacaaggtggagttgggtgtagacacggtggtggtgggtgtagacatggcggaggtgggtgtagacacggtggaggtgggtgtagacacggcggtgggtgtagacacggtggaggtgggtgtagacatggtggtgggtgtagacacggtggtggtgggtgtagacacggtggcggtgggtgtagacacagtggaggtggttttagacatggtggtgggtgtagacacggcggaggtgagtgtagacacggcagaggtgggtgtagacacggtggtgggtgtagacacggcggtgggtgtagacatggtggaggtgggtgtagacagggtggtgggtgtagacacggtggaggtgggtgtagacacggtggaggtgggtgtagacacggtggtgggtgtagacacggtggcggtgggtgtagacacggtggtgggtgtagacacgatggtgggtgtagacacggtggaggtgggtgtagacacggtggtgggtgtagacacagtggcggtgggtgtagacacggcggtgggtgtagacatggtggaggtgggtgtagacagggtggtgggtgtagacacggtggaggtgggtgtagacacggtggtgggtgtagacacggtggcggtgggtgtagacacggtggcggtgagtgtagacacggtggaggtgggtgtagacacggtggtgggtgtagacacggtggaggtgggtgtagacacggtggcagcaccgcacggaacactcaaagcccactttctggctgtgatggccgaggagagctgcctcccctccgagtggcccatcctaggtacccttgagcctcacaagctcagttgccaacctccctgcttcagggaggggtggggcagcgggtgggacaggaaattcaccaggttgtgcagggcagggcaggagagcagagggagacgctcacgcccccgcccccaggcccgcagaagccgtgggtgctgatgaatgcccctcagcccacaaatccctggcacc

SEQ ID NO: 24736 - DNA, 1890 bp, Artificial sequence
  DNA replication origin
tgctccaggccaagccacccatctcggagccgccgtaaggcctcctgcagtcaaaccgcgaggcagcaccatgcccacaagaacttgaggtttctcctggcctcaaccttcctctcatgacaacaaggcaccaatttccacgaagggctctgcgctcagggcagggctggtaaacacgaggtcacgcccttcctgtgagggaggttccagttcccacagcggaggcctcgggcaggtgggggctgccgcaagagcaggacagggccagggagctggtgtccactcccacatagtcctcttgctttaaacggttctcttttgagataattgcagattcacacacagtcgtaaggaataacacggagagtgcctgttccctttgcccagttcccccaacagcagcccctttgcccagttcccccaacagcagcatcttgcaaagcaaggagtggtcaccgatgggatcaagtgccctgagggcggatggcaccagctgcacatacactgggtgtgagcgtgtgtgtcagtgtgtgtgtgagcatgggggtgtgtgtgtcagtgtatgtgtatgggtgagtctgtgtgagtctgtcagtgcgtctgtgtatatgtgggtgtgcatgtgtgtgtgtctgtgtgcatgtgggtgtgtgagagtatcagtgtgtctatgtgtatgtgtgcatgtgggtgcgcatgtgtgtgtcagtgtctgtatgtgtgcatgtgggtatgcttgtgtgtgtgtgcatgtgggtgtccgtgtgtgtgtaccagtgtgtctgtgtgcatgtgtgcatgtgggtgtatttgtgtgaggagcatgaatgtgtgtgaaggaggaagtgcatgaatgtgtgtgcatgtctgtgtgtgtgcttgtgtgtgtgagggactgggagtgtgtgtgtgagggactgtgtgaccatatgtgcatgtgcgagtgtgtgcatgtgggtgtgagggaggggagggtgtgtgagcatgtatgagcgtgagtatgcttgtgtatgtgtgcatgagtgagggagtgtgtgtgcatgtgtgtgagtgcatgtgggtgagggtgtgtgaggaagtgtgtgaggatgtgtgtgagcatgtgcacgtgtgtgcttgcatgtgtgagtgagggagggtgtgtgtgtgcgaatgaaggagggtgtgggcatgtgaggacatgtgtgagcatgtgtgcatgtgtgtctgtgagggagggagggtgtgtgcatgtgagtttgtatgtgtatgtgtgagggagtgtgtgtgcgtgtgtgagtgcatgtgagggaatttgtgtgtaaggttgtgtgtgagggagggagtatgtatgtgcgcatgtgtgtgcacgtgtcattgagggagtgtgtgtgcgcgcgtatgagtgagtgtgtgtgtgcatgtgtgcgctagcgtgtgtgagtgagggagggtgtgtgcatgtgagggagtgtgtgtgtgaatgagggagtgtgtgtgagcatgtgtgcatgtgtgcttacatgtgaggtagtgtgtgcgtgtgtgtgtgagggagtgtgcacatgtgagtgtgtctagttttgggcagttgtgtcccatgtgtgtgtgtgagggagtgtgtgtgcatgtgtgtgtgagggacgagctgggcagttgtgtcccgtgtgtgtgtgtgtgtgagtgtgtgtgtgagtgtgtctagagctgggcagttgtgccctgtatgcagatctctgtgcagatgccggacatttccatcccacgagcatctctcctgctccttttccagccacagccacctcctgcccctccctgacccctgaccgctgacacccgctgctctgctttccgttgctgtgactttgtcagcttgagactgtctcccttcactcagcccagttcccctga

SEQ ID NO: 24737 - DNA, 1559 bp, Artificial sequence
  DNA replication origin
aaggatgcagtggcccttggttttgtcatatttcatgttatagtttctaaccaatcctcttttaaaaatttcactaagcattctgtgttccactgtgggtgtgtcttgatttggaaggttgatgtttttgttccaggagatacgtttgctcagttttccttccccttgtggccacacttctctgctgctctcatcgtttcatttgtgcctttcccgttttttgtctgttggtttgtctgtgccatggtgtgatcctagctcactgtcacctccaactcccaagctcaagcacctcccgcctaggccttcaaagtgctaggattgcaagcgccgccccacgctcagcccctttcccttgttaaaaagtgccttactctcaagaggctgaggcaggagaatcgcttgaacccgggaggtgaaagttgcagtgagccgagccgagatcgcgccattgcattccagcctgggtgacagagcaagactctgtctcaaaaaaaaaaagccttactctgtctgtgtctagaccctgtggggcttctctggttaagggggcctgtcctccttagatgagctgtcccaggaggctgctacttcctgcagctgctgaggctcaccctcctctttccaccactgaggcccaaggctccagttgctctgaggagtgtggaggcccgtgaggtgtgggggtgcggagtggccgtggaaggtgtgtaggggattgcagttggggttgggtgctggatgtgcaggtagagtataagggtagggggttaaggtgtggggcatgggggagattggggaggttgggaacatggggcaaagtggtgggggatgggggatgcaggggtggggatgggggatgcaggggtggggtgtggagttatggtgagtggggggctgtagtggggcgttgggggtggagggggctgtgagggtgtggggtgtgggtcatgagacatgggacagtgggggctaacggggtgggtggggtgtggggtgtgggatgcagagtgtgggagctcagggagttagaaggtcgagttagagggtgtaggtgtgggggcatgatggtggggcctgggggagggggagggtgcgcaggtgcaaggtgtgagggtggaaggctgggagaccggtagtgtgtgcgactgtggggtgtggaagtgggggactcaggggaggagtggggtgtggaggtgtggggcacggggtggggggttagggaagggtggaatgtagggggagtttgatgtaagggtgggggctatgaggaggggtggggtgtgagggtgagggtgggggctttgggcagggtagaggtgtggggcatggggtggaaggctgtgggagcagtggggtatggggtgcagggcatgagggtgaggggctaaggggaaagtggaggtgtggggcatggggatggaagattagggccagtggtggggtgtaggggtgtagggtgttacctggagggggaaggtgtgggatgcacggtgtgagggtggaggggtggggagggtgggtgctgggcatacgggtggacagtggggaggggtggg

SEQ ID NO: 24738 - DNA, 1433 bp, Artificial sequence
  DNA replication origin
accgtacccacggggacgcgccgtcacgcctcagtggggaccgtacccacggggacgcgccgtcacgcctcggcggggaccgtacccacggggaagcgccgtcacgcctcagtggggaccgtacccacggggacgcgccgtcacgcctcggcggggaccgtacacacggggacgcgccgtcacgcctcggcggggaccgtacacacggggacgcgccgtcacgcctcagtggggaccgtacccacggggacgcgccgtcacgcctcagcggggaccgtacacacggggacgcgccgtcacgcctcagcggggaccgtacccacggggacgcgccgtcacccctcggcggggaccgtacacacggggacgcgctgtcacgcctcagtggggaccgtacccacggggacgcgccatcacacctcagcggggaccgtacacacggggacgcgccgtcacccctcggtggggaccgtacacacggggacgcgccgtcacccctcagcggggaccgtacacacggggacgcgctgtcacgcctcagcggggaccgtacacacggggacccactgtcacgcctcagcagggaccgtaagcacggggacgcgccgtcacccctcagcggggactgtacacacggggacgcgccgtcacccctcagcggggaccgtacgcacggggacccactgtcacgcctcagcggggaccgtaaacacggggacgcgccgtcacccctcagcggggaccaccagctgctttgcccatggattggaacgcattgggtggagtaagtgagagtaacactgaggcgaggcactatcttgtaaaattaggtgaccctccaaaagtaacatgtggcggtggtgctaatgaggaaatcttttttatattttaagaaagatagagatattttattcagttataagaagagaatatttgagcccagaggaaaagaatctgcctcttgttttaggcttccaagtggtcggtctgcagatatgctggagactggttactcggcttcagttcagcccattttaacaccactgcttaacaggctcatataaagcccacagccttttgtcctggaggcattacttcgagataaccatgcaattctcaatcaccaaatgaggtaaacttcacgaggtcaggagatcagaccatcctggccaacatggtgaaaccctgtgtctactaaaatacaaaaaattagccgggcgtggtggtgcgggcctgtagtcccaggtactggagaggctgaggcaggggaatcgcttgaacccgggaggcggaggttgcagtgagccgagatcgtgccactgcacaccagccaggcaacagagcgagactccgtctaaaaaacaaaataaaaaaagaaaagaaaaaagaaataaacaacacctgtaatcccagcatttcaggaggccgaggcg

SEQ ID NO: 24739 - DNA, 924 bp, Artificial sequence
  DNA replication origin
aacatttaagaaaccggttctccaggtgctggagtgggagctgctggctcagagaggagcgaagggcacactcagccccggcgcgctcgctttgcacggcgggaggggcgttttcagggtgagcacaatggggcacagcggggaagtctcccggtgcttcctgagcgtggtcagcagagcagatgctggacaagatgagtgggagagagtggggtcccaggcagggagggcgagcacccgggcacccatggcggagagcagggtcccaggcggggagggcaagcacccaggcgcccatgggagagaggtgagggaggttggcaggggttggattttggagggtctagcagtgcacagagtctggcacatgtggaagacagtgtggagccactgaatggcttcaaaccagactccgcaggcacttgagaaagacccctgtggacaggctggggctggactggggagcatgaagtgggagggaggggcatcgatgccagcccactgcagtggtgagatgggaccggtgaaacctgttcaggaggctgcattggatggagagggagccatggggggctgcggaagcgcctagagtaggggtttgaccctggctgtggagcacagaggagcacgaagtaaagaacccaccagggttagggctgagagtttggtgaactagggagatttgtggaagcagggaataatggtggatggttggtggcctcctcctggaagttcaccatcaccctctggagacttgttgggcacttcctctgtgccaggcactgtcctgtgcatatttcatttcattggtgacagattgcatctgttgttttggaaaaccatagcacaccatgtgctgcaagatgcatctccatctcagagccattaaagtgtgtgtgtgtgtgtgtgtgtgtgtgtgtgtgt

SEQ ID NO: 24740 - DNA, 1512 bp, Artificial sequence
  DNA replication origin
caaacaaacaaacaaaacctcaaatatatgtacttgacaaataaaaatcaaagttcacatgcaagttgctaacagtgattacttccaggggctgccatccaagagaagactcccatgttccttacaccctctatactgtttgacattttatggtttacagaaagcaaatattagctttgtagttaaaagatttgagaaaattgattggacttgaaatgtttaaaatttcaatgtaaattgcaaagcagactagattttctgaatgccttcagagttagtagctgcttaacagtcatgcgtctttgcacaggtacttgttctcttcactcttcgggattctataagagatgtccagcaagcagcagagctgggcttacgatgttgtaccaagcatggaaggaagcactgcaaagctgacatcagcacaaatacctgtggaaactgcagggggcaaggcaatgaggtgctacttcaagtaggtgcgcaggggtagagcctgtgatcctagaacttgtccggggttggggtctgtggttctgaagctcgttcagggttagggttagggttagggttaggagcttgtacacgggtggggtctgtggtcctggagcttccacagggatggggtctgtggtcctggagcttccataggggtgggggtctgtggtcctggagcttgtccaggggtggggtttgtggtcctggagcttccataggggtggggtttgtggtcctggagcttgtccaggggtggggttcgtggtcctggagcttccacaggggtggggtctgtggtcctggagcttgtccaggggtggggtctgtggtcctggagcttccacagggatggggtctgtggtcctggagcttccataggggtagggttcatggtcctggagcttgtgcaggggtggggttcatggtcctggagcttccacaggggtgggggtctgtggtcctagagcttgtccaggggtaggatccgtggtcctggagcttccacagggatgggttctgtggtcctggagtttccataggggtggggttcatggtgctggagcttccacaggggtggggttcattggcctggagcttgtccaggggtggggtctgtggtcctggagcttccacaggggtggggtctgtggtcctggagcttccacagggatgggttctgtggtcctggagtttccataggggtgggattcgtgatcctagagcttgtgcaggggtggggttcatggtcttggagcttccacaggggtggggtctgtggtccttgagcttgtccaggggtggggtctgtggttctggagtttgtgcaggggtggggtccatggtcctggagcatttatttaatctttggtgtctacatatttttccttatgatgggctggattttaaggaaagcaatcttccacattataatggtccacaatataacggttatatatacaggtaaagcgagtgatggaagatctttaaaactctttaattaatttgatttattgg

SEQ ID NO: 24741 - DNA, 1642 bp, Artificial sequence
  DNA replication origin
tataatggatggagcagtgaggacagaagcctgtctatcctgtgtgaggtgggcacacaggaaatacgtgttaaatatagaaaggaagaaaataaaggagggagagaagaagggagaagggaaaagaaggtagaaaagtagtcctatagtggaagaggaggggaagagacagaaggaggaggaggaggacagaggagggagggggagggggaagggctagggaggggaggagaagtgaggggggaaaggggaggggaggaaggggaggggggaggggggaggggaaggggagggagggggagggaaagggggaggggagggagggggagggaaagggggaggggagggagggggagggaaagggggaggggaaggagggggagggaaagggggaggggagggaggggggatggaaagggggaggggaggagaagcgaagccgggggagtggaaggggaggggagggagaagagaaggagggaggcaaaaaggggagtgggaggggactggggaggacggacaaggagaaagaaggaggaataagaattgcaggcgtggcccaggctggtactggggtgggggaagggagtgccccctgcagaacaggaggctgttgccctagggtatgcagggctcacctgaggagcctccttcattctgagccctgagcgcctcctctgcctcactccggtccccaccctgcagtggtgaagccaaagtcggtaaagcagtggctgctgtgtgttttctccaggtcagtgggacatggggctgctggacatctcagccctttggccgtggctctgccgagtttgatcgccacactcttccctgctgccaccagaagggtcacacaaggccactctcaggactcccagacctcatctgtctcagagaagaacgaggccactataaaagggtgatgtctttggccttagggggcgtgtaggcccctctggttgcgatgtggatagagttccagatgtgagggaatgttctggaaatgcaacctgggcagctgatggagtccaggcccttcgggtgctaacgctgtgaaacatctctgtttcagaaatgggtgccaagcctggagggcaggcttgcttagcaaagaaggcaaactctggtgagctacagctgggttcagcacatgggtctggtagggaaacacacattgaaacgttattaaaaccagcaagactgacacaggcggcagactgtgacgtctgtcccatgttacactgagcttgttttcaggtccggagatgtgccaaagccgtgccacactgggctggagccactcgtgaaatgtcattacgctcacacagctgcaaagttctcagtatttaccaactaggacttttcttgtattggtatttgtttaattgtcttctctcctcaacagtaactataatgtcctaaaactccgtagacaataaatagttctttaaagaccagatttagttttcatgtaacctacaggttggggaaggggaaccacaaattgcattgaccctcaaaacagtggctgaaatggaaagaactccttaaacggaacccttggggaatccatctgtaaagccccattgcctctcagattctgtgatctgggcctcgagacaaccttcagagtccctcgctg

SEQ ID NO: 24742 - DNA, 1217 bp, Artificial sequence
  DNA replication origin
gtcactctgctccccatgccacaggggcaattgtttaaggcattttgttcctgactgctgtgtcacccattattttcatgtttctggagtctgtgagacaaagaaaaatgtatagtcaatcaatagcttacgttgttttaatgtaaatttttgataaacaactcaggaactgccctttctttcctccttaaaccccccgcccccaaccaggtacctgctgctggttgggtgcatactcagggaaattcaaatctgtgctcccaggtggtcatcctcagggcttgtgctcaaataaactccatgctaactcgtattttctgaatctttctatctaaggttgacaaacctaaggggcatcattctaaaatcagtaaacatgattttgctgtaggctattacaggtatagaagggaagaaaagcacaagaaatctaaccaaatatagagactccaggtcattctattagaatgtgatgtggtttggatctgtgtccccaccaaagctcatgtggaattataatccctgctgctggaggtggggctggtgggaggtggttggatcgtgggggtggagtgcccattgctgctggcggtggggctggtgggaggtggttggatcgtgtgggtggagtgcccattgctgctggaggtggggctggtgggaggtggttggatcgtgcgggtggagtgcccattgctgctggcggtggggctggtgggaggtggttggatcgtgggggtggagtgcccattgctgctggaggtggggctggtgggaggtggttggatcgtgggggtggagtgcccattgctgctggaggtggggctggtgggaggtggttggatcgtgggggtggagtgcccattgctgctggcggtggggctggtgggaggtggttggatcgtgcgggtggagtgcccattgctgctggaggtggggctggtgggaggtggttggatcgtgcgggtggagtgctcgtgaagggtttagcaccatcctctacttgggactgtatagtgagtgagttcttgtgaggcctggttgttgaaaagtgtgtggcacctgccccctctctccctttctcttgttctggccaggtaagttgtgtctgcttccccttcgcctttcgccatgattgtaagtttcctgagacctgcacagaagcagaagcagctatgcttcctgtacagcctgcagaacagtaaaccaattaaacc

SEQ ID NO: 24743 - DNA, 1337 bp, Artificial sequence
  DNA replication origin
ctggaggtggggctggtgggaggtggttggatcgtgcgggtggagtgctcgtgaagggtttagcaccatcctctacttgggactgtatagtgagtgagttcttgtgaggcctggttgttgaaaagtgtgtggcacctgccccctctctccctttctcttgttctggccaggtaagttgtgtctgcttccccttcgcctttcgccatgattgtaagtttcctgagacctgcacagaagcagaagcagctatgcttcctgtacagcctgcagaacagtaaaccaattaaacctcttttcttataaattacccagtctcaggtgtttctttttatcttttttttttttgagacggagtttcactcttgttgcccaggctggagtgcagtggtgcaatcttggctcactgcaacctccgcctctggggttcaagtgactctcctgcctcagcctcccgagtagctgggactacgggcatctgccaccatacccggctaattttttgtagttttagtagagatggggtttcagtatgttgcccaggctggtcttgatctcctgacctcacatgatccagctgcctcggactcccaaagtgctgggattaaaggaatgagccaccgggcctggcctcaggtgtttctttacaggaatgtgagaacaggctaatacagaaaattggtactgaaaagtggggcattcgtatgaagatacctgaaaatgcggaaataactttggaactgggtaatgggcagaggttggaaaaatgtggggggctcagaagaagacaagaagatgggggaaaatttggaacttcctagagacttttaaattgttgtgacccaaatgctgatagtgatatggagagatgggcaggctgataaggtctcagatagagatgagaaacttactaggaactgaagcaaaggtcacttttgctgtgcattagcaaagaacctggcagcattgtgcccctgctctagggatctctggaactttgaacttgagagtgatgagttagggtatctggcagaggactcctgaaagtgatttctgttaaatctcgccctggcaatattaattacaaatttaccttccaggtacaaaacaaggacaagatgagattagtcactcttctgcctaccctgatatgggctacataactctttcctctactccctcttgtcagatgtttgcctcatcttatgtaaattgttggtttactgagcactaatcagagcatcactgtggacccctccctttttttcctcctgcttgccgtctcctcctaaacacccagtccccataaccctatttggatggcacagttgatgcttctg

SEQ ID NO: 24744 - DNA, 1250 bp, Artificial sequence
  DNA replication origin
gtgagcacaccgccggccgaggcggctgtgggctgagcactcagcctgcactgggcacccaacattttcccggagttcgaggtcctgctgggcctggaggcagaagacctcttttctctttgccttcccttctctgtttcttgctccttttctccctctgtccatccttccctctgttcttccttctctccctctctccctccctgtctccctccctccctctgttctctccttccctctctcccaccatccatacctccctttctccctccttccctccctcccttcctttttctttccctccctccctccctccatcccttccaaggtccgtcctttcatccgtcctttcctccctctgtccctctctctcactttgtctccgttcctttccccatctctgcctggcttccctcccgcctagaaagggcagaaccacggtttgcacgagatctcggggtctacatttagttcccgggcgcttcacgtgatgccaaggaggatggcggggcacgggtgggcgaaggagggtggagcggggaggtagtggagttgagctgcgaaaaggagagcaggcctggccgctgcccggatcggtatttcccggggtggaggtctccacctacaccactgaagaacgcgggggagggggggatgtactgtgtgggggagtgggggaagggatgagagccctgcctgggctggtcccaaaccctagccggctgcccgcggacctgcgcatgcgcagtagacggcccatctctgagtacctgggctggctctgaaatccttgggatgctcaggaaagaatgacagccctcctttctgtggagtctctcgctggacttggactcagggatcctagacaggtcagctggaagggaagacacaggtctccatactgaaccagaggttcaccgcgaaagaggagccactgacctgcccccacccggtcccaaccccgcgtcctaaagctcctccagctgagcccagtgttcttcctggctgaggagtggttccagaaaagcaggctcttccaagtccttcaaatccctcagcggctccgttgctaggaaaggttgtgtcctttgctgaaattgtgtcctttgctgaaaaatggggtagacaggagctcatataacagggtggatgcgagtacagatgaagactccagctcctggagcggttgggagggtgcctggattgcttacatcttcttctgacacgccgagacctccatgggcgcgagc

SEQ ID NO: 24745 - DNA, 1142 bp, Artificial sequence
  DNA replication origin
tagtgcagtggcgcgatctcggctccctgcatgctccgccacccaggttcaagcgattctcctgcctcagcctcccgagtagctggcattacaggcgcctgccccaccgcgcccgactcaatttagtatttttagtagagatgcgttttcgcagtgttggcaaggctggtctcaaactcccaacctcaggtgatccacccgtctcggcctcccaaactgctgggatgacagacgtgagccaccgcgcccggccttaaccatgtatttttaagtcgaggagcttatcagggaaatacgagaagtagggacgccacacgtgacagagagaaacgtttgaaaatgccccttccatccaagtggggacccggccttgacctcccgaaatcatacaccgagtggcgaagcctagcaaggcccgtctgtctagattcctctcggcctctctaagcaggcgcttctcactttcgtggaaggggcagggccctccccggcaaaggggctctgacagactgacagagaaagagacagacatagaaagacagagatggacagagagagacagagagaaacagacagacaggcagggagagagacagagagagagagagacagataaggagaaacaaacagaaagagagagagagacagagagagaaacagacagacacacagagacagacagagagagacagagagaaacagaaagagagagagatggagagagagagaaagggagggagagagagagacagacagacaggcagagaaagagagtaagacagaagacagacacagtgagagagacaggcagagaaagagagagacagagaaagaaagagagacagagatggacagagagaaacagaaagagagagacagagacagagaaagagagagaaacagacagacagggagggagagagacagagagagagagacagacagacagagagacagaaagacggagacagacagagagaaacagacagagagagagatggagagagtgagagatagagagggagagagaaacaaagagagggggagagagagacaaacagacaggcagagaaggagagtaagacagaagacagacacagtgagagaaacaggcagatagagtcagaggcagagtcagagag

SEQ ID NO: 24746 - DNA, 985 bp, Artificial sequence
  DNA replication origin
cctgggcaggaaagttctcagcaggtttaggcctcctagacaaaaagtcaaagccacttctgggatttttttttcaaagagccagtggttccacaaggggccatgggtagttgtggaaatggagagacgtgtttgcagatacatatttgagacaaaacggacagggctcggtcacagttcatgtagaacacgagcagatgcacattaagaaaaccctcccagtatcctaggtgaacagaggtatgattttttgagacagtcgagggagacgcaacgccagattttatggttggatctttattaatatgtagtatctatgaggtatccaagtccagaaatcaactcgccagttctgtacagcactctgtagggagatcaaatctgggatgtctaaagttaagaattcaggtcgtggtaatggactagattagatgtacttgaacatattttgcaaagaaagagagggcgggagatagcgagagccagagagcgggcgagagagagagagagagagagagagagaaagacagagacagagagagacagacagagagacacaaagatacacaaagagagaaagacagaaagagagagacagacagataaagacacagacagagaaagacagagatggacagagacagagagaaacagaaagagacagagacagaaagagagagagacagacagacaggcaggcagacagtcagagaaagagagtaagacagaaggcagaaacacacacacacacagagacagagacagatggacagacaaagagaaagaaagagagagacagacagagagaaagagacagagagagaaagacagagacagacagagggagacagagagaaacagagacagagagagagagaaacaggcaaggagagagagagacagacagacaggcagagaaagacagtaagacagaagacagacacagagagagacaggcggagagtgacagacagagagacagaga

SEQ ID NO: 24747 - DNA, 893 bp, Artificial sequence
  DNA replication origin
caggtggcccaacctcgtgccacgcaaacgcggtcgtcggcaccggtcgctgctctgcaggggagcgggcagagagccggctcacagcggaatgggtcacaagctggactgaacgccaggcacagccaccgctcacgcagcctcccaaatgctaggacgccggcccggcccggcccggcgggatcctcccccgactcggaagggggaggcgcgggccacacagtaggcgacgagcttccctgggtccccaccgtggaggctggcggaacccttgctctccccccctcaccccatcaagggggcagtggaggagggtcctctgcaagccagtcgccacggcagcgctaccataacgcagagagaggcggcaggccgggggatccggtaccccaaaggcacacctctcagatcgctagagaaggctttctcactgagggtgagtcacagttcccacatgccagtcgcccctcgtcgggcccgcagaggcgcgcagggacgcctggggaagggagggggcctgcggtaccaggaaaaatctgcgtgcggcaaccttgagccttcgcggtctgggcagggggcctggccgctgcacgtgtgcgcaatcccacaagggcccccccgtcgaccagcctcctttctcccaggcaaagcacctccaagtaaacccacacacaacctgtcggaggcagaacggtagcccctcggctgccggacggcgcacgcgtcatctgacccagcccaccgcaatagctcacacggcccgcgcgcacccgccagagaggagcacgggccctgcgctcgccagatcaggcagcactcttccccgcgtgggaggagcgcgtctcactcaaccgcctcaacccctacaccaacgagctccctcaggacccact

SEQ ID NO: 24748 - DNA, 860 bp, Artificial sequence
  DNA replication origin
  misc_feature (847)..(860): n is a, c, g, or t
cgcaggccccctcccttccccaggcgtccctgcgcgcctctgcgggcccgacgaggggcgactggcatgtgggaactgtgactcaccctcagtgagaaagccttctctagcgatctgagaggtgtgcctttggggtaccggatcccccggcctgccgcctctctctgcgttatggtagcgctgccgtggcgactggcttgcagaggaccctcctccactgcccccttgatggggtgagggggggagagcaagggttccgccagcctccacggtggggacccagggaagctcgtcgcctactgtgtggcccgcgcctcccccttccgagtcgggggaggatcccgccgggccgggccgggccggcgtcctagcatttgggaggctgcgtgagcggtggctgtgcctggcgttcagtccagcttgtgacccattccgctgtgagccggctctctgcccgctcccctgcagagcagcgaccggtgccgacgaccgcgtttgcgtggcacgaggttgggccacctggccctgggaagcatcccaagtggggggcatgtcggtctcctggagcttgaccgggttggaggatggatgagaaacgagcaacgtggccctggcgttgggtttgtggctgaggtcgcctcggggtcctgatggcgggacccggggctcatgaggcgggtcttggtgggtgccgagggccatccggcatcctaggcgggtcactgcgggacctccctcgtgtctgtggtggtgggatcccgtggccgtgttttcctggtggcccggccatgcctgaggtttctccccgagccgcccctctgcgggcttccaggtgcccttgccctcnnnnnnnnnnnnnn

SEQ ID NO: 24749 - DNA, 2865 bp, Artificial sequence
  DNA replication origin
  misc_feature (1)..(453): n is a, c, g, or t
nnnnnnnnnnnnnnnnnnnnnnnnnnnnnnnnnnnnnnnnnnnnnnnnnnnnnnnnnnnnnnnnnnnnnnnnnnnnnnnnnnnnnnnnnnnnnnnnnnnnnnnnnnnnnnnnnnnnnnnnnnnnnnnnnnnnnnnnnnnnnnnnnnnnnnnnnnnnnnnnnnnnnnnnnnnnnnnnnnnnnnnnnnnnnnnnnnnnnnnnnnnnnnnnnnnnnnnnnnnnnnnnnnnnnnnnnnnnnnnnnnnnnnnnnnnnnnnnnnnnnnnnnnnnnnnnnnnnnnnnnnnnnnnnnnnnnnnnnnnnnnnnnnnnnnnnnnnnnnnnnnnnnnnnnnnnnnnnnnnnnnnnnnnnnnnnnnnnnnnnnnnnnnnnnnnnnnnnnnnnnnnnnnnnnnnnnnnnnnnnnnnnnnnnnnnnnnnnnnnnnnnnnnnnnnnnnnnnnnnnnnnnnnnnnnnnncccaccacccggagctcctccctccctaccccacgccccatcgcccgccctgccacgcccaatctcgcaactgggacgccgggctcatcctcgcgagtcccagaggccgctttctacctacctggttgattctatcagaaccatatgcttgtctcaaagattaagccatacatgtctaagtatgcagggccggtacagtaaaactgtgaatggctcattaaatcagttatggttcttttggtcgctggctcctcttctacttggaaaactgtggtaattctagagctattacatgccgaagggcactgacccccttcacggggaagatgcatgcatttatcagatcaaaaccaacccagtcagcccctctccggccccggccagggggtcgggtgccgccagctttggtgcctctggataacctcaggccaatcgcatgccccccgtggcagcgatgacccattcgaacgtctgccctatcaactttctatggtagtcgctgtgcctaccatggtgaccacgggtgacagggaattagggttcaattctggagaaggagacttagaaacggctaccacattcaaggaaggcagcagacactcaaattacccactcctgacacgggaggtagtgacaaaaaataacaatacaggactctttcaaggccctgtaattggaatgagtccactttaaatcttttaatgaggatccattggagggaaagtctggtgccagcagccatggtaattccagctccaatagcgtatattaaagttgttgcagttaaaaagctcgtagttgaatcttgggaacgggtgggctagcgagccacagcctgtccctgcttcttgcctctcggtgccccctggatgctcttagctgagtgtcctgcggcccgaagcgtttactttgaaaaaattagagtgttcaaagcaggcccaagccgcctggatactgcagcttggaataatggaataggaccacggttctattttgttggttttcggaactgaggccattattaagagggacggccgggggcattcatattgcaccgctagaggtgaaattcttggactggcacagtttggaccagagcgaaagcatttgccaagaatgttttcattaatcaagaacgaaagtcagaggttcgaagacgatcagataccgttgtagttccgaccataaacgatgccgactggcgatgtggcagcgttattcccatgacccgctgggcagcttccaagaaaccaaagtctttgggtttttgggttccgaggggagtatggttgcaaagctgaaacttaaaggaattgacagaagggcaccaccaggagtggagcctgcatcttaatttgactcaacatgggaaaactcacctggcctggacacggacaggattgacagattgatagctctttctcaattccacaggtggtggtgcatggccttagttgctggagtgatttgtctggttaattccaataatgaacgagactctggcatgccaactagttatgcgacccccgagtggttggcatcccccaacttcttagagggacaagtggcgtttagccacctgagattgagcaataacaggtctgtgatgcccttaaatgtccagggctgcacgcgcgctgcactgactggctcagcgtgtgcctaccctatgtggcagatgtgggtaacctgttgaacctcattggcaatggtgatcattgattgcaatttttccccatgaatgaggaattcccagtaagtgctggtcataagcttgcatgaagtccctgtcctttgtacacactgcaggttgctactcctgattggatggtttagtgaggccctcggatcagcccctccgggtcagcccactgccctgtcggaacgctgagaagacagtcgaacttgactatctagaggaagtaaaagtcgtaacaaagtttcggtaggtgaacctgcggagggatcattaacagagaagagcaaagccacggagatgccgccatgtccttcctccttggctgactgtgttcccctgtggcgcatgcatgggtggggtcgtgccctttgttcgttgcatggccccatctgccccgagagccagagaactcagaagggagagagggggtagagagagacatgcgtgtggggatgaaactgtgtgcttgtcgtggggtgggctggatggctcgccggcctggtgagcagtggggagcggtcccctgctgtggcccccatgtgtgcgtcggtgggcgcgggggtggttctcggcgtcatggtggggtgggggtctcggtgccctccccactggggccgtcatcatgccctgtcgcactgtcttggccccatcccgcccgctcccgttggggctggccaggttcccatcgctgccgctgccaccatcgtcgcctc

SEQ ID NO: 24750 - DNA, 1152 bp, Artificial sequence
  DNA replication origin
tgagtggagtggaatggagtgtattggagtggaatccagtggaatagaatggaatggagtacagtggagtagagtggaatggaatggagtggattggagtggagtggagtagaatggaatgcaatggaatggaacggaatggaacggaatagaatggaatggaatggaatggaatgcagtggaatagaatggactcaaatagaatgaactgaaatagaattaactggaaaccaatgtaatccaatggaaaggactcaaatggattgtactcgaatggattggaatcgaatggaatggaatcaaatggaatggaattgaatggaatttaattgaagggaatgtattcgaatggaacagaatgtggagatgtggagtggagtggaggggaacggattggaagggaatgggtggaatggaaatgaatggagtggagtgaactgtcttggaatggagtggaaatgaattgaatgggaaggaatggaattgaaaggaggggagtggagtggagtggaatgcaatggaatgtaatggaatgacgtggagtggagtggagtggaatgcaatggagtggagtggaatggattggagtggaatagaatgcaatggaatggaatggagtggaatggaaaggagtggattggagtggagtgcagtggaatgcaatcaaatggaatggaatgggaagttatgtagttgaacagaggggagtggagtggagtgcaatggaatgcaatgggatgtaatggaatggagtagggtggagtggagtgaatggaatgcaatggaatggaatggagtggaacgcagtggagtggattggaatgtagtggagtagagtagagtggagtggtgtggaatggagtggagtggagtggaaaggagtgaagtggaattgagtggaatggatattatggcagtggagtggattggagtggaacggaggggtaaggagtggtttggagtggaatggagtggaatagagcggactctagtggagtggaagagagtggaatggaatggaatggagtggaatggaatggaatggagtggaatggaagggaatggaatggaatggactcgaatggaaaggactgaaatagaatggcgtgaaatggaatggactcaaatggaatgaatcgaatggaatggaat

SEQ ID NO: 24751 - DNA, 770 bp, Artificial sequence
  DNA replication origin
tcgaatgcaatggagtggagtggaggggagtggataggaatggaatggaatggagtggaatggagtggagtggagtggaatggaatggaatcgaatggaatggagtggaatggagtagagtggggtggaatggaatgagatggaatagaatgggaaggaatggaattgaataaaggggagtggagtagagtgcaggggaatgcaatggaatggaatggaatggaatagagtagggtggagtggagtggaatggaatgcaatggaatggaataaagtggagtggagtggagtggaaaggaattcaaaggaatggaattgaatggaattgaaaggaatcacttggaatggagtggaatgcagtcgaatggactggaatggaatggactcgagtagaatggaattgaatggaatggaatggaatgaactcaactggaatggaatcaaatggaatggaatcgaaaggaatggaatcatatggaatgtaaaggaatggaatggaagggcaaggaatggaatggaatgaaatggaatggaatggaatggaatggaatggaatgaaatggaatggaatggaatggaatgaaacggaatggaaaggaatggaatggaaaggaatggactcgaatggaatggactggaatggaatggaattgaatggaatggaatagaacggaatggattccagtggaagggaatcgaatggaatgaaattgaatggaatggactggaatggaatggactggaatggaatgaactggaaaggaatcgac

SEQ ID NO: 24752 - DNA, 961 bp, Artificial sequence
  DNA replication origin
caaatggaagggaatcgaatagcatcgaatggactcgaatttaatgcattgatgttgactggactggagagaaacggagtggaatagaacgagggggaatgaaattgaatgcagtggaggggagtagagtggaagggattaggaatggaatggaatgggaagaaaatgaattgaacagggtggagtggagtagataggaatggagtggagtagaatcgaatggaatggaatgaaatggaaagcaaaggaactgagtcgagtcaagtggattggaatggaatggagtggagttgaatggaatacagtgtagtgaaatggagtgtagtgcagtggaatggaatggaatagaatgggatggaataaaattgagagcagtggagtggactggaatggggtgaattggactggaatggagtggaatggaatgtggtgaagggaattgaatgtagtggagtggagtggactggaaaggagtggaatggaaagcaatgggaagtaatggaattgaacggagttgagtggagtgcagttgagtggaatggaatggaatggaaaggaatggaaaggaatggaatggaaaggaatggaaaggaatggaaaggaatggaatggaaaagaaagtaatggaatggaatggaatagaatggaatggaatggtatggtatggaatggagtgacatggtggggaatggatttgaatggaatggtgtggagtgggatgggatgaagtggactggattggaatggaatggattggaaaggaatggaatggaatggattcgaatggaatggacaagaatttaatagaatggaatggaatagaatggaatggaatggactcgaatggaatggaatggaatggactcgaatggaatggactggaatggactcgaatggaatggactggaatggaatgaaatcgagtgaaatggaatcgaatgaagttgaatcaaacggaatt

SEQ ID NO: 24753 - DNA, 1265 bp, Artificial sequence
  DNA replication origin
cggaatggaatggaatggaatggaatggaatggaatggaatggaatggagtacgatggagtggaatggattggaatggagttgaatggaatgcagtggagtggaattgaatggagtgtacggaagtggattgcagttgagtggaatggaatggaatggaatggaatgaaatggactcgaatggaatggaccctaatggaatagaccaaaatggaatggactcgaatagaatgcactcgaatgtaatggaataaaactaaatgcagtcgaatggaaaggaatcgaatggaatggaatcgaatggaatggagtcgaatggaatggaaccaaatggatttgaattgaatggaatggaatcgaaagacatcaaaaggaatcgaatgcaatgcagtgaaggggagtggattgcagtggaatgtagtggaatggaatgggttggaatggaattgaatggataaaactggaatggaatggaatggaaggaatggaattgaacggaatgaagtgcagtggagtgaagtggagtggaatgcaatggaatggaatggaatggagtggagtggagctgagtggaatgcaactgaatggaatggaatggagtgatgtggagtggagtcgagtggaatggagtggagtggaaaggaatggactagaatggaatggaatgcatttgaatggagtggaatggcatggcgtggagtggaatggaatggaatggagtgcagattggagtggagtgaagtggagtggagggcagtggaatggaatcgaatggaatggaataaaacggagtgcagtgaagtggagtggaatggagtagaattgaacggaatggactggaatggaatggactcgaatataatggaatggaatggaatggattggaacggagtggaatgggaaggagtggactcgaatggaatggactggaatggaattgactagaatggaatggactcaaatagaatggactcgaatgcaatggactgtaatggaatacaatcaaatggaatgaactcgaaaggaatggaatcaagtggaatgtaatcgaatggaatcgaatcaaatggaagggaatcgaatagcatcgaatggactcgaatttaatgcattgatgttgactggactggagagaaacggagtggaatagaacgagggggaatgaaattgaatgcagtggaggggagtagagtggaagggattaggaatggaatggaatgggaagaaaatgaattgaacagggtggagtggagtagataggaatgg

SEQ ID NO: 24754 - DNA, 1476 bp, Artificial sequence
  DNA replication origin
gaatggatttgaattgaatgtagtggacagtagtggattggtgtggaaaggaatggaatgggaaggaatggaattgaacagtgtgcaatggagtggagtggagtggagtggaatggaatggaaaggaatggaatggagtggagtgcaattttgtggaatgcagtggagtggagtgaaattgatgggaatgcaattgagtggattttagtgtaaaggagtggactggaatggaaggcaatggaattgattgggaacaaatggaattgaacagagtgtagtggagtggagtggaatgcaatgaagggaaaggagaggagtggaatggaattgaatggaatggaatcgaatcgaattgaatggactggattggaatggaatggattggaatggagatcaacggaaggaaatcgaatggaatggactcaaatggaaaggaatcgaatggaacgtaaccgagtggaatggaatcaaatggaacggaatcaaatggaatggaattgaacggaatggaatcgaatggagtggaatcgaatggaatgcaatggaatggaatggaatggaatggaatggaatggaatggaatggaatggcatagaatggaatgaaatcgaatcaaatggagtcgaaacgaatggcattgaatggaatcgaatggaatgcggtgaagtggagtggagtggaatggagtgggatggaatgggaaataatggaattgaaaggagtggagtggggaggagaggagtggaatgcaatggaaaggaatgggaaagaatggaattgaaaggagcggagtgaggtggagtggagttgagtgcaatggaatggaatagaatgcagtgcagtggaatgtattggagtggagtggtgtggagtggagtggagtgtaatggcgtgggatgcagtggaacgcagtgtagtggagtttagtagagtggagtggaatcgagtgtactggaatggagtggaatggaatggactcgaaagaaatgaaatggaatggaatggactggaatggaatagacgccaatgaattggacacgaaaggaatggattcaaaaggaatggaatggcatgaactggactcgaatgggatggactcaaatgcaatggactcaaaaggaatggaatggaatggaaaggaattgaatggagtggaattggaaaggaatggaatggaatggcatgaactggactcgaatgggatggactcaaatgcaatggactcaaaaggaatggaatggaatggaacggaatggaatggaatggaatggaatggaatggaatggaatggaatggagtacgatggagtggaatggattggaatggagttgaatggaatgcagtggagtggaattgaatggagtgtacggaagtggattgcagttgagtggaatggaatggaatggaatggaatgaaatggactcgaatggaatggaccctaatggaatagaccaaaatggaatggactcgaatag

SEQ ID NO: 24755 - DNA, 1383 bp, Artificial sequence
  DNA replication origin
ggaatggattggaatggaatggattggaatggaatggaatggagtggagtggagttgagtggagtggaaaggagtagagtggactggaatggaatggattggagtggaacagagtacagaggagtggaatggaatggaatggaaaagagtggagtggagttgagtggaatgtacgggagtggagtggaatggaaatgattggagtggagaggagggaaacggagtagagtggagttgaatggagtggagtggaatggaatggagtggagaggaatggaatgaagtgtagtggagtgtggtggagtgcagtggagtggagtgcaatggaatggaaaggaatttagtggagtggactgggatggaatggaatggagtgcaaaggaatggaatgcagtgaaatggaatggaatcgaatggaatggaatgaattggagtggagtggagtgaagtagagtagaatggtgtggaatggaatagaaaggaatggaacggaatgaaatggaatggaatcgaattgagaggagtggagtggagtggagtggaatggagtggaatggaatggaatggaacggaatggaaacaaatggaatggattccaaaggaatggaattgaatggaatggaatcgaatgcaatggaatggaatggaatggaatagaatggaatggaatcgaacaaaacggaattgcatgttgtctaacggaatcgaaaggaatgtggtgaagtgtagtggagtggagtgtaatggagtggagtggagtgtaatggagtggaatggaatgcactgcaatggaattgaatggaatggagtgtagtggaatggattgaatggaatgggaaggaatggaattgattggagtggtgtggagtagagtagaatggaatggaatggaatggaatggaatggaatggaatggaatggaaaggagtggaatggaatggagtggaatggaatggagtggaatggaatggagtggaatggaatggagtggagtggagtggaatggaatggaatggaaaggagtggaatggaatggactcgaatgaaatggactctaacagaatgaaatcaaatagaatttaatcaaatggaaaggaataaaatggaatggaatggaatctaaagaaatagaatctaattgaatggaatgcgttgaagtgtagtgcattggagtggaatggaatgaggtggaatggatttgaattgaatgtagtggacagtagtggattggtgtggaaaggaatggaatgggaaggaatggaattgaacagtgtgcaatggagtggagtggagtggagtggaatggaatggaaaggaatggaatggagtggagtgcaattttgtggaatgcagtggagtggagtgaaattgatgggaatgcaa

SEQ ID NO: 24756 - DNA, 1512 bp, Artificial sequence
  DNA replication origin
  misc_feature (1)..(299): n is a, c, g, or t
nnnnnnnnnnnnnnnnnnnnnnnnnnnnnnnnnnnnnnnnnnnnnnnnnnnnnnnnnnnnnnnnnnnnnnnnnnnnnnnnnnnnnnnnnnnnnnnnnnnnnnnnnnnnnnnnnnnnnnnnnnnnnnnnnnnnnnnnnnnnnnnnnnnnnnnnnnnnnnnnnnnnnnnnnnnnnnnnnnnnnnnnnnnnnnnnnnnnnnnnnnnnnnnnnnnnnnnnnnnnnnnnnnnnnnnnnnnnnnnnnnnnnnnnnnnnnnnnnnnnnnnnnnnnnnnnnnnnnnnnnnnnnnnnnnnnnnnnnnnatggaatggaatcgaacggaatgggattgaaaggcatacaacatatggaatcaaaaggaatcatatggaatcgattggaaactaatggaacgcggtgaagtagagtgtagtggagtggaatgaagtggaatggaattggatggaatggaatttaatagagtcgagtgtattggaatgggatggagtggaattaaatgggaagggattgaattgaacggaatttagtggagtggagtggagtggaatgcaacggaatggaatggaatgaaatggaatggagtggagtggagtggaatggaaatttttggaatggaatggactgcaatgcaatggaatagaatggaatgcaatggacaggattgtgttgaaattgggtggaatggacaggactgtagtggaatggaagggaaaataatggagcaaaatggaatggtaaggaagggaatggaatggcatggaatggaatggagtggagttgaatggaatggaatggaatcgaatagaaaggactcaaatggaatggactggaatgtaatagactcgaatggaatggaatcgaatggaatggattcgaatggaatggaatcaaatggaatggaaacgtatggaatggaaacgtatggaatgtaattgaatggaatggaatcaattggcttcaaatggaatgcggtgaagtgtacaggagtggagtggaatggagtgaaatgcaatggggtggaacgcaattgaatggagtggagtggagtggaagggaatggaatggaatgaaatggaatgggaaggaatgtaattgaatggagtggagtggagtagagtggactgcagtggagtagagtttaagtggagtggaatggaatggattggaatggaatggattggaatggaatggaatggagtggagtggagttgagtggagtggaaaggagtagagtggactggaatggaatggattggagtggaacagagtacagaggagtggaatggaatggaatggaaaagagtggagtggagttgagtggaatgtacgggagtggagtggaatggaaatgattggagtggagaggagggaaacggagtagagtggagttgaatggagtggagtggaatggaatggagtggagaggaatggaatgaagtgtagtggagtgtggtggagtgcagtggagtggagtgcaatggaatggaaaggaatttagtggagtggactgggatg

SEQ ID NO: 24757 - DNA, 764 bp, Artificial sequence
  DNA replication origin
gcagagcaaggttctcctcagcacagaccttgagggcactgcctcgctttgggacaactcggggccgcatcgacggtgaataaaatccttcctgtttgcagccctgaataatcagtgtcagagaccagttagaagggttcagtgtggaaaacgggaaatcaaaagcccctctgaatcctgcccaccgaggttctccccagccaaggcgaggtggccgcagtgcgagatacataccgcagcctcggaagacaaatgcagcattcctaatgcagacatgacacccccattgctcatgtaacaagcacctgtaatgctaatgcactgcctcaatacaaaaatattaatataagatccgcaatcccctcactgctgtgcagtcctaagacagtgatcataataatcaacattgacatagtcaatacaaacgtagtaacaaacctagggttaggggttggggttaagtttagggttggggtgggggtcagagttagaggttgggagtcaacgtttagagttaggggttaagagaggttaggggttagggattaggggttagggctgggttagggtgagggttggggttagggtttagggttaggggttagggttaggggttaggggtcagggtcaggggtcaggggtcccactctgtgggttgtctatttactctgctgactgttccctttgccatgcaaaagctcgctctttagtttaattaagtcccagctatttatctttgtttttattgcatttgcatttggttt

SEQ ID NO: 24758 - DNA, 1094 bp, Artificial sequence
  DNA replication origin
ggagagtttatggcccctgtcctcggacggctccgcagccgccagggagggactggagggaccgcggctgggacaggctgctgcatcaggcggccctggaccgccgcttccgcccctaagccgccctcgcagcccaggcgaccggtcgccctacccagggagcatcgccctcctcagccggggcccgagcccggcgtgggggttgcaggctggcgccacagcctgaggacaccgcgacctctgcccccaggagcacgccgaatgccaggtggggctgctgtcgcaggctgtggagccgcagccccgctggagggcagggtccggctgggcgtcggggtcctggcagagaccgcggtgagggcaggagcaggtgcactggccgctgcagacgcgccgccaggctcccggacaccgcgggcgcgcccctggtggcagccggctccggagccgcgggagggcggtgcccagtccccagctggcggcagcgcgaagctccttccccgcttgggggagtgggcgtggacctgcagccggagtgccttactaacgaaaaaagctgggattggagttgccacggggggaggtgtgggggcctagggggctctgcctggacattctgggtgtcctcctgcgacctcaggttcctcacctgtctcagaggactgatgggctgctgtggcagggttgtttggaggattaagccagatagtcccagtaaagccccattagcgccccctggcctctggattattatttttttattatttttctggctttcttaggaaactttccggaatgcgtccaggtgttgaagcgggaaggctggacaccctcccttggcgttgcggttccttccagacgccccctcttcttaggctgttttcaagggcatgcccggcaacatgtgctctacccaagagcgcttcacagatcttcctgtgggtctaaaaccagaacgctttcttccccgacccctgctcccgtatcaccccaacctcaagtcttttggcacagccggctacagactcgagtgtcagtttaatgcttgttccctaaggtctccccagggctcttaggacggcgtcaggattagg

SEQ ID NO: 24759 - DNA, 1171 bp, Artificial sequence
  DNA replication origin
cctgctcctgccctcaccgcggtctctgccaggaccccgacgcccagccggaccctgccctccagcggggctgcggctccacagcctgcgacagcagccccacctggcattcggcgtgctcctgggggcagaggtcgcggtgtcctcaggctgtggcgccagcctgcaacccccacgccgggctcgggccccggctgaggagggcgatgctccctgggtagggcgaccggtcgcctgggctgcgagggcggcttaggggcggaagcggcggtccagggccgcctgatgcagcagcctgtcccagccgcggtccctccagtccctccctggcggctgcggagccgtccgaggacaggggccataaactctccagagcgggaagccgcaccctggtggcccggctccgcgcccagacctggccgcagctggcacctgacccgctgcatgggtctccagggagctcgctgccaacctggcgctgcagcctcggctccctcatacgcgctctggtaggtgctagggacgaccctatgggccagcttgccacgccaagtccccaggccacacccaccctggctccctgggctaggggactggctcctcctgtgggtcgtggggctggcaggcagggactttaggggagagggagggacagagggcagcccctgctgtgtgcgcagcgaggtcctgcacaggcctctgttgcagagcgtgcagcttcagctgggactggattgcaggtggagatgactgtttgtgcgcacacctgggggtgaagaggacgcagcctgtctacctgacccatgaaatggaggagactgtaccacagaagcagcgggttcactgctccattgatgaagcaagtctgggacacacatgtagctaagctgcgacttctgtgccagcggtcccaacacccacgccttcaggaagacacatgtgtgggggttgcgtgcttgtcaggcctgagagtggagagtgggggccagagacactaggtagggggaacccgcccgagggctctgagggatgacgatgtagggagctggtggcagagattgagctggcccaatgttgcagggtggggacagagtcgaggtccaccccgcctcaggtggacagctgaacctgagtagacatcaggccccagatcgacatctggccccaggta

SEQ ID NO: 24760 - DNA, 1626 bp, Artificial sequence
  DNA replication origin
caatcccagtaaccctggagggtttttctcatccaatcagaacatgcagtctaggaaccttcatctatatataacctcagtatatgaatgatcctgaagggaaggctgcccctttaaggttccggtatcttcctgtagagctgctcagggcccagcttagaggaccgggaatgggtaatcacaggccgtacgctggaggctggatccgcggtaggacagctcgcctcgctgcggtttgtggtgacggcaacggagaaagcagtgtggtgcaagaggtaggaggaggaaaatagttttgggatagatggagggaggtaaagagggtggttagtgacaaagggaaaagagaatagcgagcaggagaaggtgttgcaaaaagacagtggggaaaagatggtgggaaaaaagtttttgggtaaatggagggggagaaacagggtggggagcgggagggagggaaggttttgcagaaagacagtgggtaaaaagtttatgggtagatggaggagaagagggtggcaagggggaggaggaaagagggtgggagggaaatgggggcaagcagtagggagagaaggttttgtgaaaagacagtggggagaaaagtttttgggtagatagagggggaaaagagggtaacaagtgggggaagggaaaagggtggccagcgggaggaagacagggttttgcaaaaacacagcaggcagaaaagaaagacggggcggggaagaaaagatgatgggtaaaatgtgtttgggtagatgcacgggggaaagagggtgaccaggaggaggagaaaagagggtggcgagagggagcagggaaagagggttggggaaaaaatggaaaaatagtttggggtagatggagggcaaaacagagtggaaagcaggatagggcaaagaggatgagtgggaagggggaaatactgaaaagacggtggggagaactttgagggatagatggagggggaaaagaaggaggtgagcaggagtggggagaaggctttccgaaaaggctatggggaaatgtttttgggtagatggagaagggagagggtggcaaggaggagcaggggaaagacgatgaggaaaacagtttttgggtagatgaagggggaaaagaggttggtgagcggcaggagtgaggagaaggttttgggaaaagaggggggaaaatatttttgcttagatgaaggagcaaaagatggtgatgagagtgggacggggaaaaagaaggtggccagggagaaggggaaaagacggtgggagaaaacagtggggaaagtgtttgggtagatagatggggaaaagggtggtgagcgggagagtagagaaggctttgcgaaatgacggtgggggaaaaatggtggggaaaaagttttggggtagatggaggaagaaaatgggtggcgagggggaggaggccaaaggcggtcgggaaaagaaggtggagaaataatggtgagagacaaaggttttgggtagattttttaaaatcagattatttgtatttttgcttttgagtagtttgagttctttatatattttgtgtattaaccccttggctgatgcatagtttgcaaatattttgttccattctctgggttgtttcttcattctactg

SEQ ID NO: 24761 - DNA, 1994 bp, Artificial sequence
  DNA replication origin
atcagaacatgtagtccaagaacgcatgtgcgtaacctcagtatataaagcacggtgagggcaacctcaggtcatttcaggttcttcagtggtggtgtgctgctcttcgcttagagaactaggagaggggaccgccatctgctgccagctggagccagggcactggctgtctccggttggtggtggggatggagcggtcgaagggtggcctgcagtgggagcttttcctgccgggcaggaggaagagtagaagggagaggcacggacgcatgctggaggctggagcttgcgccaccgcagctcgcctcgctgcggttggtggtgatgtcggacactgcaggtcttccagagtggtagacgtgccgttgggtaggtgagttttctggggctgcactgcccacctctgggggcaggggttgggtgtccttttggggctcactgcccaaggctgcactccctgtggcaggcagctggttcggggcactctctggggtattgctggcggttggggggggggttggctggctatcactggctacactgcctgcggtggcgggggtggtggagggaggcagattgtgtgcactaatgtgtactgctggttgtgggtgatgggttaggggcactatattctgctccactgcctgcggcagggggtgggttgggtggttatctggagctataatgctggcagtgggcggtggtttaggggtgttatggagtgctgcacttcacttacttggggtgcactatcaggagttgcactgcccgtggtggggttggggggggcgggtttggggcactgactagtgcagcaacccccttggctgggtcgggttgtgggccctgtaatgtgctacactgcctgttgggggtggtggcttgggggggtactggggttatatgcctgcaactggcacgggatgtgttgggtgtgctatcccggggctacactgctgatggcaaggggcaggcaggttaggggtgctgtcaggggctacactgcgtggcattgttgggctgcagaggtggcagcaacagcaacagtggtggcctcctttctccttccagtgaccattcttcttttcccagattccagactctagagggtaatcttctcctgctcatgcaattgtgagcacagcagggcccccacaccccccgtggttccccagcctgtgcctcatgctgcctgttggggagaccacctgggactaccgggcagggattagtgggaatcatgggggactgtggggccagggcactgtaggtggaggcgtcaggaacaggaaccagcacttgggtggggagggctgcctaggtctgagtttttcctagtcctgctcctggaggagtgcagccctggtgggcccagcaatttctggccagctgcacctgaacaggggcactttcagcgaaggcactcacacccacctcaggccccagttcttggccagctttgccagaaggagaagctggactttggagggtgggtgtgagtgcctttcctgaaactggtccttgccacccagtggccagcgtgacaaggtgaggctctaaggctaccactctctgcatcccattctaggcttttctggctttgccctcccagctgctccaagccaggatggaggaggaggacaaggaagagtcacctgtggtaaactggagcctgcatatggctctgcagctggtctcacgagattggtggcagcgacggagactgcagctcgactggagtggtaggagggtgcccgcgggggcaaggtggtaggagccttgtagggtgggctgctgcattgagggcgacacggttgtattggcatcggtgctagtggtggtatcagcattaagtctgggggctgggaagggggagtaggagcgctgcagggcccagcccgacctggggatggggaggaacctgcgggtactgtaccaggccttggtggcagcagtggaggtgcacctagggaaaggaggagtccttccccttc

SEQ ID NO: 24762 - DNA, 1427 bp, Artificial sequence
  DNA replication origin
cgcacgccgcacgcgcggcagtggcttggctggcttgtaacggcttgcacgtgcatgccgcgcgcgcacgccgcacgcgtataacggtttggctggcctgtaactgcttgcacgcgcatgccgcacgtgcgtaatggcttggctggcctgtaatggcttgcacgcgcatgctgcacgcgcgttaacggcttggctggcctgtaacactcggcatgcgcacactgcacgtgcgtaacggcttggctggcctgtagcagctagacttggctctgcgacctttgcttggcttggcagcgtgactgctgggatagacattccttccttggactgacgttttttctgtcacgttactccgctggacttgaccttttctcttctgggtttggcattcccttgggtgggccgggtgttttcttggggggtggggttggcccttcctggggtgggcgtggggtcgcccagcgtgggtgtgggctttccccaggtgggtgtgggttttccctgggtggggtgggctgggctcccctgctggggttggcaggttttggtcgggacttttctcttcaaacagattagaaacccggagttatctgctagttggtgaaactggttggtagacgcgatctgctggctactaccggcctcccctggctgttaaaagcagatggtggctgaggctggttcaatgccggctgcctcctctgtgaagaagccatttggtctcagaagcaagatgggcaagtggtgccgccactgcttcccctggtgcagggggagcggcaagagcaacgtgggcacttctggagaccacgatgattctgctatgaagacactcaggagcaagatgggcaagtggtgccgccactgcttcccctggtgcagggggagcggcaagagcaacgtgggcacttctggagaccacgacgactctgctatgaagacactcaggagcaagatgggcaagtggtgctgccactgcttcccctgctgcagggggagcggcaagagcaaagtgggcccctggggagactacgacgacagcgctttcatggagccgaggtaccacgtccgtcgagaagatctggacaagctccacagagctgcctggtggggtaaagtccccagaaaggatctcatcgtcatgctcaaggacactgacatgaacaagaaggacaagcaaaagaggtaaccaggcctgggctgggaggaggtgggatgtgggaggatgatggggacataccctcctggcgggggaggaggggagcctggttttctcgcctccgcaggcctcacaccaccctggatgtggaaacctcagagagttcagggcacaggcccctttatgagcagcaacacaaaaacaaaactttagctgatttccaatcaaattataatttccctcctagaacactaatagactgttttga

SEQ ID NO: 24763 - DNA, 1388 bp, Artificial sequence
  DNA replication origin
gccacagtccagagcgcgacagggcaggattcctgccttgctatatccagggtgcagcggggcgggggttctcttctgcaggagtccaggacgtggcagaacgggagtcctccgtgtaggagtcctccggtgctggagtccagagcacagtgaggctgggtcctcccgtgccatagtgtagggcatggcgggacagggatcctgccctgcgatagtccagtgactgagtccgcagtaaggcagtggtcctccaatgctggagttcacggcgtggtggggtcacggtccttcagtgtcttagtccatgggtaccagggcgggggtccacagttgccatagtgaggacctgggaggagtgtggttcctgcctcgctgtagtccggggagcagggggcaggggtcctctcgtcagagtctctggcgcggggtgggggtggggtgggggttttcctatgcgatagcccacggggcggtgaggccaggtcctcgcttgcctttgtcgtgggcgcaggggggcgagggtcttcggtggtggagtcctcggagcggcagggcaggggtcctccagtgccatattccagggtgcggcggagtgggcgacctgtcctgcagtggtccagggcatgcgggagtggtggtcctcctgtgccatagtccaacgcgcggcggggagggggtcacctcggcctgcagtccaccacgcacgagaccccggtcctgctgtgccccagtccagtgcgcggagggacggcagtccttctgtgctgtagtgcaggacgcggtggggcagccgtaacccagagagcgccgtggcagggggtcctccagtgctggaatccagttcatggcgggtcaggggccttattgttccgaagtcggtggcaaggatcctcctgggccatagtctagggggcgacggggcagggttctctagtgcaggtgtccagggtgcggtggggcaggagtcctctggtgcagaagtccaggacgtaatggagtgggagtactccaacgccagagtccagggctctgcggggcggggttcccccatgccagagtgtagggcgctttcaggcgagggtcttggcgtgcagtagttcagggtgcggtggggcaaggatagtccagatctccatggcgggggttcctctgtgcaggagcccagtgcccggcggatcggggtccctccgtgctgtagtccagggcacggcaagatgtgggtcctctggtgccctatccagggggcggtgggtcagaggttctcccctgtcttggtctagggcccggcgggactgaggtcctggagtccacgcggtagcccaagttgcctcaggaccaggtcctctggatccacagtccagagcacagaggggcaggaatagctcagg

SEQ ID NO: 24764 - DNA, 1146 bp, Artificial sequence
  DNA replication origin
gtcctctggtgcagaagtccaggacgtaatggagtgggagtactccaacgccagagtccagggctctgcggggcggggttcccccatgccagagtgtagggcgctttcaggcgagggtcttggcgtgcagtagttcagggtgcggtggggcaaggatagtccagatctccatggcgggggttcctctgtgcaggagcccagtgcccggcggatcggggtccctccgtgctgtagtccagggcacggcaagatgtgggtcctctggtgccctatccagggggcggtgggtcagaggttctcccctgtcttggtctagggcccggcgggactgaggtcctggagtccacgcggtagcccaagttgcctcaggaccaggtcctctggatccacagtccagagcacagaggggcaggaatagctcagggcgagccagggccgaggtcctcgggagccacagtccagggtgtggaggggtgggggttctgcagtggcacagcccaggacacagcggggcggggcggggatcctctggtaccttagtccagggcggagccgggggagaggtccttcagtagcatagtctagcgcatggcgttgcaggggtcctccagtgcctgaggccagggcgggtcgcgggtcccactgtactctcgttcagggcggagcaggtctggggtcttctgcttcagtctagggtgctggagagtgggggtcctctggtgccagagtccatggagccatgggtcggcgtcctgccatgtcttagcccagaacggggagaggcggagatcctcctttgccctagtccaaggcattgtgaggccccgctcctgcacagaggcggtctgttcctctaccgccgtggggaaaaactgcaccatctctggcaagcctaacccagcagctgtccttaaaagattcccagttgagtgtggttcagagcagccctgagaagtgtgcccttagatggcttcaagggctctgggcagtgtttaaggaatccagctgacctcagttactccaagcccttttccactcagcagaacttctggccacccgggtcctctatctgtggagcccttctatcatcccagatccccacagggtggactccctctcatcctcacaatctcagctcaggcctta

SEQ ID NO: 24765 - DNA, 1239 bp, Artificial sequence
  DNA replication origin
cagtccgggcaacacagtgagacaccccccactacaaaaaacaagaagacccctctttttacccctaactgagaggcgtgactagaaggcagaaagctggctgttgaggtgggagtctctctcttcaggcagaggtagggccgcttcctggggcagaggcgtgggtggtgtgtctggctctgcagttcctgatgaagacatactggggtgcccaggctaacctttggcaaaactaggagctgaactcaggagtccctgatgccagcctttctgatgcggtcccccctcccctcccccatgtgtctcgctccatagctccaggccaggagccccaactggctggtggaggatgtcttgctcctcagcagctgggatttgtaagtatttgtaggaacatggaacagatcagtggctgacaggcccaggaagcagacagtccccttcccataggtcaccagcttcacttccccttcctgcaccccatcctgatttgagggagcccaggatgacaaagagggagtagttgagcaaggtatggagtggcagcctctacaggagctcaaaggatgcatttgtccatctgccctgggctcagcttccacactcagagtcactcacatccctccaccgtcgccacagctcacctgtgtgcccacacggccaaggtcacactgaccccaaacgcacactgtttcaactctcagcacttcactgtcacactcgcgtgtgtacacacatgctttctaatttccacagccacatggatgctcacacactcacacctttgcacacacacacaagctggctcacagacacactgggggcccagatcctggtcattccccacaggtcttaataaaggttcatggaaggaaacctgtttcctaaggtagggtgggagtgtgtgtgagtgtgtgggggggagagggtgagagtgtgtgcgtgtgttagtgtgagtgtgtgtgtatgtaaggagcaggagtgactgggtcctgagtttagggagttgggaagaggaaggagagatggagacaagcctggaccaagagccactcagagctgcctggaagggaagccaggctgagaaaaaggcaaggcaaagaaataagacactgacaaggatcaagccagggttgagtagggactgggaacagagtctgcctccatgagaagctgtcacattgctgctctggtgccctgtgacagcggcaccatctccagctggagactcccctctct

SEQ ID NO: 24766 - DNA, 969 bp, Artificial sequence
  DNA replication origin
cctggctgcagcgggaaccgagctggatgcccggacagcgccggggtcgtttttctgcccccgccccgtggccggagccgcaggcctgccgctacccccacccgggccgcgccttccttcctcgcggccggaccgcgccagagtcccgggccctggctggaaactcgcaggccccgggcagccggggccgcaagtgcgatgaagaagcgggcccggcgcgcacatgtggttccgggcaggagccccggccgcctcgtgcccttcttctcgcccacgacggtggccggcggcggcctctgcttcccggacccatgaacaaagctggagatgcggctttggagtcggccctgggacctgcttcttctcttggctttggggaccgtagcccagggcgttccctccgggtcggtggccagggcttgcggggcgtgtgcgactcgggacccccagccgggcagcagcggccgccaagcatggcaaggagcagcgccagcctctccccaccacgtcccgggatggtgggcgtcgggtgggagccggcccaggacatccaggtgggatcagccaccgctcaggccctgtcccaagcggacgcggccagaggcagtctcagcaccacgcaggccgcgggttcagtgggcaaagagaggggcccccggtttagaccaaaaacgtgtgttctccaacctcctacttaaaagcccctgtctcatatgctggttcctgtctctaatagttcctaggtgtctgggaccggtgacttggcccctgttatccccgagctcagccgcaggcttcagggacctgggcaaagtgtggataaccctgcccgccttttggggaggaaagccagttgctcccctagcctctactgtggcactaggaagcaagggcagccaagctgatcgctggtttcatctgcaccaccccactccctccagcaggtgatgagatggccagtgacgggtg

SEQ ID NO: 24767 - DNA, 997 bp, Artificial sequence
  DNA replication origin
gaaggcgcggcccgggtgggggtagcggcaggcctgcggctccggccacggggcgggggcagaaaaacgaccccggcgctgtccgggcatccagctcggttcccgctgcagccaggagactcccgggagcgctctaggaaccacagagccctggaagtcacctggcagcctcgcggcgctaaagccggcggagcctgagacagcgcgcggcgaggcggtcacgctccacccccgcgtggcagcaggactcggatttcgcccctggttttaaaattgtgccggtggagcccgggacgctgggaagagcgttctgcgcccctccagtcgcggtctccgccctaaaccgacttccagagccgcctctgctccctggaggggcgcagtggcggacaccggcgtcccacgaagtcgcaggtcctcagtctgagggctgccccgcacgctcggaatgcaggagggtctccgcctcgctgcgctgcccctgggggcggaggcgtgcgctgcaggcgagagaggcggcccggtatcgatggagaagcacagagggctttgaggtcgcaacgtcccggttgctgagcggagtcgggagtcaggttccaaagggacagcgctcagggttgtaatcaccacccggcccaccgcttccgcagctgcgagtctagggcggagctgttgggtggaccgagcaggcgaggcgcaggcaggcagcggctccgcctcggaatccgcctcgaccggggcccaggtgcccgccccacctgtccctcggtcaccccaaccctgtttcctcgacccccagcactcctccaggcctagttcgcttcagaagcgcaagacccggaaaacaaggaagaagcgagctcagcctcaatccccgtccccaccccactttcgggaccgctacgctggagaattgaagggggcggaccccggattaaagccgctcccttcccagcctcgccccgctttcctaatgtccgtgatgatttcgttattg

SEQ ID NO: 24768 - DNA, 890 bp, Artificial sequence
  DNA replication origin
cagggttgtaatcaccacccggcccaccgcttccgcagctgcgagtctagggcggagctgttgggtggaccgagcaggcgaggcgcaggcaggcagcggctccgcctcggaatccgcctcgaccggggcccaggtgcccgccccacctgtccctcggtcaccccaaccctgtttcctcgacccccagcactcctccaggcctagttcgcttcagaagcgcaagacccggaaaacaaggaagaagcgagctcagcctcaatccccgtccccaccccactttcgggaccgctacgctggagaattgaagggggcggaccccggattaaagccgctcccttcccagcctcgccccgctttcctaatgtccgtgatgatttcgttattggcagggaagagccaggctccctgcgctcccaagacggggcgattgggagggggttctggagctcacgcctggggtcggcccggcgggggtgaccccgcgccctcgccggtgcaaggagaacaggtggttcccgccggggcagggaagcgtggacggtgtgggctcaggcgcctggcaggcacgcggggcctctaaagcttggtcgctgtcacagatcgtgtggttgtttcttccgtccccgccacgccttcctcctgggatggggattcattccctagcaggtgtcggagaactggcgcccttgcagggtaggcgccccggagcctgaggcgggaactttaaaatcagacgcttgggggccgggctgggaaaaactggcggaaaatattataactgaactctcaatgccagctgttgtagaacctcctgggacaagcggtggaagtcccctcaggaggcttccgcgatgtcctaggtggctgctccgcccgccacggtcatttcc

SEQ ID NO: 24769 - DNA, 839 bp, Artificial sequence
  DNA replication origin
aaaagccttagataagcatggtgtatcttttttttttcccacgtatattttttgttgttttttgtttttttctgttatatgtcctggttcttccataacttataaacttgatttataccgaggaggtgggaaagtgggcggggcagggtggactgacccgggatggggaagctcctctcgctgccccctcggggcgggcctaggccctttggaggatggggacgccaggacactcctccctgaggtcgtctggccgcctctgcccctagtgctcagaatcctgtgtgcccctcaattccggaatccctcctgggaccccatgcccactgggcacactgcccctggtactcagaatcccgaagcaccattcggttccagaatcccctcctcagctgctggggtggcggggtccctcctttccgatgtcccccccaacccctgaggggggagggaagggaggggggtcaggtctcccctctgtggcagggggaggtggaggtggaggtggaatcggaagggcgtggaaggcgggggccaggagggctcagccgatggtgagtccagagccacactggaacttgttcttgcggtgattcaggaaggccccaagggccagcgtcaggggcaggagctggagcttcttctccagcgtggcacccacgatccagttgctatccacagagcctttgaagaggaggttggccttgggcaggtccagctggtacccgaaggagacgctggtatcctgcatccttgtgctggcctgaaaatccacacccacctgcaactggtcactggctttgtggtagtatgttgcgtccatgcccgcctggctcaac

SEQ ID NO: 24770 - DNA, 923 bp, Artificial sequence
  DNA replication origin
ggtagagggtcggtggtgaaaaaattatagatttcaaagttattgtttgaaataacccaaacaagcaaaacattagtatttttatcttgaaattcttggtgaattttatgttctagcccataatatattagtttattttaacacaaaagtttcttccaaaatggacatgtccaaaagatacaccatgctggcgacgggggtggcggcggcggcagcgagttcggttgcgcgtggcgcaccgggtgggagcggagaccaggccgggagcaggcgccaccgccagcgaccatggggaacatgttggccgccagctcgccgcccgcagggccgccacctccgccctcgccgccaggcttcacgctgccgccgctgagaggcggcctgggcgccggcaccactaggagtcgaggttcggaacggacccccggggctgcaaccgccagcgcctcaggggccgctgaggatggggcctgcggctgcctgcccaacccgggcacattccaggagtgccaccggaggtgtaaggagctgtttcccattcagatggagggtgtcaagctcacagtcaacaaagggttgagtaaccgtttccaggtgaaccacacagtagccctcagcgcaatcggggagtccagctaccacttcggggtcacgtatgtggggacaaagcagctgagtcccacagaggcgttccctgtactggtaggtgacatggacaacagcggcagtctccacgctcaggtcattcaccagctgggccccggtctcaggtccaagatggccatccagacccagcagtcgaagtttgtgaactggcaggtggacggggagtatcggggctctgactcaccgcagccgtcaccctggggatcccagacgtcctcgtgggttcaagaattctcgaagcccactacctccagagc

SEQ ID NO: 24771 - DNA, 1383 bp, Artificial sequence
  DNA replication origin
gataagcatggtgtatcttttttttttcccacgtatattttttgttttttttttttttttttttttttttttctgttatatgtcctggttcttccataactgataaacttgatttataccgaggaggtgggaaagtgggcggggcagggtggactgacccgggatggggaagctcctctcgctgccccctcggggcgggcctaggccctttggaggatggggacgccaggacactcctccctgaggttgtctggccgcctctgcccctagtgctcagaatcctgcgtgcccctcaattccggaatccctcctgggaccccatgcccactgggcacactgcccctggtactcagaatcccgaagcaccattcggttccagaatcccctcctcagctgctggggtggcggggtccctcctttccgatgtcccccccaacccctgaggggggagggaagggaggggggtcaggtctcccctctgtggcagggggaggtggaggtggaggtggaatcggaagggcgtggaaggcgggggccaggagggctcagccgatggtgagtccagagccacactggaacttgttcttgcggtgattcaggaaggccccaagggccagcgtcaggggcaggagctggagcttcttctccagcgtggcacccacgatccagttgctatccacagagcctttgaagaggaggttggccttgggcaggtccagctggtacctgaaggagacgctggtatcctgcatccttgtgctggcctgaaaatccacacccacctgcaactggtcactggctttgtggtagtatgttgcgtgcatgcccgcctggctcaacgttaccgttgccaaccagttgttcaatgtgtatttcccagctagagacgtgacagtgccctcgtccccaggccgccggttgtagaccagctctccgcccagggccaggcaaggcctgatgctctggaggtagtgggcttcgagaattcttgaacccacgaggacgtctgggatccccagggtgacggctgctgtgagtcagagccccgatactccccgtccacctgccagttcacaaacttcgactgctgggtctggatggccatcttggacctgagaccggggcccagctggtgaatgacctgagcgtggagactgccgctgttgtccatgtcacctaccagtacagggaacgcctctgtgggactcagctgctttgtccccacatacgtgaccccgaagtggtagttggactccccgattgcgctgagggctactgtgtggttcacctggaaacggttactcaaccctttgttgactgtgagcttgacaccctccatctgaatgggaaacagctccttacacctccggtggcactcctgga

SEQ ID NO: 24772 - DNA, 866 bp, Artificial sequence
  DNA replication origin
gttgtaatcaccacccggcccaccgcttccgcagctgcgagtctagggcggagctgttgggtggaccgagcaggcgaggcgcaggcaggcagcggctccgcctcggaatccgcctcgaccggggcccaggtgcccgccccacctgtccctcggtcaccccaaccctgtttcctcgacccccagcactcctccaggcctagttcgcttcagaggcgcgagacccggaaaacaaggaagaagcgagctcagcctcaatccccgtccccaccccactttcgggaccgctaagctggagaattgaagggggcggaccccggattaaagccgctcccttcccagcctcgccccgctttcctaatgtccgtgatgatttcgttattggcagggaagagccagactccctgcgctcccaagacggggcgattgggagggggttctggagctcatgcctggggtcggcccggcgggggtgaccccgcgccctcgccggtgcaaggagaacagctggttcccgccggggcagggaagcgtggacggtgtgggctcaggcgcctggcaggcacacggggcctctaaagcttggtcactgtcacagatcgtgtggttgtttcttccgtccccgccacgccttcctcctgggatggggattcattccctagcaggtgtcggagaactggcgcccttgcagggtaggcgccccggagcctgaggcgggaactttaaaatcagacgcttgggggccgggctgggaaaaactggcggaaaatattataactgaactctcaatgccagctgttgtagaagctcctgggacaagccgtggaagtcccctcaggaggcttccgcgatgtcctaggtggctgctc

SEQ ID NO: 24773 - DNA, 986 bp, Artificial sequence
  DNA replication origin
aaggcgtggcccgggtgggggtagcggcaggcctgcggctccggccacggggcaggggcagaaaaacgaccccggcgctgtccgggcatccagctcggttcccgctgcagccaggagactcccgggagcgctctaggaaccacagagccctggaactcacctggcagcctcgcggcgctaaagccggcggagcctgagacagcgcgcggcgaggcggtcacgctccacccccgcgtggcggcaggactcggatttcgcccctggttttaaaattgtgccggtggagcccgggacgctgggaagagcgttctgcgcccctccagtcgcggtctccgccctaaaccgacttccagagccgcctctgctccctggaggggcgcagtggcggacaccggcgtcccacgaagtcgcaggtcctcagtctgagggctgccccgcacgctcggaatgcaggagggtctccgcctcgctgcgctgcccctgggggcggaggcgtgcgctgcaggcgagagaggcggcccggtatcgatggagaagcacagagggctttgaggtcgcaacgtcccggttgctgagcggagtcaggagtcaggttccaaagggacagcgctcagggttgtaatcaccacccggcccaccgcttccgcagctgcgagtctagggcggagctgttgggtggaccgagcaggcgaggcgcaggcaggcagcggctccgcctcggaatccgcctcgaccggggcccaggtgcccgccccacctgtccctcggtcaccccaaccctgtttcctcgacccccagcactcctccaggcctagttcgcttcagaggcgcgagacccggaaaacaaggaagaagcgagctcagcctcaatccccgtccccaccccactttcgggaccgctaagctggagaattgaagggggcggaccccggattaaagccgctcccttcccagcctcgccccgctttcctaatgtccgtgatgat

SEQ ID NO: 24774 - DNA, 1796 bp, Artificial sequence
  DNA replication origin
tcacacctgtaattgctgtgctttcagagctacaggcaggaggatcacttgaggccaggagttagagaacagtccgggcaacacagtgagacaccccccactacaaaaaacaagaagacccctctttttacccctaattgagaggcgtgactagaaggcagaaagctggctgttgaggtgggagtctctctcttcaggcagaggtagggccgcttcctggggcagaggcgtgggtggtgtgtctggctctgcagttcctgatgaagacatactggggtgcccaggctaacctttggcaaaactaggagctgaactcaggagtccctgatgccagcctttctgatgcggtccccctcccctcccccatgtgtctcgctccatagctccaggccaggagccccaactggctggtggaggatgtcttgctcctcagcagctgggatttgtaagtatttgtaggaacatggaacagatcagtggctgacaggcccaggaagcagacagtccccttcccataggtcaccagcttcacttccccttcctgcaccccatcctgatttgagggagcccaggatgacaaagagggagtagttgagcaaggtatggagtggcagcctctacaggagctcaaaggatgcatttgtccatctgccctgggctcagcttccacactcagagtcactcacatccctccaccgtcgccacagctcacctgtgtgcccacacggccaaggtcacactgaccccaaacgcacactgtttcaactctcagcacttcactgtcacactcgcgtgtgtacacacatgctttctaatttccacagccacatggatgctcacacactcacacctttgcacacacacacaagctggctcacagacacactgggggcccagatcctggtcattccccacaggtcttaataaaggttcatggaaggaaacctgtttcctaaggtagggtgggagtgtgtgtgagtgtgtgggggggagagggtgagagtgagtgtgtgcgtgtgttagtgtgtgtgtgtatgtaaggagcaggagtgactgggtcctgagtttagggagttgggaagaggaaggagagatggagacaagcctggaccaagagccactcagagctgcctggaagggaagccaggctgagataaaggcaaggcaaagaaataagacactgacaaggatcaagccagggttgggtagggactgggaacagagtctgcctccatgagaagctgtcacattgctgctctggtgccctgtgacagcggcaccatctccagctggagactcccctctctggatcttgtcattgtgactttgctttgttggacaaccaggagtggtgacaggcagggaatatggtgcccagggcagctagccatgccacgccagtccagctgccaacccacccgtcactggccatctcatcacctgccagagggagtggggtggtgcagatgaaaccagcgatcagcttggctgcccttgcttcgtagtgccacagtagaggctaggggagcaactggctttcctccccaaaaggcgggcagggttatccacactttgcccaggtccctgaagcctgcggctgagctcggggataacaggggccaagtcaccggtcccagacacctaggaactattagagacaggaaccagcatatgagacaggggctgttaagtaggaggttggagaacacacgtttttggtctaaaccgggggcccctctctttgcccactgagcccgcggcctgcgtggtgctgagactgcctctggccgcgtccg

SEQ ID NO: 24775 - DNA, 1199 bp, Artificial sequence
  DNA replication origin
tgcagaagtccaggacgtaatggagtgggagtactccaacgccagagtccagggctctgcggggcggggttcccccatgccagagggtagggcgctttcaggcgagggtcttggcgtgcagtagttcagggtgcggtggggcaaggatagtccagatctccatggcgggggttcctctgtgcaggagcccagtgcccggcggatcggggtccctccgtgctgtagtccagggcacggcaagatgtgggtcctctggtgccctatccagggggcggtgggtcagaggttctcccctgtcttggtctagggcccggcgggactgaggtcctggagtccacgcggtagcccaagttgcctcaggaccaggtcctctggatccacagtccagagcacagaggggcaggaatagctcagggcgagccagggccgaggtcctcgggagccacagtccagggtgtggaggggtgggggttctgcagtggcacagccaggacacagcggggcggggcggggatcctctggtaccttagtccagggcggagccgggggagaggtccttcagtagcatagtctagcgcatggcgttgcaggggtcctccagtgcctgaggccagggcgggtcgcgggtcccactgtactctcgttcagggcggagcaggtctggggtcttctgcttcagtctagggcgctggagagtgggggtcctctggtgccagagtccatggagccatgggtcggcgtcctgccatgtcttagcccagaacggggagaggcggagatcctcctttgccctagtccaaggcattgtgaggccccgctcctgcacagaggcggtctgttcctctaccgccgtggggaaaaactgcaccatctctggcaagcctaacccagcagctgtccttaaaagattcccagttgagtgtggttcagagcagccctgagaagtgtgcccttagatggcttcaagggctctgggcagtgtttaaggaatccagctgacctcagttactccaagcccttttccactcagcagaacttctggccacccgggtcctctatctgtggagcccttctatcatcccagatccccacagggtggactccctctcatcctcacaatctcagctcaggccttattcatcaccgcattcctggcaccaggcctggcccatgagaaatgggtcagattaagagctaaa

SEQ ID NO: 24776 - DNA, 1355 bp, Artificial sequence
  DNA replication origin
acagggcaggattcctgccttgctatatccagggtgcagcggggcgggggttctcttctgcaggagtccaggacgtggcagaacgggagtcctccgtgtaggagtcctccggtgctggagtccagagcacagtgaggctgggtcctcccgtgccatagtgtagggcatggcgggacagggatcctgccctgcgatagtccagtgcctgagtccgcagtaaggcagtggtcctccaatgctggagttcacggcgtggtggggtcacggtccttcagtgtcttagtccatgggtaccagggcgggggtccacagttgccatagtgaggacctgggaggagtgtggttcctgcctcgctgtagtccggggagcagggggcaggggtcctctcttgtcagagtctctggcgcggggtgggggtggggtgggggttttcctatgcgatagcccacggggcggtgaggccaggtcctcgcttgcctttgtcgtgggcgcagggggacgagggtcttcggtggtggggtcctcggagcggcagggcaggggtcctccagtgccatattccagggtgcggcggagtgggcgacctgtcctgcagtggtccagggcatgcgggagtggtggtcctcctgtgccatagtccaacgcgcggcggggagggggtcacctcggcctgcagtccaccacgcacgagaccccggtcctgctgtgccccagtccagtgcgcggagggacggcagtccttctgtgctgtagtgcaggacgcggtggggcagccgtaacccagagagcgccgtggcagggggtcctccagtgctggaatccagttcatggcgggtcaggggccttattgttccgaagtcggtggcaaggatcctcccgggccatagtctagggggcgacggggcagggttctctagtgcaggtgtccagggtgcggtggggcaggagtcctctggtgcagaagtccaggacgtaatggagtgggagtactccaacgccagagtccagggctctgcggggcggggttcccccatgccagagggtagggcgctttcaggcgagggtcttggcgtgcagtagttcagggtgcggtggggcaaggatagtccagatctccatggcgggggttcctctgtgcaggagcccagtgcccggcggatcggggtccctccgtgctgtagtccagggcacggcaagatgtgggtcctctggtgccctatccagggggcggtgggtcagaggttctcccctgtcttggtctagggcccggcgggactgaggtcctggagtccacgcggtagcccaagttgcctcaggaccaggtcctctggatccacagtccagagcacagagg

SEQ ID NO: 24777 - DNA, 1355 bp, Artificial sequence
  DNA replication origin
gcttggctggcttgtaacggcttgcacgtgcatgccgtgcgcgcacaccggacgcgtataacggtttggctggcctgtaactgcttgcacgcgcatgccgcacgtgcgtaatggcttggctggcctgtaatggcttgcacgcgcatgctgcacgcgcgttaacggcttggctggtctgtaacagtcggcatgcgcacactgcacgtgcgtgacggcttggctggcctgtagcgcttggcttggctttgcgttctttgcttggcttggcgtttgtcgcttggattgacatttcttccttggactgacgttttttctgtcacgttactttgctggacttgaccttttctcttctgggtttggcattcccttgggtgggccgggtgttttcttggggggtggggttggcccttcctggggtgggcgtggggtcgcccagcgtgggtgtgggctttccccaggtgggtgtgggttttccctgggtggggtgggctgggctcccctgctggggttggcaggttttggtcgggacttttctcttcaaacagattagaaacccggagttatctgctagttggtgaaactggttggtagacgcgatctgctggctactaccggcctcccctggctgttaaaagcagatggtggctgaggctggttcaatgccggctgcctcctctgtgaagaagccatttggtctcagaagcaagatgggcaagtggtgccgccactgcttcccctggtgcagggggagcggcaagagcaacgtgggcacttctggagaccacgacgattctgctatgaagacactcaggagcaagatgggcaagtggtgccgccactgcttcccctggtgcagggggagcagcaagagcaacgtgggcacttctggagaccacgacgactctgctatgaagacactcaggagcaagatgggcaagtggtgctgccactgcttcccctgctgcagggggagcggcaagagcaaagtgggcccttggggagactacgacgacagcgctttcatggagccgaggtaccacgtccgtcgagaagatctggacaagctccacagagctgcctggtggggtaaagtccccagaaaggatctcatcgtcatgctcaaggacactgacatgaacaagaaggacaagcaaaagaggtaaccaggcctgggctgggaggaggtgggatgtgggaggatgatggggacataccctcctggcgggggaggaggggagcctggttttctcgcctccgcaggcctcacaccaccctggatgtggaaacctcagagagttcagggcacaggcccctttatgagcagcaacacaaaaacaaaactttagctgatttcc

SEQ ID NO: 24778 - DNA, 2133 bp, Artificial sequence
  DNA replication origin
gttctgattggatgagagcaagtcttaagacaacaaatcacagcatgaaaataaagcccaatcagagtaggcctagaggtttttctctcatccaatcagaacatgtagtccaagaacgcatgtgcgtaacctcagtatataaagcacggtgagggcaacctcaggtcatttcaggttcttcagtggtggtgtgctgctcttcgcttagagaactaggagaggggaccgccatctgctgccagctggagccagggcactggctgtctcctgttggtggtggggatggagcggtcgaagggtggcctgcagtgggagcttttcctgccgggcaggaggaagagtagaagggagaggcacggacgcatgctggaggctggagcttgcgccaccgcagctcgcctcgctgcggttggtggtgatgtcggacactgcaggtcttccagagtggtagacgtgccgttgggtaggtgagttttctggggctgcactgcccacctctgggggcaggggttgggtgtccttttggggctcactgcccaaggctgcactccctgtggcaggcagctggttcggggcactctctggggtattgctggcggttgggggggttggctggctatcactggctacactgcctgcggtggcgggggtggtggagggaggcagattgtgtgcactaatgtgtactgctggttgtgggtgatgggttaggggcactattttctgctccactgcctgcggcagggggtgggttgggtggttatctggagctataatgctggcagtgggcggtggtttaggggtgttatggagtgctgcacttcacttacttggggtgcactatcaggagttgcactgcccgtggtggggttggggggggcgggtttggggcactgactagtgcagcaacccccttggctgggtcgggttgtgggccctgtaatgtgctacactgcctgttgggggtggtggcttgggggggtactggggttatatgcctgcaactggcacgggatgtgttgggtgtgctatcccggggctacactgctgatggcaaggggcaggcaggttaggggtgctgtcaggggctacactgcgtggcattgttgggctgcagaggtggcagcaacagcaacagtggtggcctcctttctccttccagtgaccattcttcttttcccagattccagactctagagggtaatcttctcctgctcatgcaattgtgagcacagcagggcccccacaccccccgtggttccccagcctgtgcctcatgctgcctgttggggagaccacctgggactaccgggcagggattagtgggaatcatgggggactgtggggccagggcactgtaggtggaggcgtcaggaacaggaaccagcacttgggtggggagggctgcctaggtctgagtttttcctagtcctgctcctggaggagtgcagccctggtgggcccagcaatttctggccagctgcacctgaacgggggcactttcagcgaaggcactcacacccacctcaggccccagttcttggccagctttgccagaaggagaagctggactttggagggtgggtgtgagttcctttcctgaaactggtccttgccacccagtggccagcgtgacaaggtgaggctctaaggctaccactctctgcatcccattctaggcttttctggctttgccctcccagctgctccaagccaggatggaggaggaggacaaggaagagtcacctgtggtaaactggagcctgcatatggctctgcagctggtctcacgagattggtggcagcgacggagactgcagctcgactggagtggtaggagggtgcccgcgggggcaaggtggtaggagccttgtagggtgggctgctgcattgagggcgacagcggttgtattggcatcggtgctagtggtggtatcagcattaagtctgggggctgggaagggggagtaggagcgctgcagggcccagcccgacctggggatggggaggaacctgcgggtactgtaccaggccttggtggcagcagtggaggtgcacctagggaaaggaggagtccttccccttctcctgcaatctgtggagggtgccctcctcctgctggtgactgagcca

SEQ ID NO: 24779 - DNA, 1545 bp, Artificial sequence
  DNA replication origin
gataataaagtccaatcccagtaaccctggagggtttttctcatccaatcagaacatgcagtctaggaaccttcatctatatataacctcagtatatgaatgatcctgaagggaaggctgcccctttaaggttccggtatcttcctgtagagctgctcagggcccagcttagaggaccgggaatgggtaatcacaggccgtacgctggaggctggagccgcggtaggacggctcgcctcgctgcggtttgtggtgacggcaacggagaaagcagtgtggcgcaagcggtaggaggaggaaaatagttttgggatagatggagggaggtaaagagggtggttagtgacaaagggaaaagagaatagcgagcaggagaaggtgttgcaaaaagacagtggggaaaagatggtgggaaaaaagtttttgggtaaatggagggggagaaacagggtggggagcgggagggagggaaggttttgcagaaagacagtgggtaaaaagtttatgggtagatggaggagaagagggtggcaagggggaggaggaaagagggtgggagggaaatgggggcaagcagtagggagagaaggttttgtgaaaagacagtggggagaaaagtttttgggtagatagagggggaaaagagggtaacaagtgggggaagggaaaagggtggccagcgggaggaagacagggttttgcaaaaacacagcaggcagaaaagaaagacggggcggggaagaaaagatgatgggtaaaatgtgtttgggtagatgcacgggggaaagagggtgaccaggaggaggagaaaagagggtggcgagagggagcagggaaagagggttggggaaaaaatggaaaaatagtttggggtagatggagggcaaaacagagtggaaagcaggatagggcaaagaggatgagtgggaagggggaaatactgaaaagacggtggggagaactttgagggatagatggagggggaaaagaaggaggtgagcaggagtggggagaaggctttccgaaaaggctatggggaaatgtttttgggtagatggagaagggagagggtggcaaggaggagcaggggaaagacgatgaggaaaacagtttttgggtagatgaagggggaaaagaggttggtgagcggcaggagtgaggagaaggttttgggaaaagaggggggaaaatatttttgcttagatgaaggagcaaaagatggtgatgagagtgggacggggaaaaagaaggtggccagggagaaggggaaaagacggtgggagaaaacagtggggagagtgtttgggtagatagatggggaaaaggctggtgagcgggagagtagagaaggctttgcgaaatgacggtgggggaaaaatggtggggaaaaagttttggggtagatggaggaagaaaatgggtggcgagggggaggagaccaaaggcggtcgggaaaagaaggtggagaaataatggtgagagacaaaggttttgggtagattttttaaaatcagattatttgtatttttgcttttgagtagtttg

SEQ ID NO: 24780 - DNA, 1226 bp, Artificial sequence
  DNA replication origin
acacactcatcgtcgtgcttggagagtaattgtcattctgaaaggagtggaggaagttccctcctagctcgccgtcatctcgaggggtgcctggaagattgctaatactattcacgttgttaggagaattttttggaagtcatttatgtcgcctgaccctaacaatccgttcatgtggtgtggctccatgccacccatgctgcccattggaccgtccaagctgggacccatcaggaagttggaccggctgcctccaggtggcaccagattaatcattgtgtagatgttgtcgctggaatttgttgaatctgagggactgggcatagtgggtgttcctggagggccgccaccaccagggggtgtcccacataggtaccaggtgatgaggaggagtatggaattgagttagcactgttaggattgggccagggtctgccagctcccgggcccatgttaatcccgggcgtggcggggccgagggaattgggtggtggtctcatgccactgccgtaattctgtgggctgggactcatgggccccatgccttggggagggttcattctctgcattgatcctcccatgtgggggtggccttgctgtcgtgtgggatccatggaattgggcagcaatggctgtttcccaggaactcctccggaggaggctggtttcccattctgatcggggggcctggggccgcctgcatatcgcggtgacataaaaggctgactgtggggtcccatcatgctgctaggattgtgaggtggaggctgtgcatgcggcgagggcagtgaccccggaggaccctgaaagaaacctggcgggactcggcctcccggcatcccatcgttggggggaatgttgccaagcacggggctccgggcagctgctgcactagaatcaggaaaggcttttgcttcacttgaatgttcacaagtgtctctccttttaggagctgcacagtaaaggtcccaaaatacacaccaccacgagtgcaaaaaccgaggctgttctcccaacgtgatgtttttttttttcccagagaatctccgataagaaggtctgtgcagatttctgtgttcctacctgcagtaaatattcgtagacgtataaagctaacttttccccagcctgcccgtccgagggcaccaacgagcctttgtctttggcaaacatggtttgcagggaagagggctccaagcctcgccacagccgccaccgccccggct

SEQ ID NO: 24781 - DNA, 1032 bp, Artificial sequence
  DNA replication origin
atgtctacttctttgtagcaaacacagtaacaatctgatctctctttcttttccccacatttctcccttttctatttgacaaaaccgccatcgtcatcatggcccgttctcaatgagctgttgggtgcacctcccagacggggcggcggccgggcagaggggctcctcacttttcagatggggcggccaggcagaggcgccccccacctcccggacggggcggctggccgggcgggggctgccccccacctcctggacggggcggctgccgggtggagacgctcctcacttcccagatagggcggctgccaggcggaggggctcctcacttcccagactgggcggctggtcagagacgctcctcacctcccagacggggtggcggcggggcagagacactcctcagttcccagacggggtcgcagccgggcaaaggtgctcctcacttcccagactgggcggccaggcagaggggctcctcacatccccgacgatgggcggcatggaagagacgctcctcacttcctagacggggtggcggctgggcagaggcgctcctcacttcccagactgggcggccaggcagaggggctcctcacatcccagacgatgggtggccaggcagagacgctcctcacttcctagacaggatggcggccgggaagaggcgctcctcacttcctagacgggatggctgccgggcagagatgctcctcacttcccagacgatgggcggccaggcagagacgctcctcacatcccagacggggtggcggccgggcagatgctgcaatctcggcactttgggaggccaaggcaggcggctgggaggtggaggttgtagcgagccgagatcacgccactgcactccagcctgggcaacattgagcactgagtgagtgagactccgtctgcaatcccggcacctcgggaggccgaggctggcagatcactcgcggtcaggatctggagaccagcccggccaacacggcgaaaccccgtctccaccaaaaaatacaaaaaccagtcagg

SEQ ID NO: 24782 - DNA, 901 bp, Artificial sequence
  DNA replication origin
tcgtctgggatgtgaggagcccctctgcctggccgcccagtctgggaagtgaggagcgcctctgcccagccgccaccccgtctaggaagtgaggagcgtctcttccatgccgcccatcgtcggggatgtgaggagcccctctgcctggccgcccagtctgggaagtgaggagcacctttgcccggctgcgaccccgtctgggaactgaggagtgtctctgccccgccgccaccccgtctgggaggtgaggagcgtctctgaccagccgcccagtctgggaagtgaggagcccctccgcctggcagccgccctatctgggaagtgaggagcgtctccacccggcagccgccccgtccaggaggtggggggcagcccccgcccggccagccgccccgtccgggaggtggggggcgcctctgcctggccgccccatctgaaaagtgaggagcccctctgcccggccgccgccccgtctgggaggtgcacccaacagctcattgagaacgggccatgatgacgatggcggttttgtcaaatagaaaagggagaaatgtggggaaaagaaagagagatcagattgttactgtgtttgctacaaagaagtagacataggagactccattttgttctatactaagaaaaattcttctgccttgggatgctgttaatctataaccttacccccaaccccgtgctctctgaaacatgtgctgtgtccactcagggttaaatggattaagggaggtgcaagatgtgctttgttaaacagatgcttgaaggcagcaagctcgttaagagtcatcaccactccctaatctcaagtacccagcgacacaaacactgcggaaggcggcagggccctcttcctaggaaaaccagagacctttgttcacatgtttat

SEQ ID NO: 24783 - DNA, 1116 bp, Artificial sequence
  DNA replication origin
cgggcagaggcgcccctcacctcccggacagggtggctggccgggcggggggactgaccccccccacctccctcctggacggggcggctggccgggcggggggactgaccccccccacctccctcctggacggggctgctggccgggcggggggactgacccccccacctccctcctggacggggcggctggccgggcggggggactgacccccccacctccctcccggacggggcggctggccgggcggggggactgaccccccccacctccctcctggacggggtggctggccgggcggggggactgaccccccccacctccctcctggacggggcggctggccgggcgggggactgacccccccacctccctcccggacggggcggctggctgggcggggggactgaccccctcacctccctcctggacggggcggctggctgggcggggggctgaccccctcacctccctcccggacggggtggctgtcgggcggagacgctcctcacttcccagacggggtggctgccaggcagagggtctcctcacttctcagatggggcggccgggcagagacgctcctcacctcccagacagggtcgcggccgggcagaggctgcaatctcggcactttgggaggccaaggcaggcggctgggaggtagaggttgtagcgagccgagatcacgccactgcactccagcctgggcaccattgagcactgagtgaacgagactccgtctgcaatcccggcacctcgggaggccgaggctggcggatcactcgtgattaggagctggagaccagcccggccaacacagcgaaaccccgtctccaccgaaaaaatacgaaaaccagtcaggcgtggcggcgcgcgcctgcaatcgcaggcactgggcaggctgaggcaggagaatcaggcagggaggttgcagtgagcccagatggcagcagtacagtccagcttcggctgggcatcagagggagaccgtggaaagagagggagaccctggggagagggagaccgtggggagagggagagggagagggagagcgataaatttcaaatattcttgtttttttttttttttgagacagaatctcactctatcac

SEQ ID NO: 24784 - DNA, 1294 bp, Artificial sequence
  DNA replication origin
ctcccggacggggcggctggccgggcggggggctggcccccccacctccctcccggacggggcggctggctgggcagaggggctcctcacttcccagtaggggcggctgggcagaggcgcccctcacctcctggacggggcagctggccgggcggggggctgacccccccacctccctcccggacggggcggctggctgggcagaggggctcctcacttcccagtaggggcggccgggcagaggcgcccctcacctcccggacggggcggctggccgggtggggggctgacccccccacctccctcccggacggggcggctggccgggcggggggctgactcccccacctccctcctggacggggtggctggccaggcagaggggctcctcacttcccagtaggggcggctgggcagaggcgcccctcacctcccggacggggcgtctggccgggtggggggctgactcccccacctccctcccggacggggcggctgccgggcggagacgctcctcacttcccagacggggtggctgccgggcggaggggctcctcacttctcagatggggcggatgctgggcggagggtctcctcacttctcagacggggcggctgggcagagacgctcctcacctcccagacggggcggcggggcagaggcgctccccacatctcagacgatgggcggccgggcagagacgctcctcacttcccagacgggatggctgccaggaagaggcgctcctcacttcctagatgggatggcggccggtcagagacgctcctcactttccagactgggcagccaggcagaggggctcctcacgtcccagacgatgggcggccaggcagagacgctcctcacttcccagacggggtggcggccgggcagaggctgcaatctcggcactttgggaggccaaggcaggcggctgggagatggaggttgtagcgagctgagatcatgccactgcactccagcctgggcaccattgagcactgagtgaaccagactccgtctgcaatcccggcacctcgggaggccaaggctggcggatcactcgcggttaggagctggagaccagcccggccaacacagtgaaaccccgtctccaccaaaaaagtacgaaaaccagtcaggcgtggtggcgcgcgcctgcaatcgcaggccctcggcaggctgaggcaggagaatcaggcagggaggttgcagtgaaccgagatggcagcagtacagtccagtttcggctcggcatcagagggagacagtggaaagagagggagagggaga

SEQ ID NO: 24785 - DNA, 996 bp, Artificial sequence
  DNA replication origin
cagccgcccctactgggaagtgaggagcccctctgcctggccagccaccccgtccaggagggaggtgggggagtcagccccccgcccggccagccgccccgtccgggagggaggtgggggggtcagccccccacccggccagccgccccgtccgggaggtgaggggcgcctctgcccggccgcccctactgggaagtgaggagcccctctgcccagccagccgccccgtccgggagggaggtgggggggtcagccccccgcccggccagctgccccgtccaggaggtgaggggcgcctctgcccagccgcccctactgggaagtgaggagcccctctgcccagccagccgccccgtccgggagggaggtgggggggccagccccccgcccggccagccgccccgtccgggagggaggtgggggggtcagccccccgcccggccagccgccccgtccgggaggtgaggggcgactctgcccggccacccctactaggaagtgaggagcccctctgcccagccaccacctcgtctgggaggtgtacccaacagctctttgagaacgggccgggatgacaatggcggttttgtggaatagaaaggggggaaatgtggggaaaagatagagaaatcggatggttgccgtgtctgtgtagaaagaagtagacatgggagacttttcattttgttctgtactaagataaattcttctgccttgggatcctgttgatcggtgaccttacccccaaccctgtgccctctgaaacatgtgctgtgtccactcagggttaaatggattaagggcggtgcaagatgtgctttgttaaacagatgcttgaaggcagcatgctcgttaagaatcatcaccactccctaatctcaagtacccagggacacaaacactgcggaaggctgcagggtcctctgcctaggaaaaccagagacctttgttcacttgtttatctgccaaccttccctccactattgtcctatgacc

SEQ ID NO: 24786 - DNA, 1914 bp, Artificial sequence
  DNA replication origin
ctgtcgcccaggctggaatgcagtggcgcgatctcggctcactgcaagctccgcctcccgggttcacgccattctgcttcagcctcccaagtagctgggattataggcgcccgccaccacgcccggctaatggctaattttttgtattttttttttttagtagagatgggggggggtttcaccgtgttagcctggatggtctcgacctcctgaccttgtgatccgcccgcctcggcctcccaaagtgctgggattataggcgtgaaccaccgcgcccggcccggtttcgttttgttttttttttttttttttttttccaaaaatgggcggaggagagtagtctgaattgggttatgaggtcccctgcggggtacctcacctcagccattgaactcacttcgctggccgtgagtctgttccaagctccggcaaaggaggcatccgccgggcccctccccgaagggcggggtccacggcatctcctgcccagtctgacctcgcgcggagccccgttctctgggaactcacctccccgaagctcagggagagccctgttagggccgcctctggccctagtctcagaccttcccaagggacatgggagtggagtgacaggacgcactcagctcgtggccccactgatgagcttccctccgccctatgggaaaaagtggtctcatacagaacttataagattcccaaatccaaagacatttcacgtttatggtgatttcccagaacacatagcgacatgcaaatattgcagggcgccactcccctgtccctcacagccatcttcctgccagggcgcacgcgcgctgggtgttcccgcctagtgacactgggcccgcgattccttggagcgggttgatgacgtcagcgttcgaattccatggcggcgcggcggcgacggagcaccggcggcggcagggcgagaggttcggagctcaatatcgcgggacggcatgcggggggcgggcagtcagaaaggaacgatgccacctactgtgacccccttccccttccagctccctataacctgcacttggctaccaaaccagttggggtgctaaattttgtaaatttcggttttcagagctttggggattacataattgtgcataaagccttgcggagctgtaacaactaatgtgccagtactgttgttaatacctaatgtcatccaatttacaaaaagtaattgtaaggcacaccattattttatacacaacaaaggataagcactgaaaatggtgaactgtgattcactgcttatgtcatccattgtaagatgcatcccagttccagagagtaaaatgcgagtcttagacctattgagatacggtattatgtgtataatgttcttaaatgcataggtgcaccctataaattaggttctattgtacttctctagaagtacagtattgtacaatattctaatattggagtaagtgaagtaggaagagatcaaatacttctccaagtttccacagagaaaagcagcagagctaggctctaaattaggcacagacccttgagcacttaactaacctttatcccatacggcctcatgtatgaggtgggtatttgggggacattgggacacaagtaaaacagataagcaggcctcaatctatgagcttacaagactcctgggactcccttttattttgttttatttcatttggctagaatagcaatttaggaagaattacacagactgttacacaaaagtagtgtgggacagttgttattgcctctgtaaacttagaaaattatcttaaaccggcggggtgaggtggctcacgcctgtaatcccttgggaggccgaggagggcagatcacttgaggtcacgagttcgagaccagcctggccaacatggtgaaaccctgtctctactaaaaatacaaaaa

SEQ ID NO: 24787 - DNA, 1914 bp, Artificial sequence
  DNA replication origin
tctgcccaccttggcctcccaaagtgctgggattacaggcgtgagccaccgtgcctgaccataatttaattttaaatataaacacaaggcattttatgcgtagttttaatacacactgaactttccagggatgcaactaccatgaaaatcatgggatgatcataccttgttttgtttgaaaatctgccaaaagctatttagtattctggaaaatcataccacatcagtaattctgttcatggtatttgaatcgccattataatgcctgtatcattctgcatttgtagctgttacattccaggtgattttatatacagatgcatatatctgagtaccacattgtgtcttcttgaatgttatacacaaacatttacatatctaaacatatagtatttaattataagtcatattctttctagtattccttttatctcccatccaagtactaaccaagcccaaccctgctcagcttccaagatcagaggagatcgggcgcgttcggggtggtatggccgtagactcctttatatctctttaagagattttactaattttttggccaggcatggtggcttatgcctgtaatccaagcactttgggaggccaaggtaggaggactatttgagccctggaggtagagagcctgggcaacatagcaaaaccctgtctctactttttgtctttaaattttggtttaaaattgtgcgtgggggtaagttacattctttacgaattatgtttcagaaaaataaaaagagctttaaaatatttgttataaaaaggaaatgttttagttcaggttgctataacaaattaccgtagaccgggtggcttaaacaacaaatattatttctcacagttctagagaatggaagtccaagatcagattgccagcatggtctgcctctgaagatgagggtcttccttgggattgcagatggctgttttcttgtatcctcatatcgtggaaaaagagctagctagctcttccgtctctccttatgaggccaccaatcccatttatgagtattctaaactccatgacctaatgacctcccagagatcccaccctaaataccatcgcattgggattagggtttcaatatataaattttggggagacacaaacataaagaccattgcagggagtgttgggactggtggcaatagaggtttctaaggaaggaaaggggtactggctcagttaatagaggacagaatgccctcaattctgagcggaagctcagctgttacctgagactcaagggtacctctctaaggaaagcaatgatattttccagaagacagctaatctgctttatataaaggcagaaagcatatttctcctgctactatgtttggtcctctctttatgaagctaggattattaacctaagggtcacttgtctctttcctaagcctggttccatcttcctggaaagggttcagcattaatcattcaggatggctccagatagattctgtgtgatccacggatctctcttctgatcaacaggaggggaggcacttgctctcagttcagcgaactttgattgactgatgtctacacttggttacaggcggttgctttccgctttccgtctccttttaaggagttcctcaaaggaactttaggatgaattgagtctgaccgtctttgatattaggaaggagaggtgtacagctaggcagcgagcatgctaaaatcttttccaggaaacggtgtttgaagagttaatgggagaaaaaaagacgaaaattagccagaggagacgaatttggtagagggggaagccctagggacaggagaaaataggaccagaaagggaaaaaaaatagaaacaataacaaactaaactcgggccccagaaaaggcggcaggggtcctgggcattcgcgtcgcagccctggcat

SEQ ID NO: 24788 - DNA, 933 bp, Artificial sequence
  DNA replication origin
cgtgctgctagacggaacggggcggggcaggccactggttgcggagtgagctgggcgcgcggcgcgcaggcgccctggggacccggtagcggcggtggcggtggcggcggtggcggtggctgcggcgacggcagaggcgaagggagccggatcgccgacctgagcgggaggcggcggtggcggccatggcggcagatggagagcgttccccgctgctgtctgagcccatcgacggtggcgcgggcggcaacggtttagtggggcccggcgggagtggggctgggcccgggggaggcctgaccccctccgcaccaccgtacggagccggtaaacatgccccgccccagggtaagccggggcgggtccgaggtgctccccggggtactctgaaagccggggagggggcgggaccgagggcggaggcgggtcccagtcgccaggtgcgggactgctgcacctgtgactgggcgaggcttccttccctccgtaatcgcgaccacagcctagggacggaagggggttctgagcaacctgatagaagtgccaattatgagaagccctccgagcttggtcagagggttgaagatcagaaggacttccctaccaccgtggagcatcagtgggggtgtaagtgatcccagcccttctatttgcttcctctccagcatttcccccgtttcccgaggggcatccagccgtgttgcctggggaggacccacccccctattcacccttaactagcccggacagtgggagtgcccctatgatcacctgccgagtctgccaatctctcatcaacgtggaaggcaagatgcatcagcatgtagtcaaatgtggtgtctgcaatgaagccaccgtgagttacacatatctatgaaatgggccctgtttcctggatcctctttctgatgtcttggttctagaccctgacct

SEQ ID NO: 24789 - DNA, 1106 bp, Artificial sequence
  DNA replication origin
cctcacttcccagacggggtggcggccaggcagaggctgcaatctcggcactttgggaggccaaggcaggcggctgggagatggaggttgtagcgagctgagatcacgccactgcactccagcctgggcaccattgagcactgagtgaaccagactccgtctgcaatcccggcaccttgggaggccaaggctggcggatcactcgcggttaggagctggagaccagcccggccaacacagtgaaaccccgtctccaccaaaaaagtacgaaaaccagtcaggcgtggtggcgcgcgcctgcaatcgcaggccctcggcaggctgaggcaggagaatcaggcagggaggttgcagtgagccgagatggcagcagtaccgtccagctttggctcggcatcagagggagaccgtggaaggagaccgtggagggagagggagagggagagggagagggagagggagagggagagggagagggagagggagagggagcaaactcactttttcatccttatgatttgtctatatattcttttggggtttctaaacacagacactgtttcatgggtgaatcaatcagagttttactttttcttgtctggcactggagctctttctttgtcctaccctacagcattggctgagacctccagcaccataacttgtagaaccgcagatcaaggcactttcaggattcacattcagtgaggtttgccagagttacttctgctcctctagcaattgatcagataacgctttttcattattcttgttgtattcgctggatacacgctgcttgagctttggagcctcgcagtggtgtgtacgtgtggcgggggctggcctgtgagctcctctccgctgctgtccttgctgggttagggactgaggctacgttggcctcaggagctggtgagtgctcccttgtctttctggaagagttttgtggacgtgcattactttccctgtaaatggttggtagaatgctgtggtgatgctgtctgcgcctggagttctttgtgagagaaggttgtaatgacagattcctttttttttttttttttttgagacggagtctctctctgtcgcccaggctggagtgcggt

SEQ ID NO: 24790 - DNA, 1297 bp, Artificial sequence
  DNA replication origin
cggctggccaggcggggggctgatccccccacctccctcccggactgggcggctggccgggcagaggggctcctcacttcccagtaggggcggccgggcagaggcgcccctcacctcctggatagggcggctggccgggcggggggctgacccccaccacctccctcccggacggggcggctggccgggcagggggctgaccccccctcccccctcccggacgggacggctggccgggcagaggggctcctcacttcccagtaggggcggccgggcagaggcgcccctcacctcccggactgggcggctggccgggcggggggctgaccccccccacctccctcccggacggggcggctggccgggcagatgggctcctcacttcccagtaggggcggccgggcagaggagcccctcacctcccggacggggcggctggccgggcggggggctgacccccccccacctccctcccggacggggtggctgccgggcggagacgctcctcacttcccagacggggtggctgccggacggaggggctcctcacttctcagacggggcggttgccaggcagagggtttcctcacttctcagacggggcggccgggcagagacgctcctcacctcccagacagggttgcggcccagcagaggcgctcctcacatcccagacagggcggcggggcagaggtgctccccacatctcagacgatgggcggccgggcagagacgctcctcacttcctagatgggatggcggcggggaagaggcgctcctcgcttcctagatgggatggcggccgggcagagacgctcctcactttccagactgggcagccaggcagagaggctcctcgtatcccagacgatgggcggccaggcagagacgctcctcacttcccagacggggtggcggccaggcagaggctgcaatctcggcactttgggaggccaaggcaggcggctgggagatggaggttgtagcgagctgagatcacgccactgcactccagcctgggcaccattgagcactgagtgaaccagactccgtctgcaatcccggcaccttgggaggccaaggctggcggatcactcgcggttaggagctggagaccagcccggccaacacagtgaaaccccgtctccaccaaaaaagtacgaaaaccagtcaggcgtggtggcgcgcgcctgcaatcgcaggccctcggcaggctgaggcaggagaatcaggcagggaggttgcagtgagccgagatggcagcagtaccgtccagctttggctcggcatcagaggg

SEQ ID NO: 24791 - DNA, 948 bp, Artificial sequence
  DNA replication origin
ccgggagggaggtggggggatcagccccccgcctggccagccgcccagtccaggagggaggtggggggtcagccccccgcccggccagccgccccgtccgggagggaggtgggggggtcagccccccgcccggccagccgccccgtccgggagggaggtggggggggtcagccccccgcccggccagccgccccgtccgggagggaggtggggggatcagccccccgcctggccagccgccccgtccgggaggtgaggggcgcctctgcccggccgcccctactgggaagtgaggagcccctctgcctggccagccgccccgtccgggaggggggagggggggtcagccccccgcccggccagccgccccgtccgggagggaggtggtgggggtcagccccccgcccggccagccgccctgtccgggaggtgaggggcgcctctgcccggccgcccctactgggaagtgaggagcccctctgcccggccaggaccccgtctgggaggtgtgcccagcggctcattggggatgggccatgatgacaatggcggttttgtggaatagaaaggcgggaagggtggggaaaaaattgagaaatcggatggttgccgggtctgtgtggatagaagtagacatgggagacttttcattttgttctgtactaagaaaaattcttctgccttgggatcctgttgatctgtgaccttatccccaaccctgtgctctctgaaacatgtgctgtgtccactcagggttaaatggattaagggcggtgcaagatgtgctttgttaaacagatgcttgaaggcagcatgctcgttaagagtcatcaccactccctaatcttaagtacccagggacacaaacactgcggaaggctgcagggtcctctgcctaggaaaaccagagacctttgttcacttgtttatctgctgaccttccctcca

SEQ ID NO: 24792 - DNA, 885 bp, Artificial sequence
  DNA replication origin
gagatagtatgggtgttgcagtttttttttgagaggggctacccaggagcagatcattagcatattgaaggacagtggcccgttttagggataaggtacagagattgcgagcaagggccagtctaaaaaggtgggggctgtctctgaaaccttgaggtagcacgcaccaggtgagctgacgtgaaaggtgggtgtcggggttttcccacataaaggcaaagaggttttgggaatcagggtgtaaaggaattgtgaaaaaaagcaacctttaggtttagaagagaaaaatgggtggtattggagggaactgaggaaagtaaagtgtatgggttaggaactgctggacatactgggagtacagcttggttaatgagcctgaggtcctggactgcgtgattaagttccatctggctttttaacaggtagaactggtgtgttaaaaggggggtctgttgggcggagtaggtgacaggcaaggaggtgagaaatgataggctttaggcctatgagagctgttagggggatgggatactgcttctgtgataggaactgggctccttaagggtaacgtggacggggctgtggtgttctgcgactgagggtgtggaagtatcctaaacagcagggttaactacggttgggggataaggaaaagttgcatgttttaatatgggaggttggaggagtagaagaaagttagaagctccggaggggtctgggttgatgcgttgggtaccatggagaacgtggaggtggagagtagtgtggagttttgaaaggatgtctctgcctaggagtggagttgggcaagagggcaggactaagaaagagtgagtgaaggaaaaggtgttcagggagcggaacagtggaggggggctcggggtt

SEQ ID NO: 24793 - DNA, 1130 bp, Artificial sequence
  DNA replication origin
cttgagtcctgcaaggagacacacaattatacggtcttgacagcagcgtccaggggccccatcttgataatcctagtgggggtcctggctgaggactgcctttgtaccagtgggttgggcagcccagtcattaagtgtatcagcatgtgcctgagctagggcccagatatggtcttggttttctggggtgagggtggaagagagggtaatgtagaggtcatgccaagctagtttataagactgggtaaggtactgaaacttcctaatataagaggtagggtcttctggaaatgagtcttttgttaatttgagaatgatcagtgagggagaagggaacatgaattttaacaatacctttagctcctgctacttcccgaggggggcactctagcactggcgctgaagtaaggttgggacatgggccaaagatgatacccaagcaagtatgggtgggagagaaggaagaagccagaagtggttggttcctgctgagggtttgaagggggaaggggggttgagttgataggcagtggaggatagataggggcttaaggtgatgggatgggtttataggcctcaagagagggcagtgaggaaagagaatgggtacaggcaatgctagagttgacctgagaaggggggcggggtgtaggaagggaagtgggtacgtttggaggtgatgccatctgggaagatggcagctgagaagacaaagaagaggcttgggaggttaaagaagacggttgagagggaaaggtaggggctgggaggggtggacagcagtctgctggacccaacgaggaaaaagaggtagggtcaggagaagaaaggcgatcagggcggcaagaatggaggagaaggatttgaacaggtaagcaagaattgtagagttcgggttgtgatctgagtgcaaaaaggcctggacataaggaatttctccccatttctccagtcgttggcaataactgcttaaatcagttaaaactgtgaagtcgagtgctccatttgcaggccatttggacccattatccaattcatattgtggccagactgaattacaaaaaagacaaggtgcttagggcagatatcttggctgaggcctaaggtttgcaggtttttttatgaggcag

SEQ ID NO: 24794 - DNA, 1030 bp, Artificial sequence
  DNA replication origin
cgatggcgcttgccttcgcgggccgtcgggggagaacgggagaagattgtgggaccgctctcctctccctttctccactcgtgggacctacacggagactgagtagaggagagaagcgacggcaccaatctttgtgtttgtttttaaattgtggagggaaacagccatgctctgctaccctcctcttactggagagctgtcaaaaattttggggatcccctattcccccgcgtttagtccccctgcagatagaaaattgaggccaaatgtagtaactaactggggcaaggtcacactgggagtggcagagccgggattcgaatccggaggttctgacagggccaccctcttacctccacatcagcacttccttctctcctccgcgcagcctgaactgatgcccttgtagcctatattgattccggctcgagcctagagaggacgtgttctctggacttaggggtagacagacactggggagggttagtgacccgaggaggttgatgaccctgggagtctgggtcttggctgaggctttccgtccctgaaagaccccaggtctgtctcccatgtcattcacctcgttgctgtgttttctcagaccccagagtcagaaggagtgagaaccctgacccctaatcccactgcatccagccaataggagcccagtaagtgaccccaccccgcaggctgcaggctccttcctgtgcaggtctgtccaggtgctctgctcctcacccactaatgttgaacttgcggagtttattcagagttgggaggaagggtcttgggaggaagggaggcattgggttggttggacagatgtcccttttatgttgttttccccacctcccccattggtcatgttgctttggtcatttttagccccctttgagctgccgactttggggctttaattgaaggtcatggtcaattgtgaactctcacagtcccgtcttttggtaccctgtcctttagaatactcagtcactgagctacaagtttcactccctacctgagagtgtggggt

SEQ ID NO: 24795 - DNA, 1308 bp, Artificial sequence
  DNA replication origin
gcaattgcactctggctccttccttcgcccccagactcagtggtgggaaccggtagtggggagacgaacccgggatactgacaccccacgagttcgactccccccgcccgaacacagagaactagattaagaaaggaggaggtgggcgggaccgccgctgaggaggcgggggtctcgccggctggcaggggcaggtgtgctggcgccgaaagggggcacgggggaacgtcgagggcgcaggagttccgactccctcgtgcccagagtcctggtacctctcctctctttgctgcgtcccgacgcctgctctccggctgctccgggagaagttggacaacaaggcggggaggtgggggcggggaatgcggggggccgctataaatagagggcgatcgcgggcaggcggggggtggggagaggatggccaacagggactctggggtcaatgcctcaaggggcgcgggggaggggccggggacccccagaggctctgactcctgggtaaacaggcgcaggggcggagttaaccctgcgggggtggagtaggggcttggggaggacgcagtgtcctgggctgggacccaagagaccctgtggcttcgccgctaacccctcccagtccggcccagaataggagaccagctcaggcccgctgaatcgcaatgcccgggggatggtctcagggtctgccgcgtccctctcggtgcccgagtgggtttgccactgtagactttacacacacacgcacacgcacacacacacacacaccctggaatgagctctccttgtgcccctcggaggaaggctccctggaatgagttagttgattaaaaatgtggcttaagggaattcgaagttgtttaggcaaaaggaaacctgactgaatttctccccacctgccccccttgtagctcccccaatcccaggatcatatccaccccaacccccttcagactggttcctgagttgccatttcgggggctgggcgccaggccagtcaggaacaatggccaatggaacttgagctgccaactgcaacaccagcaccgactgcccccccaagacccccaagtttccctgccccctcctgcctgggaaccaccctcccaccaccaccctcaccacccgcaatacccctcccatccaaggaacatcaatgcccctttcatccccacttggcagggtctactggaaagaaggagaggccaagagggaggaggtgacccacagtaggaaaactggtcgggctaaaacccagccttcaacaaccccaaatctaaggagctccccctacatcccccaatttgg

SEQ ID NO: 24796 - DNA, 1391 bp, Artificial sequence
  DNA replication origin
ttaggggagagacccaagggaggatgggggaggaggcggaggagaggaggaagaaagggtgagggcaatacccggtggggacagagctaaacagtcgggcagacagacaaatcgaagaaggggggatgggagggaggagagtcccagaggggccgaacagtccgaggcaggctcgggaggcaccaggctgaggacttgggggcccggagcgggctgcgcgaaggccgaggggacccagggggctgcgacgctggactcaccatggctcggcgccgggccgcgtccgacgcttggtcgggcgggcggggccgggcgcgccaccgcctccctcccgccgctcgtgtctcgccgggtctggctaagggacagctccggccgcggtggcggctcggcccgctccggcttccaggccgcggggccccgccagggagggccgagacggccgcccctccccgccccgcccttcagcgcccgcccccgcctccgcgcgggaccccttgccgggactctgtctcccgcgccgagatctctgccgttccccgggcgtccccagcctatccgtcccgttcaccggcaaccttctttcttctccgccccgccctccagcgggtaacctcgaccctgaccctcggaggcccgcccagccgaggatgcccctcttttcccgccacggcctcgctccccgcgggatcagtttagcctcggcaagggatgctccaaaggctggggcgtgcgtgaattcccttgggccgccccttcccagaactggggtcttcctgcggctggaaagcctccccgctctaactcgcccgggatcctcttctctcaacggtttctagactttggcaggacccagggctcaaatgagaccttcaggcccctgcctgcctagcagagagcggagggccgggaaatcaggggattccccaaccccccgggggcttgcccgccctcctttccctccatctcctcgggcctggaatctctgggctgacaatgggctcctctgtgttgcctggggaaggcgggagtgtgcgggagttagggagcagcgaaggcttgggatagggggcggacatcctggccaagggggcagggttcccggatcgggatgcttatgtaggggcgtgcatttcgccggacattttctgagttctctcctccgtggcccttcccttccgcatccctacctctctattcggctagaagagggaaggcaccaggcctccagttcgaggattcggtactggatgccagccccttccttctgttggggtggctatagagtcccgcagggccgctagggctcgtggccatgggaatgggtgggtatctggcgcaggagacaaagcagggtgggctagttacgaaagttctagcctcactccctc

SEQ ID NO: 24797 - DNA, 849 bp, Artificial sequence
  DNA replication origin
tttgcagtgggcgctctctctggcagtgcccactctcgcagcggtgcttcagagtactctgcagtgaaagttcccagggcagtgttcactcctgttggtgtgggcttctccttagcgtaccctccagcgtccagcgccccaagttgctgctgccagggtcccctagtccctgcagggagctccggctcgtgttccctcccctctgtagcaggagtgccctgaggcagcccttcagttccctgcagcaagagctctggggcactttcctcctccgcaaactctggtcggctctggcagtgtcacgccccctggtactgtgagctcccccccaagcacccccaactatcctgaggcagctctttttctctgcgggaatttccctctttggccatgccccgggacccggcccagccacagctgtggccagtcccctagggccggatgggtgggcctgcctcaccgggttggggacagggatggaaaatggtggttccatgcaggtcagttctcatgacccgaggggccgggcctcttccagggtcgctgcaggaccaacccgcaggggtctcccgcgggtaaggagctcggaccaggagggggagggaagctccaggaaaggaaggcacaggtcaggacagaggagggcggggagcggggaggtgtgtggattaggggagagacccaagggaggatgggggaggaggcggaggagaggaggaagaaagggtgagggcaatacccggtggggacagagctaaacagtcgggcagacagacaaatcgaagaaggggggatgggagggaggagagtcccagaggggccgaacagtccgaggcaggctcgggaggc

SEQ ID NO: 24798 - DNA, 1652 bp, Artificial sequence
  DNA replication origin
gaaggcagaatagtgatgcacggccactcacacaggcttcctgctggaccttggcaagcaggtgcttggctggtaccaggaagtccagcgtgtacctcagtgcgtcctcccgataagtcctctccaccacctggaacacctggcccaacagggtgggggctgttgcctcaaagggtggatacagggcggcgagagtgctctgcacacagtcctccactggctcaggctcctgtagagataggaccaggctacagatccctagagatcacccaatcatggctccttgggagctgcactggtctggggttggctgtgttctccaaagccccgattgtacaatgtgggcaaaaagtgagcactcaggaaatgctggctgatgagcccagaacaggagtggggctgggccagagtgcacaaacctggcagggcgctcaacactcccgctctgagaccttggctttggagatccagggagaatttgttgtgaatgcccctgatcagggctgttccgggtgctcgtgagttggggtgattgcatagatctttcccaggagagaaaagacaggcttctgggctatcaggggactgagcttatggctgagaactcgaggggatgagggagatttccacacagccatcctgcaaatcccttcccataagacccaccatccagggctccccatcttaggtggaggtgccatcacccacaattatgtcccagagatgatcatttggtgaaagagagatgctcatttatatgctagagatggtcatttggtggaaagaggaggatggaaagactgtctgtgactgtcttgggtctttctagcatccctcttccttctcccacagtggctctgaagcaatcacccaatcttagagcatgtgggattggattacaaagaatcgggtgggggcagttgaaagagaaaaaagtcacaagaggaacttgtgggaagggaggaggaggccttgatggtgcgcattcgagctgatcttttctgattccagtgggacctctctctgccaacctccactaggagtctcaaaaagactcagccctgcttcatccagactcccctccctaagtgagtcaatgagacgtctttctccaactcctaacctaaacaaccaccccttgggctattcctttgcaaacttctttttcaagacagtctttgaagtcccttttactggaatttttttttcttttttgctgtaaatggggaaggggatactcaatgcagcctttaccttggtctctaccttccctacccccataccttgcctttgccataaaacaaaatagcttatttttctctgagctccatccagagttgcccgtttgtcttgaccgtctgggaagttagggcaaccactccagagacgggacattcagtgcgtcagcgcgcagacccggccccaaggtgtgtgggcgagcagacagacccccagtgttcccgggaccaggcggacgcagtgcgcgtgggtggggggaaggtggagatgggcgggggtgaggcagagtggggccgtctgctccaaggcagggagtgcggagctagggcttgagcagcgaggcagctgcaacccattaggggcggtgagctcatggctgagcgagagtctcagccacaggaaacggccgcggc

SEQ ID NO: 24799 - DNA, 907 bp, Artificial sequence
  DNA replication origin
ggatggagcacgcccacccggcgaggggagcagcaccggagcctcccctgagtctcccccaggagctgaggctgtcccagaggcagcagtcttggaggtgtctgagcccccagcagaggctgtgggagaagcctccggatcttgccccctgaggccaggggagcttagaggaggaggaggaggaggccagggggctgaaggaccacctggtacccctcggagaacaggcaaaggaaacagaagaaagaagcgagctgcaggtcgaggggctcttagccgaggaggggacagtgccccactgagccctggggacaaggaagatgccagccaccaagaagcccttggcaatctgccctcaccaagtgagcacaagcttccagaatgccacctggttaaggaggaatatgaaggctcagggaagccagaatctgagccaaaagagctcaaaacagcaggcgagaaagagcctcagctctctgaagcctgtgggcctacagaagagggggccggagagagagagctggaggggccaggcctgctgtgtatggcaggtgagatgacacggagtgaggctcatggggcaagggccaaagcaggtcgggcctatgggagggggcaggaggaggagcagggttaggctgggagcagaacaaccagaaccatcttaacttcagtcccatgtttctgtctgtgtctgtgcaggacacacaggcccagaaggccccctgtctgacactccaacacctccgctggagactgtgcaggaaggaaaaggggacaacattccagaagaggcccttgcagtctccgtctctgatcaccctgatgtagcttgggacttgatggcatctggattcctcatcctgacgggtcagtgggcatcagtgggtgaagggaaacaggactg

SEQ ID NO: 24800 - DNA, 1444 bp, Artificial sequence
  DNA replication origin
tccggctcgctcaagtatcacctacagcgccaccaccgggagcagaggagcggggccggccccgggccacccccggagccaccgcctccttcccagcggggttcggccccgcaatctggagccaagccgtctccgcagcctgcgacctgggtggagggcgcctcaagtccccggcctccttctagcggtgctgggccggggtcccgtcggaagcccgccagccctgggaggaccctgcgcaacgggcgaggcggtgaggccgaacccctggacctgtccttgcgggcagggccgggaggcgaggccgggcctgggggtgccctccaccgctgcctcttctgcccgttcgccactggagccccagagctcatggccttgcaccttcaagtgcaccacagccgccgggctaggggccgccggccaccccaggctgacgcgtccccgccctatgcccgagtaccatcaggagagacccctcccagtccttcgcaggaaggggaggagggctccgggctgtccagacccggagaggcagggctgggggggcaagaacggtagtgggccctcaggggcgattagcttagtgagcttaccccgccggagcgggggagcgctagaggtagttgggtagagaagccagcagggggcagcgtgggacccatatcccagccccaggcggaccagaggtggaaggcgcggcgggcgtaggagggtgggctggcggtacccacccagcccaagggagtcacagtgccttagaagtggcagaggtgagggtcaaagaacggggtccctgggctggcagagaaggtttgtgtccctgttgaggagccactctgccagtctttgctggtccataggcgtgagagtttatttttgtacaaggggtgagggtggggggcactgtacccttctagccccatcaggggccctgtagacgtcgctatttttggtacgattcctgtcatccctattgcagagtcgtgtccccaataaacaggtgtcttgaggcacagggccctgtgtctgtctgcctacctatgtcctgcttccctctttgggtccttctgtcaggaaatagtcacctcttcagacacttagttatcacccaaagagtttgataagaaatgcagaatattgggttttacccccaggtttcgatgcagtagctctgatggggcccaagaattagcatttaacaaacagccaagcaagttctcacgcactgtggcctgaggacctcattttgagaactgctggactgtgctggatcccagtttgtctgtgaccagttcagcctcaaggagtaggtgcagtgtgggagaaggagcttcagagagtgtgtggaacctctgggagccactgtggaggagacacattctcccaggctcatacacagtcagctagctctgggcctgggaggggtagaggggaccttccagtc

SEQ ID NO: 24801 - DNA, 1218 bp, Artificial sequence
  DNA replication origin
gtaggggcaacggaaggcggacgatgaaggagcctggggccgcgccagaccctcagtggcaggggtggcctgcatgccccctgagcttcgggctctccccagtcgggcctcgcgtagtagcgcgcgctcttccaactccagcaacaggcgtgcagcaggactacgtgggcgctcgggctggtgtgtgcgcaggtgcgagcgcagcagagcccgctgcgccgcgcggtggccgcagtgagggcactggaaggcctgggctcctgggtgcgcccgcaggtgcaaagcaaggatagagttgaagcggaagcgcttcccgcatacagggcaggggaagcgccgttcgcctgcacgactctcagaccagctcaccgctcccatcccgagcgaccctgcgctcacggctggcccgttggagtatcgctgcagatccagctcgccgtcgaaagccggcggcgacggcgctaagtggccgctcggggcgcggggacgtgagccctgtggagaaagatctgcgtagagcaaagggtgaaggtagagctgtaaaggaagcaagggcgtcgcctcgagggccagaaggacaacacgagggaaggtgggctggggcctgaactaggaacacagggtgctactcacctcgggaagatggggtggggggaggtgtatgggaatcgagatgtcagggccaaggagttaacttctaataatgggaggtcaaagagagagagaggtaggcaggagagggagtatacagttgtaggtacttgtaggttgaagccagagcttcactcacctccatggacccccttcacattctttggttctgggaagtgcagggaagaggaggaaaagctgctaatgaaggcaacaggtgctgtggagctaaagcaagagacagatttggaggaaaagatgagccctagttttcagcagtaaagtcactccctacccccagactctcagcattctgtattcccaaaaccaatccattctccctacttgcttcttgaggcacgaaggggctgctatactcaaaaactgtacctcttgacttgccaagcctacaagcctcccagataatccagatttcttccccaaattctatattttaaatgcatggtccagaacaaccacagctaccaccccaccccctggcggtggggaagaccatcacaatatgcccctctcccatgtaggttgggctatgcagtgtggtgagca

SEQ ID NO: 24802 - DNA, 1610 bp, Artificial sequence
  DNA replication origin
ctccgccgccgcccgcccggggctcgtgagtagccgctcccccgactcccgggcccccccgtccgccacccggcccccgcccccggccccctcccccctcccggagggggggcccgctcagcgcgcccggctcggagcaggtgcagggggcgggggcgggggaggggcgccggctcggccccaagcaaacttcgcccagagctcctgggggggcggggtgggggtggcggcctcggaagcctggagagctggggggccccaagggagggggggccaggtggaagagctgggggagcagacaccaaagggaagggccaacgggggggatgtggcgggggaggtggcgggtgtctttgtaggggcccgaaggcagggcgcgagggacctgggggtgaggggcggcagagccgcgagcctgagtggatgtgcaccccccaacccccggcccaggtagggctggtgggggagggggaaggagcccaaactctctggaagcacggggtggcgggggaggggaaaggatggggggtgcttccctctttgcgtcccaaacaaagtgtcacaaagagctcggcccgcggcagcagcggaggcggctgtaactcagcttttgttctcctggccgggggtagctgagccttggcctccctatctcccaaccctgccccccatcatccttctggcttatcttcctggggaggggtctggggtgctgctggaaaaacctctccggcaggatagcaggtcctaccctacttagcaatctatttctgggagggggattttcccagaggctcccttgatcgcccctacctcccagtctgaggaccgaggctcacgtgggtgctaagactgacttttctagggtcagctccacttaaagggacttagggctggctacatgcccctctttcccaaacccaggtcttccagaactttcaaaatcaaaatcggggttgcgttaggacatgcctctgggataagattccccatggtgggatggcagcaggtgagcaggtgtgccttcctctcgcctcctgctgtacctttgaagtccatggctgaggttccatgtccctaactcaggagagtgaggacagagggaaggaggctttaccaagatctcagtctaaaaaggctggtgagctgcagagtggagcgggttaggaggagctatctgagcagtgaggttcagagggccatggagaggagaccataaaagtgaactactggtgtgtctgtgtgatcaaggtagtcttttgaacgtagaccgccctagaagctccctttccttttaaccccatctagtgcagtggtaatcataattgttagcagatttgggaggtctaggattctcaagagggaaaaccatcgtgttagaggtgaccagaggcagttacaactggaccccagaagtcctgaacccttgctccttacactttgaccctaaaaacttttgaatcacaagacttgagggacagtctttgtggtccatttagcaaatacttctatgtacctgtccttgttgtttctaagtcttttcaccaaccattccatccttctctactgagtaaggtttagtggtccacacccacttccctaccagctgc

SEQ ID NO: 24803 - DNA, 958 bp, Artificial sequence
  DNA replication origin
gccgagccggcgcccctcccccgcccccgccccctgcacctgctccgagccgggcgcgctgagcgggccccccctccgggaggggggagggggccgggggcgggggccgggtggcggacgggggggcccgggagtcgggggagcggctactcacgagccccgggcgggcggcggcggagcgggcggcggcggcggcggcggcggcgggcggcgggccggcggcgcgggcgtcagcgttacgtggggccgggggagatgcgccgggccccggcccccccgcccccggcccggcccccgccccctccccggtcccccgcccccggccctggcccgcattgtgtgcggcgggaggcggcccggccattagcatgcggggggcggcgcggcggggctgggagccgcgcgggagccgggctctggctccggggacagggagctggggaccccgggagccgcgagaggcggccgccaggggcggggtgcgggcggtttggagacggggggcgctgtcggagggagggaggaagggagggagcgggggtggggcgcacagaggattccaacaggagactggaagagattttgaaaggtcatctcgtccttcccccagcctccaagcagcactgcccctccctccctaaacccggacataccagggaaggagttggctctgccgctctttctgccccaacatgcacagactcgggaagttcttcctggggttttatctcaaagcctctcccttacaatttctgtctctcttttgggggaggaggaggggcgattatagagatagttaatgtcggccgtataagaaacattattaaagttactcttcggtcctttccgttcttgataaacaattcctgcgccttcctctcgaattctattttccattcctcaagtcactttaatggctcttcaatacaacaaatatttactgagtgcttactaagtg

SEQ ID NO: 24804 - DNA, 1091 bp, Artificial sequence
  DNA replication origin
taggcagaggaccctgcggccttccgcagtgtttgtgtccctgggtacttgagattagggagtggtgttgactcttaacgagcatgctgccttcaagcatctgtttaacaaagcacatcttgcaccgcccttaatccatttaaccctgagtggacacagcacatgtttcagagagcacagggttgggggtaaggtcacagatcaacaggatcccaaggcagaagaatttttcttagtacagaacaaaatgaaaagtctcccatgtctacttctttctacacagacacggcaaccatccgatttctcaatcttttccccacctttcccccttttctattccacaaaaccgccattgtcatcatggcccattctcaatgagctgttgggtacacctcccagaccgggtggtggccgggcagaggggctcctcacttcccagtaggggtggccgggcagagacgctcctcacctcctagacggggtcgcggccgggcagaggcgctcctcacatcccagacggggcggcggggcagaggcgcttcccacatctcagacgatgggcggccgggcagagacgctcctcatttcctagacgggatggcggggggcagagacgctcctcactttccaaactgggcagccaggcagaggggctcctcacatcccagacgatgggcagccaggcagagacgctcctcacttcccagacggggtggcggccgggcagaggctgcaatctcggcactttgggaggccaaggcaggctgctgggaggtggaggttgtagcgagccgagatcacgccactgcactccagcctgggcaacaacattgagcactgagtgaacgagactccgtctgcaatcccggcacctcgggaggccgaggctggcggatcactcgtggttaggagctggagaccagcccggccaacacggcgaaaccccgtctccaccaaaaaaatacgaaaaccagtcaggcgtggcggcgcgcgcctgcaatcgcaggcactcggcaggctgaggcaggagaatcaggcagggaggttgcagtgagccgagatggcagcagtacagtccagcttcgactcgg

SEQ ID NO: 24805 - DNA, 997 bp, Artificial sequence
  DNA replication origin
agacacgaagggtctcaaatcttatacagaaatgaaaaataaacatccaaagtgaatgcaatcacaatttagggtcagcaaaggatcaggatggaaagacataggaccaaattggagccactcagatttcctaagtagatcaagatcctaggccattttctctgtcttcaccattctcactgccaaatgtgtggctactctgtttctgttttccaattactgaaagagaaagcactcacacctcaatcaagggtatggtcatttgggggaatataaggctggtaaagtaagaccttgtgaataaatcggaaaagcaaaataggcaactacgacagctaaagacatgtattttcagggggtaaagaagaaactagagagattctgcactcatgaaaaaagggaaagggcgaggtgaggaagtgaggggttgatggagaggaaaacgcgactggggtgggggtgggggggacccgggtacattacctgctcatactgccggggttggtgccagtaaggtccatacagcagaggcggaagatttctggtaactggagaccccaaaatggaaatgaggtacatgcacttgaggtaaggagctagcgggggtgccctccagggtggggatggccaagacgggaagatgcggggggtggggggtgtggatgcccgggataggagcaatgttagggcggaagctgcaggccgagaggcccgacaagccctgaaggagaaaacgagctgtgcctcaccccagtggaggagagaggtggctttacctgcagtggctgtggggggccggttcgcccctctccctgtctctccagcaccagttccccctcctcctgcgcaacctaacctgatgctcctgcccgccccgcgccatcattggctgaagcgcactgccactcaccaaaggcgaaaagacgcaaaacagcgcaaagggtgggactataaggagctcccttccccctcccccgcaggttaggttgagagcgca

SEQ ID NO: 24806 - DNA, 1254 bp, Artificial sequence
  DNA replication origin
gccgaggtgggcggatcacttgaggtctggagttcgaaaccagcctgaccaacatggcgaaaccccgtctctactaaaaatacaaaaattagctgggcgtggtggcgggagcctgtagtctcagctactcaggaagctgagacaggagaattgcttgaacccgggaggcagaggttgcagtgagccgagatcgccccactgcactccagcctgggtgaccgagcgagactccatctcaaaaaaaaaaaaaaaaattaggcctttaaaaaaaaaaaggaattcctccttaagtcctgttcttgatttccaactgattcacagtgcccctactggaaaatttgcagtgaatcctaaagcttagtagcacctataatagatacatgtcctgatattttgagtgaggtgtccataaaggattaccctaggaaagtgcaactttcactctcattagaagaattaatttttgcttatttgatttgttaaaattgctttactcctacagttaagtgagagggtggtggtggttgttgcccgtaaccacatacggcattactccagggtttcacgtcgtgactgaggggcctcctaagtgtatacagcagagtatgttcgggctggacctagatagtcggacagaacaccgacagggtcttcacattctttaagcactctcacccagtcccggagtccgagccaagatggcttcccagaagtaggtaactaagtgttgttttagttcacagcgcccccaatggcgggggtcaaaaaaagatgccgaggggcctggccgcctgtgaactgagtcgtcagaggcgagccgccgccagattttattttcaatcaggcatatttgtggtcgcctacgtacccttctcatcctcctaggaccttccaccctcaagagacttcctggatggcgctcacactagctcgctggaagaggccgggcttcggtgctgccattggcggatgggagcgcaggggggcggagcctagggagaatggactactagcaagctagattgaggcgagggctggccatgctccgccggaaggcgccttgttctcggagagggtgagttgaaacgctgcctggaaaggaagtaccaggacttgcacaggtaggcttcccgctcgcacccgctcctcagtgctgggccaggagtcagcaaaagctgaggctctcagagatttgatttaagtaactccttctcctctctcttccaccccctgctcgccccccagttgtgaggg

SEQ ID NO: 24807 - DNA, 690 bp, Artificial sequence
  DNA replication origin
ccacctgagggttacctgtgtctccgatgatgatatacttgaagagataagcataagtcatggtgtcgcgtcctctgggttccgggtccgcccgacttctatagccacttacctccgacctctctagccactcaatctaccgatcttcttcttctcccccttccccccgctcccccgcccctccggctcctctagcccagatcacgtctctattgcactccccggaatcatccttaggtcgggagtaccctacgccacctccagggacgcttctagcacttctacatgcccttatccctccaaactccagggggcgatagcccagcgcctgactctctgcagccccacggcgctccttccaatcagcagagagaacacacgtccttgcggaagtgacggcagttccgagtccagtgggggcggtgggagcgatgagggtctgagacggtgggagcggttgtgtgaagatggaggtaggaacctgatagctaagaaggctggcgagagaacgcggccgaccgggttgaagcagggacgggaagccgggcggagaggcgactgacgggagaggagagagagcggggtttggggagtgttgtcagaatgtcagggtcaaaagccatcgctccaagctgactccctgctccccctaacttatccccgcgactttcttttggtttccagtttccc

SEQ ID NO: 24808 - DNA, 803 bp, Artificial sequence
  DNA replication origin
agggccatgcagaagtctagagctcaggcctgatccgtgtggacaggagacaacccggcatggggcaggggggtggggagggaggaggggaggggggcaagagcatgctactcccctcctcagccaccctcccttccccaggccacaagcgagttcacggaataggtgtggggacaggggcctacgcagagaatcatgcattttctcccacccaccgaaagtcttcgccgcccctgcgcatccccctccgcccccacccctgcccagcccgaccgaccctaccgcacctccgagctctgccggctccccgcagggcaccccgagacgagagctcctctcggattcgtgcgccatggttgtgggggaagtggagggccaggtggggtgggagacaatggatattgggattgagggaggcgatggccgctgggtctgcggcagcctctgcacccagcggcccagactgcggagatggagatcggcagcggcgggggcagggagcagcggcggagggggaggggagcgaggaggcggggagaagctggagtgagaaagcggggagaggggagatctgggaggagctgatgaggaggggagtttatggggaggagctgctggggagggaggcgggagctagaggaggcgggagaagggagcgctagcgggggcgtgggggcgggagctcagagctcgggagagtttccggaggcgcagtgacaggtgctgtgaagcactgcgggggtccacctttcccggtccctggccagctccccccatctgcagatgcctttgcccaggcctac

SEQ ID NO: 24809 - DNA, 929 bp, Artificial sequence
  DNA replication origin
tgtttcagagagcacggggttgggggcaaggttatagattaacagcatcccaaggcagaagaatttttcttagtacagaacaaaatggagtctcctatgtctacttctttccacacagacacaggaacaatccaatctctctttcttttccccacacttcccccctttctattcgacaaaaccgccatcgtcatcatggcccgttctcgatgagctgttgggtacacctcccagacggggtggcggccgggcagaggggctcctcacttcccagacggggcgccgggcagaggcgcccccgcaactcccagacggggcggcggctgggcgggggctgccccccacctccctgacggggcagctgccaggcggagacgctcctcacttcccagacggggcggccggtcagagatgctcctcacctcccagacggggtggcggcagggcagagacactcctcagttcccagacggggtcgctgcacggcagaggcgctcctcacatcccagactgggcggccgggcagaggggctcctcacatcccagacgatgggcggccgggcagagacgctcctcacttcctagacggggtggcggcggggcagaggctgcaatctcggcactttgggaggccaaggcaggcggctgggaggtggagattgtagcgagccaagatcacgccactgcactccagcctgggcaacattgagcactgagtgagcgagactccgtctgcaatcccggcacctcgggaggccgaggctggcagatcactcgcggtcaggagctggagaccagcccggccaacactgcaaaaccccgtctccacgaaaaaatacaaaaaccagtcaggcgtggtggcgtgcacctgcaatcccaggcactgggcaggctaaggcaggagaatcaggcagggaggttgcagtgag

SEQ ID NO: 24810 - DNA, 1276 bp, Artificial sequence
  DNA replication origin
aggcggggggctgatccccccacctccctcccggacggggcggctggtcgggcggggggctgaccccccccacctccctcccggacggggcagctggccgggcggggggctgacccccccacctccctcccggatggggcggctggccaggcggggggctgacccccccacctccctcccggacggggcggctggccgggcagggggctgaccccccctcccccctcccggacggggcggctggccgggcagaggggctcctcacttcccagtaggggcggccgggcagaggcgcccctcacctcccggactgggcggctggccgggcggggggctgacccccccacctccctcctggacggggcgactggccaggcagaggggctcctcacttcccagtaggggcggccgggcagaggagcccctcacctcccggatggggcagctggccgggcggggggctgaccccccccacctccctcccggacggggtggctgccgggcggagacgctcctcacttcccagacggggtggctgccggacggaggggctcctcacttctcagacggggcggttgccaggcagagggtttcctcacttctcagacagggcggccgggcagagacgctcctcacctctcagacagggttgcggccagcagaggcgctcctcacatcccagacagggcggcggggcagaggtgctccccacatctcagacatgggcggccgggcagagacgctcctcacttcctagatgggaaggcggccgggaagaggcgctcctcgcttcctagatgggatggcggccgggcagagacgctcctcactttccagactgggcagccaggcagagaggctcctcatatcccagacgatgggtggccaagcagagacgctcctcacttcccagacggggtggcggctgggcagaggctgcaatctcggcactttggggggccaaggcaggcggctgggaggtggaggctgtagcgagccgagatcacgccactgcactccagcctgggcaccactgagcactgagtgaacgagactccgtccgcaatcccggcaccccgggaggctgaggctggcggatcactcgtggctaggagctggagaccagcccggccaacacagcaaaaccccgtctccaccaaaaaaaaaaaacgaaaaccagtgaggcgtggcggcgtgcgcctgcaatcgcaggcactcagcaggctgaggcaggagaatcaggcagggaggctgcagtgagccgagatggcagcag

SEQ ID NO: 24811 - DNA, 971 bp, Artificial sequence
  DNA replication origin
gccccccgcctggccagccgccccatccgggagggaggtgggggggtcagccccccgcccggccagctgccccgtccgggagggaggtggggggggtcagccccccgcccgaccagccgccccgtccgggagggaggtggggggatcagccccccgcctggccagccgccccgttcgggaggtgaggggcgcctctgcccggccgcccctactgggaagtgaggagcccctctgcccggccagccgccccgtccgggagggaggcggggggggtggggtcggccagccgccctgtccgggagggaggtgggggggtcagcccccgcccggccggccgccccgtccgggaggtgagggaggcctctgcccggccgcccctactgggaagtgaggagcccctctgcctggccagccgccccgtccgggaggatggtgggggggtcagccccccgcctggccagccgccccatccgggaggtgaggggcgcttctgcccggccgcccctactgggaagtgaggagcccctctgcccggccacgaccccgtctgggaggtgtgcccagcggctcattggggatgggccatgatgacaatggcggttttgtggaatagaaaggcgggaagggtggggaaaaaattgagaaatcagatggttgccgggtctgtgtggatagaagtagacatgggagacttttcattttgttctgtactaagaaaaattcctctgccttgggatcctgttgatctgtgaccttatccccaaccctgtgctctctgaaacatgtgctgtgtccactcagggttaaatggattaagggcggtgcaagatgtgctttgttaaacagatgcttgaaggcagcatgctcgttaagagtcatcaccactccctaatcttaagtacccagggacacaaacactgcggaaggccgcagggtcctctgcctaggaaaaccagagacctttgttcact

SEQ ID NO: 24812 - DNA, 946 bp, Artificial sequence
  DNA replication origin
ggccgagaccccgtctgggaggtgaggagcgtctctgcccggccgccccgtctgagaagtgaggagaccctctgcctggcaaccaccccatctgagaagtgaggagcccctccgcccggcagctgccccgtctgagaagtgaggagcctctccgcccggcagccaccccatctgggaagtgaggagcgtctccgcccggcagccaccccgtccgggagggaggtggtggggggtcagccccccgccaggccagccgccccgtccgggaggtgaggggcgcctctgcccggccgcccctactgggaagtgaggagcccctctgcccggccagccaccccgtccgggagggagatgggggggtcagccccccgcccggccagccgccccgtccgggaggtgaggggcgcctctgcccggccgcccctactgggaagtgaggagcccctctgcccggccaccaccccgtctgggaggtgtgcccaacagctcattgagaacgggtcaggatgacaatggcggctttgtggaatagaaaggcgggaaaggtggggaaaagattgagaaatcggatggttgccgtgtctgtgtagaaggaagtagacatgggagacttttcattttgttctgtactaagaaaaattcctctgccttgggatcctgttgatctgtgaccttacccccaacccggtgctctctgaaacatgtgctgtgtccactcagggttaaatggattaagggcggtgcaagatgtgctttgttaaacagatgcttgaaggcagcatgctccttaagagtcatcaccactccctaatctcaagtaatcagggacacaaacactgcggaaggccgcagggtcctctgcctaggaaaaccagagacctttgttcacttgtttatctgctgaccttccctccactattgtcccatgaccctgccaaatcctcct

SEQ ID NO: 24813 - DNA, 958 bp, Artificial sequence
  DNA replication origin
tcctccggctccgaggaggcacattcctcgccccgcctcccgcccccgcccccccaacaaggggcttcccgtctgggggcactaccgagattcagccaagcatctcggggccggaggcagttgtggtcaggggttggggcgctcgcccagactcctgtctggccgccagcttatgcagggttgggagggagggaagaggaagctgagcgttcatggggtggaggaccagtctctaagggtatccgcggtcattttcatttccccgcagtaatccagctgtgcgggagcgaggagcggacagggagcggtttgcgaggtctcggtgcttggacctttgcgcgcccttcgcctacacccaccacaactccctcttctagcgcttcctagagtcgggggaagggcgggggctgcttggccaggtggagggaacgcaagggacgcctgttggggtgaggtcctggtcccccacagccagacctgggcctcggggccaccctgttcttcagaggggtaatgaaggcggacggtggctgggtccgagcttgggaaggcgttgtcctagggccgcagactgggggcccaaaggaaggagggaaataaaagggagacaaacgacagggaggggcccggagaaagcgagggtggtgggggggtggggatgggagaaagggacaaaggtgagtgaggccagcaggttgggcgggggcggagagggggatgggaacgaccaaggggtaggccagcaaggatcgcgggccaggggagagcttttcaggggtagagcagcgggccggcgcatggtggggagttgagtgtatgcttcgaagtccgctgtagagcccacttgcatatgtgtgaacctgagcgttcgcctcccctcggccttttcctcccctgcccttcaccctttcgcggccatagcacttagctctcgccatctccacgccgcacccagacc

SEQ ID NO: 24814 - DNA, 1398 bp, Artificial sequence
  DNA replication origin
agcaggagacaacgggggggtcttggggcgggagacatggtccgagaccaccgggtcagccgggcagtgtgggctccgcggccgggcccacgccctggggtcgcaccgccactccctcggggcgcctttgtcttcggtaggcactgaacttgaattcctagaccgctgtcggcttggagttaaaggggattgttcctcaaagtgcctgtttgctcttctcctcttttccggtttttgatctttcttctgcttagtcggcgaactggggtctggttccctctctcgctctctcctctggtccctcccttctcccacagcctctcctccgtccccgccccagtgccctcctttcctggttggggacgtggttgttttagcctgaatccaattacaaccaagaactggaaggaaaaaaaaaaaaaacacctctaagttgcctttttgtggtgcaggctgccatctgcaggggttgaggccgcgatggacagcagggggctgtagggggatccaggggacgggatgtgggagactttgtccctataagcatattctgagtggcttgattcctctggtattcagcatttgtctcacctcagggtgggaattattgggggctatgtggctaggggcaacgaggagctcagagtgtgggatggtggtggggtcttcttccatgcccatgagacctgcagagggagaaggggccagtttactaatagggggttatcttctgggccctgtagacaactgtctatgtccctccctctgctgctaaaaaatccaaactataacccaactaccaacaacaaaccccacaaccataccggatctgtggctccaacctttgtagaaagacaaaggtgattcctttattgtcatttgtaatgtggctgcacctttaattggaactcgctgggaggaaaagggtacaaggccgtgggatctgggggaaagcaaatcaagttgggtgaaattattgtaaaagaagggattgggagttgggactctggggtttagttccacctctacactgaaaaaggaggcaattcttaaagagttataatctcctttagggacttactggactcagaacaaaaggtggaggtatgtagggaagggagagggcaggataaagctgaccgtgagaaagggagacagatgagttgggaactagacaggtctggaaaagaagcacaacagaagcaggaaaagtgtgggagacagaaaactagactatcagcgaaatctaagatccaagaattgcatttggccagtgagagaggacagaggtagtgcgaggaggaagggagaagaaagcaaaggaaggaatagaggagggtggacagaaattaggtcaggtaggaagctccagaaatcctagggatgcacttctgtggc

SEQ ID NO: 24815 - DNA, 699 bp, Artificial sequence
  DNA replication origin
agggggagttcgccccagttgtaaagttcttccaaggactgggaaaaaagaaggaatgggaaggagagtcggcggcgcagggggtgggggcagctggttggaagcgggcaaaagttggatcgatctggaagtttggagacgaagaggaaaaagaaagggagggggaatcctgcaggcctgagcagcggagatcccaaaagccctcctctccgaatagaggctgtcccctaggagacccccgggctcgcctcccggcgggcgcgactccgggaagggccgggaagctcacttacttcggggctgaagctgctgctttgggccgagccgagggaggcgagcgcggtgccgagcgtgagcagggggagcaggagacaacgggggggtcttggggcgggagacatggtccgagaccaccgggtcagccgggcagtgtgggctccgcggccgggcccacgccctggggtcgcaccgccactccctcggggcgcctttgtcttcggtaggcactgaacttgaattcctagaccgctgtcggcttggagttaaaggggattgttcctcaaagtgcctgtttgctcttctcctcttttccggtttttgatctttcttctgcttagtcggcgaactggggtctggttccctctctcgctctctcctctggtccctcccttctcccacagcctctcctccgtccccgcc

SEQ ID NO: 24816 - DNA, 795 bp, Artificial sequence
  DNA replication origin
ccggggtgagggtggggggcgcccgagccagccccgacgtgagggcaccccggaccagaccctctccccattccccaagcgacgcccccaggctccctgcaattaacacagaaaaactattaacaacaaaaagggcctgaaggcgccgacgcgggtggggatagggggaggcagcgacccggccgatcgcccggctcacaaggagagctttgtgtgtacggaaacgcggccagcgcgccggcgctgcgaccctcgacgccagggatgcgggtagggacacagcggggtcctctcggggagacgggggctgtggccctggacgctcggccgtccaccctcgacccccacctggccgcagactcgtccgctgaaggcctgggccacccggggaggccgaagcgcccatcggagggcgcgccggcgggagagcgctggagagctgggaagtcgaagaaacaacaaactctcgcgcatgacgaggagccgggacagcgcggggtttgagcggagtccaaatgtttatcaggcggttccagagctgagagcagagcccaagggaatcggggaagggggagttcgccccagttgtaaagttcttccaaggactgggaaaaaagaaggaatgggaaggagagtcggcggcgcagggggtgggggcagctggttggaagcgggcaaaagttggatcgatctggaagtttggagacgaagaggaaaaagaaagggagggggaatcctgcaggcctgagcagcggagatcccaaaagccctcctctccgaatagaggctgtcccc

SEQ ID NO: 24817 - DNA, 807 bp, Artificial sequence
  DNA replication origin
gtctcacactgttgtccaggctggagtgcaatggccctatctcggctcactgcaacctccacctcccaggttcacgtgattctcctgcctcagcctcccaggtagctgggatcataggcgcccaccaccacacttggctaattttttgtatttttagtagagacggggtttcactatgttggccagcctgctctcgaactccagacctcaggtgatccacctgccttggcctctcaaagtgctaggattacaggcatgagccaccatgcccagcccatagggcccttttgtctttcaaaccagcccacttcttctcaccttgaagacaaacatctcccctcggagcatggccacggtgtcaaagttcccgtcacagatgttgggcccataggtggggtttttgggtttatcaggaacagaaggccgggaggtagtcctgggttgagggggcatcttggtggggaaccctgactcaccccctggggcagaaaacacgaggggcatttcagacttaggaggaggcggggacggaaggacagacagatgggcagacaatacccttggaaaggtgtggatgggcttctaggggaggctgaagcaaccaactgggaggcgacacaaaagatgggctcaaaagtggagctgatagaggcaggggcaggttggcagggggcggtgcggagactgcaaggcataaaagaggggaaatgcgtagaccaggagggaacaagcagcagaggagggagcaggcgtgggtgtagactactcgccataaagttgctggatgccccggcggtcatcatcggg

SEQ ID NO: 24818 - DNA, 1145 bp, Artificial sequence
  DNA replication origin
agggagggaggcggtcagggtgaaggaggccagccaggggacagagagaagcaaggaggctgcggggagggggctcgggacgatgggaacagcccacccaccaccacctgctgccactggccttcagaggcaaagtccttgtggtaggagtgggcgggccggcggtgggcgtcagaccttgtccagcagggaacgctggcagtagagcagtcgcctgggggtcccatggcgtctgaagaagaagactgcaaggcccaccgccagcaccaggagcagcagcagcacgggcagcaccacggcagccgcgctcaccgccccgccgccctcctcgtccacctcaatgatgatcacctccgtctcctcctcagtcccctcatccggccggcctcccgatgggcagcccatccagtccctcagggctgacttggggtagcccggttctaccttcagcttctggttgttgaatttccagtatttgttccccttgtagaagtaagtgaagactgcagggagtgaatcagaaggtggtaaggaagggaagacccaaagagaggagaggagaggagcgagggaagctctgttaatgtgagggcagctgagcttccctccaccttcgtgagcatcagcttcctcagctgtaaaatgggggtgcttatagtaccaggttggaaggtggtggggatgaatgggcaccacgtgtggaagcacctagcccagcgcctggtatgtggtattatcatcgccgttgttttccacacagcactccctcaggcttccctcccgctcttcctcaactccctattcccatccttctctcagcgacaccttcccttgcccctctcaccttcatcgctgcccatgaatgaccctctgggagactcagggatcccttcccagactttgatgttcttggggtactcgctatccactgccctgagctcttcgttgaaacggtagtacctggggaaggggaaaggaagggcagtggcggacactgggcatgtcctcaggaggcgcaagacccggaccgaatccaccagtgggcaaaggatagctgtggacagggtggggacaggggttttgagtaatgaggacctgctgctgaaagcggcggaaggtgggggtggaagggagggcccaggctg

SEQ ID NO: 24819 - DNA, 812 bp, Artificial sequence
  DNA replication origin
aggaaatactgcctctaccctcagggagactacatcctggttaggacgatcaagcatagatattcccagaaaaaataaaatagtacatagcaactaccagatgaaggtccacaccgagcctcagcttccttatctataaataaaggctaaattatctcccctctaaaactttggtaggtcccatggaattcagggaacagagagtccttctcgactgctccctcattcccaagcccacggagccccagaggttccctcaactcaccatgatttggaaaaataatccggtctggatgggccagagcgcctcctagaggaggaacgagaaagggcaggagcgtgagacactccttaggagttttcttcttcacctgagcaactcaagggagccatccgggacttccgggcagttaatcggaagagggagtggggggcgggagagggctgcggcgtgggacttccatggaaggaaggtccggcagcagggccttgtggggttggtggggtgatctaggggaagccggagagaggaccagggcccagcggagcagctgaagacttcctgggggttggggccggcagtgctggggctggcggcaggggctggggggaatgggcaggcaggatagagtgcggggccgcactggagggagttagagctgctggcccggtgacagaaggctgggggttggtatcgtttcggttcttaccaaggaggaggaggaggagggtggccaacagcatcctgggctgtccagaggtgccggaagggtcccggagcttctgtggtctacccgatggggtcgcggcgg

SEQ ID NO: 24820 - DNA, 1150 bp, Artificial sequence
  DNA replication origin
ccgggccgcccccggcggtcacaccggggcatcctgggagtttttggtttcctagacggcctccaccaaggaagccggacgggggcggggcggggcgagggggggcgagcggagggcgcggtgaccatggcgaccgcagtggccatggcgaccgcggctcagagcaccgagaggtcgtgacacgacctggagcgctgcttgaagaacttggcgttgcgcggcaccaggttggcgaggaacctcttggctttcttggtgaggctctcgcggcgtgcaggtggcgcagggccctcggggctgcccggatcgggcctctggcctccggcgtggtttcggccccgccgcagccggatctggcgcaccgcgccctcgaagagctccctcgtgttgtggtgcagtgcggccgacgtctcgatgtgcttgcagctcagcgtcccggccaggtggcggccctctgcaggaaggcaccggctcaggcgcccgctgggctgtacgggacccggggcgagggtgggtctagggagggcctgggcgtgcggtggcaagggattggtactagtgaatcttgcaaccgagagaacatggctgagctcatatggtgggtctgtggaggtgcgaaggagagggagaaggaggcctaggagagaggtgaggggaagtgacaagaagggattctcaggatcctcgagtggggcattgggagtgtccccctagcctgggtctgattgcaagtgagtgcgtccgcgatggtaaaaaggccttagggagaagaggtgacttggaagggagagcattcccctgagatcgcaagtatggaatctgttcaggatacacaccctccagtgatacctcccgggagcgggccaagtcgctcttgtttccaacgaggataacgggtaggtcgtggtgcggcctcccagcccggagccgaagtagggtctctggaactttggagaaactccgtcggtcggtgactgagaagacgatgagaaaggcgtccccggtctgaaggcagtggtcccgcagccaccctcctgcatccccctgcagacaggcagaggaacgttagggctggaggcataggagatcctgtccagcacctacacctcaaagaggaggaacagggctgtgaggcagaaagaagccacct

SEQ ID NO: 24821 - DNA, 776 bp, Artificial sequence
  DNA replication origin
gtcacggtattcggttctccactgccccgacggcccaaagtgccggtgccccggggtccgaggtgaagacgcgggactaggaaagaagcaagagggatggatgggggcggccccagagcactgtccccttcctgctagttttcagatgaaccagggctccttatttctgctaaattcaacccccctggtatctcgtgagtccgtttctcaagcatttgaacctcggttttttgcggcaggaggcctcgtagggaagggaccaagtggggcagtgaaggcgcatcccccccaacttgctcccccctttcacggcggtgcccctggaggtttgtgcgcgccgcgcccccacccgggcccaggctccgcccgcaggaattcggagaatgcgcgggtgggggggcggggcaggctggccgcgtgcgtgccgactcctgcccgggcgctccaggtgcccgcgggcggggcggctgccgccgcgcggcggaggggtggggttcggggatcgggggacgctccctagcatacgcggagtagtggcggctgtcggggaaatggagcctgggagacaggatggagcgccctgggacccaactgctgtccctccccagtcctgttggctaggtgcgtgcgtgggcatttaatcagagacccagtagtaccagcttctattttccccatcctccggaagtcagggtaaaagtcatgactactgggacaccattacctctggatggataacgaccctgtgttattgccagaaataacttggccttgaa

SEQ ID NO: 24822 - DNA, 828 bp, Artificial sequence
  DNA replication origin
gcatgggctacgaccagcgccacgggagccccttgccagcggggccgtgcctgtttggcccacccctggccggagcaccggcaggctattctcccggaggggtcccgtccgcctacccggagctccacgccgccctggaccgattgtacgctcagcggcccgcggggttcggctgccaggaaagccgccactcgtatcccccggccctgggcagccctggagctctagccggggccggagtgggagcggcggggcccttggagagacggggggcgcaacccggacgacactctgtgaccggctacggggactgcgccgtgggcgcccggtaccaggacgagctaacagctttgcttcgcctgacggtgggcaccggtgggcgagaagccggagcccgcggagaaccctcggggattgagccgtcgggtctggaggagccaccaggtcctttcgttccggaggccgcccgggcccggatgcgggagccagaggccagggaggactacttcggtgagtgagagaagtggttagggacgggaagggacccgtcacggtattcggttctccactgccccgacggcccaaagtgccggtgccccggggtccgaggtgaagacgcgggactaggaaagaagcaagagggatggatgggggcggccccagagcactgtccccttcctgctagttttcagatgaaccagggctccttatttctgctaaattcaacccccctggtatctcgtgagtccgtttctcaagcatttgaacctcggttttttgcggcaggaggcctcgtagggaagggaccaagtggggcagtgaaggcgc

SEQ ID NO: 24823 - DNA, 1466 bp, Artificial sequence
  DNA replication origin
gctgatttcgctcagcgtccagggaaccttgctcccgggccggctccaacggctcatccccaggtcccccagtagctcctcggggccctgacttcctaggtccccccaacccacttaggcgccccttgcccggcccgggggtcccgtcagacccagaccggctagattcaccctttctgcggccgaacttctccagcaggcgactggctttctctcctaaccgctccatgccctcgggcctggggcctctcgccccctccccgcctggcaccctgcggcgtctcggcggccggttctctttccctgcagccggactctggttccccaggggcacaggggaggcacaggggcttagcgggcggcctggatgccctgcgccaggaatcccacagcatcccccagcgggaggggctgcgtccccccgcgcatctggggctgagcggggctagcagggtctctggccgcggctgtccagtccgcaggtctatctgttcacgcgtcgactcgcccgactgccccactctccccggcccccgcccccctagctctcacgctagccacagaccgaacttctctcccaaacttttgtctgcctggccggatctactttcctaggggggcggagcgcggtgtgtgcgagagcgccgggggtgtccgcgcagggatagctggtgtgcgtgcagcggaaggcgctaactgccctggatgtggagacccgcggactggacgtgagaggcgggcaggggcagttggggcagctgcccctacaacactgaagaattggaataggaaagagtgtgggggtaggggacggggactctttgtctgcagttggaatgcgcggaggggcatggtggaatgtgtcgcgtcccgggaccggacgacaggaggcatgttctgcgctagcaccgtgactttgttcccagcgtggggactgtgggagagatggagagagactggtacagaaatggtgagacaaggagagagccataaagaggaagacagagagaaagaagacaaatgcataaagaggttcagagacgtgtacgtaaagatagccctgaaaggcgacgaagcccacagagagaggtggaagagggaagaggtagcgaaagaaagggagagctgaggagcaaagaggagtgtggacgatgcagagaccgaagggtgcgcagacaaaggaaaggacaagcttgtccagagagaatgagagacaaacagataaactgcaataaaaaggcaccaccttctggacccaaaagttttgtgatttgtaaaagcagtgaaaaggagtcaggaaaatgggactaatctctactttgagagggagggaaagagatatagtgtgtatgtagaagcagtgaaaaggagtgaggaaaaggtttgggactaatctctaccttaagggtaggacagttagagggatagacaccccctggtgttgggaaatgagatttttctcattt

SEQ ID NO: 24824 - DNA, 1022 bp, Artificial sequence
  DNA replication origin
agaggacccagaaagttggtggtgagagtggggcagagtcatcatctccttactccctcatggaattaacccaagtcttcccctatctagaaggaggtgaagtgtattttcccccaaggagaaaggagaatgaactgggaggcaataggctaggcctcgcctcccgtcctttgggacgatgaagctttgtatagaaacctgagtgcaaaaacagaagcagggctccagctttacaaaataaagtgtttgtttattatgaaattagagatggaggcccctccccttcctccctctttccccttccccagccgcctccccctttcctttccctactccctcaggaagcacacaagacaatgcccagggctgggatgcccaggggaagctgacagctgggcagagctccagggaggcggccacacgggaggctggagctcttgccctgggaggcaggctggttccctctctcagctggaggccagtggagccaggatgaggctgaggccatgagtaatggatggaaccatgcaggcaggtctgtaaggacaggggagccacgttagaggcagtggggagtgggagccttcatccaccgccctgccccacagtctaggggcactgacctggggcacaacatcccctgcaggagggtgggcagcagtggctggaagtttctcttgattttgggatggacaacagaaaaaaacaaaaagccagtcacagggacccagagagaaggaagggagatgtgggcaggagacagacacagagcatgtgtatgggcaaggaagacgcagggagactatgtgtgagcttcagaactgcagagacaaaacgccacggaggaaggagaggaatcacagtgagagatcgcagggccagggccagggcaggaaacccaggcccggacagaggagcgtgtcacagatagagacaaagattcctggagagagacacacacaccgactcaggaggagggaggtgagagcgagggtgccccggggaagcaaggagggacacaa

SEQ ID NO: 24825 - DNA, 794 bp, Artificial sequence
  DNA replication origin
tgggaacttgggggggttgtcgttgacatcgctgagcgtgacagtcaccgtagtgctgcctgacagcccccccatgtggccgcccatgtccttggcctggatcaccaccaagaactcctcctgtgtctcccggtccatgttggggatggctgtacgcaccactcctagggagagatgctggtcagagggtgtctgtccccttggctgccccaccgggctcccaggctccatcctcaccagtctgggggtccacagagaagaaaggcagtccatccagaacagtgtacaccagcttggcactgttcccatagctggggtcatcagcatcgtgagcagtcacctggatcactgatgtccctgtgggggatgccagcacgccattcagcagcagcagggaaggatggggaagaacaaccgatggggggggatgcagatacgagggaggctgaattgaagggggcaggttctggggcagacaacaagaagggaaggagaggtgagagagctccagaagacgggaactggggcattcagagctggggtgctcaccgacattggacatctcgggcacggtggcatggtagggcccaaggggaaaaatgggtggattgtcgttgatgtcttgcactttgatgatgaactctgatgggggctccaggggccggttggaggctcggtccacggcttgggccagtagcacatattgcgccttttcctcccggtcaaggctcttggtaacatgaatattgcctgtggcctcatcaatcacaaatacggtgcctgccccctccccg

SEQ ID NO: 24826 - DNA, 2005 bp, Artificial sequence
  DNA replication origin
tctccccggtcaacatccgagtgcagctgcaggggtcacgaaaagatggcagagggctccaagtacagagacagggttaaagagtctaggtttgggtagagcgttgggagtcctgagggaccaaggtcattgcagaagtgatgaagttgcagggcagggcctgagggcttggtgtcagagtagacatgggaggggtcatccttaccttgccaatgagaacaggctctggaccagcatattcctcaatgacaaagaactggttccagacccagctccttcgagtccgcagcagagcaggccctgggtgttcccgggaccctgcccaggcccgggctggggctgccagacgccccatgcagccccagccacccagccaggccagcaggagcctcaccaggccccacatgtttggactccagccagggctctgttcactggccctgggtgctgaggctgggccaggccacgtggcccatgagctggctggggtggaggggcagatgcgttgaggctaccccatggatccacacctgcaggacaagcagctgctcaggctcaaggaaacccctagccctcctcccccgcaaaattagatgctgaagaccagacctccaaggaaccagacactccactgcccagaactcagactaagacagagagcagagaggctgatccttcctccacccaggctctgcatgtattcacctccagccctccaagctgataaatctctggtcagtcaactctgagtagagaactggggaggaacacaggagaggggatgctgggagggcttggaatcccaaatctggtctctgtcctcccaggttgggcacgtagccaggtattggaggaggcggggctaccagagaaagggcttaaaattacggagttgggattcatggaggtgtggccttaaggtgtctagggtcagcatgagatgacaaggagtgcagcctcaggcagggctgagagtctgtgaaagtccctccccacaagggggagccccactctccaggccctgtctccagcccacgctgccagtgcagtccttgaagggggactgggctcgtgagacaggagttgggagccagagctgaaggaagaggatacagggtgggggacagggggaggtgaccggggagagaggtccacccagaggctagagacagataatgactgacggctagactgactcagggactgtccggcagagaaatgactggatgagagacagaaacagaacagtggcaagagacagaatgagagagaccagggcagcagcctgggtgtctgaaggcagagaggagtcctaggggccaggcttggaaacgggtcaccgggggcagttccgggcaggcaggggcagacctcagcttcgggggtgtcaagccaggcctcgggaacttaattctgggagaaggagcagacaggaggggtggaggcagggaggggccacgggaagggagctagagaggagacccttcccactgctctcctttctcctaggggcgggggggaggacccctcaggtagctgtggcttctgcccctcctccctcagagcagacacacacctgacagtccctttgctcccgagggaagggggaaaccggaggaaggctggggaccagagagaaggcgggatgaggaggcgagaaggaaggggatagaggagtgggaaacaggatagcaggaaggggagaggagagggagggaaaggagagcaagaaagagaaaagagaaaggcaggaaaggggagaaaggtagagaaagaaaaaggcaaagagggagaggagatggaaaaaggacaagagggagagggaagggttggggagacagagggaagggataaggaaggcaaacaggcagagaaggaagggtgaagagaaatcgagagaagaaagagggagagaggtgcgaggggagaagggaaagaggcagagcgcgggagaagggagccggcagcgggctcccagccacggagcgcacccctccgaagaccc

SEQ ID NO: 24827 - DNA, 1084 bp, Artificial sequence
  DNA replication origin
ggtcccgggggcacagccccgagccgattggagcgggcgccgcggctccgctgcaggtctgagcggccccggcgagaacaagggagcgagacggagggggcgggggaagaagactccgcctgcggaggagcgaggcggctccgcgccgcgcgggagaggagagcccagcctccgaccctccccggccagccgggcccgcgcggcgggggcgggggcggaggcggcgccgcgcgtccgccccctcggcgctcctgggctgcggggcgcatacagatgcggcgcccctcccggaccgggcccgcagcgcccggcagggcactcgggcgggaggacgtccaggccacggcgccaggccatttccgaagagctggcggggcgggtgcacccgggagcgcgaagctgccagtccccgcccgcagcggaaaacgggcgagcgcgcggtgaggtggggaattcggagcccactgcggagagacccggctccgggctcccggttcccggctggcttttgggactggtgtggatggaatcccagctgcaaggcggcggcgttttgagagcccatgcaaagcacggtagcaggtcagctgggggacacttaaggacggcagaagggtccagagagtccgaggcccgggcccagggagcgggtcgggaacagaggcacgacatcggcgggaggtcggaggcgggcagtggaacccttcttgggaagctcggttacaggggccaacagagcgaggagctgccgccccctggtggtagttgtgggaggcaccaaggtggcaggcaggtgaccaaacccctaatttaaccgtgcacaggaccaggaaccagaagaggacccaccctcctagccctgctggggtgccgccacggacacaggttgctccatgccttcccgaatgaggaaggtccacagctttgggttggtcagggccaaggcaggggataaaagacgtgggaagttcaataagcaggaagcagtcagcctaaaggaacacatggaatgagagcaactcctactccagatatcctcagatgtccacgctcagatatccacagtggcttcttaacctgccca

SEQ ID NO: 24828 - DNA, 1375 bp, Artificial sequence
  DNA replication origin
ggagaatcacttgaacctgcgagtcggagaccacagtgagccaagatagcaccactgcactccagcctgggcgacagagtgagactgtctcaaaaaaaaaaaaaaaaaaaaactggcggggcgcggtggctcacgcctgtaatcccagcactttgggagcctgaggcgggcggatcacgaggtcaggagatcaagaccatcctggctaacaacggtgaagccccgtctctactgaaaatacaaaaaaattagccgggcgtggtcgcgggcgcctgtggtcccagctgctcagcaggctgaggcaggagaatggtgtgaacccgggaggtggagcttgcagtgagccgagatcgtgccactgcactcccagcctgggcgacggagcgagactccgtctcagaaaaaaaaaaaaaaaggctgaaactaggagggagagaggtgctctaagaaagacaggatgcagttgttgagcccccaaccccttcctgtttaactgaaaagctgaccctgagctaggaggcagggtccaggcacaaatggaggctgtgaccaggactgagctgcctattctctgcctttcctacctggctacagatcgttcagaaagaggcagagcgggccgaacgggccaaggagcgggagaagcggcgaaaggagcaagaagaagaagagcaaaaggagcgggagaaggaagccgagcgggaacggaaccgacagctggagcgagagaaacgtcgggagcacagtcgggagagggacagggagagagagagagaaagggagcgggacaggggggaccgagatcgggatagggaaagggaccgagaacgaggcagggaaagggatcgcagggacaccaagcgccacagcagaagccggagtcggagcacacctgtgcgggaccggggtgggcgccgctagctgggaaaacactagagctgcaggtaccagccactcggccccagggggttatggccacagagggataggcacagtctccaccaccctggagccaagggtctttcacatcacctatccctacatacataccaaatggaaaagtggccatccttttccccccaaacacacccccttaacctatctcttgggacttagcccgaccctccctctcatttcccattaagtctgagaggcaagagctaggttaggcaaggaggtggttggccagagatggggaacagccaggtgccccagtcctctgatttttcctccatcctgcttaccacctccctgggtacttacagccttctcttgggaacagccggggccaggactgggtcacctatgagctgaatcagcatctcctcctgagtcccagggcccctgcagttcccagtctcttctgtcctgcagc

SEQ ID NO: 24829 - DNA, 1292 bp, Artificial sequence
  DNA replication origin
caatgagctgttgggtacacctcccagatggggtggtggccgggcagaggggctcctcacttcccagacggggcagctgggcagaggcacccccacctcccagacagggtggcggccgggcagaggctgaccccccccccacctccctcccagacggggcggctggccgggtgggggctgacccccccacctccctcccggacggggcggctggccgggcgggggctgaccccccacctccctcccagacggggcggctggcctggtgggggctgaccccccaactccctcccggacggggaggctggccgggcgggggctgaccccccaactccctcccggacggggtggctgctgggcgggggctgacccccacctccctcccagaggggtggctgctgggcagagacgctcctcacttcccagacggggcggctgccgggcggaggggctcctcacttctcagacggggcggctgccgggcggaggcgctcctcacttctcagacagggcggctgccgggcggaggggatcctcacttctcagatggggtggctgccaggtggaggggctcctcacttctcagacagggcagccgggcagagacgctcctcacctcccagatggggttgcggccgggcagaggcgctcctcacatcccagatggggcggcggggcagaggcgctccccacatctcagacgatgggcagccgggcagagacgctcctcacttcttagacgggatggcggcggggaagaggccctcctcacttcccagagtgggcagccgggcagaggggctcctcacatcccagacgatgggcagccaggcagagacgctcctcacatcccagacggggtggcagccgggcagaggctgcaatctcggcactttgggaggccaaggcaggcggctgggaggtggaggctgtagctagccaagatcacgccactgcactccagcctgggcaacaacattgagcactgagtgaacgagactccgtctgcaatcccggcacctcgggaggccgaggctggcagatcactcacggttaggagctggagaccagcccggccaacacagcgaaaccccctctccaccaaaaaaatacaaaaaccagtcaggcgtggcggcgcgtgcctgcaatcgcaggcactgggcaggctgaggcaggagaatcaggcagggaggttgcagtgagccgagatggcagcagtacagtccagcttcggctcagcatcagagggagaccatggaaagagagggagagggagaccgtggggagagggg

SEQ ID NO: 24830 - DNA, 832 bp, Artificial sequence
  DNA replication origin
gaggagcccctccgcccggcagccgccccgtctgggaagtgaggagcgtctctgcccagcagccacccctctgggagggaggtgggggtcagcccccgcccagcagccaccccgtccgggagggagttggggggtcagcccccgcccggccagcctccccgtccgggagggagttggggggtcagcccccaccaggccagccgccccgtctgggagggaggtggggggtcagcccccgcccggccagccgccccgtccgggagggaggtgggggggtcagcccccacccggccagccgccccgtctgggagggaggtggggggggggtcagcctctgcccggccgccaccctgtctgggaggtgggggtgcctctgcccagctgccccgtctgggaagtgaggagcccctctgcccggccaccaccccatctgggaggtgtacccaacagctcattgagaacgggccatgatgacgatggtggttttgtggaatagaaaagggggaaaggtggggaaaagacagagaaatcagattgttgctgtgtctgtgtagaaagaagtagacataggagactccattttgttctgtactaagaaaaattcttctgccttgggatgctgttgatctatgaccttacccccaactctgtgctctctgaaacatgtgctgtgtccactcggggttaaatggattaagggcggtgcaagatgtgctttgttaaacagatgcttgaaggcagcatgctggttaagagtcatcaccactccctaatctcaagtacccagcgacacaaacactgcggaaggccgcagggtcctctgcctaggaaa

SEQ ID NO: 24831 - DNA, 901 bp, Artificial sequence
  DNA replication origin
gaagcgcgtgagcgtgcgctggagcgccgacggctggcggagccaacgcgaggcgccagccgcctacgccggtccggccccgcccccgccgcgcgccgaccgcttcgccttccgcctgcccgcgccgccgattgggggcgccctgctcttcgccttgcgctaccgtgtgacaggtcacgagttctgggacaacaacggcggccgtgactatgctctacgtgggcccgagcacccgggcagtggcggagctccggagccgcagggctggatccactttatctgagacgaggcgcctgcggccgacggcggaaaacaccaaaggcacccgggggcggggcgacccgatgtggcggggaggagtaggagagaccaggattggcgggagcggtccaagggagtcaagccggggagggcgaaaagggtggggaaatcaggggcgtgggggcgtgggggcgtgggggcggggggagtgagcggaaccaaagaagctccgggagatccgggtgttaaaagctggttggatgtgagtggaaggaactcagaatataggaggaaggagacccgaaacggcaccggagggattataaaaaaaggaaaagaatggggatgatggtggccttcccttcagtgagtgggctctgggagaaagggaggaggtccatcaggcctaggcggttgaagaaggttaagaaccttttggagatggaggaggtatgatgtgaagtagcccacccagtcgaaggcatttacattgctggcgcattccctcttcttaccggccttttccacctcagatccccctgtcctacccatcctagctttaactcagccataattgccttgcttaatcccaggaacctggccactgctccttggtccttggcattatgacgggattccc

SEQ ID NO: 24832 - DNA, 695 bp, Artificial sequence
  DNA replication origin
actggtgggacaagtgcaggagtggatggtggcctacctggagacgcagctggctgactggatccacagcagtgggggctgggtaagaagcttctcaattgccgctctgcacatccttctgcaaagctggtctccagggggaagatgggggctctgattggaggctgaggcagctatgttgggaatgaggtacggggctgagtctccccgtctggatggaattagattgagagatgcctggactctgcactccagggctgccatgcagtcaacactggatgggctcatggtcccaagcagaggacagaatacacacccaaggagtgcctgcaggggaatgttgtcagggactttttacatctgagtcatggcgtgggaggtggggaggaccagggatgggtggtggtcaggcaagccttggcaaaggatgctagttctgagcagaatttttcgccaaggaaaggatggaattcactggaggcagagtgggcagatgaaccagtctctcagggtgggggtgcacctggggggatcagaggggcttgcagggagaagagctttggccagagaggagctgggtatggggtagtgctcgcagtggatggaactggaactcttcctctcctcttctctccactctttcctctcctgatatccctttctccttctttctctcctgcttcccttctctccca

SEQ ID NO: 24833 - DNA, 1105 bp, Artificial sequence
  DNA replication origin
gcagtcaacactggatgggctcatggtcccaagcagaggacagaatacacacccaaggagtgcctgcaggggaatgttgtcagggactttttacatctgagtcatggcgtgggaggtggggaggaccagggatgggtggtggtcaggcaagccttggcaaaggatgctagttctgagcagaatttttcgccaaggaaaggatggaattcactggaggcagagtgggcagatgaaccagtctctcagggtgggggtgcacctggggggatcagaggggcttgcagggagaagagctttggccagagaggagctgggtatggggtagtgctcgcagtggatggaactggaactcttcctctcctcttctctccactctttcctctcctgatatccctttctccttctttctctcctgcttcccttctctcccacaggcggagttcacagctctatacggggacggggccctggaggaggcgcggcgtctgcgggaggggaactgggcatcagtgaggacagtgctgacgggggccgtggcactgggggccctggtaactgtaggggccttttttgctagcaagtgaaagtccagggccaggtggggctaggtgtggctgggggccaggagagcaggaacagaacagagaaatgcccttggaagaagtggagttggtggatgggtgggcatggaacaggatgggcagagaaagggtagtgtgtgagggagctgagtaggccaggtaggcgattggaagagtgagcaggacacagaggggaggggaatgttttggcaagtttaggggcacaggagatgtagtcgttccagggctgggggaggtgggagggatcacgcctataggtgtgggcacatgaaacgacctggaacttgcttcacagccctgaggaaggtggacttacataagcagctgtattccattagatgagtgggatttagggaacgcagaaggcacatccctttggaatggaagcttaggggttctcaggtgatagggagaggtggctgttaacagtgggctgcttggacacgcgtgtgcatgtgcacgcatgctggtgtgcatgctgggctgcctggcaaatctggtgg

SEQ ID NO: 24834 - DNA, 1081 bp, Artificial sequence
  DNA replication origin
gggaatagtggggtataatgagtcacttgattttttggtttgctaatgaggatcttctcttgtccaaatccctcggccaaccatgtttgtttaactttttggttgggctatatgtatctttcgaactgtaggttagtgtgcccacaaaaatttctcttgcaaacgtacactgccattcctttctttttaataaatgtgtaggactgctaccaaaatatggcagtcctgccttccagggctaggtctcattggtacttggggtgcaggggtgtagtgggaacctgccaggagaaattcctctgggatcttgggggcttgagggcttaaatgaagggtggcacccaaatccccaatcaatgcctgttcaatcaacaaacatctaacaggacattatgtggtaggcatattgccaggccgtggagatgcgaatataaataggaaccggcccctcatctgcaggcgctcacaacctagttaggaaacagtaaaacaattaagcgcgccgtggagataggcccacttgtcctgggaaatgaggggaagctggggtttgcagtggtttgattgaagggggactacatgttagaggcacagactgggtgcaggtacacccaaaggaacgagaagagtggaaggaaacaacatccacaaagtaaccacatgctggcgtatcgaaggccgtgatttacggttttgagactttacctcgccagcaaaggggggccagtctgttagcggtgcagattggaggggtgacattggaagctgtccaggaaaaagaaaatggaactggggagcagaaggcctacgcaagagggcgggacagacaggacttgtgactagtagctctggactgaggaatcctccctgctttctggtgcgggagagctagtggatgatggtgccaataacctggatggggaaagtaagctccctcctggaatgcttcattcacaacctccattttcagcaacatcccatctactggtgcttcctggtcgagatacaagtttcctgaaactgctgctctgttttgggcctcacccggccaacagctcactagctggcaagcagtagtatc

SEQ ID NO: 24835 - DNA, 813 bp, Artificial sequence
  DNA replication origin
gcccgagctctgggcctccagtgacccggccggccagccgccggcctgctcgctcgccctccttccctcaccgggtcctcaatggcgccgtcccccgggtcaccctcgaccagtcccggctcctcctcctcctcttggctgccgggggctcccgaaccaggcccagggcccggagctcccgggggggcgcggggccggggcggctcctcttcgggctcgggctccggctcgggctccagcagcagctcctcaggctccagttcctcagactccaggccgttcccgtagtcccctgcgccccccggggccccctccccggcctccccaccggccccgggcacaagatggcgccgccgccccggcccggagccccgaccgcccgcagcccccgctgctgctgccgccgccgccgccgccgccatcgccgctcagactggggcccgccgcccggcgattggagagctgcgccggccacgccgaggactcattagtcaagctgcctgcccgtcaccatgagctagtactccattggggaatattacttggcaatcaaataaggccccacctctaaggcggggcactgcgccaaattctcaaatcccggtaggggaaatctgcctgtcaatcaacacgcgtcccacctcctatcgagtccttaggtaataataccgccacgctgtgacgatattcctgcttctccccggcctacgggcgggcccgcgaagtatgggacgctccgtgattggccctagctaggcgactggaaaggaccaatcttccgatcgcctcaccgcagtggcccagtctcagatg

SEQ ID NO: 24836 - DNA, 1123 bp, Artificial sequence
  DNA replication origin
ggcagcagcagcgggggctgcgggcggtcggggctccgggccggggcggcggcgccatcttgtgcccggggccggtggggaggccggggagggggccccggggggcgcaggggactacgggaacggcctggagtctgaggaactggagcctgaggagctgctgctggagcccgagccggagcccgagcccgaagaggagccgccccggccccgcgcccccccgggagctccgggccctgggcctggttcgggagcccccggcagccaagaggaggaggaggagccgggactggtcgagggtgacccgggggacggcgccattgaggacccggtgagggaaggagggcgagcgagcaggccggcggctggccggccgggtcactggaggcccagagctcgggcgagcgggtggcaggcggggggtggggttgggcggggaataacgtggctggggccgggtcgggccggggatgggtcagcgatcactacaaggggcccgactggcttgattcgggcgtcacggttgcctagtgttgttctagagagggtagcttttcttttatcacgaccctcgcatggggcgagggaaatggccgagcatggctgaggccgcgctctggccgagagcagggcacagcccctgcgttggttcctcttaagctgtcctccataccctccccacttatattaggagctggaagctatcaaagctcgagtcagggagatggaggaagaagctgagaagctaaaggagctacagaacgaggtagagaagcagatgaatatgagtccacctccaggcaatggtgagtaactggcggttgcacgcggagcccgggttctcgggttggaagggttgtggggaggatggggaatgtggggttagatactcggcaccctggagctgcttgtctgagctattatgactgtgccgcggtcatagtccgttgtgtgttcctctgacctttgtgaggcagaacgtatattttggtggtggtagccttgtgcctccctttgtgcctgttataattgtgttgctctttgttcttagtctacgtctatctttctttgtagaggttgcgtgctcgcatttgaccttcaaatctaatagtttttcctccaa

SEQ ID NO: 24837 - DNA, 1245 bp, Artificial sequence
  DNA replication origin
aggtagagaagcagatgaatatgagtccacctccaggcaatggtgagtaactggcggttgcacgcggagcccgggttctcgggttggaagggttgtggggaggatggggaatgtggggttagatactcggcaccctggagctgcttgtctgagctattatgactgtgccgcggtcatagtccgttgtgtgttcctctgacctttgtgaggcagaacgtatattttggtggtggtagccttgtgcctccctttgtgcctgttataattgtgttgctctttgttcttagtctacgtctatctttctttgtagaggttgcgtgctcgcatttgaccttcaaatctaatagtttttcctccaattggagacgctttaggattctaagagaaagcaagctgcaaggggtttcccctttaatctagaaatgtggagtctcagcccacttaattttgctcactcttaaaagcatttcaaccaaagccattcattagggatttgatttggaggcaggagggattcctatactgttttaagtgtgtattaattctttcaatttattgaatatttagtgagtacctgctatgcactaggcactattctcggttgtgggtacagcagggaacagcacagaccaaaatctttgccttcactgagcttatgggatagtgctggtggtggaagtgcaacatattggtcaagtagaaaacaagtgtgtggtttttgtaaaaaattattttttcctgatagctggcccggtgatcatgtccattgaggagaagatggaggctgatgcccgttccatctatgttggcaatgtacgtactggggctctgactggggttgggggcaagttcttcttttggggaattatttaatagtcctgaaaggaacatctccgggatagatgtggttttgggtgtggagggagtgtgggaaggaggttaaaggtaatggaatgatcagtaatcagcaaaggctctgggtttggaaggaaaagagattaattcctcaaattaccagatttcatgtgctttggtgtatgatggcccagaccaaaggctcgggagggttccttttgagacaggaatttgcctggtgcctgtgaaatttttctcctctcatcaggtggactatggtgcaacagcagaagagctggaagctcactttcatggctgtggttcagtcaaccgtgttaccatactgtgtgacaaatttagtggccatcccaaagggtaagtaaaggggag

SEQ ID NO: 24838 - DNA, 1190 bp, Artificial sequence
  DNA replication origin
tcagagggcagggttgggggtggcaagcagcgggacgtggtcacagcgggtagggggtggctgccgcagcagggaaggccggcgacacagctccccgtcccggagcacctcgggcaggagcttgcgcttggtctccggcagcagcataatgctgagaatgcagaggagggcgcaggccgccagcaccacgtgctgcaggaaggctccatggcccatgtggaggcgctgggccgggccgctcagtcctccaagcgcccctagagccatgatcaggcccaggccacggcccctggggggagacagaggaggagctcagcccacagctgtagccttgctgggcccttctcccgcagcccccctcctccagcccgcaggccctgtcctcaggggtggggtgggggagcgggaggcgagggggcccggctctgcccctgggggcacccctgctctcaccggacagtggtggggatgacctcagcagcaaggagggtgctgaggatggcggcagcttgggaggagaagagcccaaggacagagaaagtggtgatggcagcctcgttcagatctgcagaagcaagagggatgatatgaatgcaggtggggaggtcaaggctggcctagtcccgggtgtcatccccttggctctctgttcccatggctctagctgggcaggctctgggcattcagtaattgactgggagagcagatggggctgtggggccaggtggaggctcgtggaagagctgggcagggtctggggcttgtcttgggaggcctgtgccagaagaaatggctgtgcctgtctgaagcacctctgttggggttcccttgttgagcccacactgtggggaagataggatgctcacaatcccacaggcccagcaggaccagggaagcaatgccggtaagggtcatggagagaagaaggatgccccggcggccaaatcggtccacggtgacccccaggaagacacaggccagggctgcggtgccgctggccagcagagagcacaggtagaagtccgatgggctccctcctcctcccacaggctggtagcagtggcgaatggcatgggcaatgaagctgtgagaaggggtggggaagcaacgaacagagcctgaatcccctcccgcagccttctacagtgctgatggtcctccgcaggggtccccgggccttcccacccagc

SEQ ID NO: 24839 - DNA, 1217 bp, Artificial sequence
  DNA replication origin
ataaatgacatatgggtgataaggaggtataaacaaagcggacgctgaacaccagttaggaattagggagctaaagtggtctttgcaacaggtagcttgactaataatggtagagatggagagatgtgggatgtctgagaatatataggaagtaaaatgggcagaattttgtaaagaattcaacatggataaggaagagaaagctctaaaggctgttgcctgagcatttggccacaatgcgatgttgagggtgccattcgctgcagaaaaaagcagtggaagccaaccaagttatgggggaaaagcaaaaatttcgtcttgaacatattgagtttgaggtccctgtgagtcatccaaggtgaaggtcaaataagaggtggcttcataggtctggagctcagaacagaggtggaagctggagatgtcagtctgggcgtcaggtttgtattgtttgtatgggtggtgattgaagctgtgggcataggtaagatcccaaagtggagacagtgtgagatgagaggagggcctaggactaagtctgtgaggattccagacactgaaccatggtgtctaaatgatacagacgggaatggccctagaagccagcaccacagcctcatcactaccaatacagacccctcctgcagttgcgtcaccccgctggacttcaatcattgcctcaagaaccgggaggataatggcctgcccatgctcagcaccaatgccatgagctggaagacgatttctgcaatggagaaaaggggagcaagagagactcagcagcaaaggaagagagtgtttagaggaagaggggtcaacagtgccaaatgctgttgagaaatggagattcaaacaggatgggagtgatgaaacccaagaaagtggtctccttgtagaggactgaagctagggctgatacagggccaagacagtcttccatatgcataagttgtactgtaatagccagtttacatgtctgtctccctggagtaaaggtctccaaagtggaacttgtccaccctgttatccttaaagtctagtgcaagtcctggaacgtagtggacacttaaattttactgattagtgaatgggtgaatgaatgaatgaatgaatgatggcaaatgattggaagcagaggaagaatctctggcatctgcctggactagctactatccttcagctttttttcttttttaccgcaatggcccgcagaccca

SEQ ID NO: 24840 - DNA, 623 bp, Artificial sequence
  DNA replication origin
ggaggggctgggggcctcagggacaggcagggcaggcagagggcggcgggacaggctctcagctgaggggagccggggcctgtgtgggggtggggggcttctggccagaagctgggccagggtgtcctggtcatgggaggccaaggctccagggggctctggagaagggggagcctctggccccagcagaggcacatcgtagatcccctcatcagtgcccccgccctccccgtctgccagcagttcctcgggtgcttcatacaaattgagtaaggctgacgctcgtttcaggttggagggggcagcatagatggggggccccggctcccggcctccttcccactccagatctggttccagctctgcaggtggctttggggtcagaggcacatcatagggagcatcatcctctccagggggctgcggggcaacccgggtcagagggtgggaaaaggaggcagggcagtcataggggccactggagggcacccggagggcggtggggggcacatcgtagacctgcggaaaggagtggtcagtcatctgtcagctcagcgatgaaccctcccttggggccatttgtctcccacccaacatacacagggacctctagccctcacctc

SEQ ID NO: 24841 - DNA, 832 bp, Artificial sequence
  DNA replication origin
tgccagcagttcctcgggtgcttcatacaaattgagtaaggctgacgctcgtttcaggttggagggggcagcatagatggggggccccggctcccggcctccttcccactccagatctggttccagctctgcaggtggctttggggtcagaggcacatcatagggagcatcatcctctccagggggctgcggggcaacccgggtcagagggtgggaaaaggaggcagggcagtcataggggccactggagggcacccggagggcggtggggggcacatcgtagacctgcggaaaggagtggtcagtcatctgtcagctcagcgatgaaccctcccttggggccatttgtctcccacccaacatacacagggacctctagccctcacctccaaggcatctctgggagcagccagctgggtcccactagctctggggattttgtagatgaggtcaggagagggtgggcaaggtccagctggaggtcctgaggttggacagggccgagctgggggcggcaccacatacacctgagggatcaaatagatggggggtcaggaggaacggaggggccggtgatcagataatgtctgagtgcgaggagcttagagaccttctaactctccctgtatcgagagggccacagctcagaaaggttggtagacaggtttcgtccagcgcagagcagtgaagagctgtggcctcagggctcttcctgcccacctgctgcaggccctgggtggggctagttggggaggaatggggctcttctggcttggggttggggaggctcccactctcacctcctggtcctcattgctgtgatctggggctg

SEQ ID NO: 24842 - DNA, 1518 bp, Artificial sequence
  DNA replication origin
gctccaggcaacttggggcaagcgtctcagttctcgctctcccttcctcccagcggggtcgccgcagaccccagccctgggagcaccgctctgcagcgcggccggcgggtggagacggttggcccctaaactcgctcgtccagcccaaccgccccggcggcttctcccagccctcgaggctctcctgagcggcctggagaggcgtcgagcgcagcccagcgcccgcctgctcacccgccccggcccgggaagggaattttcggatcctgcgagcccggggcgcccccgcggcctagggcgggcagctcccggggcctggccgagccggtggcgcccgggaggccgcggggacagcacgcagcgcgcgcccttggatgccgtcccgcagcgacgccccggcccgccccgctcctcctcctgcctggctagcctgcctctcatttgggaagttttgtgggttttctttctcctcctccaaccttggcggaggccacgactcaggcgccacagctgggggctagaggccgcggaccatggtgcggggcagccaccgctgaagtcagcaaaaccgagcctggcctgaggcaggctgcgcgggaggccaaagccatggccattgccacgtcggtgagtccaccagggagtggaggctgccggggagagacctccacggcctgccctgcgctcctgtcactttatttctgccctctctttgtctctctccttggtccctttcttctccaggaggctgtgtccccctcctctcacttttgtttcccttctccctctcactcctcatcccctgctcctcctggctccgggctcgcccctcttccccgccccctccccattctcctttttcttcctagaggctgcgcctgaatggaggggaaggggcaagcgtagcccgagtcctatctgctccttttgggcgggaacagatggccactggtggttggcagaggcttgtggttgggaggcaagtaaaaggtttggagggggctgaaaggacctagtggctcacggaaaacggaaaacgagaggctgaacgaccccaggaggcccatctcgagacgagggataaggaaaaaagggagatagagcaaaggagggagatcaagaaagagaagacagagggaggaggggaggtgatgtcagccagagcctcaggccactttccagggatcgggacaaagggaggagacagctggcatgatgggacagtgggaggaggcctcccagagagcacagaggctctctgccacctacattaggctggccattccctcaccagtcagctgggctgctgggggatagagcaggagtggtcacacccatcatcaatcagtccatcaacaactctgtcctgcaatggcagggcccagaggcttggctccattggacagaactcagtcctaacaccgggaggagcgctctacagccccacctctgctttctgttctacagtctatgcagtctgaatccaggcagctttgttccctttccaccctcttctag

SEQ ID NO: 24843 - DNA, 1506 bp, Artificial sequence
  DNA replication origin
gagaaggcgagggaggagcaggggcccgggtcctgtggactcgcctgggctgggagtggggacactgagagggctgcgaaggctccgggggtcgcgcgtggcccgcaggctcacccctggcccgcggctgcccttccctccccttcctgggctcctggcccctctcagtgctgttcctttctcctcccctcaggccctctcctctcccgcgcagggctccgtcctggggattaagagaaaggagggaggggaaaggggaggggaagggaaggggcggaggagaaagagggacgatccttccaaaggcgggtgttgagtttcagctcaggaccctcgggtccaactgcctgtggtaccccccacaccccccacccccgtcccgccctggccctgccccagtccccggcgccttcctcctccggactccgctgcatgcctcgcttgcggtggtccgatcggctttctccgggagctttcctctccccgccacgcccccgtctccccggccgtccccgcgcctctcggcctccctttcattagccccacatctgtctttcccatgggagggagcgcgcgccttccgcccagcggggcccttagcagagcctctccaatcctcggcgcctcccctacacagggttcgctgggccgttcttgcggggcacaggaggggagtctggcgctggacatggattctggccctagtgacaacatgaagcagggcgtctggccccagaactgcaggcgggcaggttgtgcggcctcttacactcctctgccagtctgggcctgtcggcctcctcagcctggctcactcttgctgctatgaggagaggattgggcaggaccgctggcacaaaagttgctagaactcttccagaggagatgggatctagccccaccaggagtttccactgaaaggatggtgctcctagccccctacagctcctctgccctgggataactccttagtgtgtgctgcttccctggaccttccctctgggacacacacatcagggcctctcaggcttgagtgaagcctgccttcttccatttttgaggttcctggtatttaaaaagcaagatgacaaacaggattgaaagctgtggtatattttggatgtttacattgaacaaattaacgcttcaaacacatacaatagagaatgactctgtgcataaccttatttggagacaagatcagaaatgtaatataaggcccttggtgaacttgaggccctggacagataaccttgcctcaatattccacaggcccacacatctaggcatttcctaggagagtgtggtcaggacacctgccccagctccttccccactgtattacctgggcacctgtgaagaaacctctgctggaagggtgtggtggagcctatggggtggaatagggagagattctgggataaacatggggatggggataaactgtgttggctctaggctggctctccatgatggaagactcctgaatagattccaactccactg

SEQ ID NO: 24844 - DNA, 1832 bp, Artificial sequence
  DNA replication origin
agtgccagaaatggagcctggagctggaaagagtcctctgcaagggaaagaccctccagtctaggttctgccctgcagctaagcgtcatttaatgcctcttttcttattcgtaaggggatggggtgagcagactgggaaactcctcaaacagtgaggtgccacatcagcccacatggtgaataaggctgggcttggttgaagtactacataagaagagaatctagagaatggggcacagggagtccctcccacctcctggtgcccccccccctccccaggcgaagaacgccctggcccatgcactgcagtcggcccggcatgactgcgacctgctgcgggagcagtacgaggaggagacagaggccaaggccgagctgcagcgcgtcctgtccaaggccaactcggaggtggcccagtggaggaccaagtatgagacggacgccattcagcggactgaggagctcgaagaggccaagtgagctccagatacccccttaacctgactctcagagaggaaggggcgagaggacctggggtggggacaggcaaagtggtcatgagacggaagtggaagagacaggaggaactcggagggcaacagaagtgcttggaagaaagcctgaactctttgctctgtgaactctggctggccctgacccacttcctgtgacgggcgagcttttggcccgggttatacctgatgctcacgtataagacgagcaaaaagcttgttggtcagaggagctaccgtcgatcagcctgtgtggggggtgagggcagggggcactgacacccagatgccactgcaggtagggaggacgcctgggcagcccgtgctggcggactctgttccaggcatgagcaggctcagctcctgctaggctggacttacggtgtctcaaggagatatagggagggggtggaaggaggtccacccaaggctccagtgttgcccagtagagtcacacacacaccctccaccctcacctgggcagaaagaagctggcccagcggctgcaggatgccgaggaggccgtggaggctgttaatgccaagtgctcctcactggagaagaccaagcaccggctacagaatgagatagaggacttgatggtggacgtagagcgctccaatgctgctgctgcagccctggacaagaagcagagaaactttgacaaggtggaccatgggcgggggccgcagccagcatgcagggcaagggggcatgaggggttcagtgagaggccaaaggcaacctccttggaggtggaggaggagggctaagcccaggctcgggaccagggacagatcttggacatgcggctgaggctgggggctggggcactgggaagcaggagggctggggagctaaggctggggggctgaagagtgagccttgtccccgggcagatcctggccgagtggaagcagaagtatgaggagtcgcagtctgagctggagtcctcacagaaggaggctcgctccctcagcacagagctcttcaagctcaagaacgcctacgaggagtccctggagcacctagagaccttcaagcgggagaacaagaaccttcagggtgtgctgggggtccaagaggccagagatgagttggtgggagggagggccatgcaggggcagggggaacataggctttgagctttctggccctctggtccccagaggaaatctcggaccttactgagcagctaggagaaggaggaaagaatgtgcatgagctggagaaggtccgcaaacagctggaggtggagaagctggagctgcagtcagccctggaggaggcagaggtgagggccgagaactccctgcaccc

SEQ ID NO: 24845 - DNA, 1557 bp, Artificial sequence
  DNA replication origin
cacaagcctcagagtctctgggatctgagtcccgcagagagcctggtcagcacctcaggccttcccagggctgcctgcctgcccctcccaccttcggtgccgtctggctccgcctgctcctcccgctgcttctgcttgaacttcatgttcccgtagtgcatgatggctcccgtcagcttgtagacgccagctttctcctctgaagtgaagcccagcacgtcaaaggcactctgggacagagcgagagacaaagaggggggttggagcggtggccccaggagctcctggggtccctcgaacggccgcagcagccccctcactcacatcggtggccatgagctcctcggagtcatcaatggaggccacggacacctctccctgagacacgaaggcgtagtcgtagggattgttggtgaccagcagcatgtctgcaccaggcaaggggtgaggcaggggcaagggggcaggcggagggcagggaaggggcaggtagagttgggaaagggagggaggggcagggaggggtaagggacggggtgaatggaggaagggaggacagggagcagggagagaagagaagtcagcaaggaccaaggagtgaacccagaggaagtgaaagggtagaagaggggccctggcaggggctccagtaacaaggaggagggagggtggcaggggagtgacacatgggagatggggaggcaaataaagaggagaaggcaaagacaagccgagggaggagtggagagaagggtggagaaggagtgaggtgtgtgactgcacagggaggcgagaggagacgcaggtggtcttgggagggaagcgagagggagctggcggagtgagtggagggagaagggaagtgagcagcaaggtggggcacagtggggagcaggagggccctgccctgcatgcaggagtcgttggggtgtgcagcagggacagcagtgggtggggggtggcaggcaggttcacccagcaactccggcttcttgttggacagaatctggtagaagatgtggtagtttctctcagctttcagctggaagatcacccgggacttctccagcaggtctgaggtgggtggaggggaggaaggcaggtgaggaaggaaagagagtagagccagaaaaaggtggccatgggggcagagggcagggggcacccacagcttgatgaagagggccaggcgagaagatgtggcttaaataaaaaggatcctaaagcccagaggcaaatgcagacaaaacaggagatggcaggaatgatgagactggccgccaggcagggagagaaggcagagggggacctagagggtggcagcctccctgctggtactcacaggtctctatgtctgcagaagccagctttccagtggccccaaagtggatcctaatgaatttcccctggggacgaatgggacagagtgagggaactggcgggaaggacagagtgaaatcctggccctctgttcagcccagaagccctggatggttctggaaatgtaaacgacctctttggtgtctcagttgagtataagtgaagccgggcagagga

SEQ ID NO: 24846 - DNA, 1146 bp, Artificial sequence
  DNA replication origin
tgtctgaagggaccagtgcagaggtttagcttccctacctgtagcaaggaaagaagggcctttatcaaaggtctgggagtttactagattaaaacagctgaaccattctaagcaggaagagtgggaaggaagcaagatgggacagtagttggtttgctgggagtgaggaaaagtcaggaaaggggtccatggagaggctgggagaggggcagagggggagatatgcagagatattgcatagtagcggggctgggggagctgaggtccggctgtgggaacaaagacagtggagtgacgaggctaagactgcagaaaaggtgcagagctgtgtgtctgtgcatggtggaggagatgaccttgcccaagggcagagccttgtggctctgagaagccagggcagggggcacaggctccagcctggtctccccgtgcctgggccccttgtctctgagattacagccttggctgccaagagcagctccatgggggtggtgtggaacaaagcgaacggcccttttgtgattctgggttcctaagaatagcttggctgtgtgtggggaggtgtctgtagcctgcctgtcctgggtcttgttctcagaggtgttcgaatgcctggtgttggcggggctcattgctagttgctggggtagtggaggccgtcagcccacctcagcctctgttacctgtgcttgtccagctcagctttgggagaaggctcaaggcccagggacagtggaggggcagacacggagtggccccaaggtgttaagggagagaagacaaaggccacaagcctggaaaacaaatttgatgcctgaaagtgaagacagggagggttctgggaaggtaggggttgagggacagcagccagaagaggccagagcagggatggacatgtgggaaggacttgtgggacatggaggagaagcagagagaataggtgcacgcggaggccagaatgtggaaagcaaagggatgaggaatggtccaggggagggggagcaggatggacgggttgacagagaagagcagatggaaggagagaagagaacgaagcgggaaaggcagtgggcacttccacagagattggaggggggtggcatgactcttggaagagcttggaagcaaggctctcaaacgccattc

SEQ ID NO: 24847 - DNA, 858 bp, Artificial sequence
  DNA replication origin
tttgggaggctctgcaaggggcgggtataggctgtcatagctctttcgaaactgagcagcataacggctcagggcttcaaagggcagaaagcggcggtggacatgttcctcgtgtgtcttgaggataagcatattggagaagagtttcccacaggccccacaggccagcttgtccccacccccgagggcctcaggtgggggtggggtagggggagggggcacagcttgcttcccttcattgtactggatcaccagctcaaagccaaagttttctagaagggctttggctgcagtgcgggcagcctcgttgggcaatgggtcggggggtgaggaaggccctgcctcattaccctctttggccatggggggccgctcccactcccgctcagccagctcagccttgggaggttggggtggaggaggaggggtggcagctggcagggacagcacaggtgcaggcccagctagtgtcagcttgggccccaccttgagatcgtggaggtagaagggcaggagcagctgctgctgctggagcttaagcagtgattcgggcaccagagggaaggggggcaggactggtggggtgaagagaggggctgggaatcggtgcaggtccaagggaggtgggggaggggacaggaaaggcaatccagatatgaagccactggtgtcagggcccttcttctcagtgcccacctccccctctgtctcgccttccttgggctcttcttggctgcgttctggcccttcaatcttggaatcagtcttggttccccgagagcgagtctgatgcagaactgaccgcatgtggatctccagggtggagctctggttgtaggagactctgcagactgtgca

SEQ ID NO: 24848 - DNA, 939 bp, Artificial sequence
  DNA replication origin
ttctggcccttcaatcttggaatcagtcttggttccccgagagcgagtctgatgcagaactgaccgcatgtggatctccagggtggagctctggttgtaggagactctgcagactgtgcacttaaagggcttgtctgtggcagcagtggtggtgggtggggcaccggcctctccccgtgcaggggcagaggggtcaatggcagccttcttcatcttgtgaaggtgggagacagaattataatgaaccaacagaatattcttctgggtgaaggactccttacacacagtgcacttatagggccgggcagggtcgagaaacttgtccagggcaaagttggtggttttccgataggtcagagggtggcgagagtcagctggagctggctctgcagagcggagctccccagtggtcccctcttcctcctcagccatggtgggcggaggagctacgtcttcagcttgggcatcaggttcagggactggagatggggctggagaagggggttggccagggcttcctgagggtttgtctgggacctcaactgaggccaggggaggctcaggaagaggatctggactggcttctggggtcaggttagggccttctaggggagagagaagaaagtacaatgaggagggaacttcgtttaagccagaccccacccactcaataccaaggcagttgaccttggcctcagtcatcttcagaccttgttggcccatggagtcccctttcctggtaccttgggaggtttgctgttccattccttacctgctgcctggtctctgctcggtgtaggctctggcccatgagtggggggttcttggccattgtccagagggcttaatgtgggtgcagacagcactttggttgtaaatgtcatttctacagttgtagcctgcaatgagaaaaagcctagtggcttcaccaccaccccc

SEQ ID NO: 24849 - DNA, 1637 bp, Artificial sequence
  DNA replication origin
attcttccaatttcttattaatcaccccttggttcctcccctgcccccgagtccgcatagattttcctcccttcctttgcacatccctcacgtcatacatttctctaccccatgtgtttattgcaccgaccacccctttctttctttaattctgttcacctctgaaatcgtccatcttctgcccatgtctgcctgctccttttacctttccaagctcctgaggtttggaaaaacaatgatgggctaaaaactaaggtaaactctccagatcctttatccacccttactgttcttcaggctaaatgaacttggctccttacatacgatagcttttattacactaataaacactgcctcattaaaaaaaaatggtgctggatctaaatatgatagtagcaggggcctaggaagaagatgaactaaaaagtgaagaaaaagcaactgatatctagaatgaactgaaggatggggggcaaccaggcagggtggagcttagagtcctagggaatgtccccttacaaaatcaaagttgacagttaactgacataatggcactgactgatggaggggttatatgcccctggaagctcattaaatttatttcttggcctgtttatgtgccttcacaaaccataccccacacctctcccagccctttgcttgctggtactttctgctgctggggttaaaatgctggataagaggaaaagggataaaagaaactagaaacttagggtgatcaagaagaaaaggtaggaagagggcagattatgggaacaaaggtggaaactcagagctcatgggaaacagatggaaaaaaggggtgaagcaaaatggggaaataaaaaatatacaatgatacagtgggggaagggagtaaaattaagtcagcagggaagaggttttgttgtgcgaagctcctggaaaggcagatgacacgcatgagaccagaaggtgaggttctgatgagggagacaggcacatggcaaaggggacagtcaacaatgctaggaagttccaaagcttctctggtgatggtggaagaggaggctgtcctggccatgctgaaggcactagaggctttggcgaagacacatttgctccatcatcccactcctccaggccctgactgtgaccaccacaatcatgactgataagcaaattccaaagtagcctgaaaaggccagagatatccagacagactctgaaggagagggcatggaatcctagaccgacagaacaggcagccaaggcgtgacacatagtgatagagacacacaaggagaggatcactcagatgggaagggtcacaagtggagacagtgacatacagatccagagatggatgggatggaagagacaagatgaagaacagcaaaaccaaaagtcagggacacatggacagagatcagcggggctacaggcacagcgaggaagcgtggtcctgtgcttgaaaatgatagggctgctcagaggggcagacgagcggatgggggtggtaggatgggcgtgcaggacagacacgcttcaccttgaatgggcttatggcctcccctcacctactcaacactttcaaaaaaaggaatggaaagcccaacttcagccaaaaacgaacgaagactgagagtatccacgtc

SEQ ID NO: 24850 - DNA, 804 bp, Artificial sequence
  DNA replication origin
ccgcacggctcccgggggctggtacaggtctcatgcctgaggctgagccaggcaccccgaggcgcggatgcatgatgggagatgtagttccaaagggagactttgccatctcgccccgcccgtcgctatggcgacaggaaagctgcacttggtgcctgcggtactctacctaaagctgaactggggctacaaggcggcggggagagtcgggtgcaaggagctcaagccccagtcccgtctccaacaccccccgccgcacccccaacgcaggcagatgggcctggaatacaagccattcacaccgtccaacagatatctgctatagcagccagctaagcgcaggccagtggcaatggtggcgaggggggttggggtggggggagggaagggggcgggggcagcgcgtaataaagtccagtttagctactctggagttttagaggggatctaatacctcctggcatgaacgttgagggtaagagtgggtgagaaactttctgtcagagaataaagtggtattttggccaggaactaaagatatgatggtatttcaacagttggagacctagatggagacaggaatagcctaagcaaaggcccagaaactggagagcacctgggtggtacgtaaggagaagacgaggctagaaatgcagttgagggaaaagccttgagtgctagactgaggagtttgtcagagtttccagcggtccctaagcagtttttgtcaggtgtagaactacttatgttcatttagaatacagaaaggccggtgcggttgctcacacctgcaatcccagcact

SEQ ID NO: 24851 - DNA, 1983 bp, Artificial sequence
  DNA replication origin
cgctgtgcaccctgagtccagctcagtttcaggacagggctagttatatacaatctgagagtcctaagacagaagagccacgttatctgagatccctccaaataggctctaaagatctttgacccaccaggtttgaggagaaggggctaatcacggctcccaaagaacataaagaagaggctatggactaagaatatgcacagtagatatcaccatcctcttccccacccccataccagactgccttcctgagccagagagaacaggcctgtggccagaggaagtcatggggtgtgatcaattcaagcccatggcagctcgtcggcctgccttttcctcagctcttttgtgccccaccctcagaattacagaactcatttaaggatgacaaggcatctacgattaacagcagagggtgaaagggaagagaaaactgaggaagcatctgacatcacagggagaactgagaagcaacagtggggaaggactgatcagactcccaggctgcctgcacctaaggagcagggaaggtggtagggggttgtggaagggagactaagggtttagccagaagtgtagttgcaatggtgagaaagcatattgcatgttagtagggagaggggatgggatcattaccgaaaggggagacccactctcattccagttccagagctcaggaaagcatgacggggggcagtggggtggtagcagtgacaagaggaagaacagtgtcataacagaagaggctgaaggaacgcaagataggaagttctcatgccaggaaatctgtacgggtagaggtaggattaatagtaaggagaagtgacagtagaaagagaaagggaggcagagactgttaacataagggagacggtggctctgaacgagggggcggggcaggggcgaagctgcttggaggggaggatcaaggtacaggaccctgtgctagaccccacagagaggcctgtgactccaggggggtgagaggggttagtaacaacaggaggtgctaactgcaaagaaggtggtagtatagctcataagcaccaagcaggactgcaggggatgtgctaaaagagtgaggtctcgactgtcactgggaagggggcaggataggaatggaattacacagttccaggagggcctggcccttgcaactggaagaagtgttactacaggacgtagcagtagaagggtgtgagaggagcaggagggtgtgatggtggcaaacacagcccaggtcagggggaggaaaccaaacgggagctgccctggcctgccaggaagggaagcagctggcagagtgtggcgaagggtgacgactccagaggagaggaggatgtgatgtagaggggacaggggctagggggctggagcatctgagcagggactaacttgaagtgggggaagttctgctaaatccctgtctctggacccgacagggcagcagacgccctcctaaaggcagtggcagccagcagtgtcgctgagaaggccgtggaggcagctcgaatggccaaactgatagcccaggacctgcagcccatgctagaggccccaggtgaggcatggacagctggggggagggcagtgaggcccctagggagctagagaggctcaggtgtggggaaacagatgagaagccctgcaagggaagtggggatgggaaaaaacaaggaatgagggtgcaaggaacacagggtgggggccagacctggtagtctggggagtgggacttgggaatgtatgcagtaggataatggggggtttggggtctggcggtgagaggctatgagcctgggaattccaaagtcctgggaagtgcccagtcaggaataaagctgcagccactccagcccaaggccagttaggcccctctgattctcagctatccctacccaggccgcagacccaggcaggactcagaaggttccgacacggagcccctggatgaggacagccctggggtatatgagaacggac

SEQ ID NO: 24852 - DNA, 978 bp, Artificial sequence
  DNA replication origin
tcgctgctgctcagcgggctccgagcgggcggacgtcgcagctccctgggcagcaagcgaggctccctgcgcagcgaggtgagcagcgaggtgggcagcaccggaccgcccggctcggaggccagcgggcccccggccgcagcgccgcccgccctcatcgagggctcggccacagaggtgtacgcgggcgagtggcgcgcagatcggcgcagcggcttcggcgtcagccagcgctccaacgggctgcgctacgagggcgagtggctgggcaaccggcggcacggctacgggcgcaccacccgccccgacggctcccgcgaggagggcaagtacaagcgcaaccggctggtgcacggcgggcgcgtccgcagtctcctgcctctggcccttcggcggggcaaggttaaggagaaggtggacagggctgtcgagggcgcccgtcgagccgtgagtgctgcccgtcagcgccaggagatcgccgctgccaggtgggcgtccagttcagaggccaaagctgggctaagaggagggggtgcgctggggaccaggaaggcgggtgtgcctaagggaggcccaaggcccaaggcctagggcctgctattgcaagcctaaggccaggcagttggacccctgggcattcttggtgtttatatccgaggctacaggtggatgtgggtgtaactctggatagctgggtatttgagggagatggtgtaagactgtaaatgtgtctcggtgtcttttgtgtggagatgcatgtctatggaatccattgttgtgtgtgggagtagcaaggaagctgttttgtgcaggcccagaaatctcttggaactcaaaacatgtccctagtcttcctcctcttgcagctgatccagcctccaggcctcaggctgggagcatcaaccctgggtggaatagggactgtcccttcctaatcacgtcccagcctgacaccatttcagccttgggcctttggga

SEQ ID NO: 24853 - DNA, 1226 bp, Artificial sequence
  DNA replication origin
ccgatctgcgcgccactcgcccgcgtacacctctgtggccgagccctcgatgagggcgggcggcgctgcggccgggggcccgctggcctccgagccgggcggtccggtgctgcccacctcgctgctcacctcgctgcgcagggagcctcgcttgctgcccagggagctgcgacgtccgcccgctcggagcccgctgagcagcagcgaacggcgaaagaatccgccggccgccggagtgcgctttcgggacgacgcgccgtcggcgtccccgggcccggccagcacgaagccgccccgggagcccgaggcggggctgcctccctcgtcgcccggcaagggcaggggcgggggtggcgtcggggggtcgctgtggccggaatccagggaggtgcggcggggcgagcgcagcagcgccgcctgatggtagggcacactctggcgtaccccgtagccgtggcgcttcccggcctgccactggccctggtaggtgcctgcgggcggcggaggggtgggagaaagagtcaggacgtgccgctgggctccttgcgccccaagtcccaagcgcccctggaagcccaagcgtcaggcgggagagatggaggcagttagtgtggaggtcggggaagggcactgggagccgggaacaggccaggctgggccggaaagtgtgggagagcagagtgaagacgggcaggtagcaggagccctacgtggattttggcagtgcgggtaaacaggggaaacggggagggcccggcaggcatgcgaaggacaggctggtcagggcgtttagataggcaaacagtactctgaggggcacgccgacccgacggagagcagaggtgttggggacaggcaggtagagagggaggtgtgaggacaggcagacagggaaggggtgagggagaagcgagcaggagacagacaattgaggaaagcataatcatggtgggagagagcagaaattgggggctgggggtcacatcgatggggaatggtggcgggggaaagaaggatgggcgcaagggcgcaaatggcgggcgaaggcccaaggctggggaaggcgcacgcggacgagcagacagacactggtgggccgggccccgcacctccgtcggagtaggtctcagtgccgtagccgtcctggaaaccgtccttccagagcccggcgtagcgcaggccggacacgctttcccacacgccgctgcgccccttcagcccgccca

SEQ ID NO: 24854 - DNA, 2144 bp, Artificial sequence
  DNA replication origin
ccccgcctcccagccccccacgtagcagcccccgtcgtcaaagtcgaacttgcccccgggggacatgcatgtagttggcgcggcctcagccccccggcggctcagcgcatcctgggactggagagcctgctgggggccttggagccgggcgaggcctcggggcgggggcagttagaccggggccgggcgggggggccccagcgagggcaggcagggccggaccctcatcctgagtggctgcggagaaagagggaggggggcaagtggcgagagaggcccctcctctttgcccgccgctccctggcccggtggctctggggcatcagcgccgccccccaatccacccccctcctttggcagcatcttccagcagcccccaagctttgggggaatgggggcttcccccatttctgtctttgtggagcgggcccctcccaggacttggggccccaaccccaagcgggagtcccaattctccaacctagaaccccgaagtgtcgagtgtggatggcagtttgggggtcctgagagggggctgggcagaatcgtagggcacccgtttccctggctgctgtcaggacccctctgccccggttcttcggcgtctctggcaaagggatgggggtggggggtagaatatgtagcggggagatcggaccaaggtaggcagacggtttttcggggggtttttcggggggtttttcgggggatggggcccaggggaggctctgcaggggaaaggccagggtggggacgggcagacaggcagaagggagggggcaggctactcaccatgtgggctggggctcaggctgcctccccggcacagcatccatggcaggatacctccactcccacctcgcccggacaagccaagccccctccccttccggagagactgctccaacccagagaggaaaggtgggggagtccggagagtcccctctctccccagctggaggagcaggctgggtgggggggcgaggtagtggcaagggtgggggaagatgagaatagtgtaggggaaaaaatctgccttggatggagatagggaagaagagctgggagctggatgcaaagggggagggggctctcaagagggggtgtttttattatttttttcttcttatggttgggagaggaaaaataaatcaaaattccgattccatcccagcacaaatcaatgtttgctccatcccagcatcacgggggaggctgggccaggcagatttaaaggggcagggagaagagaagagagaagagggtgggtagagaaggatacggtgaagaagagacagcggcagtgttgcgggtggtggtggggtccccaagcagaaaaggatgggtgtccgctaacccttcggtgagggaggaggcaggcagagaggagaaggagatgcactgagacccccagggaggagagaaatcctggcatgcgggctgggagtggggcgaggcggaggggagggaagaggagcgagggggaggagactgagctgaagatggggaggcagggggaggccgaagccgggcgggggaggagagatgctggcgaggctgggagagggtgagaagaatacaaagaaagaggtgcaggggtgagcactaaggaggggggagatgcagcctgagagaggggaaggaggggagacccatactggggctcgggagggatggcaaggaggagaaaagcaggggaggagggaagaagggggaaagaaatagatatggagactgagagagcgaaataaggctcctgaagggagggagaaagctctgcagagggaagggcaggcgtgggtatagagatccaggcaggaagagcccagatagaggcaggagggccggaagtggtgtttgtggggccctagggagaaggatgaacctgtcagctgcttggactgaagccaaaaagctttggggcatggatgcgggtgtccactgagtccactatcctccggaagaaagcactggagggggaccaggaggctcacgctcttgcactttctgaagatgcctgaaatgggaccctgctaggaaccctggccccatcaatgcttctccaggcctccccatcctccatccccaccacccatttctctctgggttgtccctctgaaggagaagggggtgtattgcttctg

SEQ ID NO: 24855 - DNA, 1174 bp, Artificial sequence
  DNA replication origin
cccttaatccatttaaccctgagtggacacagcacatgtttcagagagcacggggttgggggtaaggttatagattaacagcatcccaaggcagaaaaatttttcttagtacagaacaaaatggagtctcctatgtctacttctttctacacagacacagcaacaatctgatttctctttcttttccccacatttcccccttttctatttgacaaaaccgccatcatcatcatggcccgttctcaatgagctgttgggtacacctcctagacggggtggcggccaggcagaggggcttctcacttcccagacggggtggccgggcagaggtgccccccatctcccgaacggggcggctggccgggggggggggctgccccccacctccctcccggacggggcggctgccaggcggaggggctcctcacttcccagacagggcggctgccgggcggaggggctcctcacttcccagactgggcggccgggcagaggggctcctcacatcccagacgatgggcggccaggcagagatgctcctcacttcccagatggggtggcggccgggcagaggctgcaatctcatcactttgggaggccaaggcaggcggctgggaggtggaggttgcagcgagctgagatcacgccactgcactccagcttgggcaacattgagcactgagtgagcgagactccatctgcaatcctggcacctcgggaggccgaggcgggcagatcactcgcggtcaggagctggagaccagcccggccaacacggcgaaaccccgtctccagcaaaaaatacaaaaaccagtcaggcgtggcggtgcgcgcctgcaatcccaggcactcggcaggctgaggcaggagaatcaggcagggaggttgcagtgagccgagatggtggcagtacagtccagcctcggctcggcatcagagggagaccgtggagagagagggagagggagactgtggagagggagacggagagggagagggagcaactttttttcaactttattttagaatctggggtgcatgtgcaggtttgttaaaaggtgtgttacatgatcctgaggtttggagggcagatgaatctattactcatggagtgagcatagtacctaagagataatttttcagcccttgtaccttgctctccctccttcctctg

SEQ ID NO: 24856 - DNA, 1263 bp, Artificial sequence
  DNA replication origin
ggcagcgcgacgcgcatgctcagtcgggcagctctccgggccggcgtgggagcccgcgctccaaggcccggtggggggaggggcgctcacgcaaccgccactgtctggagcgggctcgcctctgcggcagccctcaccgcccgggctttactgaagcggagtctagcatgtgcggctgctccacagcggtgtgggtggcggcggctcctctgcagcagcctcggcagtaggggtcagggtggccaagcccaccgtggagctcatctgagagttgtaaggtacgggactgcctcggtctttgggacgccccgtctggtagcatcccagatccagcacgttccttccggccctgcaccccggcccggtgcctcacaccccgctaccccaagcatccagactctaaggcagcccctgcatctcagtcctgacatcgctgtccctggagcatcctccgctggagctggagcttgacaggtagggtggagagggcggtggggggcggggggccgaaactgcatcagttaacggggccgtgggggagggaagtcctccattgctaaggcttcagtaggcgttctatgatcacagtgtaaacaaagctgcagggaagctctaactgggcggaacccaccgcagctcagcaaggcctactgcctctccagattccacctcaggggccagggcatatctgaacaaaaggcagcggacagcttctgcagacttcagtgtccttgcctgacatctctaaagacagcagtggttctcccagcacggagttcgtgctccgataacggacagactgcctccccgagtgggtccctgacccccatgtagcttgactgaaaaacaccgaccagtaggggcggagagacacctcatacaggtgggtgcccctgtggaacaaagcttccagaagaaggatcaggcagcaatatttgctgttctgcagcctcctctactgatacccaagaaaataaggtctggaatggacttccagcaaacccccaaagacctgcagctgaggggcctgttagaaggaaaactaacaaacagaaaggaatagcatcaacatcagcaaaggacagcatcaacatcagaatagcaaaggacatccacactaaaaccccatccataggtcaccaacatcaaagaccaaaggtagataaaaccacaaagatggagagaaaccagagcagaaatgctgaaacttccagaaaccagaacgtctcttctcttccaaaggaatacaagtcctcaccagca

SEQ ID NO: 24857 - DNA, 1241 bp, Artificial sequence
  DNA replication origin
ctcttctgtcctcccggctccctgccctctactggccagctgcccttgccagccacctcctccctccccacatgcccagtgccctcaccagcactcggtcctcaaacttcttgggctttgtctccaacttcacatgatgttgttggagcacggccccttggctcaggcacctccggatgctgtctgagggggggtgggagcctgctcagagcttcaccttaccctggccacccccacctcccagagctctccagatagaggcagggtcagggtcaaatgggataagagagaaacagagagacaaagaagggaggacagggacagagggcattccttcttgggtgacttttcacactgtctcttttttgacttttctcttcctattagagagggagtagggtgtggagaaaactccggctcctgatgtccctgagtcaggggacggttgctgactgtctgtgggagggtgtgtctcacacttctgagggtgtgaagaatttttccaacccatgcactacaacagccattgacacatacaaagtgagtcactgtgtgggggtgtggggtgtccctttgactatattctaggtggtccgggtgtgagtgtctgcctttactatgagagtgtgcatgcctcctggagatgtcagggagcctgagtgtggcattggtggggacaggtaagtgtgaatgagtatgctgtggaaggggcacagagccagacacttcctctgtgtgtgttgggcggggagaagaattaatgtttaaatgagccccatacccatctgctggcagaaccacccagatatagtgtgtgtgtgtgtgtgtgcacgcgcgtgtgctggggtgccatctctgtgaagatgtgtttacacacgtctaatgattgtgctgtgtgtgtgtgcaggtgtgggagattgccacggcgcagcatgcctctgagtatccacgagcatcctgcgctttgcgtgggctagcctgtgctcccgtctctgggggtcagggttgtggcagtgctgggtggccgggcctgggtttgggctaggtctgagaaccatgcaaacgggagaagccttgatgtgtgggtggtgggtagcgagaaggaagcaggctgggacggggctgtgggaggcgagcctcagagaccctcctgctcttggttttagctccaatccagggcctcttccctgactcctttctttgccccactggcctgggcgctgcccagctcctaaggggct

SEQ ID NO: 24858 - DNA, 859 bp, Artificial sequence
  DNA replication origin
agagcaggagagcgccactggcagccccgagggggcgagcgcagcggaaggtgcgggtgggccccgggccgggggtcactcaccgcaggccagggcggtacaatgcggccatggcacctgggcaggggctgcggggtggccaggaaccgagcggagccggggaggtatggaaggcggggaaggagggagcgcggcgaagcgagccacagcagaggctggcgggaggcgcttaaaaaggaggggggcaggcgcgggggcggaacctggtagggctggcactagctttcctccgccccgctggcaggccagctccctcggccccggggctccaggctccaggtcagcccagccgccgccccaacccctgcctccaaaccgccaaacccatctctcccattggaggactgggtccactcttcggcccccgacttcgaggccccgccccccatccgccaccgccctcccagccgcacatgatgtaactttgaggactcttgctcccgggagagacactaggtggcaaacaagctaggaacgaggggcgaggccaggggcgggagactacaggggccagacgtctagaagttagggggttgggcattgcctttccagttcctcctcctggggacgcgacaccctgagtcctgggcctttctgtagtccaagtgcccaatgctaaggtccacttagtccccaactcctaaatccccgtttctcctcctgatcaaggctcctttctgccttgccatgaaatggtggagtctctctacccctgggtctcttccttggtcctctgatctggtcattctcctcccccggcacatcccctcttcccctgacggagtcttactctgtcacc

SEQ ID NO: 24859 - DNA, 963 bp, Artificial sequence
  DNA replication origin
tgcccccgactcgcgtgggagcctggggggcgggtcggggatgcccccggccgctccagccacgcctccccagtgggccctttctagaccccgcggcgctcaccttggcttgggcctcgggctggaccctgagcatggccatgaccgggacggggggcctagcgccgcacaaggagtggagtgggcaccgcgaagggaaagcgaaagcggtagggcgctcgcacccagctccgccttcctgggtagtggggcggggagggctggaggaggcggggtcggatggaggaggcggggtcagccctgccatggaaggggcggtgccgcagaggagggcggcgggtgaggctccgcctagcgcgcacaggcgctcttcacccaccctccccgcgccgcctcgcgagggccagcttccaggctccccacctccgctggcccggtccccgcctcccgcctcccgccacctgccgcccgccgcctgaggacggcgggtccgggtcctcccatcgccaagcccaagccagtctctccgcgtcccaacctccacctcccgcctcccaactggctccccacctgctctcttcttcccctgctccgcctgggacagataagctttacttagggctcttccgtctttccctagagatggaataagacctggcctgtctttcctagccttgctagcgtgggcctctggctctgccgacatcctgcgcacctgtagcaacaccggcaccagagctggcagcatccctatccaagcccggaccaactctctcctggaccacggctgcagatgccattctataacccactctcacggagcagcgggttcatgcctctctctggcttaaaaccctttctcagctgcctgttgacctttgaatgaaatccaaaaggctgtcgcacctgtctcccctttaagtccactttctactgcttgccccttcattcattacacttgca

SEQ ID NO: 24860 - DNA, 1664 bp, Artificial sequence
  DNA replication origin
agggggaaagtggaaggaagcatggactagaaaagagcagggaagtggggcagcgctctcacctggacagccactccaaaattgttaccatcctcaatccgaggtatctgcagctgcaaccaggtggtgacctgggaagagggaatggcataatgccacatcagccctctacccaattcccagtttcatattctcccttgcttccctccccacactgggtggaggcgtgccgggtctatcctgagccccagggcctggacttctggtttcacttgctgtgccctctcttgctaaaacctggcaagtgccaggccctaaatggcagggaccaagaggacaatggtttgacttgaagcctgagagtttaagggggagggcttaccaggttgagctgctcaatgacatccttgatctcaggcttcaagcgctgcagaaggaccacgatcttttcattgcagttcactgggccacagggaggacctagagagtgagcaatgggtcagtcacatgattgagcctgtgtgaggggcgaaggggagactggaaagaaatccttaggaggagctcctgtgagtgggactcaagtctcttcccaccattgtggtttcaagtacctttgtcttcatcctcccccttcttcttttcatccttgtcttccttctgcagaaagagaggagctcatgagagtcaggactaaggttgattacccccatagttggatcccttctcccaggtcttcccagcttgcctcctgctgtttcttccgctcctctttctctttctccttgactggatcaggcactgggatgtccaatggggccttcagattgctcaagttggcttcattgagagctggctcctggtgtagggtgggaggagggctggaggtgagggagttcctctcacctcactctcacagcctccagactcttctcttggcctttactccctagctccctgcccagccgcggtacctttaaaaatgcatccagctcagaaatcttcttggggaaatagctcccgagcaggttctctgtctgtgtgtgaggtgggggtggaggaggatgggagtcagcatcaaatgcccgtcctaggtagtgaggcagggttgagcagtaggagttgggcaggggtggggccacgctgatggggcatgtcttaccttggtacagaggtcttcacgaaacacatccacctgtggggcacacgcatcccttcagaaacttggctttaaggccagttcatttgaggacagttcccttagggttatgtagggcctgacctggggaagggtggaggggatccctctaaggccagacctgaagaaagcgagatggatgcctgtagggtgggttggggtggtggagaaggtggatctctgcagacctggatctacggaaagtggagtgggtatccctggggctggatatgggggatgagaacattcctggcggtgaagggccagtgttcacgtgagaacagatctctggggtcgcctggcaggtgtgaggaggggtgctgagagtcctctgcaagtaggacagggatggggtgggccccgggaccctccctgagggaaaggccagaaggtagctggggcagtcccgcacccagtctgtgtgtggccccggccccaggccagcggagttcccctccacgccagc

SEQ ID NO: 24861 - DNA, 668 bp, Artificial sequence
  DNA replication origin
cgagtcgagttagcgttgtcgccgaaccgaagtgagagggcacggggaagggtcaaagagcgtgccgaagcgctggagggagcttcacggacgcgagctaggcaccggctcgcctaatccggtactaatccggcttgctgcttcccgtccaggcctcgctcgccatgggggaggtggagatctcggccctggcctacgtgaagatgtgcctgcatgctgcccggtacccacacgccgcagtcaacgggctgtttttggcgccagcgccgcggtctggagaatgcctgtgcctcaccgactgtgtgcccctcttccacagccacctggccctgtccgtcatgttggaggtcgccctcaaccaggtgcctccgttggatgcccatcccccaccgcgaacccacccaacaccccagcccaagttcatccccggtcccttggcagcagtgcgcatccacaaagccagcggcacaatttaattactgatggcccctttcctacgacaggtggatgtgtggggagcacaggccggtctggtggtggctggttactaccatgccaatgcagctgtgaacgatcagaggtgagtggcgtagccagaggaagaaggaaaggattatggcgggttggggattggaggaatagagggcgaggatgcgtggggcggtggg

SEQ ID NO: 24862 - DNA, 1202 bp, Artificial sequence
  DNA replication origin
tggctcaggcctttctcaccacaaactagctttccctggaagctcctgctcactgcagtcagaaggcaggaatctgggaatccccgagaagtgaaggcactagcgagattgggggagttctctggcactgcttggtcccctgaaccacccagcttggcctccacccaagagggttctatgaccccttcctggcctccgattccccattacctgtttgcgggcttccccgctcaggcgcaccccacacggcttggccatgctgcttcagtcgctagatctctggtctcccggctagtcgcccgggctttcgctttcactccccaggtccaggcccgcccccctcaaccccgccccctttcttctttccgcccccctcctcccgctggcaggccgcaagcagtaggtagcccctcagccattcccagccagttgccactaggagaggcggtgctggctgggtcacagtccaggggctgcccgagggaggggctagggtaagtgggaccgcggagactggagcgggggctgtccctcggagaggggcggggcttatagctagggccaactggaagtccagggttggggtaagagaggtgggagtatggcaaagggggtattcagtggcggggctcccccaagaaggctcgaccgcaagtagcggacggagagagatcagagcgagtgggaggggcagccagagggagcgcctggggtggagaaggactagcagctcttagaagagagcgggcaggggttgggtgagggtcttccctctgccttcaggacagaccggagatggggcgggactcgctcgagaggggttagggccggccagagtcggttcccctgcagggtgggacttcctcggtgaggcccggagcgtaccggactggtccagctagaaaaagaaaggttttgagctgaataggataaccccgcgcctgcggctatccggaaggggtggaaccagattgggggaaggcggggaagagcgcttgactgagggaagatgctggcgcgctctgagggaggagccaggagccatttgccttctcattggttgggacctggccctccctcttggccgcgccccctggtttcctgacaccgctccaaccttaaccttaagccccgcccgttcctccgaaattgggtcgcagtcccaccctctctcctagtacttcctgttctcggctaaccct

SEQ ID NO: 24863 - DNA, 1110 bp, Artificial sequence
  DNA replication origin
gggacctggccctccctcttggccgcgccccctggtttcctgacaccgctccaaccttaaccttaagccccgcccgttcctccgaaattgggtcgcagtcccaccctctctcctagtacttcctgttctcggctaaccctggcgctgggccgggggctggagagtgaccgtggtctgagtgacctggggcggctgcgtgggccggggtgggcctcaaagccgggcaccagacgggaggggcggcgctcgggccgcgcgctgcccgcgccgggtcctggcgggcggcgaggctggggctgactcctgcctcaggatgccgggggaggaagaggagcgggccttcctggtggcccgcgaggagctggcgagcgccctgaggagggattccgggcaggcgttttccctggagcagctccggccgctactagccagctctctgccgctagccgcccgctacctgcagctggacgccgcacgccttgtccgctgcaacgctcatggggaggtgaggcccggccccgcttggaagggggacaccagggcctgaggcccaggccacgctcacacctctctgctctccttgctcccagccccgaaactacctcaacaccctgtccacggctctgaacatcctggagaaatacggccgcaaccttctcagccctcagcggcctcggtactggcgtggtgtcaagtttaataaccctgtctttcgcagcacggtggatgctgtgcaggtgaatcccctggccttatgggagagggggctggggtttggctagaaaaggcctgaggttgtgctgaatgggaaggggtccagccctactaggcaggaaacctcctgggtggtgactcgtttgaatgtgtggcaggggggccgagatgtgctgcgattatatggctacacagaggagcaaccagatgggttgagcttccccgaagggcaggaggagccagatgagcaccaggttgctacagtcacactggaagtactgctgcttcggacagagctcagcctgctattgcaggtgagatgctcctctagtcttgatggacttatgcaccagggctggggagcccagcctaactcaagtaagtttgaggaccccc

SEQ ID NO: 24864 - DNA, 875 bp, Artificial sequence
  DNA replication origin
tgggttgggttccaggttggagatgcagagctccaaggggacgtccgggccggaatccagagcaggtcccgagggagcacggtgtcctccacagcaggcctcggtcctcgagcgctgggagcgatgtcaggcccctgggccttgcactggcttgggcggccgcggtgtggccccgggccgcctactgcaggactagatcgcaccgcgggaagcgagcgcttcggggcaccgcacctcgctcctcattagatggcggcttttgccctgacagccaatggggaacgggggtcgggtcgggaacgccaagtatcctggcaacagggtctcccgaggcagccagcaaaccaatcataaggattttgcgcgccgctggggtccattgtgaggtgttccgaccaatgggctccggttctcgcctctagtaacaggcgccccttccttgaccaatgagcgcatccccgtcgctcccccgccgctcccccgccgcaagcctggcaacaagggcgcctcaattggtaggggaggtcgggtcacctcgggggcaactgtactgggcctcttccgggtgccaagatgtaccttgcacggcgcctgacctgaggttagaccccgcccttcccccaatccacaaactccgactttgtttccaactagggcgtgtcgtgtgctgcagaggaagaaagatgtgagatgaggccgggcgcagtggctcacgcctgtaatcctagcactttgggaggccgaggcgggcggatcatgaggttaggagttcgagtccagcctgaccaatatggtgaaaccccgtctctattaaaaatgcaaaagttagctgggcgtggtggcacgcgcctgtaatcccagctactcaggaggct

SEQ ID NO: 24865 - DNA, 1414 bp, Artificial sequence
  DNA replication origin
aggacccccgcctcgccgaagacgggcggggcaagccgagcctcacggggtccccggagctgggccgggcctccagatggagaaggcgcaacggggagttcttgagtaagccagagcggtgtccagcgcggtgtagccgcagccgccgctgtcaggcgcagcaacgggcaaccccgtagaagtcggtcggcaggtcctctccaacccgccgctaccgcgccgctgtgggagagaccccagcaggagcccaaaggcagctacgggggcgcgaaggccgctggcgccgcctcggccagcccttcccgcgcggtgaggaccccggggctgtggcgggaagggacccgaggtgcgagaccgagcggcgttgccatggaaacgggccagggcgcgtagtagaggccccgggccagacgggctgcgggtggggtgaaccccaggttgggaggatgagagagcagaggtggagcggggtctttgggatagagagacgtggggtagggtgaggcggggagggggccaatgggagcaagtggagccaggggacctcagttcgaggcacctgacctggggtttctgtaacctccctggtttctataacctcaggattcccccaaacaggttccactgccttaaggatgacagtcgtagggaaccctcgaagttggagctgccagtggttgccaatcctgatactgttgctgggcacaggccatgggccaggggtggaaggcgtgacacactacaaggccggcgaccctgttattctgtatgtcaacaaagtgggaccctaccataaccctcaggaaacttaccactactatcagcttccagtctgctgccctgagaagatacgtcacaaaagccttagcctgggtgaagtgctggatggggaccgaatggctgagtctttgtatgagatccgctttcgggaaaacgtggagaagagaattctgtgccacatgcagctcagttctgcacaggtcagcctctccacattggctatcacgtagccctccttcccagagactaacagtgccttacatttatggttcagggtacctttatggaaattgtctgatttgattctaactacaatacaacccagtgtggcaggcaggttaggtgatgctattctaattcagttgactaagatacatacttgctcagaagttacttttttcaagattacatggacagtgatttgcagaactgatatcagagcccagggtttcttactgcaagcttctctgttggtcatgaggtcccaactatcagtcccacatagttctgtttccttccatgcctacctcttggctgtttcttagctgtttcctgtagtctctacctaaacttccctgtcatgctttttctttagtgaatcctggtacttctccttagtccactccagacctcc

SEQ ID NO: 24866 - DNA, 918 bp, Artificial sequence
  DNA replication origin
cagggtcaggctgcgtgatggaggtggaaggcacgcagttacctgttcggggtggagggtcctgcacatctccttgtaggatgggcagacttctgagggagaggaagaggaaaagaaccacccgtgacagggacggagacatgggtactttacctcaaggcagcgcagggcagccagtgcaggtggcagggttcggaggcgattgtgtgacaagtcaagatgggtgaccaagagcagctgttccagatggcagagcactgtcagatcctggggggtgaagggaggaaggaggtgatgggcttcccaggagacctgggagagggtcctcggccagcatttattaggcacatgccctctgtgccccacaggcccttggggaccccagccaagaagaggatgggagcatgtgggaagctgaccttacagcccacagcagtacatgacgtgggacagacagtgctgcgagtggggtaaccagtggggtgggtgaggaggaggaggcctggagttcggaggtacaggggccagtggagggtgctgggtaaacaaagactggtcccccatggggactggtcctgatgaggcagagatgagtttggcaggaatggaggtgggctgtggtgatgtgataaaactaatgtgttgggaaggactaggaaagtggagcctggacaacttctcaggaatctctggaaagtatttggccttcaggtattggaggttgctccagggtgagatgtgctggaatgtgtgggaggagtgggctagcggtcactctgaaggaagatgaagctgtgaccagcctggggaagaaacagcacaaggaggtcctggtgactcgggatttgaaagtgagtggcaagaagaagaatgggctgagtgacagaaaggcctggaagaggagcaagctgggaggca

SEQ ID NO: 24867 - DNA, 861 bp, Artificial sequence
  DNA replication origin
tggggctagtggctagtattggacagagcaggtctcttgggtgagacacgtaagatggagtaggacaggggcccatgagggcccacagaagggacacctcacccagactcaggttaagaagaacttgttttagatctggtgattgtaacggtttacatttttttctgtttaacttttgatgcttactctattcttctataaaacttgtcactgaggcataatgtattatactgaaagtgcacaaatcacagatgtgcagctctgatcctcctattttaaaactctcccagacacaggtatgggtaaaaggtttagtgggggacgggagacacagaacggaggtaaatgtggggaaggaggttagaaaaccccctcttcagggatgatctggcagaacctagaatccacatgaatgtccctgtggctgtgggggggcagtgggcatggagagtgaggatggagaaggactatttctgaggaccagtaggcaggatttggtagcaggtgagactaagatgcagggacgaagggaactgggaggaaggcttgcagttgtaaagctgaggacttgagaatttgtggtgtccacagaggtcctagaacatgggcgtggggagggatggttgcatgagaagaggaagggctacttctcacatgtttggttttgatgtggagatgtcctgaggcaacaagaaatccttgcctggagagaggctgagaggtcaaggcagaagaagtcagcgtgggcgtcaggtgtgcgcaggtagtcattacacccagcagagaatgggtgctctggggagaggggaggtgagggaacccacaaacaagctttgatagagcgtggtgagggcagggctg

SEQ ID NO: 24868 - DNA, 1690 bp, Artificial sequence
  DNA replication origin
gtagaacaactctctctcactgtctgttgtgaggatacgctgtagcccactcattaagtacattctcctaataaatgctttggactgatcaccctgccagtcttttgtcttgggcaatctatacttttctcagaggttcccaaggcctactgaagggacttaacatactcttaatggctttcctctctcttgttttaccttatgccctcacttcctgagttaacctcccaaatacaggatcacctgtacccaagcccttagctcaagaatacaggatcacctgtacccaagcccttagctcaagctctgctttggaagaacccaaactaagacagtgctcctggtgccctccccaagcaacctcaagttctggctgttacttgagcagaggcctttcttttcccttcccccagctctatccatctgccaggcccccctcaaatctcttcatttccaagttttgcttgacttttccaagaggagagggctgcttcttagtatgtccctactcatcctttcctttcttgtcttgtatcctggtgcagcctggtaatggggcctcttcatggttgtgtgtcatgactccctaaccattatgcctccatgcatcccctgttcctcctggaacctagcaccatgccttacatggaaaagctgtcattgacagcccggtgagagccctgagggtggagtgactggggcagggcctgaggcaagaggtgggaggaggtaggaggccaggggctcagccggaccaggagactggaaacaggcaaggataaggcaggtgggggactgagttgtttgggtcacctctgcaggccagagagaccaggcaacatacacactgcagaaggtgggctgggaggattggggccagagctgggggagggatgagaacagaagcaggaccaggattcagcagagtcctcctatttccttccaccaccagggaatcttactgccccacttcagcttgtgctgtttcctggcaaggcaggctctcacatgcctggacgcctgggtgcgttggtgatgggaaggagcagggtgagggaggggccccaggagaggcccaggatgagcctcatcttgtccctccccattcttgtcttaccctctgcaaatgtgataggcacaggacaggagtaggcacctcgcctactgctgcttaacctttcagcttctccaggcccccaatcctgcttgctcccagcttggtaagtagatctgtgcacgtccctttacaccccaccatccagttttgcccagatgtgctagaatggggctggacaaagaaggaggggccagactagaggagtggtggtagagatagtgacagcctggggtgatgactttatgcctgtttaccactgagctctgggaaggaggccaggagtggggcaggtcaactgactgggagcaggggatctgggttccaagaaggagttgtgtttgaggtggggtctgggtcctcgtggaagtcaggactcccaggcagaaaagaggcaggctgcagggaagtaaggaggaggcatggcaccttctcatcgggcatcacaggtggggttttgccccacccctgaacgccctctgtggcgccttccacccacctgtaggcccagaaggatgtcggtctgctaccgtcccccagggaacgagacactgctgagctggaagacttcgcggg

SEQ ID NO: 24869 - DNA, 939 bp, Artificial sequence
  DNA replication origin
cgtctaccgccacctgtggagggaccgcgtatgccagctgtgccacccgtcgccggtccacgccgccgcccacctgagcctggagactctgaccgctttcgtgcttcctttcgggctgatgctcggctgctacagcgtgacgctggcacggctgcggggcgcccgctggggctccgggcggcacggggcgcgggtgggccggctggtgagcgccatcgtgcttgccttcggcttgctctgggccccctaccacgcagtcaaccttctgcaggcggtcgcagcgctggctccaccggaaggggccttggcgaagctgggcggagccggccaggcggcgcgagcgggaactacggccttggccttcttcagttctagcgtcaacccggtgctctacgtcttcaccgctggagatctgctgccccgggcaggtccccgtttcctcacgcggctcttcgaaggctctggggaggcccgagggggcggccgctctagggaagggaccatggagctccgaactacccctcagctgaaagtggtggggcagggccgcggcaatggagacccggggggtgggatggagaaggacggtccggaatgggacctttgacagcagaccctacaacctgctgcccttccctgtccctttccaccccccacccaccctccagaggtcagtgttctgggacatttggggacccttctttgactagagtttggatctggctgggtaggattactatacacttggggcaggcccaggctcctccaaactgagggattatgagggtggtgatggtccctgttaaggactattgtgtgcttgcaagttggcatgtacccatgtgccagcattgcttacttgttgccaatagctgttattgtgaaatacactgggaagccattagatgatgacttaagtgtgcttcccctggtggttct

SEQ ID NO: 24870 - DNA, 900 bp, Artificial sequence
  DNA replication origin
tgctgcccttccctgtccctttccaccccccacccaccctccagaggtcagtgttctgggacatttggggacccttctttgactagagtttggatctggctgggtaggattactatacacttggggcaggcccaggctcctccaaactgagggattatgagggtggtgatggtccctgttaaggactattgtgtgcttgcaagttggcatgtacccatgtgccagcattgcttacttgttgccaatagctgttattgtgaaatacactgggaagccattagatgatgacttaagtgtgcttcccctggtggttcttcatgcctgagttgtactgaagccacctagttccctgctgggtcaagccaggctgggcagtgccagccttcagtggcatcttgacctgccctcctcagcccaggtgccctggttccacaggccaacccatagaaccactctggaaataaaggagaaaatggaaggagaggtatgggagcttggatgaggggtaggaatgggatccattctctgaggcttataaaagcctctgaggaggaaatggctctgaaggggaaaatgaatctgtggggtttgaaaaggaagttttcctgcctgtcttgtatttggtccagtgagtatgagacaggcacacaaggagtggacagtggtgtaggggccctgggagtctgagacttaccttgccccctgaccatctgatcctccctgcaaaggccacctgacgtgaaaaggagccaggagcaagcactcagtcagggaagtttggaggttggccattggggtatgaggaatggcaggaatatttagaggacaggaataatttttcagagaagtgccacatattctttttctctttgccaagtctgggctccttctaagatgctg

SEQ ID NO: 24871 - DNA, 1793 bp, Artificial sequence
  DNA replication origin
cctccttccaccaggcctagttcagttcgtttaacttgagagggctggaggcagtgaggctctcggaagggccgggctccagagcggcggggccgctcctagcggtctggcccaggctgcccccgcggcgcgtgctggacgcctcggagcccgtgccctccagcagcttggcgacgaagcccacgcccgccgagcgcagcaggccgccgccggcgcacgcgtacagcacggggttcacgctgctgctcaggaaggcgagtgcgatgagcacgttgcgggccaggctcagccgcttccccacgagccctaacccggcggcctggccggccagcgcgcggcccgcctcagccaggttcaccacgtggtagggcagccagaaggcggcgaaggtcaggatgatgagcaccaccaggcggccggtgcggcggctgcggcggaagcgccgggcctgtagccgacgccctatgtccgagtagctggccaccacagccaggaagggcagcaggaagcccgtgacagcctcgaagattagatggaaggcccggtgcccttcgctggggtaccgcgggaagcacaggctcatgttcgttttccagggcactactgtgcggtacgcgaggacgggtgtggccagcagaaaggacaacacccagatgcctgccagcacccgccgggccatcgccttggtgcgtagcttctgggacacaaaggggcgggccaccgccagtgagcggtctagactcatggccgtgataagcaggacgctggcgtacatgctgactccgcagacatagtgacacaggcggcaaccagccagtccaaaactccaggtgccttgggccaggaagtgaaggaaaaagggagcagtgagcaatacggccaggtcggccagggccaggttcagcaccatcagggcagtgacagagcgcttctgcatccttttcaggatactccacaccacaaagctgttgccgggaagccccacagccagcgccactgacagcaggatgatagccagcagagagatgaactctacacctagtgaggggggtgctgcagaagatgtagtgttcatggccgtcgggaggacctggagagtgagggcggacacacgcatgagagtagaggaccaagggtttcctgacgccatggacacacctaggctgagaactctagtctatctccagggtcagcagcatcagaggtccccctgaaatatactgcccccatcgctgcagactgacaacttaaagggatctggttgagtacaaagactagtttcctaactgggtcatgcggccccttcctgtccacagacccaattgcaaaatatacagtgaccacagcagcagcagcatttccagaccttttcagtctcctccccttaggagaccctaaagcccagaaccaaacagagttcctaccaatgctgcaccccttgaaaggccagtctttttgccccctgccaggccctcagcccctcaatcccattaactttcccaatcacctgcctactgtccccagagatgcccagggtcaaccaggaataacagggaggggaggagtttagtggacaagtgacaaggacaaagcctcccaactttttacgctggtcaggctttctttggagattcctttgcaccttctttcatggctgcacactgtcccaccaccaccacaaccacggccgctcccaggaaacttacttacaagctttggcaggaactggttggaagctgatgccaatcccagggtcagggcagggtggtgtagcctatccctggatctgtccc

SEQ ID NO: 24872 - DNA, 1130 bp, Artificial sequence
  DNA replication origin
tggctgtggtggccagctactcggacatagggcgtcggctacaggcccggcgcttccgccgcagccgccgcaccggccgcctggtggtgctcatcatcctgaccttcgccgccttctggctgccctaccacgtggtgaacctggctgaggcgggccgcgcgctggccggccaggccgccgggttagggctcgtggggaagcggctgagcctggcccgcaacgtgctcatcgcactcgccttcctgagcagcagcgtgaaccccgtgctgtacgcgtgcgccggcggcggcctgctgcgctcggcgggcgtgggcttcgtcgccaagctgctggagggcacgggctccgaggcgtccagcacgcgccgcgggggcagcctgggccagaccgctaggagcggccccgccgctctggagcccggcccttccgagagcctcactgcctccagccctctcaagttaaacgaactgaactaggcctggtggaaggaggcgcactttcctcctggcagaatgctagctctgagccagttcagtacctggaggaggagcaggggcgtggagggcgtggagggcgtgggagcgtgggaggcgggagtggagtggaagaagagggagaggtggagcaaagtgagggccgagtgagagcgtgctccagcctggctcccacaggcagctttaaccattaaaactgaagtctgaaatttggtcaaccttgtgagtggggtacatgtgctgtgggtatcggggtgctcgtgggcgccctggtggggcccctctcggtagttgagagtcacgtcctttagttccccatgatttacaattttggaagggacacaaagaaacatagacttcccccatcccagatgattccgagtacatagtctgcagataatacttagcaaaacgcagtctacagactcctaaagcagcttgtctaggaagaccacccatgtgggcttatcactccaggttctgtgacccgggaccttctgagaaaacagcactgctgtgaaatatcttccttgaagcctgtgataagtctccttgttagaatgactccaacttcctgccaataatctttgtcctctccataggagatgttctaggggatgccttccttccctccat

SEQ ID NO: 24873 - DNA, 857 bp, Artificial sequence
  DNA replication origin
cggggatcaggggaacccggggctccctcgcaccaaccccaaatcctgccctcctggcgatgaggcttttctagggcacctctacaatccgggtttgagggaggaggaggaaaggactgagggatcccctcatcgccagctgggagcgggctgggaggccgcagggagggcctgaaaaaggagacgggattgccacgaggttgggggcgcggggtggtagcggctttgagcgggtgagaaaagctcaggtggggcccgccgggccgaaggaggtaacccggcgcccggccctagccagccccggggctcggggctggggagatcatggcccgcctcttcagcccccggccgccccccagcgaagacctcttctacgagacctactacagcctgagccagcagtacccgctgctgctgctgctgctggggatcgtgctctgtgcgctcgcggcgctgctcgcagtggcctgggccagcggcagggtgagccgagcctctgctgcgggagggtctctacctggggagcattttcggggttggggtttgtggggtcttcttttcgatgtgttttcgttgctgggagcagagaaagaaaggaccattgagcctggctaggaactgcagtgaccctgggcaagtcactctacccttctgggtctgctcagggagaaagctgagtcctggatgcttctcgtttctgtccgggttctgacagactttatgaacatccgtggtctacgggttctacaataaatccatcaccggattttccagttttccaaaggggaaattctaggaggcccctggggaattcatttcctgcctttctctccctcttaggggatgtagagcagttg

SEQ ID NO: 24874 - DNA, 1331 bp, Artificial sequence
  DNA replication origin
ctgacaagtagagacttcatactccccacccacccccaacttggcctttctgacagctaaaccctcctgccaccatcactatttctcttaaagggcgaccgctcgttaacatatacaactgctctggggtgcaagttggagacaacaactacttgactatgcaacagacaactgccttgcccacatggggcttggcaccttcgggcaaggggaggggcttgcagcaccccccaccagtaggttcgcaagaaggccctaaagatcctgaagcctggagcaggccacagggttggtataatcatagcgggaaataaagcaccttccaagcttgcctccaagagttacgagttaaggaagagtgccaccccttgaggcccctgacttccttctagggcagtctggcctgcccacaaactgactttgtgacctgtcccccaggagtcaataaacatgatggaatgctagtcagtctgagctcagccaggggcagggagggactgggatgggggtgggagctgccagtgagggatagggaggcaccacagctctgctatggcaggaagtggggatgctgggggctgggagtgggcaatggcctggcacacaaggtcagggcacagccggctacaacaggaaggaatcctagaggcctggttccccagaccactctctaatctcagggcagtgcttcctctaaagcctaggatggcgaccccaccctaaccctaaactctggggatagaggctgtggtcccttttcttccgggctctcaagactcacttgcagggctctggcgagggatgagttgatgtgaaagatcacagacctggccccgcacggtgcccccaggctcttagagatcatgacgccacatacctgcctccaccacacactcaggttgcttcctggacattgcttcccttttgattcccagttgctgttcgggagtggaaagctatggctcctaaagctatacacaggcgcaacccctcccacggagcatgaacagttcaaacccggtggtagtggttgccagccaagcggagaggtcaagagaatgagcgcccccaactctgacctagatccccaccaggacccacattcttccctacattctcgccaggcttcagccccccgccctcggtctccccactaccaaacgttcacctccatttggacacatcccattgggtccaccccagcccaccccttcgcatctctcccagggtccacattgcccttccctgaaggggctgaagcggggaggcgatggtgttaggagagacaaaaccaagtgcgggaggagaccaggggagtccggctttggcac

SEQ ID NO: 24875 - DNA, 1070 bp, Artificial sequence
  DNA replication origin
cgctgattcggcagcgcaaagacttccagaaggcccgggcagagtagccccaggcaagggaggcggaagaatagccttttcctcttccgagcaactcggtgccactctgcccccaggaccctcctggcctcaggcttggagggaaaggggaggagaagtggttctgccttgctaggtgctatctacacagtcttcagaatttaaaaaagggtcttccgtgggctctctaccctgggggcccaggatgtggcccctttaaggctctcggacccagaaccttgaactgagactaggggaggtgggggctgggctctctgcgggaaatgattgtcacaacggcggaccaataggcaacattagtatcactcttgaaggaccgttttccaattcagtttttttttttttgagggggagggactgaagagaggacagagggagggagggtgggggaggacgaggggcgcgtggttttcccatctcatccctggaggaggggctggagcatccccggcagccaatcagggacaggctgggggggggaccgctttgaagaagtttgggggaaaaaagtttggaaaagtttctataataacgagggggcttctggagggaggcggcagcgacggaggagggggcttctcagagaaagggagggagggagccacccgggtgaagatacagcagcctcctgaactcccccctcccacccaggccgggacctgggggctcctgccggatccatgggggcggccagctgcgaggatgaggagctggaatttaagctggtgttcggggaggaaaaggaggcccccccgctgggcgcggggggattgggggaaggttagtgctgggctgggaaggggtcttggggtcagtgagaggagggccggggatcctgagtctggggaatttaaggcagcgagcctagggtggggggtgagggagtcagaggtcgaagggagtcggggggactcgttggcctgcggaagtgaggctgggggcccgggcaccactttctcctttttaggtcgtgactggggtgggggtgggggtgctgttggctgtgcgcc

SEQ ID NO: 24876 - DNA, 1054 bp, Artificial sequence
  DNA replication origin
atcttcgggggtccatggccgaggggaggcccggggcgagggcagcggggagcccaggccaaagcgggaggccgcctcatttagctcagactccacctcgtcgcaggctgcatacagggctgcctcgtcagaggcatcggagaagaagctccacgaggacaggctgctgctgccagggcttgggctgaagaaggcccccccaccctggccccctgcttctctgtagcccccaaagccttctggtggggggtaatctctaggagagccgtccccccaggcatcagggttgtcctccagcgctgctggcggctccggcgtgggagagatggaggtgatgcggatgctgggacactcgagaacacggccacccccagcacccccagcaccccctcctggtcctcccagcctcaccgacctggcgggctggctctcccaggtgccaggtgagggggctggtcgcggcggtggcgaatgcatgccaggccgagggggtggaggtcggggaataccgataggtgcagcgccatagggagggggctctcccaaggccagacggcagcatggcggggcatcctctgagtccagttctgtcaaaatgggaagaggagcagagggagagggggaaagagagaagcaggtgagatggctatgttccttgagtggccaggccgcaagtccttctatgctccctgcccctcagcaaagagaccttctgagccacaagacaaaagcagagttggacctgggaagatggaggagattgaagcaggcatgccaggcctttgcccactggcccctggatcctaggaccgagggtacccgatccagtgggtcttaaggtgagagaggtgggtccagaggggctggagctggggctgggcctggaggcgtgtttcttgaggcactgggctggactgggggcgactcacacatgaacccaattagcagcggttcccaaacccccaaacggcgctggcaggagccccagttgccatcgcaaccgtggccagaggggaggggggcgtcagggctgtggtgacgaggggaggtggct

SEQ ID NO: 24877 - DNA, 1804 bp, Artificial sequence
  DNA replication origin
gcgctgcacttgcagccgctgccgctgcacccgaggcttcgattttgtctgcaccatgaaccattcctgcgccggaggatcgcccccagacaggagcatggctgccccgcccgctcctggaacgaaggagacgatagtgtcacccgggtctcggggcggcaggcgccccagcccccagccccaggcgcctaagccacgccccctcctccccgcggcgcgccccccgcacggcctccttcctccaggcggcgggacccaccccgcacggctcgggcgcccgccctctggagcttggtccccttcgaccgctgctaccgcgacgagctcttcctgcccggggttgtagctaggggtgggaccggtcgggctcctgccgcccttccctccgcccccagccttccccctccagcactctgccagcccctcctggatcaactctgtctccgtctgctggatagcttaaaggggcgcggaggagagggcgggggagccggcgggggggaggagggggcggggagggtcccggaggcctctgccttccacccaagttttgggcccagagccagaatccaggggtcaaagttagtttccttccacgttcccctcttgctagtggaaggacggggaagaggaaggaggggaggattggtttccggcacccttttttgagatttggaacaaggatctctcccctttacccccacctcccccctacccccaacagcctctcccaggcgtcccaagagaacggggacctcggccactccttccctgggaggaaagggttaaggtagagtagggtggggagcccagggaggccggggcctaaggaaactctgggctggagaccaagcaggaaggaaagggtaacagcactgactccccaccccccactgaagtctagggacagcttggagctggcgggcagcccagaccctcctgaagccccccagggctggaggggcgggagagctgccagagttttcagacttgagttgtttatgaaagccctttttagcacgtttgagttatgctgtgaggggaaggagatagagggtccgggcagtaatgtaacctccgaggtctcctgcaacccctgaccagtcagccaattggcatcagtggtctgggactaaccctgggctaggggaccaccttcaacacccaggctctgctcacatccccagcacaaagaacaccttatacagccttgggcctgaatagaacctggccctgtggagggcagggcctatgtctcggcctcaatgatcttattttgcagactaaaacgaagagccacagtctgatagacacaagtatacctatgaggtcaaaaggcatcagactttaaattaggcctgccctggaacatctggtctgcagggtcgttatgtgtttgtgtgcaggcaagggaccaggagcaccccactgcaaggaaggggcccaattgggggcagggaggggctcacgctactcctggtctggactggactcagcccaccacaccctacttcatcctgcacacctgattcttctccctagattggaatccagaaaaggaaaaaatgatctgtgttacttctggctccaaagccttctgctccaccctgcctggtcctcctgtcctgcccctctctagtaccttgaagcagaaggcctttgggctgaatctccatctcaggccttctttccacctctgactgctctccttttagcaaaagagtctcctgccttattgtgcttcagtttctcttacaaaacaaggtgagagccacataaccctgctccccactccttccctgaa

SEQ ID NO: 24878 - DNA, 1250 bp, Artificial sequence
  DNA replication origin
tctgcagtaggtgtgcgtggtgaaggggaaggtggtctggggcagagggaggctgtggcattcctacaaagaagaagtaagataaaggaatctaagggaagaggtaaaccttgggggacagtggaatctgacaggcccaaggggaggaaaagcttgtgagagaagccagggagattgcaagagaggcgcactgtgatctggcctgtccaaggtccagccccacatagcaagccctttcatctgaaaacccatagccctcctcccagactcccacccatctccaagggctgggaatctgggaagagggctgcaccccactctgaacccctgcaagaagctgagtggcatcaagagtgtggggcagggagcccagagccctgggttctggtccaacccccaccacctcacctacctgactctgagcactcagccaggccccttaccctctctggccaccagtacctcatctgtaaaatgccagtatcactctagaagcatctctaaaggcccctccagtcctagtactcagaggctccaaggggcagcccaggatttaaggagacttaaaaggagacagaaggacctgggcctttcagtcttggtggagaacaaagaggtgtgttgcagaggccacagaaatacagcgccttgagttgctccccagatggaaaagtgggactgctgatgctggggccctggccagggaagtctcatgggggacacacaccgaggaggtgctctcagtgcacttgagggacagaggtgacacgtagggaaggggtggggcaggaaaggaaggaaccagagggaagaagcgggcatggaaggagcgcaggctgatctggcgaggcaggaggatggcccactacctgcctgccacactgccaaatccaggcgggggcagggtgggtggtgtctctgcggaccaccatctccccaggggaaggggagagagtgatctggctggaagagatgggtgggggtggggagaagctgtttaccttggctttgcccatgttctctcggggcccctcgagctgtagccagaagtagggggtgtccgggcggctctggaaggcgttcagcttgaccctaaagatgcgctgcacttgcagccgctgccgctgcacccgaggcttcgattttgtctgcaccatgaaccattcctgcgccggaggatcgcccccagacaggagcatggctgccccgcccgctcctggaacgaaggagacgatagtgtcacccgggtc

SEQ ID NO: 24879 - DNA, 859 bp, Artificial sequence
  DNA replication origin
aggccacgtgttcagcatcaggctcacctggggaggggagcccagttagcccccattccccagcccttagctcaggaccccccactttcccaggagcttcctcttgggaagctgggttttaatgggctctcccgggagggctgaggggcggccagcattggactctgcacatcctccacactcaatgcaaggcaggcccattcctcccctggtcctggcctccaggacacaggtcaatggagagtccacccggaggtcagctgggctccccttcttccccctccccaccctcctgagccggggatgggggccagtgctgaggtcacctggacagtttggcggttgtacaccttcaccacatggaaccggaagctgtagacaccccggacaggggctacgaaggagccagaggcccggtcaaagccaccgccctcgttcaccaggacctgggggaagcagagcctgctgagtggggctcaggaaatgcccatggctcaggggtaccatggggactaggggcaggggcagtgagtaatgaatagaaggagtggcaagtaggagtgaataggagtgaacagattcaaaagaaatggtgagaaggggcaaggagagggctgcgtatgggtggagggaggggaaaccgtcggtggggtggtggggcaataggccagattagtgaaagatgtaggaagctgttttcttaaagcctcagagacagcaaagtgggcttggacagttgcttccaggtccttgcagggtctttccaggtcccctggacaggggtagggggattacctggtcgaagtagatggccccactggtgccattgccggtttcccctgctggctcatggtggtgg

SEQ ID NO: 24880 - DNA, 1270 bp, Artificial sequence
  DNA replication origin
ctctccgtcgggccaggagcaccgcccagggcccaggggccgggccgggccgggcccgcccaccgcggactggggcagccaccccgggccgggcctactccgcaccgcggcccccgctccccgctcccgggcgcggtggaggggcgcgcctaccgcctccgccgcccgcgccggcttcaggtcctctcagcgcccgccaggcccccgctttgcccgcgcccccagcccaggggacaagggcagggggcccgaatctgggcgggccttcccgggttcctcacccagcggggacctctcttgtccacatcgcacgcaaactgtttcttgagtcacttcctggcctggggcggagtcagcccagctcctcccggctgcgcgccctcctcccaaccccgccgccgcgcccagaggccccgacgggcccgctcggcctagtcccctcggcggctccagggctcgccccttgcgcttctcaccagccctcccgtctgtctcccggccctcagggtcctcgcgcattctgcgcagttacttctcggaaaggggaaccatgcgttgaaagttgtttcccgcgaataaagatgtggccgaccaaagaggcagcgtgactggcccactggtgctctaggcccaagcactttccaccaaagcaatcgtggcggagggggtaggcgggaggcgggaggcggagggtacccgtggtggagtacccctttcttccaacaaacggaaagatgccacgaagaagggctgttgatttgtgggggattttgaagagaggaagagtaggaggaaggggttgaggggctgcctctggcatatgcacacactcacacattctgtcacacccgtcacacacacataccatgttctccatccccccaggtccagccctcagtgctgtcccatccagcagggctgccctgaagctctggctgcagccctcccgtccagtgggcaggcggcttcatccctcctttctctcccaaagcccaactgctgtcactgcatgctctgccaaggaggagggaactgcagtgacagcaggagtaagagtgggaggcaggacagagctgggacacaggtatggagagggggttcagcgagcctagagagggcagacgatcagggtgccggcggtgagaatccagggagaggagcggaaacagaagaggggcagaagaccggggcacttgtgggttgcagagcccctcagccatgttgggagccaagccacactggctaccaggtcccctacacagtcccgggc

SEQ ID NO: 24881 - DNA, 910 bp, Artificial sequence
  DNA replication origin
agcaaggagccaggaggggtgatctgggccagttagtttacttttcctgaccttcccttcctcccaaccaggagtacctgaagggcctctgcagcccagaactgcaggatgaaatccactacccgcccaaactgcactgcatctttctgggagcccagggcttcttccttgactgcctggcctggagcacgtcagcccatctggtgcccagggcgccaggctcactgatgatcagtggcctgactgaagcctttgtcatggctcagagccgggtagaagagctggcagagcggctgagctgggacttcacgccaggaccatcttccggagcctctcagtgtactggagtgctgagagacttctctgccctgctgcagtccccgggggatgcccatagagaggctctgttgcagttgcccctggctgtccaggaggagctgctgagtctggtgcaggaggcgtctagtgggcaggggccaggagcactggcttcttgggaggggcggagctcagccttgctgggtgctcagtgccaaggagtgagagctccccctagtgacggcagggagtccctggacactggatctatgggacccggagattgcaggggagcaaggggagacacttacgctgtggagaaggagggagggaaacagggtggtcccagggagatggattgggggtggaaggagttgcctggggaagaggcgtgggagagagaagtggccctcaggccacagtcagtgggtggaggggcaagggagtcagcacccctgaaagggaaggccctggggaaggaggagatagctctgggaggaggagggttctgtgtccaccgtgagcctcccggtgcccatggctcctgtcacagggcagctcagtcccgaggagcctccctcctccagcggct

SEQ ID NO: 24882 - DNA, 2510 bp, Artificial sequence
  DNA replication origin
atacaagtcaaggctgggaagtacaaacagcaacacgaggaccccatgtttgtagagcctaacacaagttacaatgcctttcatactcagaaactgatttcatcttacatacatcttgaagggtttacagggcaaatgctgttatctccattttatatgaaaaacattcattcttttagcaagcaagtacttagtatctactaaagtttccttcctaatatttattgagtgccaggcataagttacttgctatctaatctaaagcccagagtgaccctgtgaaatagttgctattgttaaccccatttggcaggtgagaaaatgaaaccacagaggagtgatatgggatggcagagttaggatctgagtttgtgctgtctgactccagaaccagtgctctggactgttctgcggtacccacaagcagtctgttaaccacatgaagaaataatgactcaggtcgagtggataaatgctgcgagggaaaagtgcaatgtgccacaagaaaatagaacaagtgtcctaacaatctagagattgaggagaggcttctttaagaaaataacaattaaactgaggcctgaagaaggggtaggaacaagacaggggagtggggtgagtgtgggaagagtgtgctagagaaagagaacagcacaggcaaagtctgagtgatggaaggagaccacactgtgaaggacttgaaagaagcttgtctgtttgctctctagagatcatgggggacagagggagatgaggttaaagaaataggcaaggtaaggcttgatggttcatattaggaattgactcaaagcactggtaatccactggagggaagatttcagcccatggagatgcatgtggctgctgtgaggcgagaggattaaaggaggcaaaagcagaagtggagagagtggccaggagaccatgacaggaagtggacgcagagaaaggaacaagtcggctgatgttgaggaggtaacgtaaagttgacatgacctggtgactgctgtgagctgggaggaaggaaaagcagacaacatccagatgcgtggcaaacccctcagttgacagtgatgccatttcctcagagcaaacaccagagaaaagccaggttggtgatgtggtgaataaatagaacacaagtgaaattttgaacaagttgaatttcagatgtcagggaaatatgcagagaagcacatgaatctggagctcacaagggagttctgtgctaaatatacacatccatgagtcactgagacgagccccagggaagagtaaagttgaggcctagattataacccagcacactaccatatttcaaggtcctgtaaagaagggagacccacaaaagaacaaggaggaaaaaagaaaaaaacagaactatggagttaacgaaaggggtggaaaaaaagagggactatgtaactaatgtgaagacatcaggtaaaatgagggttgaaaagtgatttaggttctcaagggcatgagtggtcttagcaggggccatttcagtgctgtggtgggtagagacattatgttacagtgagtggaggagtgagggagtatagggtcagtgagtggcagaatgagtggacaatgagtgagcgaaaagaaagtgcatggaagagtgagtgagtggaggagtgagtgagtggaagagtgagtggaggagtgagtggagaagtgagtgagtgggggagtgagtgagtgggggagtgagtgagtggaggagtgagtgagtggaagagtgagtggaggagtgagtggagaagtgagtgagtgggggagtgagtgagtgggggagtgagtgagtggaggagtgagtgagtggaagagtgagtggaggagtgagtggagaagtgagtgagtgggggagtgagtgagtgggggagtgagtgagtggaggagtgagtgagtggaagagtgagtggaggagtgagtgagtggagaagtgagtgggggagtgagtgagcagaggagtgagtgagtggaaggtgagtgagtggaggagtgagtggaacgtgagtgagtggaggagtgagtggaaggtgagtgagtggaaggtgagtgagtggaaggtgagtgagtggaaggtgaatgagtgggggagtgagtgagtggaaggtgagtgagtggaggagtgagtgagtggaggagtgagtggaaggtgagtgaatggaaggtgagtgagtggaaggtgagtgagtggaaggtgagtgagtgagtgagtggaaggtgagtgagtggaggaatgagtaagtgcaggagtgagtgagtggaggagtgagtgactggaaggtgagtgagtggaaagtgagtgagtggaggagtgagtgagtggaaggtgagtcagtaggggagtgagtgagtggaaggtgagtgagtggaaggtgagtgagtggaggagtgagtaactggaggagtgagtgagcggaggagtgagtgaattgaagatgagtgagtggaaggtgagtgagtggaaggtgagtgagtggaggagtgagtgagtg

SEQ ID NO: 24883 - DNA, 995 bp, Artificial sequence
  DNA replication origin
ggtgagtgagtggaggagtgagtgagtggaggagtgagtggaaggtgagtgaatggaaggtgagtgagtggaaggtgagtgagtggaaggtgagtgagtgagtgagtggaaggtgagtgagtggaggaatgagtaagtgcaggagtgagtgagtggaggagtgagtgactggaaggtgagtgagtggaaagtgagtgagtggaggagtgagtgagtggaaggtgagtcagtaggggagtgagtgagtggaaggtgagtgagtggaaggtgagtgagtggaggagtgagtaactggaggagtgagtgagcggaggagtgagtgaattgaagatgagtgagtggaaggtgagtgagtggaaggtgagtgagtggaggagtgagtgagtggaaaatgagtgagtgaaagattagtgagtgaaggagtgagtgattggaacatgagtgagtggagaagtgagtgatgaaaggtgagttagtgggggagtgagtgagtggaaggtgagtgagtggaagatgagtgagtggaacgtaagtgagtggaagataagtgagtggaaggtgagtgagtggaacgtgagtgagtggaagatgagtgagtggaaggtgagtgagtggaggagtgagtgagtggaaaatgagtgagtggaagatgagtgagtggaggagtgagtgagtggaagatgagtgagtggaggagtgagtgatggaaggtgagtgagtgggggagtgagtgagtggaaggtgagtgagtggaaggtgagtgagtggaggaatgagtaactggaggagtgagtgagtggaggagtgagtgagtggaagatgagtgagtggaagatgagtgagtggaggagtgagtgagtggaaggtgaatgagcgagtggaggagtaagtggaaggttagtgagtggaagaagtgtgtggagacaaagattgctgacaagaactcatagtatttcgctgtgttgtgcgggatctccatgctgagaaagatgtag

SEQ ID NO: 24884 - DNA, 1244 bp, Artificial sequence
  DNA replication origin
tcatcactttgtgcttctgaaggaagcttccaacttcctgatcttatgcaccacatgggtatgcttccctgttccaagctgagtaggatggggagagttgagaaaggcccgacttaggaagaatcaatccagctacaatatgaccttgcttgaaaagataagctgcgccgcgcgcagtggctcacacctgtaatcccagcacttaggaaggccgaggtgggtagatcacctgaggtcaggagtgtgagaccaacctgactaacatggcaaaaccccatctctactaaaaatacaaaattagccgggcgtgatggtgcaggcctgtaatcccagctactcaggaggctgaggcaggagaattgcttgaacctgggaggcggaggttgcagtgagtcgagatcatgccattgcactccagcctggacatgagtgaatgaaactccatctcaaaaaaaaaaaaaaaaaaaagataagctgggtcaattagatcctgaaagaaaacagagcaattagtagtgggagctgaagctttaaggtcagttatgcagaaagaggctgagagaagaaggttgatcacatacaagcaaatgccacaaagaaaactggtctgtaggttgaggaaagggtgatgcagatatgcagagagaagaggagggagagagaggaagaggcagagaggggacagggagagggaagggaggggagaggatggaggagagagcagaggaggagagagcagagagagaagaaaggagagagagcatgagaaaggaggagaagagaaaaaggagagtaggaggagagagaaagagaagagagacagaagagagaggagagcagacagaagacagaggagaggcagcagaggagagaagaggaaagcagagagggggaagagagaggagaaggagatgagtgagagaaggaggaggaagagaaagaggaggagaagagcagagagagaggaggaggaggaggagagaggagaaaaggaagcatccagaacttctgctcatctagtcatccccacttccagtacatatgcaggcttatgaaaaactcttcttttcctaaagtaattggaatgacctgctattacttgcaaccaaaagaaccaacaaaagcaatgaatattgtcaaaaaattaaaatctgcaagtatgtgtcttactttctttattaatacagtaggcctaacagctgccccaatcagtttatacaggtcattgagagaatgcagattaa

SEQ ID NO: 24885 - DNA, 1305 bp, Artificial sequence
  DNA replication origin
tcacaatgaaagcaagtaattgcaactcagaaatacgttgccacttggctgcctcttctctattattgtacaccttgaaggcgaggttaactaagtcctgttgtagggtttgagggccagaatctaatgtttggagctttttctaatgtcgggagcagatcggataataaaatgcatattgagaataagacggccttctggcctctctgggtctagggcggtaaagcatctaagggttgttgccaaaagggccatgaactgggctgggtttttatatttgataaaaaacagcctaaatgctaattgatttgggagaggtcggataaagaaaaaggagcattaatcttgactatgccttcatctccagccacctctgtaagaggaaattgttgggcaggtggggggagggctagttgcagaaagaaactgtaagccagagtgtgaggaggggaggtgtgtgtgaggaggggaggtgatagaaggattatagggtgggggagtggaggctgagtaagaattgggacccggcgcgtcttggtgaggagcagcctggggaggaggggagaggtcagatgggtccacagaaaaggaggattcaaaggactcagagcttggggtggagattgaaggaacagacaggagagaaagaaagatttgggatgagtcacattgggagcggagattagggagggaccgatttgaagttcttgaaaacacaggctaagggagaagaagggggactggaggatggaaggttgtccataatgaaggaggtaagtttaaagagaaaagtagagacacggagaagggggtggtgagcagccctgggctgtaatgtgggtgagcagccaaagcaggcattcccgcaattgacttgccaccgaggaaatgtagatgaatgatcaaggcaggtgtccttgtggtgatcagacaccaatggaatgtgggtgaatgatcaaggcaggcatccccgtgatgatcaaacaccaagggaagactgtcttcctgagtccatgaccagcgtgggagtttggggtccacagataaaatgtgtctcctttgtctctactagagaggaaaaagaactggaattggaaggacagggagactgaagggtagcgagagaggctggagaagagagtgaaaagaccacttacctgatttgaaattggtgagatgttccttgggctggttggtctgaggaccagaggttgtaggtggatctcttcacagagtgagggcaaggacaggggaccggtgtcccagaagagtcccctatcctgggtcttcgtcaccaaatgtcac

SEQ ID NO: 24886 - DNA, 896 bp, Artificial sequence
  DNA replication origin
cattttgatgaatgataaacacagaaatggaaatgtgtcggggacacctaggcgcggggcaggtgcaggggagggggcgcggggcaggggcgcaggggccgccgggttcgggctggaggtgtccgggccgcgggagggagggagggaaggagggagggaggacggcgagggagggaggcaggggcgggcggcgggggatggggccagcggggaggtggaagcgatacccaccgcccgtattggtcctcttggtgctgccggcttcagggggggcttccagcggccttttccgcgagtccggcgggtccaggtctatgggaaccccagtgtgggtcccgttctgctggatgggagctgccgccatcatgtttgcagttcctgccgctgctaccgggagaaggttctcccttttgttttggctttttcttttcttttttcttttttttttttttttttttttgcgtttggggtttcttaaggttttttttttttaatcggatcaatataaatctctttaggaaaaaaagcaatgttgctggtttgttctcactggggagggggcagggctgaggagcagctgcagtgcagtgtcagaaaggagacaggggaatggagggggtgtgagagacggagggtgaaagaagaagaagaaaggagacagggggagagagtggagaagggagaggggcgagtgaatgagcgggaggaggggaccggggaggacaggcagagggagtgggagagcgcgagggctggcggggcgcggggagaagccgaggaggaggggagagtgagggaaagagtgaatgagcaggaggaggggaaggaggtggatgccgagagaggagcgagcggcagaggagggcaggagccgggaaggagcgcggcggtccccg

SEQ ID NO: 24887 - DNA, 1574 bp, Artificial sequence
  DNA replication origin
agtgaatgagcaggaggaggggaaggaggtggatgccgagagaggagcgagcggcagaggagggcaggagccgggaaggagcgcggcggtccccgcgccgcgctagcgttgcgctcgctcccgctgctggtgctgccgccgccgccgctgccggagcggttctgccgttgcctgggctgctcggcgctgctgctgctgccgcccggtctcgctcattatttctcccgcttgttggggggggctggcggggagggaggggggtggctgtgaggggagggtagagaggggttgagttcgtagactcccacacacttcgcgctcgggtccctgcctctcagcagcgccgccgcctcccagcgccgatgcttcagccggcggggcggctgaggggtgagggggaactccgcgggcgggggcgagggagcgtgtgtgcgcgagcgtgtgcgcgcgcgaggggagcgcgtgcgcggtgaggacgcgcgccggcggttggggcgggggcgggggccggggcgctcctgtgggaagggaggggtgaaaggtcgctggtccccggcaacacggctcaggcaaacgtaagcggcttgtcgcagaaaccaaggggtccacgaaacgcgctaggctagaaggcgggaaggagagattactgacagccgtgccagccaataaaatagaaatgtgagaaaggttcttcgggccccttcccaatcaggaaacttgggtgatgaggggcagcgaaggggtggggtgggatcttggtccagctggtactggagcggcgacaattttggctagtctaagaagggcattcgagtgaccgttgacaacgggtgggacagcgtcagagctggagggagagccagcactgtatgcttccaggacttcttgctaggtgcattagtttttatttttaagagttgggtaaaagacattaattagttagcatctcactcatcggcgattttctacggtatgatttcatccaaagaggatttcttaatcgcactgtgtgacaccgttaggggacttagagtgtcactcgccgccttaaatcctttcgggaacaagccaggatataaataaataaagctaggtgtgggtcttcccttcacaaggcgctggtaggcagactaaagacaggcaacagctgagtgtgcacacagaactaaatattgaacgaaatacgagtgtcggaataaaattcattgccatgtgcacggcttatgattatacagatcttggacatatcacggacctgaacgtcaaccctgcaacaccggataaaacatctaatgtagctggaatagactctgaaaggacgttaggcattatctaaatcaagtccctcattttacagatgagtaaactgactcagtgaagtattttgctcaaggtcgttcatcaaattagtagtttaattaactcagtgttctaggaagcagggtagtagaaaagcatgggattcggagtctgaaatcttccttggtttctggtccttgtaggctgttttacaagtgtatcttgggcaaatcccttaacgtcttgccatttattaagggcttacttaccacgtg

SEQ ID NO: 24888 - DNA, 907 bp, Artificial sequence
  DNA replication origin
caatatttgtccttagtgattaaagtttgtatccaattttatttttgaaagcgggggtggtggtggtagtgggaagagtgggagtgcagggagaggatgcgagagggcaggaaatggaggaggtagaggcgaggcactacttttccgagtcggccttgcaggccagtgtctggcatttctgagccagcaggaaaattgtgccctttgtaggtaatagtctagcgcagctttggataaggggggagataaggcccaccgctggcgtgtgtgcgggggtgtcctttacttcgggggaggagggtgtgggagagctttgggagcgatgagatgaggaggaggaagtgggcagaggagcgcggggccaaacaggggttacttactcgattcctgaggcctgggcggcggcgagctccgggctccggcaccgcggggaaaccgggactggggctccgggtgctgctgcggcggccggggccgctcagtagtgggcgcctctgatggccttccgaaatgagaggtgcccagagagaaaacagtaccaaacaatctcgaaataaatcaggtaacacatgctatatacgtgtgtctcttccttttccttctctcctgctccagagcgtcgctcacgcgcggggtgactcgatgtcgttttctcctcgccgctccagcctcagcttctaatccgaattggaagcgggtagctgcgagcgatcaccctggaaatattttcgttttgcttgttgacattggagggaaaataagggtgggcgtctatttctttccggttttttttttaagccttcctattttcactccttttttttcctttccgtttctcaaatgcttttattttgtgcgggcctcattcctgaaataacagtatactgaagccagctcttgccaaccc

SEQ ID NO: 24889 - DNA, 948 bp, Artificial sequence
  DNA replication origin
ccccgctgcttcctcctcctcctcctcctctcgcagcagcagtcacagcagcagcagcagcagcccaaagggggggagagccgggcggcgggcgggcgcgtcccggagcggccgcggcgaggctggggagacagcgatcgaggcggctatagccacaattaattttccgagctacaggcgcacactagggctgtaaaaaaatttttggtttaacctttcctaccgctgggccaatcagagctggcggcgtgcgggagcgtctctctcgccgtcgaccaatcggaggggccgggcccacccacccccgccccgcccgccggctgccgccccctcgggcgctcgcctccccctctccgcgggcctcggaccccgaggccgcgcggagccgcgtagggatacgccggcgggagcacgcggtgccgcagcccttccctgcgcccccgccaccccctccaccccgccggctccgctccaccgaaattcccctcctagggccaatagctcacatttccggcttcctcctcattgtactgggtcattttcgtttaagcgtcaatatttgtccttagtgattaaagtttgtatccaattttatttttgaaagcgggggtggtggtggtagtgggaagagtgggagtgcagggagaggatgcgagagggcaggaaatggaggaggtagaggcgaggcactacttttccgagtcggccttgcaggccagtgtctggcatttctgagccagcaggaaaattgtgccctttgtaggtaatagtctagcgcagctttggataaggggggagataaggcccaccgctggcgtgtgtgcgggggtgtcctttacttcgggggaggagggtgtgggagagctttgggagcgatgagatgaggaggaggaagtgggcagaggagcgcggggccaaacaggggttacttactcgattcctgaggcc

SEQ ID NO: 24890 - DNA, 1504 bp, Artificial sequence
  DNA replication origin
taaacaaaagaaaaaaaaacagttctttaaagaaaaggacaaaacaataaatggccaaaataatttcttgggcacctttactacgaatgctttttaaatacaaattacagtttaacattttaaaattctccccataatttaggttgttctcaaggtctgcgtccaccatatagttccatgataacttataatactgcacacatggaaatctggcggctcttagagatagacttgtcaggtttgaatgaaatggcaaagcagtcactatttagatacacattctactataatttgacttccaaaccttatattctacaatgtattctccccacattgcacctcgctgacactccacaccttgttagaataataaacaaccctagagactgaacaaacgtacagaaatgggaggggggggcttaataaaaaatacctggacttatttttttaattatcatttacaatgcaaatgtgtgtaaaacgttcacttacagtctggtcccagggatgttaatgtattaaagggttggaagaagacccctgattttgatgtgtgaaataatcagacagtcccccagacagtcccgtcgtaaaacttggcaaagagggtcttaaagactcacagggcagggtcgagggggcctgcggcgacgtggaggaggacgcggccctggcgctcatggacgtgctgctctgcgaagtcattgacgggtgcgggacgtgggggaaaaagtaactggtctggcccgcgagcaggttgacggagcaggggttgagggagtaggtcccagagcagggcaccgacaggccgcagggcaccgaggcggctagcgcggcggccgtgaggtggtgcgtggcgtacgggatctccccgttgaccagccggtccacgctcaggccgttggcggtggagaaggagtggttgttgcccagcgagttctgagtcaacacggagctgtagggcatggggtggctggggtaggccgacgtggtgccgttgtaactcaaagtgctgctggcgcgggggtggtgcagggacaggaagggcgacatgggccagtagagggagccggcgcggtccatgaaggtgaggccggtggaggtgaggcgcgcaccgcgcttgaaggccagcttggcccgcgaggtggtggagcggcgccgcagcttgcccgtggtgccgccgatgaacacgtcgtcgctcgacgggtccagcatccagtagttgcccttgcccgggtcgtcgtagtggcgcggcaccttcacgaagcacttgttgagggacagattgtggcggatggagttctgccagccctgcttgttctcgcggtagtaagggaagttcttcatgatgaactcgtagatgccgttgagcgtgagccgcttctcggggctctgccggatggccatcatgatgagcgcgttgtagctgaacggcggcttctcgtacttgccgttcttcttctcgccctccttgcccccctccccgtccttgccgccctcgccc
